United States Patent Application Publication US 2009/0119022 A1 - sequence listing, part 13

SEQ ID NO: 23092 - DNA, 812 bp, Emericella nidulans
gttctctaaccaagatctgcacattgctattcgtcatcctcactggcttcgtcgtcctcggcgggaacaccaaattcaaaagcccaaaggcaaacttccaggatgcgtgatccggaagctcgacggatacggcgtatgggttcacgattgcttcgtactgaataatcttttcgtatggcgggtattacaatgcctttaatgttgctaatgaggtcaagttatgcaaccggcgtgtctgcttaacgcagcagaagtcactaaacggtatatggaaccctgtcaagtccctcaatatataccacggttgcattgacaacggtgtatctcctctatatgttagcaaatgtcgcgttttgcggccggttagtttctcctgcttttctcttggatgccaacaccagctaagatcatccagttcccaaagattaattcaagacctccagcctgaccgtcgcaagcctcttcttcagcaaagtctttggagatggtagctccatgcgcggcctaaacttcctcattgccctctcctcattcggcaacatcattgccgtacaagtcggtctctcgcgtcagatccgcgaatgcggcgacagggcgtgttgccattcaccaggttctgggtctcaacgcgcccattcggcacacctcttggtccctacgcggtggtctggttcatgattgcgctgatgacctcgctgttccggcgggcaatgcgttcaccttcgtcaatgatctcagtatgcttcctaaggcggcttttaattttgccatagcagtagggatctatgtgtgcgttggagacgaaaaaatgc

SEQ ID NO: 23093 - DNA, 850 bp, Emericella nidulans
acacagtggggtgccgagtttggtggtccactgattattgtgagttattcatggtccagtcattctactgccagcaaactgacgtacgaggcagaacaactacgctgtcatactctaccaaggtctcggcgaaactggcagtatgcccctgcttctcagcgccgtttggctgactacagctggtaagcgttgtgcgcgcacttgatactacgaaaagcgtgctgatatgctcaggtgtgatctataacccccttggcgcatggctgcacgacaaggtcaactctcgccgcggcatgtacataaccggctttgtcggcatcatcataaccacatcaatcctggctgccatgacagccgaatacgccggaactacgaaccgaggaggaaacgccgtgggtatcctcatgatgtacctttaccttgctttccaggggtacgttgcaacacctgtttccaatgccatgccggccagaagtttcctaatccaatcacagcacatgttgcgacacaaccatgtatctctatgtgtctgagatcttcccaacagagattcgtcccattgggatgggattctcactgttcggccagtttgccggtaagcccgctactagtttgctacattgcaagggctatgaagctaacgatactcagccaccctgatcctcctgcaaactgccccaattggctttgcaaactccggatggaaatactacctggttattatcttgtggtcgttcttcttcattttcggtaagccaccttttctacgtgccgccgtgatctccgctcactgccgtagtcatctatttcttcttccctgaaactgctcgtcttactctggaagagatcg

SEQ ID NO: 23094 - DNA, 661 bp, Emericella nidulans
ctagtattgacaagacctctaattcagtgcctgaacacgtgcagtctcctccccagcacacgctcagaatcccaccggaaccctctacactgacaaggccacaaatatcaccttctccacctggtctatcccggcctcgcagtcatccgagtcgcaggccagccccttaacattcggcctcaccctcccctcaaaggctctcgaaacggacgcgactgacttaatcggatatctccactgctcatcccctaccggctggtgcggaatctccctcggcggctcaatgacagacgccctgctactcgtcgccttcgtcgacagcaacaccgtcaaacacactctccgctacacaaccgagtacgccctcccagctgcgtatactgggaatgcaactgtatcgccgatccactctgacgtgagcgaggattcattcacgacgatcgtccactgcaaggactgtctacactgggaacagaaggggagttctgggcgcgcgagcacgagttccgggcagatggaccttgcgtatgctctttcctctgagaagctcgtaggtgcggccgggtgcgcggatgaggcgaggtttgtgcggcatagccagcagggaacttggattgcgtttttggatgagggggctgttgcggagagttatagagactgg

SEQ ID NO: 23095 - DNA, 500 bp, Emericella nidulans
gtgtgaagatgaaatcgtacaaaaacacagagtacgttaccagctccgggctagaagagagctactaaccaataaagagctgggacatcaaagaaacgccgcaagatataacctcgtggcttttgaaagcgtacgtacacaaggaggtgtcggctgctcccacagcgaacgcgctgcatgaggactctcgagcagttatagtggccggcagtgaaaccacagccacaacattagcctcaatcctctactttctctgtaaaaatccagagatcctagcgaagcttcagcttctcctagacgaggccatgcccggcgggtcctcggagtggacttatgacataatcaaaactatcagttacctcgacgacatcattaacgaaacgcttcggctgcggcctgctattctgacgggtgggtaccgcgttacaccggcacaaggattgcaggtagccgaggtttgcgttcctacccaagtgttcgtaattgaacctacacagtta

SEQ ID NO: 23096 - DNA, 850 bp, Emericella nidulans
accgagtttcaaacccaactggttcaggctgtatgtaaaggcattgacgcgccgtttgtgcaagaggatgctgaacatcttgactgcaatccactctgcacggatggtaatgtcctcgggacgttatcaacgaggtttatcctagtttctaggtctccaagcgagcataggctgactctacaactatgccacgcccagttcgacggggtctcgttgtccgccatcctttacgatattgctcgcgcctatgggaactcggcgtcaccattgagtaacgcagtaccattttctcaccacctgcatatgtgtcgttcaactcgcccagatgcactggccttttggaaagcatacctgcgagatgccgtcttgactgaggtgccccgtccggaggaggtgaacgcgacaaacgagaaacctctggagatcatacagcaagaagcaataggcgaggttagtctgccgtccacagtcgacatcacattctctacccttgtcaatgctgccattgcgttggcgcttgcccgtctggtccagcgcaacgatgttatctttgcctgcgtcatgacctctcgtggtgttctcgccgagttggccgagtctgtcgtcggaccatgcgtcaatcgctgtctgcttcgtgtcaaagtgcccgacgactcgaaccctgactcaacagccctagacttctgccgtaacttacgcgacaaccaagcccaggtttctggacacggtcacttggggttccgtgacgtcgttgagaactgcacatcctgggcgtctttgggtgttgatgttggccgtattgcttttgtaactcatctcccggcagagacagcactagaaacattttctc

SEQ ID NO: 23097 - DNA, 850 bp, Emericella nidulans
ggtgattctaggagttgacctgatggattattcgccctcacgcgtggagttcggggccgtgtccacgtctatcgaagatgccatcacatacgcgacgcaaggggggatcattactatctgctggcattggggtgagctcagccatgactggatgactgacgagaggctaacgacacttctcactctaggctctccttctggcacgtataacaccaccgagcaaccgtggtggtctaatttttacaccgaggctacctcattcaacctctccgccgccatgaacccggcttcacgtgattacaagctgattctccgcgacattgacgccattgccgagcagctggcccggctcaaggacatccccgttctcttccggcctctccatgaagcggagggtggctggttttggtggggggcgaccggcgccgagccctgcaaggcgctctaccggctgctgttcgaccggttgaccaagaagcatgggctgaataatctgctctgggtgtggaactcgaaggacccgctttggtatcccggaaatgaatatgtggatgtcgttagtgtggatgtgtacgctgacaacggcgaccactcctcccagctggaggcgtaccaagccctccaaggcctgacaggcaattttagcaagcttattgccctgggcgaggtgggtaatattccggatccggagctgatgcgggaggacggtgcgcagtgggcatactgggtgacctggaatggggacttcattcggggagagacgaagaacccgatggaatttaagaaggctgtttacgcttctgagttggtctatacgctggacgagatccagggatggaatttgtaagcg

SEQ ID NO: 23098 - DNA, 850 bp, Emericella nidulans
gatggccgacagagcaaagacaaacctggtcagcaatatctctcacgaactgagaagccccctgcatggaattttgggcaccgcagacctccttagcgatactgccttgaatgctctccagtatggaatggtacacactttggaggcctgcggccggaccttgcttgatactatcaatcatctgctggactttacctatattgataaattcaggaaagaccgaaactcgaagcataaacatgccaagaaagctgagacgtcaagtcaaaatcacgacactcttgaacgtaaccccccaaatagcagcgagaatatcaatacgcatgttcagctagatgcggtcctagaggaagtggtcgagagtatatttgccggtcatactttctatcatcatgcaagaaggaacggtggtagtccgaaaacggctgttgtttcggcgaagcaagtaactatcatattcgatatccaagaatccaacggatggggtttctacacacaggctgggtgctggcgacgtatcatgctgaatgttttcagtaacgcactgaagtacacgcaacagggtttcgtttacattgggctgaaggtaggggaagcagaaacaccccggggagaaagcaatgactcctcgcagtctgattccaacgccaaatataccgttacattaactgtcaaagatactggtcagggcattgggactgcttttctccgaaacggcctcttcgttccattctcgcaggaagatgctcttgcccctggaagtgggctaggactaagtattgtgagaaaggcagtcgcctccctccatggaacaatcgagcttagttcggagaaagacaaaggcaccgag

SEQ ID NO: 23099 - DNA, 680 bp, Emericella nidulans
gcaatattcctcggcaaagctgagggcaagcctgggaaggtctattatccgctcgcactaaagaccttaccccaacccacccctaaaggcaccgagctgctggtgaagttgtccgcagcagctctcaaccatcgcgatgtgtttctgcgccagcacctctaccccggactgacgtttgacgtacctatgggcgcagacggggtcggaaccgtcgtgggcgcaggccctgacgtaacaaatccagaacgatggcaagggaagcgagtcattttgaatcctggaataggctggaaggactctcttgaaggcccggaggatcccacaggctataaaatcatgggaggaaccaagttctacgacaagggtacattgcaagactatattacgatcgacgagtcagaggtcgaagaagccccggagcatttgtcagacgcagaagcagccgccctacccctggcaggactgacaggatggagggccctagtggtaaaggcaggcgagagcaataccggcaaaggcgctgccgttctgatcacaggtatcggcggaggtgtggcgctaattagcttgctttttgctgttgcgcgaggtgccgacgtgtatgttaccagctctagcgaggagaaaatccgcaaatctatcgagctcggtgccaaggggggtgtgaactataaggaaga

SEQ ID NO: 23100 - DNA, 728 bp, Emericella nidulans
ttgtcatcgacggttggggtgtcgccggcccaaactcccccaaggagggtgatgccattgcagccgctgagaccccgttcatgtcgggtttcgccgaagagaactcgaagacagcccaaggttacacggagcttgatgcttcttcgctcgccgttggtttgcccgaaggtttgatgggtaacagtgaggtgggccacttgaacattggtgccggccgtgttgtctggcaggacagtgtgcgcatcgaccagacacttaagaagggggagctgaacaaggtggagaatatcgctgcgtcgttcaagcgtgctaaggatggcaacggccgtcttcaccttttgggtctcgtgtctgatggcggtgtccactccaacattacacaccttatcggcctcttgaaggttgccaaggagatggagattcctcaggtcttcatccacttcttcggtgatggacgtgataccgacccaaagagcgctgccaagtatatgcagcaacttctcgacgccaccaaggagattggcgtcggtgagattgcaactgttgtcggccgctactacgctatggaccgtgacaagcgctgggatcgcgttgagattgccatcaagggcattctttccggagaaggcgaggagagttccgaccccgtataaggctaatgagaagcgctacaccgaggacgagaccgacgagttccttaagcccatcaactttgggacgaggtccct

SEQ ID NO: 23101 - DNA, 850 bp, Emericella nidulans
acagcattatcgcggctcagaaacatgcggctacactaccgtacgcgattgtgcgtaagattcgcgacgcggcaaagtcggaggagtttggcaagttcattattggtatggacggcgccctaaaagattcagtgaagggggctttcaaagcgctgaagaggctatcaagcatggtaattaccattctgcacaaaatgaaaagtttgtactgacggtattcaggagaagaaggaaaccgcagctggcgtggaggcattcaagctcctttactctatgacaatactgcaggtttacaatggcgacgcagatgctgcgtcaatgctggatgaactagacttttgctataacaaatttttcgcagacaagaagtccaataaggaagaagagacctctgaagcctcggatgccctcgttgaaattcttttgagttttgcctcgaagcagtctcagcttttccgtcgtatgagtgagcaggtctttaccgcgttcgctccgaatgtcactgcaactgggctggagtctttgacctcggtatgcatcccgttatttctgccctttccagtttcgagactaaccgactcgctaaggttctggaagccaaagaaagtctggcaggccaacaagagatgttcgaccagcaagacgacgaagacgctgaggaagacgaagacgaagacatgatggacgtcgacgaaatggacagcgacgttgaagttgtagagcctgaagacaacgacaaggacgacgacgcctccctcccttcagaccaagaagcccaagaagacgacgacgacgacggcgaagacgcggccgagattgccgccttcgaggccaaactcgcctcaggcct

SEQ ID NO: 23102 - DNA, 528 bp, Emericella nidulans
aatctcacgcctgctctgatatacatccatggcggcggctacaatgtcggaacaggcgacgaattcgaaaatggatgccgaattctggctgaaaaggccggggtgcaggtgtatcttgttagtaccggctggcggcctgaatggcagtattcgacgcaatgagatgagtacaaggctgttctgaactggttaagaggtaacgggggaagagaccgaggtgttgaccccgaccatgtctttggcggcggggatagcgctggtgggaacatgacggcggcgctttcgctcaggctgcgtggtgaggggaagagagcaatggccggtgtgtttctgctgtatcctgagccaatgctgtcatttggcaccagtgcggcgacatagaataaccgtggtccgtatctcaattgtgagtcctcctgtcaggtagatggtacgtctggtgtttacggtcatgccaggaatgtgatctttgaattcgccagcaactatattcgcgccggcgtaccgccgtcggcgaatttatatact

SEQ ID NO: 23103 - DNA, 423 bp, Emericella nidulans
ctacatatcaggtgatgtatcatttctcagcgacaaccccggccgccaggagatcggcagtttcaatcccatcacggacacggactggaccggtgagtttttttcacaatctgtatgtttcgaggctgacaatcgacagaaatggcctacgtgggaaacactgccggattatgtcaggcaatcgtcgacaatgacctcgaagaggtgcagcgctggctcgctcagggtgagattgatgtaaaccgacgtgaccatactggacggacaccattgcatttggcctgcatgacgtctacgcctgaaattgttcagcatctcgtggacagaggggcccgcctgatcgctcgtctcgcagacggacgtacagcattgcatctggcagccgcgcgagggagcgtcgagattgttcgcattcttctgact

SEQ ID NO: 23104 - DNA, 644 bp, Emericella nidulans
acctacctcccgttgaccatcacttcataaaccagaatcacgctggctcgtccacggaacggatgaagcgaattcgcaaagagtttgcgatcctcgaatcttcgttaccgtccggcatctttgtccgatcatgggaatctagaatagatcttttacgaatattgtttatcggtgccgaaagcactccatatgagcatgcgccatatgtggttgacatgcactttccttcagacttccctcattcacccccatcagcattctttcattcttgggggtctggtgaaggctctatcaacccgaacttgtccgaagatggcaatatctgtctcagccttcttgggacatggccaactcgggaccttgacgagagatggtcgccagcaaggtccactgtattgcagttgctggtctctataatggggttgatccttgtgcaggatccattttacagtgagttcccgccattccttcatctatcgactcatactcagactctttcagacgaggcgggctatgaaagtctcgctgccaaaggcagcaggacgattgaatcgtcccagtacaaagagaaggtgttcctcctgacccgccgcttcattatacatgctcttgaacatcccatccgtggccttgaggatgtcctc

SEQ ID NO: 23105 - DNA, 500 bp, Emericella nidulans
gcaaattaaagacaggatagctcgtcctaatgacagtatgaccactggcttgaaagggaagaccctgatgattttcaggtggacagaagactatcagacagaatcgcaacatgcacggcacctgcggaggagggacaagaggacattgccgacaaatatacttgttctcgctgatacgttttgttgctagtctgaataaaagcgaatggaaatatatggtctttggactttctctctcggccatttgtggtggaggtaatccaacccaagctgtcttcttcgccaagtgtattacagcctctcgcttcctctctcagagaactcccagatacggcaacaagccaatttctggtcgccgatttatttgattcttgcctttgtacaactgttcgctctcatctctcaaggtattgcgttctcctactgtgcagagcgacttacccatcgggttcgcgatcctagtaattcaaagtgtcacctaaatcgtatgtgatatcata

SEQ ID NO: 23106 - DNA, 850 bp, Emericella nidulans
gttgagagcggcgggctggccgagaacgacatctgggcgaagttatccttgtcagggatcatcctcttcatgtcctcaaaatctcgcgcagtcctcggccaaccgtccgacgacctcatagggaagcgtttacaagactttcttgtgaccgacaacttccactcggaaccggctgtccagcaagcgcttgaaacatcccgtcataatcaacaagctactttcacccacagaatccgccaccggaagggccatatcatttctgcccagatcactctatatccgggagacatagtatatggcgcttccaagcccgccttcttgatcgcacacctccgctttccaagggaactccaactacaagcatcaaccactgaagaccaaagcaatagccagagtcagagtcagacctcaagtgacaccggccctggagactacaagacaccccagaatcagcaacagacagccgaatcccatcaaaaaccgcacccgaacttcccgcaaccccccacttcctccgcaaccctagccgtgccgtcatcagcctcacccaactccgccgagccgcccactgaactcggcatgcacctcttcgaagaactcaacccaactcgcggctcaaactggcactttgagctgcgcgagctcgaaaagcagaataggcatttgaccgatgaagcgcagcgtcttcttgcccggagacgaaagcggaagaggaaacaaagcgctgctgctatggagaagagctgtgctatgtgtgggacacggacgacacctgagtggcggaggggtccgagtgggaatcgggacctatgtaatagctgtgggttgaggtgggcgaagcaggtgagaa

SEQ ID NO: 23107 - DNA, 850 bp, Emericella nidulans
gacactggtaagttgcacagcgttctatcgtcgataccaccattttcactttaatggcatggtctgatagagtttaactaataatggcgccttaggggttgtgtcacccccaaggtcatcgccaatatcaacgaacttgttggcgaaggtgacgacagagacctcgagacgcttgatgggtatgaggatctcccggctgagcttcaggagaaggttgcaagggctttggatcagggtcatgtcgacgatgaggattggaggggtgtaagtttttcttggcctgtatccgtgatgtgtgcaagaagagcgcatggctgacatcgtgcaggatcctgagatgaatgtgcgcggcagcagcggcttccgggtgagagcctcagctaaggccaagaaagcaaaagatgcagatgaagtacgtaggccctcatcgccatgagggaattcgcaaagtagctgacacacttacaggaagagaaagatgacgccgctgaagagcagaagactccggcaaagaaaacaaaaaaagcaaagaaggctgaacatgcagacgatgtacatatacttttcctggacatgagcgaaccagatgacactgaccagttcgtttacaggaagagaatgacgacgcaaccaaagagaagaagtcccccagctccaagtctaagaagcgcagccgcgtgcaagttgacgataacaaccacgatgcaggggccgcttcgcccaagaggtccaagaggaccccaacgaggattccgaagcaagttcctgccatttcgtctcaatccgatgacagcgcaaatgagtcccctgagccgaagcgcaggcctgcgaagcgtggtcatcaagccaa

SEQ ID NO: 23108 - DNA, 500 bp, Emericella nidulans
ttgacaacccaactgaccattctagatccgagaacctcgcgcaagtcgcccgccagcatgaaccgcactcaaccattctggccgatatcttgaatctaccacacccagattcgttttttgattttgccatttcaattgctgttgtgcatcacctgtccaccccggaacgaagggtccaagcaattcgtgaaattctgcgcactctgaaaccggcatcaggcgataccccaggaggtagggctttggtctacgtctgggctctcgagcaaaagaatagccgcagagggtgggataagggagacgaccaagatatcatggtcccctgggttctgaagactcccaactccgataatacatctgacacccaaccgaaagtattccatcgatattatcatctttatcaggccgaggaattggagcgggacgttgaaagtgcgggcggccgtgtgctggagtccggatacgacagagacaactggtgggcgatcgcgactcgagta

SEQ ID NO: 23109 - DNA, 745 bp, Emericella nidulans
ggacgatgacgatgtggaggccgtagtctttgtggacatcagcacattagccaagatcggctgcttttccggggactgggttcgcattgaggcgtccgaagagccgcaagcaaacattttctcctctattaatctcggaagctttaatgaacaatacggagagggcgattggcgcgcagtcaagatttacggtctgcctgggcttccctctgccaagcctcgctattcgatcaagcaatctggtgataggcgtttaagcttttcccaacggcctggtgtgcgcatgacaccgtcagtctttgtaccaccattactgctcaataatatggataatccaagatacctccgtatatctccaatgagtctcggtggcatcggggttcccaagtccggtgttttgcatcagatgaaaacggcagctcgcagcccccctgtggcgaaggaggtgaccttgctaaaggtcagcacgccggtttcaatggatcgtgcgttgcaaccagccctcttttcggccctaaaacagtatttcgagtcgaagcggcgactcctaaaaagtggcgatctacttggaatcagcatcgatgaaaccctcggtagggctgtttttgcggggactggtgccgatggtcaggacgatgacattacaaccaaactagggcctgggcttgacactaaccgagctgggccgaagaaaatcggcgttgcttggttccgtgtcggtcaagtcattcctagcttgcccgag

SEQ ID NO: 23110 - DNA, 850 bp, Emericella nidulans
cgtctagaaagtgttaacttcatacatgatgtgaatgttctcagaaaaacaatgaaacgcgtctataaagcgtctccagatcttcaagctctcaattctgccttcccggaccgacagaaaaactgccgcgttcaagtcctccctgtgtaagtcttgacttcattgtctatttgaagtttctttgtgctaatccttttaggtgctggagacacttactagaatttcctcataaaaaggccggccaaaatcgtacagagctcgacctggcagatatggacatgctcgatgatgatgtctaccctactctgtccgacatcactcttgaaagtgttcccgccgtccggaatctcatttctgacctcgccattgatgttctgctctaccaaagtaagcaccgtgaccaaatttccgccattgtcaggaatgaatgcaatcgaatcgtcgagctttacaggaagcgaaacccttctttcaacggcacagtgagcctttgtgggcactccctcggaagtgcgattctattcgatattctctgttcgggggacacagggccaaagatggagaatattcatgatgaagctggtacagcttcattaacatttgagtgcgaggaattcttctgtctagggtctccagtagctctatttgagatgctcaaaggtaagaccattgctgggcggtcttctcaacggggtgggagtactagggaccttgccgccgccagcgtggggtccaggtctaaaagtccccctgcaactttaggcacagggactgcggttactgagaatcagtcctccgtgtctgttccaaagtgccagccactgtatacatattccatccgccgagcgta

SEQ ID NO: 23111 - DNA, 670 bp, Emericella nidulans
cgtcgagtccgtcctcacaactgcttttctggtgtacttgatgggttggaaggcaacctcagcaggttgcgccatcccaatcttgctgacgcctctgtacttcagcgtgacgaagcaatatagcgagaaagagcaggcgctcatggaccgccgtgatgagaaatccgcctcgctaacagagatgattcaggggatccgacagatcaaattcagcgccctggaagccgaatggtacgagaaaatcctgaagctgcgaaccaaggagttggacgaacaaagagcagtcttctggctgaacatttccctcaatggaatgtacacccttgttccgattttcatgagctgtttctcaattaccgcttatgtgtacttgaatgggagtatttcgccatctatcgcgtttacagcattgtcactttttgagactctccagaacacaatctgtatgcttcctgaagtcatcactcagtttctagatgcaagggtcagtcttggaagagttgcaaagttcttggggttggaagagcacgcggatggcaggagtcctggaaatggggacgggatatcgcttcaaaacacgacaattgcctgccgtctagcggcgtggaagctgaggacgaggttcgatttcagctaaaggaccttaacctctatttccctgcgcatggac

SEQ ID NO: 23112 - DNA, 850 bp, Emericella nidulans
tagtgtgacagcggactggtcgctgcctcacttcgaaaagatgttatatgatcaagcccaactcttggatgtctacgccgatgcattcaagataacccacaatcccgagtttcttggtgcagtatacgatctgataacgtatcttacatccgccccaatccagtcgacgactggcggtttccactcgtccgaggatgccgacagtctaccaaccccaaatgatacagagaagcgggagggcgctttctacgtctggactctgaaggagctgactcaggttctggggccacgagatgccggagtttgcgctcgccactggggcgttctttctgatgggaacatcgcacctgaaaatgatccgcatgacgagtttatggaccagaatgtcctttccattaaggtcacaccgagcaagttggctaaggagttcggtttaggagaggatgaggtagtgcgaattatcaaatcaggtaggcaaaggttacgcgagtatagggataaaaatcgcgtacggccagaccttgacgacaaaatcattgtagcgtggaacggattggcgattggcgctttggccaagtgcagtgttttgtttgaagaaatcgatagttcaaaatcagcccaatgcagggaggcggcggccaaggcaatcaacttcatcaaggagactctatatgacaaagccacaggtcagctctggcggatttaccgagacggaagcaaaggaacaactccaggattcgcagaagactatgcttttctgactagcggtctgctggatatgtacgaggcgacatttgacgacagctacttgcagtttgcagaacagctacaacgtacttggccctctcat

SEQ ID NO: 23113 - DNA, 642 bp, Emericella nidulans
gtttgcctccttgtttcccatagaacccctcatcaaggttatcgccgtgggtttctttctgacctcccaatgcgtacttccgtggctcatggggcttcatttccgggattgttctggtgcccctctggataaatgtgttaagtgcgttgagttcggagcccggtgtttctcgggcgatcggggcgttcaaagctctgagagcgctaaggctgcttaacttcagtgatagcgccaagaatacattccactccgtcataatcgttggaggatggaaagttattgctgtgagtttttcgccaatttcccacctttccctgtactaactgctctcaggctgccttggtttcgatgagttttctgattccgtttgcaatctatggagtaacattattcaatggccaattgatggagtgcaatgatgacgggatagcgggaagcttggacgcttgtgttggcgagtttatgagctcaccgtttaattgggacgttctcgcccctcgggctgtgtcgaatccttggtacgacttcgataatttcgggaattcgttgttcattctcttccagattgtctctcaagaaggctggacggcggttcagtccagcgttatgagcataacgggcttggacgcagccagaaacctt

SEQ ID NO: 23114 - DNA, 561 bp, Emericella nidulans
  unsure (1)..(561): unsure at all n locations
ttcaccccgcgcagactccgcgttgtgtgcgtcggcgccggattctcaggcctgataatggcgtacaagttgaaacatgagcggccgctcagttttgtcgattttactatctatgagaagaatcctgaagttggaggaacgtggtatgagaatgtttacccgggggtgggatggtaggcgttcctccactactgcatgggataagtgctgatagacatgacgcagtgacatccccattcgtgcgtctctccaattcccgctctttacttcgatttttattctattccttatatataattatgttttaagcatttatgcacatgcctatcgcgtcgctaattgtgaaacccacctacatcttctacttcaacccgaaccccgactgggcgtggtgctacgccaagggcccggagatccagcagtacattctggacacggcagaaaggtaccgactcgagggagaggattcagtttatgacgaaagtcatcaagctaatctggaacgataaggagggcaaatgggacctgaggttgcagcgngtaatggaggtgtcccaggat

SEQ ID NO: 23115 - DNA, 850 bp, Emericella nidulans
gactctgcttttccgtgactggtccctgaagtaagcaaccctagacggtagttggtattgtctaactaacgttgatagtaatgggcgccccgtcgaatcgcgtgttatgctttctgacgaggagaaaccaacacctggaactccggttgctctcgacaccgagtttgtcgacctcgaaaaggctgaaataaacgtcaaagccgacggctcgcaggaaatcgtgcggccgagcaagagcggacttgccagggtgtcagtccttcgaggctctggggagcgagaaggcgttcctttcattgatgattatatctctgttaaagagcccattgttgactatgtaacgcaatattctggcatcaaaccaggtgatttggatccgcggaccaggccacacaacattgggccacttaaggttgcatacataaagctgtggttactgctcagcctaggctgcgtgttcgctggtcatgggttggcatcggactttcgacaagtcgatatgcaagtccctaggaagcaaactgtggatacacaatacttgttcttccacccctcaaagaaccgacggctcagtctccggtatcttgcgtgggctgtgtttaaagaatacatacaagaagaaccagccgacagcaaccagggccatgactcaatcgaggacgcacgcatggctctgcgcctatggaagaagttccaagagtacgaggacgccggtattgtgggacaaatcctggaagaaatcttccgcgagggctcaaaattgggattccgaccgccgcctcgcaacggcgtaactacagtgctttctcggcccggaacggccgtgacaatgcagaacaacagcggccgc

SEQ ID NO: 23116 - DNA, 850 bp, Emericella nidulans
tggtggccgcggtggtcgcggcggtggccgtggtggtgctaagggcggtgctaagggtggtgccaaggtcatcatcgtaagttgatttccaggctgttacggtaacctagcatttgttgaccaggatctctaggaacctcaccgtcacgccggtgtttttgttgcccgcggtggtaaggaagatttgctcgtcaccaagaacttgactcctggcgaggccgtctatggtgagaagcgcattgcggttgagtctcctgcgggagaggatggtgccgttccaagaccgagtaccgtgtctggaacccttccgtagtaagctggctgccggtattctttgtggtgtgggatgaaatctacatgcccccttggtttcaaggtgctctaccttggttccgccagcggtacatccgtcagtcacgtcgctgatatcgttggaccgaccggaaacgtctacgctgtcgaattctcccaccgttctggccgtgacctgatcggcatggctactcaccgcaccaatgtcatccccattgttgaggacgcccgtcaccctctgcgctaccgtatgctcgtccccatggtcgacgttatcttcgccgacgttgcccagcctgaccaggcccgtattgtcggcctgaacgcccacatgttcctcaagtctggcggtggtgtcatcatctccgtcaaggccagctgtatcgacagcacagccaagcctgaggttgtgttcgcccgcgaggtccagaagatgagagatgagaagatcaagcccaaggagcagctgactttggagcccttcgagcgagaccactgtatcgtctccggtatctacaatcgttcgtcgtaaaagcca

SEQ ID NO: 23117 - DNA, 709 bp, Emericella nidulans
cgaagcgaatcatagtcgctttccgcggtacatactcaatcccgaacgcaatagttgacctttccatgtatccccaggaatacataccgttttccccaggcaacgatactgacggcgatgcaccgaagtgcgaggactgttgggtccatttaggcttcatgaacgcatggcgtttaacccgcgcaacaatcctagacaccatctccgcagcaagagaccaataccctgattacgctctaaccctagtaggccactctctcggcggcgcagttgccgctctcgcaggaacagaaatgcagctccgcggatgggaacccgtcgtgacgactttcggggaaccaagggtagggaataaggcgtttgtcgactatctagacaccgagttccgcctggaatcaggcaatgagcgggtgtggaaatttcgtcgggagacgcatgagattgaccctgtacccataattcctttttcagaatggggctactagatgctcagtggagagatttatatcgaccgtgttgagcttccattttctgttgacagatgttaggttctgtcagggcgggtccgatccaaactgcatttaagactctgaggggaagtgtacaacattttcccaaaatagctattaggggtttgatctcttcgaatccaacatgtagaagtaagttcttttgagcacgctgtaccaatcgaggatcaccaacaggt

SEQ ID NO: 23118 - DNA, 327 bp, Emericella nidulans
atgaccgctatagcccgcacccgcacgactgctctgtcgtcatattccgttgccacagtgttcttcgaacccggggcaggggtcacttctcacctccagggagctctgactctcgatacgtgtatagtggcagcgaggacgggaaggtatacgtgtggaatctagacgctaccttggcgggaacagttgatgttcagaaagcgacacacttttcccgtcctcgcagtcgtcgttttcaaggtcatatgtacatgagtagagctgacggaaatcaatggaagacatgcgtgcgcgatgccagctggcatcccaatgctccagttctgg

SEQ ID NO: 23119 - DNA, 500 bp, Emericella nidulans
aattctcgaatgaattcccgcagcgtaactcctcattcagctaaaccagaattccataagaactacaagagtgccgcatacgttttctccagcgaggatgaatctgagtctgattcgaagcctgaagagaagaccaaaaccaattcccagctcaaactgtcaacatccgaccatggctccaaggaacatgctagtcgggaagcctcagaagcagcaagctctgacaaatcaggtgacacatcctcatcagaagaagagagcgacagcgaagaggtcgactcttcggatgtcccgtctgtatctaaacaaaagcgtgcaaagagccctactagaaggtcggggacaccagacgataaacgagtgaaattgaaaaaggaatctagccctactccatccgctgtttcgtctcaggagagcagcagtggaagcgagagcgagagcgaaaacgatagtgatgacgagtcgtcgcggagcagcagcagcgagtctgattctggctc

SEQ ID NO: 23120 - DNA, 850 bp, Emericella nidulans
gatgctgcagccggcgtccgaaaacggtgcattgggttgatgaaagaaatctacctaaggacttcacgcgtcgagctaaaaatggccatcctggatagctttcttcagcgaactgttgaccttgaagagggcgtggcagcattggcgcgtcagacattcgaagaaatctggcttactccgttctatgatctggtcgacgccgctcaggatatcccaaagctgaaggttgggctcgcagaaagaattacactatttgtacatctggtacaaagaagtgatacggctttagaagcacttggcccttgcttaggaaagctgctatctgattcgtccaagacatctactatgaatttcaaagtgtgcaaagctatggttgcgaccatgttcgagaaattgatcgagggtaatgattcaagaaaggagttccagcaggctttactgcaaacgatgacagtatttgccaaagtgaaccccaaattacttcgtccagaccaggtggatgccctccatccttacatagggaaccttgccacggcagaagatctgtttttattccgctctgaggtgatcatctaccgatgtgttctaccatacctatcaaactctcataatacgctcttgaaagatgtccaaaatgaccttttcaagagcgtggccaaactggcacgggcagagctcaacgaggtcatggcttgtctgtggactatcaacggcgtcttgcgaaatacggaccgtcttgtgaagcttacgatctccgttctgaaacccatacagcagtacaagagcgctgacctctctagcagcagtaactctgctattcttgtaaggcgcaacagttattttataattc

SEQ ID NO: 23121 - DNA, 850 bp, Emericella nidulans
aagattggtgacatttttggacgccgcaacatgttcatgcttgggacgctcgtttttatccttggaagcggtttatgcggtggctccaagagcatgaacatgctggtctggtcccgagtgatccagggcataggtggaggtggtatctatgggctggtcaatgtgagttatctgccagagagaggacgttcagtatctgacgtgctaaggtcatccttaccgacctcgttcccctccgttatgtgggaaagtacgtctccgttaccgggcttgtttaggccgttgctgatgtggccggccctcttctcgcacgagcgttctctgagtaggtcttccagccatatgacgctgcacaaagagcttggacaagtctgacactgccaacagattcgccacttggcgttggtgcttctatgtcaacttatgcatctcccccatcagcctcatcatcacttttttctacctgcgcatccccacccctaagatcgacaaggagcgtatcaagaacttcgacattattggcaccataaccctaacagggggtaccgtctgcctccttctcgccatctcctggggcggcaatagcttcccctggaactcctcccacgtcatcggctgttttatcggcggtttcgcgctcctccaggcctttgcgatctgggagcactacgccaaagatcccctcatgccgcccgtctttttccgcaaccgtgccatcgtggccattctatttgccgagttcttctacggggctaacctcctcggaatgatgtactacgtgccccaattcttccagctcgtgtacggcgactccgcaaccatgtccggcgtcgctctcctcccgatgatg

SEQ ID NO: 23122 - DNA, 500 bp, Emericella nidulans
ttgaatcagtcaaccagtcaagtcgatcagctcctcagatcttcacccatcatgaagttcattgcccccgctgctcttctggctgtgctccaggctgccagtgcctctccggtcgacatcaggaccagcaccactgggcttcaggtcaccctctcccaggttgacaacactcgcatcaaggctgttgtgcagaacaccggtagccaggaggttaccttcatgcacctgaacttcttcaaagatgcctctcctgtcaagaaagtctctctcttccgcgacagtatgctccatcccatcctttcttcctgcagtaagctaaagcatattgacaatttgcagacgatgaggtcaagttcgagggtatcaagtatcgcgtgcaaagcagcaacctctctgacaaggtcctgacttcgcttgccctggtgcatccttcgaggatgaattcgacattgccaccactgccgacctctcttctggcgacccattaccatccgctccca

SEQ ID NO: 23123 - DNA, 500 bp, Emericella nidulans
ggcggtcaaacatcaaaactccgccatccccgctcaaaagttacagcaaaatatcccagcccctcattcaaaatattcatcagcaatcatgccagtacgtcgcaacccaataagatccacactcatcaatactaacaaagtgcctttttttctcagctcatagttttaacggctaccctgctcgggcctcagctacccgcccaacaacttgcaacgcgccttgaagaaatccaacccaactagtcgccaacgcgataatccctccttcgaaatcgaaatacaagatccacattgtctcaacgcacgataatgtcaactacccgcggacagtatacgacaccgcgcgcacagagaaggaggcgcgcggagttgcatatacaaaggctaaacgcatgttgggaagagatagttttgtgattctagatggaatgaactatatcaaggggtaccgataccaactttggtgtgaggcaaaggcgttgggtacaacgtgctgtgtt

SEQ ID NO: 23124 - DNA, 850 bp, Emericella nidulans
agcgttataccgagccgccttgtcagatcatggatattcccactattgatgccgttgtgatctctcataaccattacgatcatttgtcccttccaactgtacgagaaatccataagcgacacccgaactgccatttctttgttcctctgggtaacaaagaatggtttgacaaaaccggcataccgaatgcaacagaactcgactggtgggatgaacgcgatatactgctttctccaacaaagtctgccactcaggtagacccagctgatggaaatactgactcaaagctggcggacatcaccgctcgaattggctgcttgccttgccagcatttcagtgcccgaacaccgtttgaccgatgcaaaacactctgggcctcgtggtacgttgagtccggaggccgcaaagtatattttgctgggtaagcgatcttcaatcattgcgccacttgtgtaactgcttacaagagcgctccattcagcgatacggggtatcgatcggtgccgacacttccagatcatgttgacgaccacagtcctgaacataattatccctcgtgccctgctttcaagcaagtaggtgagtatcggggaccgttcgatctagggctgatccccatcggcgcgtatcatccgtgatggttcatgagccccatgcatgcagacccgcacgatgctgttgagatcttgccggatacccaatgcaagagggcttttggtttcactgggggacttgggtgcttacaaatgaggatgttcttgtgccctccgggagtttaagaggtacttaaaaccacaattccccggactggagacttattttgccatttgaaaagtccaagtttgaggtt

SEQ ID NO: 23125 - DNA, 850 bp, Emericella nidulans
ttttgcattgcagtatgcttgcgctcgcagctggatggattgtggagtggaggtcacagcggttataggccacagcttcggcgagctaacagcattgtgtatatctggcgcgctgtctctaccagacgccttgactcttatcgtgcgccgtgctgttctgatccgtgacaaatggggtgctgacccgggtgctatgctcgccgtagaaggagacaggtctaccttggagaaacaccttgaatcgtcctccgcaaacatagcatgctttaatggccctcgaagttttaccgtcgcagggcctaccgcagttattgacttccttcaggaagaactgggggctgattccgcatttcgactgaagcgccttgaggtcacaaatgctttccattccaccctggtggacccgttgcttcctgcactcgcaagtgccatagatggtttagctcttaacaccgcaactattccgatcgagcgtgctactgaacaccaagcagcagatacaataccgttgagcatcgtggcagaccatctccgtcagcctgtgtatttcaataatgctgtacagcgcctcgctgcacgtcatggccctgctatctggcttgaggcaggctccaactccacgattacctcgctagcacggagagcgcttggtttgggcgtctctggcaacactttccattcggtgaatgtaacatccacgtcggcattgatgaacctcactgatgtcacggtcgggctctggagcgataatgtgccttgcacattctggggttatcacgctcgccaaaccagagaatatgctccccttttgctaccaccttaccagtttgaaagaacgcgacactggatg

SEQ ID NO: 23126 - DNA, 850 bp, Emericella nidulans
cctcttgatcctgtccgcagcactggtagcagccaagactctcttgcgcgtcacgatccctcaccttctccgcaagcgagggattcgtcggctacttcgcttgttccttctagctcggagcagcttcggacaagcacatcctccccctcccctgatcaacggcgtctaaagaagcgccgacacgtgatcaaagaactcgttgacaccgaatacacatttgggagagatatgaaagttgtggacgacatttataaagggacttcaagttcctgcctggatctgtccgccgaggatataaaaatcctctttgccaattctgaccaaattgtgcatttctcaatgactttccaggatgcactgaaggaggcggccaaaagcgtgtacgttatgcccaaatcgcagcggtggagcagtaagcgtagtgggcgaaattcccacgtttctaagaatgattcagaatcaattgaaggagcaggcccttcggatctagaaaaggacagagcaacgtccataggtcagggctttctgaaccatatttcccaaatggagaaggtctataccgagtatctgaagaatcacgatgccgctaataagaaactccaaacgcttcagcgaagtgcaaacgtgacaatctggttgaacgagtgcagggagtgggcgtcggatctcacgagcgcttgggacttggattcgctgctagtgaagcccgtgcaacggattctgaagtatcctcttttgatttccgaactgcttgactcgacaccgccggaccatccagaccacgcatctctcgtgaaagctttggaagaggttactaacatttctgttcgcatcaacgagttgaagagac

SEQ ID NO: 23127 - DNA, 749 bp, Emericella nidulans
tcccgtgccgccgagtctactgccgccgaggccactgctgccgaaacgactgctgctgcgacgcagacggctaatgggggctcaattgaggagattactaccagcacccacagcgttacccggacaaagaccgtgagcgccacgcactcaactgagactgccgctgtaactgagactgctgctgcaacctacgtgccgccagtgttgcttcggaagttgacgcaaccaacacgcaacccgtctccaagactaagagcaccagctacgtcacctccacaaccacactatgtcccgtcgagagctcccaggcggccgccacggaatccgtctccagaacaaagacaaccagctacgtgacgatcacgacgacgctctgcccagtcgagagcctgcagactgccaatgccgttcccagcgcaaaggcctcaacagacgcagctgcagccacaaccccggcggctgaacctcacccatccaacgcggagacccccgcagactcgaagagctctgcagacgccgtgaccgcccaagccacgaagacaaccatcgccgtgaacacccctaacccggcgaccgactcagcctcttcggttcctccagatagcatcgtctacacagcgccagaagtgaccagcagctcgtccgttccactgttcactatcgtctcgtcctcctcgcagttcgtgactgtccctactgcggccccatcgtccttcgagcctacggacgctgtgcgcgacggagccgac

SEQ ID NO: 23128 - DNA, 598 bp, Emericella nidulans
gtccaagcgtacaaaatcccccgtcctctccgttcgctatcgcctcgcccctcaaaatccattccccgccgctctcgtcgacgctctcactgcgtacctctaccttattgccccaccccctggctccttccacgctcctgtccccccgaacaaaatcatcctggccggcgactccgctggcggaaacctcagcctcgtgctcctccagaccctccttaccctgcatcgcaagtccacgaccgtcaccttccacaacacctccgtccccataaccccgcctgccggcgtcgctgtctcctccccttggtgcgacatctcccgctctatgccgtccatccgcaagaacgctccctacgactaccttccggccccatcacccttctcttcttcaaaagcaaatggcaaacccttccgcccgcctcctgttcccgcagatgcaatttggcctaccaacccaccgcgcgtcgactactttgtcagcgcatccgcaatcctccacccactcgtctccccactcgcagctccttcggacctttggaacaactgtcccccagtctacatctccatcggtgaggaaggcctcaccgacgaaggcctc

SEQ ID NO: 23129 - DNA, 850 bp, Emericella nidulans
accaacttggcgtccctcagactgacctgatatccacgttcgagttcctcttcctccagcgccaccttttacatggctatatcgttgcctctccggatcatgaagggccagatgcggccctcggctcaggccgattagcaggaatgacggtgctggatgggatgcgtgctgtcaacaactttaacgagactctcggattctcgacttcccgccctatgatcgccgcaacaggatactctggcggggccattgcaactggttgggcagcatctctccattacgtctatgcgcccgagttaaacgtcaaaggctgggccatgggtggcacacctgccaatctgaccgggacattctactatcttgatggaaagttgtatagcggcttcatcccagcggccgtaaatgggctgtccaagccgagcgcatacggcacacagttgctacctatcatagatagaatcgtcactgagaaaggccgagcactcttggactacgcaaactcgcattgcgttcccgcagaccttgccaattggccaaaccagtcgatgctatccccagatatccaaacccctcgggcccactctgctcctcgaaccaacgattcactccgttctactcgagaatcttctcggtgggaggccagaagaggcaccaatggctcctgtgctggtttaccacagcgtagaagacgagatcatcccgtatcatgacattccattaatggtcgactcatggtgcagcgcaggagctaccgtacaattcagaacttacgtgactggtggccacgccaggacactgctcggcagcctgactgattccgcggggtatattgatgatgcatttgccggca

SEQ ID NO: 23130 - DNA, 499 bp, Emericella nidulans
cggaatacaagtcatccaacattgttctacttcggccgagcatgtcctttatgattctccagactccgaatcctcattcccttcgtgacgccctacctgacttcacacgcacaacgcacgttttcctgcctataaacgactgccgaaacgtcacagaagctgaggggggcacacactggtctctgctcctaatctcgatagtggacggagtagcattccactatgactcattaccaccagggaattactgggaggcgaagacagttacaatgaagtttggcgctctccttaaccgtcccatacggtttgtcaacctcgacgattcaccaacccaagagaacggcagtgattgcggcgtgtttgtttgcttatctatgcggcacctcctcttaaaacgattactgcgagcaaactctaatgagaaagttagtatgagtttgggtggctggaaggtagacgcgcgcttggggcgcaaggaaatagccaaaattatcgaagg

SEQ ID NO: 23131 - DNA, 850 bp, Emericella nidulans
agaaactgcgccatgagcggctggtggagttgcagaagaagattgaggaggaggaagagcgtgaacgcatcaagaaggagatccgggatgaggaggcgaggattgcccttgctgagcaggagaaaaaggctaaggaggcgcggatgaaggctgccgctgttgaggagtggaagcttgcgcaggagcgggctgcgattgcggagcgggaggctgcggagaagcgcgataaggagttcaaggagcgcctacggctcgagttcggtatgacacccgaggagtttgcggagtttatgaagaaaaagaatcagaaggaagagaagaaagaagagaagaaggaggaaaagaaagagaagggaaaggaggagaagaagaaggaagagaagaaggacgagaggaaggacgagctcattgagcaacgcaagtctccttggatcaaggtatgctgtcctgaacaccatcataactctaccctcctctaaccgtgcaataggtccatcgcaaatatctcctcccagaaaccctagacacatatagactcccctggtcatgggatgatgtgagttttatacatctatatcagcactacccacctgcacaatcagactgaccgttcattctactccaggttgacggcaactatctcatcattaagacgtggatcagcgaagacctgcaggacgagctcttccagcacacccgccgcatccgcgagggtaaaatccttactcagacctccagcactctgactgagctccgcgtcaacgatcgaaacaaggataagatgtacctcgttagaaaaaagagtcccagtcggaggtcttggatttttacctgattgcgctcatccgat

SEQ ID NO: 23132 - DNA, 500 bp, Emericella nidulans
agcttccatgactcgagagagaagcacgagatcgaaccacaaaaatccctctccacgctcgcagtccgatgacgatgccgacaagggcgattttccgagacgcgccaacgccaacgcgcgagaggagacgaagaaaatgacgtacactccaaaattggagatggcgaggacgacgatgtcgatgaagaagatgaagaagaaatcactaggtgcctctgcggacagcaggattatcctgggcttccaccctctcgccgcgaggccctcaatcgcaatggggcgcggagtgggatcaaggatgagaatcctttagattcgtctctggactcgtcagacctgatgtcagatgatatcggcagcatgttcatccaatgtgattcatgcaaggtctggcagcatggtggctgtgtggggattatggatgaggctatgagccctgatgagtatttttgtgaagagtgtcgaaaagacctacataggatcaaaagtgagacaaatgg

SEQ ID NO: 23133 - DNA, 663 bp, Emericella nidulans
atgggtctctcactgggcaacgacctctggatcctgcttgtctcgttacttgtggccattgtcacatcattggtcgtagcactcgctccgtatacctgggccagcttgcgaccgaagaacttccccccaggaccaaagccactgccattgataggaaatctgaatctgattcctccgtcgaaggcattcttactgttcgtcagctctcttctacttgaagtctggcctgcggctaacggcatatacacagtttccaccaatggacaaagaagtacggtcccataatcggactcaaattcggcccaacaaacgtcgtggtccttaataactggaaagacgttcaagagtgagtatagtaattcattattcattgataaaatcaaataaatcaaatataaaaattattcttggctcatcattccgtccaagactcctcgagaaacgcggccacatctactcctcccgcccagacaactacatcgccaacgagctcatctgcaagaaccacacccatatcctcttcgccccatacggcgacggctggaaagccctgcgcaaagcagcccagggcctcttcaccccgcgcgaactcgccggcgtcctccccatccaagaagccgaggccacccagacggcattcgacctaatccgttccccagaccg

SEQ ID NO: 23134 - DNA, 341 bp, Emericella nidulans
taccactgagctcccaaaatgctctcaccgtcacgtccaccgattggcaagtgccatcagcacccgataacttgggcaggccgcatccgagtgtattgccattccggtcaagaaacgtatcagtaccgaacccagatatctttacagactcaccggccacaccctcaatgaatgcatttcccacgttggatcttcagaagggaattgcggcggcttcgatgaacgctttacctacaccaagcgctgtcaacttcgcgccgagcgggctttcaagtgatggcctctatctattcgacaactatattcattcgccagccagtcctggcttttctactgcgctc

SEQ ID NO: 23135 - DNA, 500 bp, Emericella nidulans
cctcgacgtcttcaacgttccatactctgtgcctctcttaggaagcaccgtcgttatactgatcggcttcattgccatcaaagctctacgtgttggttcacgcccgaagggctgccacctggaccgccgaccgagttcatctggggcaatacgaaacaggtacattcttcaagggtgtgcgagggtgcagatttacggccaaataactaacgccggcagattgacctgttttacccgcaatatcagtacaggaagtgggcgcacgaatatgggcccgtctatacagtcatgctaggcgatacggcgcacgtcgttgtcagcgggctgcgcgacgtgagagacattttcatcaagcagggagcaagttcccagaatcgtccgccctctcgattccagttgctcatgcgcgacggcttcttccccggcttaaacaacggagagaagtggcgacagtcgcgcagaatgtggcaggccgtgctcaacaacagtgcggcgaaaca

SEQ ID NO: 23136 - DNA, 583 bp, Emericella nidulans
gaaacttgaagagttcaggaaacgctgttgtaaaaattggaaacaggaactaaaagtctttctcagctcatcattctgttgtcgacgaatctgcttttttcctcgatcaatggctgccttcgtatgatggtgatgtgggtgctcaggcactcatgggcctcgctcacacgatggggtctctaataatggcctacgcatttgacattgagacaccggagaatgaagatgagcgggaaggcgaagacgggtacctcactgacgaagaggaagaacagtcttccaagggcatggtgcctctggctgatatgctgaacgcggacgcgtacagaaataacgtgagcattataggcaatgcccccccttttttttttttctcttctattaattccattgactttttccaggcccgtctatttcaagaagaggaatcgttggtaatgaaggcaatcaagcccatccgggctggtgaggagatcttcaacgactatggagagattcctcgctctgatcttctgagacggtacggctatgttaccgataactatgcctcatacgatgtcattgagctctctctcgacacgct

SEQ ID NO: 23137 - DNA, 604 bp, Emericella nidulans
tacagcatgtcgacaacaaatgtaagcattattggtgctggtctctctggcctagcccttgccctcgcccttcagcaacaatctaacgtatgcacgctttatgaagcccgccctgcaaccctcgatattgggggcgcactcatgctcacccctcaagcgctgcgtatcctcgactctataggcatctacgcccgcctcaaggacaacggctatagcttcgacagctctacttcactcccacgaccgcaatccgtcgtcagctacgagttcggcggggaggcaaagtacggatacccagctctacgcatctaccgcagaattcttaccagggaactctcggccctcgttgaagagacagggatcccaatcgtgtacaacaagtaaattcacccgcgtgctcgaagaaacaccatatgatgtgatattcgagtttgaggacgagactaccgcaacagcgaccatccttgtcggtgcagatggtattcactccaatgtccgcaagtacttgtacccggacctctaacctattttcacgaaggcgattggcatcaacgctgccatcccgacctcccaactcaaattgcccgagcggtacgaccttccc

SEQ ID NO: 23138 - DNA, 701 bp, Emericella nidulans
tcaaatcctaccaagtgctactctttctgcagagttggcgggggcttcacagccgctgattatgcgaatatcaggcatcacactgacggcaagtgggtggagtggaatcccaagaagcctcccacgacgtacatcgagcttgcaggtggtgactcccagtatgagcggccggatatgtggattaagccggaggactcggtagttatctgcgtaaaagcagcgtctgtgtcagtcagcgatcaatttcgaataggcttgacgcttcggtttccccggtttaagcggctacgcatggataaagactggaaaagcgctctgtctgtgcaggagttcctagatctcaagtcccatgccgaacaggaacatcgagagaaagagttcaatgtcgaaaatttccgcaagaagcgcgtcaagaaaacgacaaaaaaaccgcttgcgatagcaggatatgacgaaaacgctgaagtccaatacgccggtccatcgggacatatattcgatggactcaatttctgtgagatcttctgccgctctcctattactggcgctaactattgtagtcatcttgaccgactcgaacgcgcccgtaaagaagtcaaaggctgagctggagaatttggttaaagccaacgggggcagaatctttcagacgaatgatgctgtacctgatacaatctgcatcgcagataggagtaagcggt

SEQ ID NO: 23139 - DNA, 500 bp, Emericella nidulans
catccgtgagaccaagattcacaaggtacttcggatgattatcaaacttccaaacatcccgcgcgacgaggaattcgacttccgcaagcgcgctctagacatcctttccaagtggaagaacgtcctcgacagtgaccgtgcaacaccctctcaggagaaggagaaggagaaggaggagaagcccaagtccaacggtgtccacaaggaaaaggaaggtagtgccgaagcgccggtcaaggcttctgaatccaagtccgagaaggaggatgacaccaagctcgacaccccggatcaggatacacctatgcctgacgccgatgagaagaccgaggaagcaccggcgcctgccaaaggcgaggatgagaaggtagagtctgctgatgctgcaggtgagacgggaaagagtgagaagaaggaaacggagacggacacggagaaaccggccgaggacaaggccgaggacaagaaagcagatgagaagactgctgaagctgaaactg

SEQ ID NO: 23140 - DNA, 753 bp, Emericella nidulans
gcttggactgattccgaagacaactcacggggaataattgctggtggtctcgagagcggatcccttggtttatgggacgctgacaagctgctaagtggtgcaaggtttgtgagcgcgggcttgattgtgacgatgatgatgctgatggaacaagtgacgcggtattatcaaaaagctcgaagcactcaggggccatcaaggccctacagttcaaccccaggcattcgagcctactagctacaggaggtgccaagggagaggtctgtgtagaaactgttgattatttgcccaggactagtactaacgttgcatagctgtacatctctgatctcaatgacctcgagaacccctaccgactgggaagctctaccgcccgcgcggacgacattgaatgtttagactggaataagaaggtggcacatattctggttactggtagcagcgcaggttttgttaccgtgtgggatgtcaagacgagaaaagagagcttgactctcaacaacatgggacggaaagctgtcagcgctgttgcttgggatcccacaaaggtaggccccgcgccctcatgttgccgttgacggaaatgcctaacaacgtgcagcctacgaagctcgtgacggcaacaccacatgaatcagaccctataatcaatctctgggatctgaggaattcacatgcgccagagagggtacgtaaccaagctttttgggttaacaatttcatttctaacggtaaatgacccttcgtggacac

SEQ ID NO: 23141 - DNA, 500 bp, Emericella nidulans
ctcctcctgcaccgaccgcaccagtaacgccgaaccccgtcttagaaggccgctccgaggggcgacgctacaaaggtaacagcgaactggattttcaaaatgctctccgtgcgtctgagatctctgctcaggaggagctcgcgcggcgtcgcgagaataaggctactgcgtatccagatctcactcgtgaggcggtgattccggacatgcttgaacctcgggaagccaaagccctcatatacaaagatacaaacaacattgttgatccgtctcgtgccatggaggtgttcggcttcctaccaccgccaaatgatttcacgcctgaggagcacgaaacgttcaccgatgcttttatggcccaccccaagaaatggggaaagatcgcagaagcgttacctgggcgggatttcaaacagtgtatcattcactattatctgaccaaggaagaaatcaagtacaaggccaagttgaataagcgatggagtcgccgtgggcgtgct

SEQ ID NO: 23142 - DNA, 514 bp, Emericella nidulans
ctcatcaatctgatttcaagatgttactacgcgaggaaactattatccggacaaaagcatggccacagcagcggtatgtgagctccgaccctcattatttcctgctgtctaactagtgtttcttatctacagaaccccccgttatacctccacgtgacgagtacctcgaaagaaggactcgaaaaagcggtcgcgctgattgaagatcttatgaagaaagagctgcccaatctagtggatgaacgacgatttcgccgccgtgaaccagagcaagttgagcgggatgaatttggtcgcgtaagtttcattgtccatgaatgcatcattacattactgattgtccacagcgcaaatggcctgaagagaaaatacccgtcggcctggagccaattcctggatttaaccttcgtgcgcaagtcgtcgggcaaggtggtatgtacgtaaaacatatccagcagcagacgagatgcaaggttcaaattaaaggccggggatctggtttcttggacccagc

SEQ ID NO: 23143 - DNA, 850 bp, Emericella nidulans
ctcaaggtggatattatgccagtgctctgcaggctgcatcagctgatggtgatgagaagatagtacagatactgctggaccatggtgctgaagtcaatattcaaggtggagagtatggaaatagtctgcaggctgcatcatatcaaggctatgagaagatagtgcagatactgctggaccatggtgctgaagtcaatgctcaaggtggagagtatggaaatcctctgcaggccgcatctgctgaaggccatgagaagatagtgcagatactgctggaccatggtgctgaagtcaatgctcaaggtggacattatggaaatgctctacaggctgcatcatgtgcaggcaatgaaaaaattgtgcagatactactggaccatggtgctgaagttaatgctcgaggtggattgtatggtaatgctctttatgctgcatcagatagaggccgtgacaagatagtgcagatactgctggaccatggtgctgaagtcaatgctcaaggtggagactatgccaatgctctgcaggctgcatcatatgctggaaatgaggagatagtccggatactgctggaccgtggtgctgaagtcaatgctcaaggtggagagtatggaagtgctctgcaggctgcatctgctgaaggccatgagaagatagtgcagatactgctggaccatggtgctgaagtcaacgcccaaggtggagagtatggaagtgctctgcaggctgcatccgctgaaggccatgagaagatagtgcagatactgctggaccaaggtgccgaatccaacccacacaaataggaaggtttattcgttcttttgtatcgtcagcaatatccgtacttgct

SEQ ID NO: 23144 - DNA, 500 bp, Emericella nidulans
gccgatgaagacatgatctcaatgtcccaaaatggtccatactcgtcaagaaaacgcaagcgcggaatcaacgaagtagctgccatgtcgcttagcgagcaggaacacattctctatggagatcaacttctagactatttcatgactgtcggagagcaccagaggcaacgcgcattccacctccccagcctcccgctaacttccaggtggatcgcccgattgccaattcaggtaatccggccttgcattgggcatgcgcaatgggtgcccttgaaattgtcaaagatttgctgcgaaggggaccaaatatgaaagccctgtctattcatgaagagaccccactggtccggcttgtgctttttcgaacaactatgagaagaggacgtttccagcactgttagacctgcttctagacacgatctccctcacggattggtttggtgctacattgttccaaaacataacgctagcgacgaaaagcaagggataatggaaaagct

SEQ ID NO: 23145 - DNA, 809 bp, Emericella nidulans
gctactcgtgctgcctctgagggcgctcagctggacccctccaagctcaccatcacgaaaacaagcacgcccaaggagttgttacccgctaaggaccttgtttttgggaagaactttaccggtaggatactctaccacaatccggcacgaaaatcaacacctcgctgatgcgattgttccttagatcacatgttcaccgtcgaatggaccgcgaaggacggctggctcgctccacagatcgttccctaccaaaagctccaactagatccatcagcttgcgtattccactatgcctttgaatgcttcgaaggtatgaaggcatacaaagatagcaagggtcagattcgtttgttccggcccgacaagaacatgcagcgcttgaacaagtcctctgcgcgtattgccttgcctactgttgatggtgaggccctcaccaagttgattggcgagctggtcaagctcgatagcagattcatccctgagtaacacaaccatcttgcaggctaattcaattgctaatttctttatagcgcacgcggctactcactttacctgcgacctacgatgattggtacccaaagcactctcggcgttggcccaccaggctctgctcttctctttgtcattgctagtcccgtgggtccttactaccctactggattcaaagctatatcattagaggcaacggattatgctgtgcgggcatggcctggaggtgtgggagataagaaacaagaatgcaaactatgccccttgcatcgtcccacagttagaggcagcttcccgagggttacagcagaatctgggac

SEQ ID NO: 23146 - DNA, 500 bp, Emericella nidulans
aggagtcttctggtagccctgtcaagaaacgcctacccaacgggctttctcgcagtgacactatggaatctttgaagtcggacagcagcaagtccacgcttccgaacggcctcttagatgacagccaagacaaaattaataaatttgaaccgcgtcctggatataaacagtgggtggctcaagcaggtactctcgtggctgacttgctcacttgtgctggcgcggatcacgttatcacgatggacctgcatgatccccaataccaaggcttctttgatattcctgttgataacctctacggccgaccccttctcaagaactatattatgcgcaacatcgccaactacaaagaagccgttgttgtgagcccagacgctggtggcgccaagcgggcaactgcgattgcggactccatgggcatggaattcgctctgatccacaaggtttgtgttaccgatcttgagagcacaggaattgcaaattccaaggggggggggggg

SEQ ID NO: 23147 - DNA, 850 bp, Emericella nidulans
tgctgtcaaatcacctccaccgattctaccagactaagacaatccgcgttcggacttggtataacgaaaatgccgactctactatcactctcagaacgccccctccagtaataccgtccatccgatcctggaaagtttcaggtgaccgatacacagagggagtcaagaagttgcaggttagtaggccatttattttgaaaacgaaggctctaatatacgtagggatcatctggaccattcagattcgctgttcaaagtttgaaggactcggaatttacgccgaagacatttgcttcaaaggatactccggtatgagactatgatatcatggccgctcagaactaacttccctagcctctttcatcgaaggatgaggttattgccaatgtttattggcaattcctgcaactccgcggttacatcaatgaaaagcaccagcttacaccttggggcgaatgctagagcaagccctctcagttctcgatcccgaagattcattggaagaagctacttttgtggctattgagttacttcggttcggaattctgaacgcaacgcaatggttctcacaagtatctggagggccaatgagaggatccggtgagcagacacacccatgatgttagactgttcctaacagtactagatgaggacaagtctttcaacatgttgatttcccgcgttgcctgtattggcaaactgcggcacaagaacatcggctactctggacctcttagcagacagttactctcttaccggtctcttatcaacgaagtccgtgcgacactgcgcaacctcattgaaatcacacttgccagccttttcctcagcggcgacgcaaatcgcgacc

SEQ ID NO: 23148 - DNA, 500 bp, Emericella nidulans
gaccacagagccgggtcccctagaaaccaggacgactctcttcaaccaaccatggaatgctcctcacctaccagtcttcattgggttggtaccgtctgcccaggcatctctcctagaaaaaaaagtcatcccgatataccgtctattcccctgggaatcctaatcctacttgtccgtcgcatgcctatcattttcgccatgcacaagtatatcgaacagatcgaaagtctgttccagactacatttgtcggcttctttggccccatcggcgtcggtgcagtcttctatctttcagtgagcagggaatatttgaataggatcaccgtgaatggcgaaattcgcgccgatgcgcagcaggtctctgataccatcgaagtggtggtctggtttctcgtcatctgcagcatagtcgttcatggtctctctattcccttcgccaaagctggctatcatctcccgcggactatctcgcaagtgattagcactagcaccggcgacaa

SEQ ID NO: 23149 - DNA, 557 bp, Emericella nidulans
agtacgcgcagatgagatttgacttggatgctggtacgtaccgtcatcactcgattgaaagtatgttgcagatgacggcctaatcaaacgaaaatgcaatagatctctcaccgctcttcaattggaacacaaaacaagtcttcgtctacgtttacgcgacgtactcctcctccaacaaaccctccgagaactcgttaacaccgcagtcccaagccatcatctgggatactatcattgaagcccccgaatcgccttactcttttgcgaatctgcgcgagcagttcttcccgactaagagcggcaagtccgcatcatcgcgcaagcgctcttcgacgaacaagaggaacgatagcaacaagcaggatgctgttcccggaactctccgtctccgcaatcagaagagcaagtaccagattagtgatattacggggaagatggcggaacggacgaatgtcacgctgagcgtggggtggaatgtgcagccgtgggtaggagcgttgtggtgggctcccggaactggtgcggttcccagaacaggtggcagcaccggggtatcg

SEQ ID NO: 23150 - DNA, 637 bp, Emericella nidulans
cgcgtcgtggctgtgttcgctgtactcgatctttgccatcgggagtatggcgccggataatcagatcgctcgcgcaggaaaagatgcggaaggagacgataagcgggcagcggactaccttgccttggccaaggatctggtccctgaagtgagcgaagaggcagatacagaaagtgtcaaggctttcggcctgttggtatgctgctatcatcgactattatttcgagttctactgacgcttgcttagagtctcgggatgcatgcaatgtgctatagcgtcggggcgtacctgcacctgggcacagcagtccggatagggttctcgctcggcttgcataggaatatctctccgcgtaagagtagctcggtagagcgcgagagagccaggcggttgtggtggacgatctacacgctcgaccatgaaatggccattaggtttggatatccctgcgccgttggggatgagagcggccttgtcaagacgccaccagcatcagaacaggtacgtcgtcaattatggtcttgttgcgcccatgctcagccgcataggtaatggatcctggcccaaatatgcccctcggataccaatccctctgtgtctcgcttgtccggatccgcaagaagatcggccaaagct

SEQ ID NO: 23151 - DNA, 850 bp, Emericella nidulans
agaccgtgaactcctctcactcatcctgcaaaatgtctttgcaattctgaagcgcattcccaatgcgcgtcgtgcactccctgaaaaagtgattccgcaactcaaagagatctttccggcaggaaaaggcgcttcccaggagcgggattcgaaaaaagatgcggggcttatggtagttctcgagaatatgactgttattgctgaaaattgtcctggcaaggagttcaaggacggtaagacaactgttctgaagcatatgggacttgctaatatccttaccagatatcctacctctgatccgcttaggatttgattcgcctactcataccctagttgatgctgctatcaggtgcctgcccgtgatcctccccgtactcgattttagcactgtgaagaacgaggttttccctccgattgcatctactttcagccgcacgaacagtcttgccgtcaaagtacgctgtctgcaagcattcactgtgctttgtggtggctccgtggataataaggatgataccagtgatgacttgtccggcattgtcgaaatgaacaaaccacaacatacgaaatcgtctattctagacaagtacactattcaagagaagctcgttccgtccttgaaagcaatcaaaacgaaagaaccggctgttatgatggcggctctaggcgtcttccagcaggtccagaaagttgcggattctgattttctcgcccttgaagttctccctgtcctctggagtttcagtcttggaccgcttctaaacttgagccagtttagccaattcatggctctattcaagagcatttcctcaaaggttgagcgcgaccaaatgagaaaacttcaagaatt

SEQ ID NO: 23152 - DNA, 850 bp, Emericella nidulans
gttgcgccttgatgcgctgtctggtgcagacgccggaaggcataaaatatttggcggagaacaaattcctccgacaggttgccgaatgtcttgcgcaggttgaccatatgagtggtttgacatcgtcggcgccgttgttctcgcgagaacaaatggcaaacacactgagcggcggctactttgccatgctagggacgctgagcgccgaccccaacgggctcgcgatgatggaacgatggcatatgcttaatatgttctatcatatcattgaactccgggatcgcgacgacctaatccagacgctcatcgggaacatggattacacccaggcaagccatctacgggttatgctatctaaagctcttactactggctccaaagatattcgcatttttgggacaaggctacttcgaaaatatactgtggggaatgtgtcacccacatcagttagcaatgcagactgggtcatcaagctccttgtaactcaattatatgaccctgatgtctccgtctgccaagtagcagtgaagattctggaggaggcatgcaatcagcgcgattaccttgagtttgtggtcaaatgtcggccgtctctggaccatctaggtgaaattggtgcgcctctgctgttacgcttcttgtccacttcagtcggctaccattatcttgatggactcgactatatcacgcaggaaatggatgattggttcctaggacggaacgatgcatacgtcagcctggtcgaagccgctttgtctcgagcctatgtggaccatccccgtagaaacagcttggtacctgaagatctcgttgatcaccaggatattggtcttgtgcctccacacttcta

SEQ ID NO: 23153 - DNA, 649 bp, Emericella nidulans
gggcgggagccagcggtatccaaatatgaagttcacatccgactgaaaacccggcgagacggccctgtcatccgcaacatgatccgattccctcactccgtccaaaccgaatcacgaatttgcgtgatctgtccgcctggctcaaaacatgcgaaggacgcacttgcagcaggagcggtgctagtgggagaggatgaagtatttgaagtcgtgaagagcggaaggattgaattcgatcgttgccttgctcatccggacagtatgcccgcgttagctaaggctgggctgggaaggattctcggtccccggggtctgatgcctagtgcgaagaccggtaccgttgtcgaagatgtggctgctcgtgtcgaaatgcttcgtggaggtacggtgtacagggagcgtgacgctgtggtccgtctccccatcggccagctgggattttctccagagcaactacgggacaaccttcgtgttaccattgatcaagtgaaaaaggatgctgctagcctcaacgaccgaatcacaaaagaaatctacgaagttgtaagtgcggaaatatcaacactgtctggctattactgatcgactgcaggtgctgagctcaacccacggtcctggcttcagtctgaatggagagttcaagaccgag

SEQ ID NO: 23154 - DNA, 850 bp, Emericella nidulans
ccctttgatcatcaacggcaaggaggagctggcttcctcagtgttcgatgtaattagtccttacacaaacaaggcctgctgggccgcagcatctgcttcacctcaagatgccattcgtgccgttgaggcagcccaagcggcgttcccagcatggtcgcagactaagccgactgtccgacgagatatcctcctcaaggcggcagacatccttgagagtagactggagaagtgtgccgagttcatgcggacggagatgggagcagatgctggggcgtcacaattcttcgttgtccccctggcaatccgtatgttgagggaagtggcaagccgcatcacctcaatttgcggcactgtacctgttgtcgaggcggaaggacagagcgcaatcatctataaggagccgatgggagttatcctgggaattgtaccatggtatgtttcctggtcgctaagcggcgtcgcactttactgatgatataggaatgcaccgtacgtgttcggtgttcgatctgctgcatgtgctcttgccgccggcaatacgacgattctgaaatcgtccgaactcacgccatgctgttactgggcgctgacccgcgcctttcacgacgccggattgccagacgggtgtctcaaccttgtgtcctgtcgcccgcaggatgcagcagaggtggtcaacgccatgattgagcacccggctgtgatgaagattaactttaccggaagcacggctgttggccggaagatcgctcgtgcttgcgggcagaatcttaagccgtgcctgatggagctagggggtaaaaacagctcaattgtgtgtgctgttgcatattttgataccgctgttaagtcc

SEQ ID NO: 23155 - DNA, 850 bp, Emericella nidulans
cgcagagacgccgacgaggttacgcaaatcatgattacagagtgtcagcagcttttgagattgttcggactaccgtatatcacagcgcccatggaggcggaggccacaatgcgcggaactggtctcgttaggacttgtggacggcattatcacggatgacagtgatatcttcctgttcggtggcacccgagtctacaaaaatatgttcaaccagagcaaatacgttgagtgttatctcactgcggatctggagaaggagtatgctctccatcgacggaaactgattagcttcgcacatcttcttgggagcgactatacagaaggaattcccggcataggaccagtgacagcgctggagattctgaccgaattctccagccttgaggaattccgggactggtggacgcaggtacagacaggggcagatatgtcgaacagcagccatgcggctttctacaaaaagttcaggaaacaggctacgaagatttttctaccgcctaccttcccggacgcgcgagtcgatgcagcttacctcgagccggaagcggacagggacccttcaccctttcagtggggcgtgcctgatctacatggactccgaaacttcctgatggcgactattggctggagtcaggaacgaactgatgaagtcctcgtgcccgtgattcgtgacatcaatcagagagaacaggaggggacccagagtaatatcaccagtttcttcagtggacctcaaggagcaggagcattcgcaccacgcgtccggtccggtggccagagcaggatggaaaaggcttttagccgccttcgacgggaggctggagctgatcaggacgcagagctagttgat

SEQ ID NO: 23156 - DNA, 500 bp, Emericella nidulans
gggttttttttcgcgtgtagagatcaagaccgaggaggatctgattccccctggtgccaagcctggtaccgttcccagcgatatcgagcaggctaccggtcttgaacgtctcgaacttatcggaaagatgcagggcattgacattttcgatatgaggccccttgatgcttccagaaagggtatgcttatcccattcgttgaaatgtgactaggaaagtgctttatctgactccgtaaccgataggaactctcgacaacccaatcattgttaacggtgccggtgacgaacagtacgctggttgcaccggctaccctgcggactcccaccatgtcaactggcttactgtacggaataatacactttttttaggcattgttcgcaggattgcatactgattgctacccaggtctcccgtgagcgccccattgagcgctgcctcgagtgcggcaacgtcgtcaagctgaactacatcggccctgaggaggaccctcatgctcgt

SEQ ID NO: 23157 - DNA, 596 bp, Emericella nidulans
tttgcagtccatacaacgcgaatgggacttcgtggcgaccgacgactgcgtaccggtgcaagtcgccctgcaattgatggacacaagcacactggggaaggcggagcgtgagccggacttcctcaatgtacatcagacgattcagcagaccctgaaggccatcgtcaacgagcatcatcaaggcttcaatagttccatcggcacgtaccacaaaatccaggcgagcattcaaagctcccaaagccgagtgcgcaacttgaagcatgcgctagaagatgcaaaaggtggtctgatgtctaccaagcccgagctgaaagagctggcgacatcttcccagaaatatgacgacataatccagctgttcagtcagatccaggaaattcagtcccttcctgagaagctggagtctagattatccgacaaacgattcttaggtgctgtggaggtattacatgacgcactgcgacttctacggcgttcggagctagaaaacataggcgctcttgcggacatccgagcgtatttcgagaaccaggagtcttccatcaccgatatcttggtcgaggaattgcacgatcatctttacctgaaatctc

SEQ ID NO: 23158 - DNA, 850 bp, Emericella nidulans
gaccgtcattatcatgactcaatgtcggaccttctcaagtgctcttgcagttcgcttcatcatgggcctgttcgaggccgctgtcacccccggactcacattgatgaccggtttctggtacacccgccaggagatccctctgcgccaatgcatctggtactctgctttgggatggggtggcatcatcggctcatatatctccttcgggatcagcaagctgcccatggacttttcgcccccgcggtgggagctgttgttctatatcctcggggctgcgacctgtctctgggctgcagtcatcttctttatcctgcccgactccccttccaccgcgttcttcctgaccaagtcggaacgcattattgcagtcaaacgagtggccgctaaccaacgggtattaagaacaaatcatttgacacacgccagggctggtcgccctgacggatcccaaagctatactgatctttatatcggtatttgccgccgctattccaaacggcgttgtgaattccttctcgacgatcatcatccaagacatgggattctccactacgaagaccactcaactgaagtctgtcggagatgcagtacttatcgtggcgttggtgatcggaggtactataacgttgactgtcccaaacagtagactgctcacatcaactgctgcaaatatcttgtgcactgtggcggctgcgtgcatggcctatctccctcgagagaaaacatgggctagactggcttgtttctggctggttaatacacagtcggtagggttcacgatctccctggtcacaatctcatccaatatggccggctatacccatagagctatggcgaatgcattggtgtt

SEQ ID NO: 23159 - DNA, 500 bp, Emericella nidulans
tctttcttctgctgcgagcgcagctgtttgagttcttgttcgtagtcgaatgtgccttcactatgtggggctgagttcaaggttgctgcaaacctaacatgttcctcgcttcggcagcgagctgtctcatgagctcttcgtcttccggatccgagaagccttcatcgtcgatatcaacagcttgagcgagcccaacctcatgaagcgcactgggcacttgctgtattggaacatcttcgaattctggcgataatcgtccagtcttctcgccatcaccgacgtgttcttccgctggcaggtgcacgtcttcaaactctagtgatcgttccctttctgcagcggggacggcttccaccggttgcacagtgacgtcttcaaattccggagaactagaccgcacggattcctcaccgtcagtctgcaccgattcggctacgtctccatcctttgcaactttggcttcaagagctacagaggctctgtgatccggcgactctggt

SEQ ID NO: 23160 - DNA, 850 bp, Emericella nidulans
gcgggatatagcctgcgggcgttcttcagcagcatggctctactctggcatggcgtttcgcatggccattgatctaggactgcacgtttcccccgacgatctacaacgccactcgacctcgctgtcggcggaagatgtcgagattcgaaaacgtttgttctggagcctatatgcctgggacaaacacatcagcctgtacctgggcagaatgcccaatttcaccatgggtgccgaaaacgtttcgcttgagttccttgatgactttaccgaagaggacctgtgggagccatattacgggcctgaaccggcgtctgccgaacgccgatcttatcccccaaccccagggcatatcgtttcttgcttcacgcaactatgcaaactgtgcatcctcatatcgcgggtgatgttggacctctacagtccgcaaccaaccagccacccaagctcatcattagacgcccgggcggcggcattcgtgacgatcaatcgggaccttcatgaatggtacaaagccctaccatcttttctacagataccctccgacaaaatcccggagatcagtcccccgccgcacatcacatctctcaatctaatgtatcatactacgctgattcttcttcatcgtccctatgtcgttagcggacatgcgcgcgactccgacgcggcacgaaagagttggaaagtttgtcgctcctcaacaactactatctaccatctgcttcaaatgtatacgaaaactttcggattccaacacatcacatatatgaacagttattgtacatacacggcggcgacaacggcagtgtatcagctggaaacttcagatggagaacctcgcgtttccgatcaa

SEQ ID NO: 23161 - DNA, 720 bp, Emericella nidulans
tcggcgtcctcggtgtatgggcagccatcaccttcactcagcaccctttttaccgccaccatgatacttgcgataacttagcctccattttagacaaccgagtcttcgcctccagctctgcagaatacaaggagtcggtctcctcttacttcagttttcaagagcagaacctccagccggcttgtgtcgtccagccaacaaccgcgcaagagctatctgcagcaatcgtgctcctggcgcgcgattatcatgaccatggccagcagttcgccatccgcagcggcggccatatgatccccggcggcgccgcaaatatccatggcggcgtgacgatcgatcttcgcgctatgaacgatatagacctgagcagcgaccgatcgaaagtgcagattggaaccggcgcaacctggggccaggtatacaaggtgctcgatccgctcaacattaccgttaccggtggacgggctgtcttgatcggggtcggcgggtatctgactggcggcggtctctctgcgcttggtccagcaaccggttggggctgtgacaatgtcctgtaagtcgaggtggtccttgcaagtggtgaaattgtccaggcttcgcgtacgtcatatcctgatctattcgttgctcttcgcggcggatccaacaactttggcgtggtcaccaagttcaccatggctgctcatccgtccaacgggatctggggcgggttcatggctt

SEQ ID NO: 23162 - DNA, 812 bp, Emericella nidulans
aggacccagtcgtcgacgatgtcacgtactatgcgaggagagttgggttagacgtggagacgtataaagtgcagacggaagacggattcattcttacgctctggcacgtttacgatcctcatgaatatagtcctcttcctgccagcgagcgagggccacgcgggccacatgttttcggcggacagaaagatccaaagacatttggtgatgctcgtcggcggaaataccccgtactcttgatgcatggcctgttgcagaattctggcgcttattgtgcgaatgatgatgacagtcttgcattcttcctgtgcaagtctggatatgatgtttggctgggaaataaccgctgcgggcttgagccagagcatataacgatgctagagtctgatccccgcatgtggagctggacgattcagcatatgggtgctttcgacatgacggctctcatatcacgggttctctatgagacagggtatgagaaactgggtctggtatgccactcgcagggtacggcccaaacgttcgtggcgctggcaaaggaccaacgtcccgaactaggcgagcgcatctctgtcttctgtgctctagcaccagccgtattcgccggaccgcttgttgagcgcgtctactttcgatttatgagactaatatagaccggaacctttcggctcatctttggcatacactcgttcatccgcttcatggtcaccgatcgacggtggcttcatgctcacatatacaggcagataagctacattgtcttttgctacctagtcaactggacagacaggcgatgggactatgaactccta

SEQ ID NO: 23163 - DNA, 850 bp, Emericella nidulans
ggcgctgacggcgacggcaacggaaaatgttaaggtcgatgtgtacacaaccttagaatgcaggttgcgaagtattcacccaaagcttcaacaggccgaaccttacatatgaggttcgtcgcaagggaaagcatgccgaacttcttgacagcatagcggacacaatcaagtcaacgtatcgaaacaaatgtggcatcgtttattgcctctcacgaaacacctgcgaaaaggtagctgaagcccttcgaacaaactatagcatcaaagccgagcattaccatgcaggcttggatgcggaaacgcgcgcacggactcaacaacgatggcaagctggagatgtacatgttatagttgctacgattgctttcggtatgggtatcgataagccagatgtgcgatttgtaatacatcacagcattcccaagagcctggaaggatactaccaggaaaccggacgcgctgggcgtgatggcagacgctctggctgctacctttatttctctcaccgggatgtcagtacaatgcagagcatgatcgaaaagaacgaggattctgacgacgtacaaaaaggtcgacagaccagaatgctgaatgacgtggtgaaatactgtgagaatgcaaatgattgcaggagagttcagatacttgcatattttagcgaatcatttaagcgccaggactgcaatgcttcttgcgacaactgcaaatcaggggacacctttgaggtacaggatttttcagagcacgcctcagcagcaattaagattgttcggtactttcaggaacggaacgaaagggcaacactttcatactgtgtgaacatctttcgtggaacacgatgtcattcagg

SEQ ID NO: 23164 - DNA, 850 bp, Emericella nidulans
cgacgggcctgtacccaggacacaagtaagccccaccaagcacaaagtaaaaccgctgcccccgaagacaagacgctcgcgcggccgaagggcaacagtagacgaaaccgcctcccctatctcgaagacaagcatttcagaggaaagggggaacagcagtcctagccctttcacaacaacacctatcatcactacctctgatcaattcagccccgatatcgaacggcgagactcatcctccacgattcatagtcaaactcacgccctgccagtccctccagttcaacatcaacaacccccaccaacaactaacaaaacaacccgccgctcagcctctaatccgcctccggcggtcccgcctcctcgccgctccacccaccatcacctccacttctccagccactgcacacccgttgcaagcttaagcccttcgcgccttccatcgcaacaaggtagcatcacccccactgccaccggcactcaagcccagcttccgaaccaaggtcaaaaccagagccacaagcaagctcaaaagcccgaaccaccacggacacgccgttcgggccgcaaacatacattcaccgattcgtcagacacgtcgctgtccagtcacagccaaggcgtgaatagtattagcagctgtgcgagcaacggcagcggaagtagcggtgttgccacaacgttcttgcatccggattatcagtatcagtattctcataacaattcgtctgctcctgctcctggatttgctgccgcggcggttgggattgtggaaagagaagatgggaagactgcagaacctgaatcaggcgcgaatgggcatcagcttatcagtgttgaagaggctttg

SEQ ID NO: 23165 - DNA, 680 bp, Emericella nidulans
aaatcatgttcccctcatgctggaatggcaaggataccgactctgacgaccatgcctcccacgttgcctacccctcgctggtcatggacggcacttgccccgagggctttgagacccgcatcgtttcgctcttcttcgagaccatctggaacacctacgccttcaaggaccgcgacggatactttgccctttccaccggcgaccctactggattcggttaccacgccgatttcatgcacggctgggagtctggtgttctcgaggaagctgtcaagacctgcaccaacccctccggcgaggtcgaggactgccccgtgttcgaactccagtccgagctcgcgcaaaagctgtgcagcgttgacattcccgacatcctgtccagcgaagacgttaaaaaggtcaagggcggtcttcccaacaagattgccgtcgaatggggccctgagtacgccttccctatcaagtacgtcggcgaagagtcctcgactgccgtcccaacctccaccgctccccaaagcacctctgacgcgggtctgggcgtcagcctctcttccgctctcagcgatcttgccggcaacatcttcgccgctgatgctaaaactaccgaggctcccactaccacctcgacctcgacctcgacatggactccgacgcccaccacttcttatatcgagagcacc

SEQ ID NO: 23166 - DNA, 500 bp, Emericella nidulans
atctcgacaacagtcaacatgtcttcatctctctggacccctacaccaccccccagccgaacgccctacgcaataccccagctagaaggagaacgtcttacgattcccggcagcaagggcacatttcggatccttgcgtcctcaaagcagaccaatggcttgatggccgtattccaaagcggcgcgactctctccgacgcaccagggtttcattaccataaccacgcgcatgatgtgttcctcgttacaaagggctatcttaaactgtggaatggggacaagtgtcggattatggggcccggggattttgcctacgtgccgccggtacctaccacttaccctgtactcttcgcggaggctcgtgttaacgtgatcaggccgttgtccacaaccctgaactcctgggcccgcacactgagacctttggcgtcgtgaccccaggcgactggattgactttttccggtacatctccgagccgtataccggcatacttgttccc

SEQ ID NO: 23167 - DNA, 550 bp, Emericella nidulans
taaaccttatgtatatacttatgtatcatacacatacgatttaggtgacactagtataatactatgggatactggcgcctgcacatgaggaacgagcaattacctacttgatgaactggcagcactacctgccctcctataccagtacacattcacagatatctcctatgccctggccaccttggctcgcaagcgatacaaggcttacgatttcatgcgctatacaacgctagatattgagaatgatccttcacctgagttacagggacagtacgatatcataatatccacaaactgtatccacgccacccggaatttgatcacttcctgcacaaacattcggaggttgctacgccccgaaggcattttgtgcctgattgagttgacgaggaatttgttctggtttgacctcgtctttggtcttctcgagggctggtggctgtttaacgatggtcgttcgcatgctttggctcacgagcgtctctgggaccacaacctacggcaagcttggattcaactgggtagattggacagacaacgactctgccga

SEQ ID NO: 23168 - DNA, 850 bp, Emericella nidulans
gaccggaatcacatcgacgctgtctcttctctcctctggagagtctctgccacagcatctttttataccatctcgacactctacgtctctttccgaagaggaccggaactacctagcaagtaagggcgttttagatctacccagcagcgtcgcttgtcaatgccttcttcaagcatatttccgtcatgttcacactatcatgccgatcattgaggcagatcagatactgcactttttccaggccgggagactgcaagagtataacttgcttctggtgtggagcgtgtttttcgttgctgtaaacgtaaggtttggtaaaagatgatggtatgttcgaaagctaatagctcatagtttatcccgtcgaatatatgcgagcgagaaggatatgagtctaagaaagtaatgaaagcggccatatactcccgcgccaaggtaaggaatccttcaagtcttactgcaccacggccaacgagaaagaaaaacagtgcctatacaataatagtggtgagcgggacaagattgttctcctccaagcctctcttcttttgggcttctggcactccgaagccgatgagcattcgcaaccatggtattggagcggtatctctgtcagtctttgccagatgctgggactgcatcgcaatcccgacacaccgcgatacaacacagccatcatggaccgtcagcgtcatttgtggcgtcgcctctggtggacgtgcttcctgcgtgaccggtggttgagccttactttagggcgaccgctacgtattgatctggacgattgcgatgttccgatgccatcagtctcagatatcatatacgacttcagggatgtcgaccctacggt

SEQ ID NO: 23169 - DNA, 500 bp, Emericella nidulans
ggccgcagccacaatatctcctacatcgacaagcatgccctaccactcgctcccattgagcattgtgagcccacctggcaagctcgaaatgaaccgtgacagtgcaccgacagcaaatgcggacgagaatgaggacaccaacgcagatcctccatattcgcaactcatctacgaagctctctcagccgcgcccgggaagaaattacctcttcagggtatctatttatggtttgaaaagaacacagccaaggggaaggatcggagctcgaagggttggcagaacagcatccgacacaatctgtccatgaatgcagtaagtccgctttcgtttatttctgaagtgtctgctgacctggttgacaagggctttgaagctgttcgggaagagtctacgccagggaagaaggcagtaaactattggcgcctgacggatgaggccgtaagcaacggcatccaatctacaacccggtatagaaaacaggcgaattacaaaaagccag

SEQ ID NO: 23170 - DNA, 500 bp, Emericella nidulans
gagcggaaggtcaattttgtcgacaatcttgtgggtgagtgaaaaatacaggaacttggaagaatccgtgctaagttgtgatataagacactgcctccatgatcgtcgaaaccatctggcctttatccgcggtctcactgcggagtgattcagctacaggatgcaagggtgtcttgcctctgcgtacctttattcaagaaacactccgccggtcgcggacgagctacagcacgttgcaggtagcgctctactacttgatcaagatcaaggcgcacgtgccaagttcagaacagacgcaggatcagtcgcgatcgagaccagtctgccgggccatgcagtgtggccgacgcatgttcttagctgctttgatccttgcctcaaaatatcttcaggaccggaactattccgctcgtgcctggagaaagatatctggtctgaacacagcagaaatcaaccaaaatgaactgctattcctggaagctgttactgaaaactcgcat

SEQ ID NO: 23171 - DNA, 850 bp, Emericella nidulans
cgtcttcgtgggatgaagtacttgcgtcttgacggttctacaaaatccgatgaccgatcagacttgctgaagctcttcaatgccccagactctgagtatttctgcttcttgctctcaacacgtgctggtggtctcggcttaaatctgcaaaccgctgatactgtcatcattttcgattccgactggaatcctcaccaggatctccaagcccaagatcgtgcgcaccgtatcggtcagaagaacgaggtcagaatcttgcgactcatcacctctaattctgtcgaagagaagattttggagcgagctcaatttaaactcgacatccaccgcaaggtcattcaagcgggaaaattcgataacaagtctaccaacgaagaacgagatgcactcttgcgtactctgctcgagactgctgaggctacagatcaagccggagaccaggatgagatggatgatgatgacctgaacaacataatggctcgatcagacgaggaattggcggttttccagcgcatggatagggaacggcagaagacgtgtccatacggccctggccacaagctgccccgtctgatgggcgagagtgaactcccagagatctacgtgactgaagagaaccccgtcgcggaagaagctgctgagatagagctttctggtcacggtgctcgcgagcgtaagattactcgctacgacgacggcctcacagaagagcaatggcttatggcggtggatgccgatgacgacaccatcgaggatgcgattgcacggaaagaggcgagggttgagaagcgtcgttccaacaaggagaagcgtggtcgtaaggcgcaaggcgacgagtcgtcgcccgagc

SEQ ID NO: 23172 - DNA, 850 bp, Emericella nidulans
agctttgctgatatcttccagaccggccagcacctcagcgcaggcgagcgtgctgggagactctccgcacgcgcagcgaaggagctcggtctgccccctgggattgccgtcggggctggggtgatcgatgcctatgcagggtggattggcactgtcggcaccaagatcgatggcgttgacgtagtgggcaatcacaacagggcagacgctttcaatcgtctcgccgcagtagcagggacatcaacctgccacatcgccatgtcttccaatccggttttcgtccccggcgtatggggtccatatcgcgataccgtcttccgtgggtgctggatggccgaaggaggccagtctgccacgggtcagctgctgaaacatgttctcgacacccatcccgcatcgaaatctgcctttgccgttgctgctgaccgcgggttggatattttttcgtttctagacggccatctcgctgcactagctgcgaaacagaacctaccgtgtatcgccgctctcgcccgacacttcttcttctacggcgacttcttcgggaacagatcacccctggcggacccgaacatgaccgggtccgtcgttggtctcactgccgatacctcgattgacagcctggccatacattactacggcacgctcgagttcatcgcactgcagacgagacaaatcgtcgagacgatgaacaaggctgggcatgctattacctcgatctttatgtctggatcgcagtgtaagaataggactctagtcaaactcatcgccacgggtgcaacatgcccgttattgtcccgcgagccgccacgtcgaggccgcggtgtgtcatggagcagccatgttgggc

SEQ ID NO: 23173 - DNA, 500 bp, Emericella nidulans
cattagtggccatgaagagcctgacgctgagaaaccagagtgtttcggaccagggagcgatatagcaaacgatgacccagccactcttctagcaactattcacgggacgcatttgctcgtagtcaacaagttctgcatgttccggccgcaactactgctactgacaagcgactcgtaccggcgacaacgggagccactggacctagttgatctgagtgctgcttgcacggtcttgaccttgttcgatacatcgtcgcaatttgtcatttataactgtgggccgacgggtggtgctagtaggcagcataagcatctgcaggtattgccgcggccgccgagactattcccagatgacgagaatgacaacaaagctgtgccgtacaaatatttccttcgttatctccgtgacgttgagctcggaagtccagaggggcaaaagaagctttttgaggtatacagggaattgctcgccgaggccaagcagtctctccgggggtatc

SEQ ID NO: 23174 - DNA, 850 bp, Emericella nidulans
attgatgccgccctggctgttatctcgtctgccgggatttatcttcttctgtatgcccaaccctgtccatgtcattaagatatggcttggcaggctaattgtagcaggtggtcaacgcagacctttaccatagcgcaaatgacgccaatctggatttttccggcctatcctatgctgataattgggcctcatgctgggctttatgcgctaagttgaagccctctagagccctgcccatcattgttgggggcacgactatccagggagtggggttcctggtttcattgatggtgtattcggccttcatctaccgattgatgtcccagaagctgccaagggagaatatccggcctgggatgtttgtctctgttggcccaagcgcatttacggtagcaggacttgtgactatggctgctcaggcgaacagtgttttcccggatgattttatgggcgacggcattttggccgccaacgtcttaaagatcgtggtcaattttgcctccttatggctctgggggtgagtacttttgctgccacagatttccaagctgacctctcagtcttgcaatattcttcttcttcatcgcaagcttcgcgcacctatccgccatcggccctgggcgaatgattttcacgatgggctggttctcgtttgtctttccgaatactgcgctgatcacgtcgacatttgcagtgggaaatgcattttcctgcaaacctattctaattatagggtgtgtcatggttattcctcttgtgctgatgtggctcttcgttgtttatatgatgatccgcgctataatcttacgtcacatcctctggccacagaaaggagaagacaaagacgagg

SEQ ID NO: 23175 - DNA, 500 bp, Emericella nidulans
ccacacctgcagagcgcaacgggcagctaactgtgggcgccgaggttgtgttcaaacacaacaaaaacaagcaaggcgtggagggtgagggcatccagtgtatcataaagggaataacaggtgagggaaacaagaaaaggtgggtcagatctatacatcttcattttttacgcacggttgaccgatgcatatctcgtgaagatacgacgtgcaggacccggaacccaacgagaacggcgaacaaggggctgtctataagactacggcggtgtccttgattccaattccacggatagggtccgcattgccttcgttcccagttggaaaacaagtccttgcacggtaccctgacacaaccacattctaccgtgcagaagtgatgggtttgaagaaagacacctaccgtctcaaatttgaaggcgaggaagatgacaaagagatggaggtagaccgacggtttgttctagacataggtggcaagtgaaaatgcggtttgggcg

SEQ ID NO: 23176 - DNA, 850 bp, Emericella nidulans
tattgatggaggttcgacttccattctgctgagagaactggcgttagcttacagcaaccaacatccgcccggacccggtccgctgttcagcgaatacattaaatacctcagagaacagccaacggctgaagctctcgaatactggaagcggcgtctttctgatatgcctccatgtcacctgccaattaatgcgagtgaaaatggagctcgtcaacttggaactcacttggttgcgttcaatcgctttgctgcacttcaaagcttctgcgaggctaattcgatcacatttgccaatttgatccttgcagtatgggcgatagttcttcggagccacacaaagtctgatgacgtctgcttcggctatccatctactggccgtgacttgcctgtccccgggattcaggatgcggtgggaatattcatcaatactttgtgttgcagggtcagatttgataccaaccagactttgaagggtactgtcaagtctgtacaggaagatcatattgccagccttgcgtaccagcggtcttcacttgccgaaattcagcatgcccttggtaggaagggagagccgttattcaacacgtgcatatccatacagaaccgttcggaagataagaccgagattgctgggatatcgtatgagtttcagaaggcacacgatccttgcgaggtaggttgaaaaccctctatgggaggtttcagactaacaagatcttagtatcccctgacattaaacgtcgaaagcgcaagaggatacgagggtattctgctgaggtattgggctgatgctgtctcagagacagaagcggctgcctttgcccgtgatattgcaaaagtcttgacatgt

SEQ ID NO: 23177 - DNA, 500 bp, Emericella nidulans
tcattccaaactgtcacgtggtgatatccacagcatgtggtccacctaccgaggtcaggactcctttggattaaatctaaaactagatactagccagtttactattcgtcttggagacatccttcgttttaactgctgtaattgtaatgtctgacgacagtgacaagcggaaatcggtcctaatcacggggtaagcctatccttaacattgggctacactgtagctagctcgactcagggaatccctactgagccttgcctatcctttgatacagctgcgctcccggaggaatagggaatgctcttgctcgtgaattttacagaaatggtctgcgagtatttgcaacagctcgaaatgcgagtcagcttgaggatcttgaagccataggcatcgagacgctgagtttgaccgtcgacgatgaagatagcgtccaattatgctttgcagaggtggagaggagactgggtcataagggtctagattatctggtgaacaacgc

SEQ ID NO: 23178 - DNA, 668 bp, Emericella nidulans
cccgattctcactttcggaaactcgattatcctccctaatcgctacgctcacgagatacgaaacaatgaccttctcagcttccgggatggcttggagaaggtgcgtgtttccaaaaacggcagcaaaatgagcaactgattgatgcctggctaggatttcctaaccacagtccccggcctggaagccatgttcaccggaacattccataaccatatagtctgggacacggcatccgcattttcgcgtaaactgggtgctctaattgagcccttaactacagagacgggaattttcctgcgagaaaattggtctgatgatacaggtgcgtctcccaccccccttacctccacctcattttcagaccctaagtccagagttaattgtggctagaatggcacgccatctccttaaacgagaccatgaacctcctcatcgcccagctgacagcgcgcatcttcatcggcgaggaactttgccgcaaccgcgactggatccagaatgccattagctacaccgcgcaccgcacagctgcaatgaaggaattgcattggtatggccggctcattccgctagcacactggtttctcccgtcctgcagggcgcttcgggggtgtgtgagggctggaagaccgtttgttgaacgtgttttggaagctcgtaggaccac

SEQ ID NO: 23179 - DNA, 850 bp, Emericella nidulans
aagcatgtcacaccagattttattgggaaatttgaaaaggcagctgatgtctttatgttcggagaggtctatgagcgatctgtcgacataatctgcgggtatcaaagcaatatcatgcccagcgtcactaactacccgatctacttcgctcttctcgacgccttcaccataggcgacacagaatcccttcccaatcaagtcgaaagcatgaagagcaaatgcccgagcgtgacgagtttaaccattttttctgaaaaccatgatctgccccgattcgcaagcttgaaggatgacataaatgtaagtcgccttaaaccttctgcgtcgcccattagactcaataatttcagctcgcgaaaaatatcctaacattcaccctcctcttcgacggccttcccattatttaccaagggcaagagcagcacttctccggctcaacagaccctcacaatcgcgaagccctttggccctctgcgtacgacacctcctccccactttacaacacgattcacacgctgaacacaatccgcaaacacgccatccagatcgaccctgactactacataaattacaacacataccctgtctaccgcggatcctctgaaatggccttccgcaagggccgtgagggcaggcagattatcatggttctctcaacgcaggggagcaatagcggggcttacacgatccgcatgatgaatggattccagccaagtgttgtcgcgagggatgtatttagttgtcggacttggacagtgaatgatatgggggaactgaggcttgatatggataaaggggagccgagagtgttgtttccggaggcgttaatgagagggagtgggctttgtgg

SEQ ID NO: 23180 - DNA, 523 bp, Emericella nidulans
  unsure (1)..(523): unsure at all n locations
cgcaggaaaaagacggccagtttacatatgagcttatgacaagagattccggtatgtaccaacgcgngagtgtcgcaaaagcgaagctaacatttctgtacgaaaagctattcttttagcgcaagagtctctgaatgagcatgcctcaacgttcctctacatctctgcatcctcaggcgccccgattcttccgagtagatacataacaaccaaacgagaagcggaaacaacgatagccactcagcttccagagttgcggagcatcttcgtccgccctccattcatgtatgattcgagcaggaagctcaccttgccgatcgccctcggcggcttcgttgcatcgcaactcaatgcgcttgtgggtaacagactaaatttctttggctcgatggtggacaagccgttccaagtggacatggtaggcgaggcggtggtggaagcgctggaagacccgtccgtaagcgggccggtcggaccaaagaagatcgaagccttggccactaaggcgtggagaaagagtatg

SEQ ID NO: 23181 - DNA, 570 bp, Emericella nidulans
ctcctaagaccgaagaagagtatgcgcagtccatgctgactcttcgcgccatcgtttcttccaaggaagcgggcgtcatcatcggcaaggcgggtaaaaacgtcgccgatttgcgcgatgagactggcgttaaggccggcgtaagcaaggtggttcccggcgttcatgatcgcgtccttaccgtgactggtgctctgagtggtactgctagagcttatgctctagtcgccaagggactgttggaaggagccccgcagatgggcatgggtggaattgtttccaacaacggcacccatcgtaagtcttacccattatgtactcacagactttgtcttggtcatggacgcctgcttacgttccttagctattcgactgttgatttctcataaccaaatgggcaccattatcggacggcagggattgaaaatcaagcatattcaggacgcttcgggtgtgcgtatggtcgctcagaaggagatgctgcctcagtccaccgaacgcattgttgaagtgcagggcaccccggaaggaattgagaaggccatctgggagattggaaagtgtcttatt

SEQ ID NO: 23182 - DNA, 850 bp, Emericella nidulans
ggccaagggatatgagtatggacgtactgctgttcatatcagcgagaccgatgagaacatcacaaggctggaaaccactgcggctatggagctagtcggttttattcagagcgaacgggtacgtactgctcgaacctacgactcgccttccgcgactgacattcccagtatgaccgatacatgcatttgtccaatagtcacatcatcatcgccaaccgtgctaatgacaaagcctcacttgcactatcctccttcatccatgccctgtttgaacttgagagttatgccgttgctcgtctggtcaccaaagagaacaaacctcctaccctagttctgctcgcaccttccatcgaaccagactacgagtgcctcctcgaagtgcaactaccattcgccgaggacgtccgaacataccgcttcccacctcttgaccatgtagttaccgtgtctgggaaggtggtaacgcagcatcgaaaccttccaaatgacgaccttcttgatgccatggacaaatacgtagatagcatggagctgaagggcacagacgaggatgggtaaactacccaacatgcctcgatatgtacacatcgctaacgaatacagagacctggtcaatacgcccttcccaattgatgactccttctcgccagttctacaccgcgtgaacgcgctgattcgctctcgagctatacacccaaacgaccccatcccgccaccagcaaggatcctcactcaattctcgcaaccaccagagcacctcctcaaaaacgcagaggccatctcaagaggcttattgaggtagctgacgtcaagaagggtactaagcaattttccccattccacaaagagt

SEQ ID NO: 23183 - DNA, 500 bp, Emericella nidulans
catattcctcttctatttgggatgccgttatcatgcacctccatgagaatgatttagctctttcgacatccgcccttctaggaattctaccgctggtcggtctagagaaattctccttgaaagaggggacaaagccggaaaagacacactttaacactatatacggtcatcttactcacatctcgtgccagatcattgaaaggttggccgatttcaaaccagaacatcttgatgaacttttcaagagtcaggatactggcagtgctcttgtgtctactctcttcgcagcggaccacaatacctatcaagccgctgtagacctcatcaagaatgttagcggccagtctgctcggagagacgcgatctcccacttgctacagtctttcttcactaccacgttgtacgggctcagctggtccttccgacggatttctaatatgaagacgtttgcctcggcaccgagaatgatacacaccggtactgatattgtggatcataga

SEQ ID NO: 23184 - DNA, 850 bp, Emericella nidulans
atgaaagaaaatgcttcgctttggggtgagacacaaaaagtattaatagaggtttatgaaactaagaatgacatctccagaaggatctactttgcagaagttgcttgaaagggacaacacttactgcagcggccagatgaagacgtttgtttgcaaagccgtccatatatttcaagagctggggatatgggccgcagagtactttatcagggcgtcggttgaggagcttctgagtcatgcctatgttcactcaaaaatcgacctagactatgacgagcgggagtacctcgtgaatatcctgtctaagtcaccggttcctgatatagacgtccactccactgaccccaaggattttcccgtctcccccaaattcgaggctttgatatcgttcttgatgagcaccgaagacataaacttctccggtctgatcttcgtggaacagcgagcggctgttaccgtcatgtcttacctgctctctacccacccctccacgagagatcgattccgcaccggcagcttcattgggatgtctaattccacaaataggaaaactatgctaggagaccttctctcggcaaaaatgcagcccgacacgttggatgacttccggtacggacggaagaacctgatagtcgcaactgatgtgttaaaagaggggattgatgtgagcgcctgcagtgtggtaatttgctacaacataccgaaaggctttgagtcgttcatccagcggcgtgggcgtgcccggcgtcaaaactcgacatattctatgatgttgtctacagaggatgacggctccacactggacaaatggcagaagttcgagaagatcatggaggaagcttgcctagag

SEQ ID NO: 23185 - DNA, 850 bp, Emericella nidulans
ctacctggagaggccgtcttaattgagaagggcggccagcccgttttccgtcaggtcgctcctcgcaaggcatacgctcctgacatcttgaatatgtctactttgctcgtcctgactccgtcattgatggtatcagcgtctaccgcagtggtcaacgtatgggtgatcgcctcgccgcgaagatactcaagagccttggtcccgaggttgtcaaggacattgacgtggtcatccccatcccggagacgtcaacaacctcggctgccgctgttgcccgttatctcgacaagccttactgccagggcttcgtcaagaaccgttacgtcttccgcactttcattatgccggaacaaaagacccgtcagaagggtgttcgccgtaagctgaatgctatgcaaaccgaattcaaggaccgaaatgtccttctcgtcgacgatagtattgttcggggaacaacgagtcgggaaattgttacaatggctcgtgaagctggtgccaagaaggtttactttgccagctgctctccggaaatcacgtatgtccaatgtacctatcatgttattcctgggtcatctgctaatatttgacagtcacgctcacatctatggtatcgaccttgcatctcctaacgagctagttgcacataaccgtgacactgagaccatcgccaagcacatcggtgcggacagcgtcatctaccagacgcttgaagacctcaagggtgcctgcgctgagattgctcaagaaaacggcctggagcatccgcgtaatttcgaagttggcgtcttttgcggcaattatatcaccccagtttctgaaggctacttcgatcacctggaaaaaatccggg

SEQ ID NO: 23186 - DNA, 518 bp, Emericella nidulans
aagtgcaacatctgtgaccgtcggtttaagaagacggagcatttcaagcgccatgaacgatcacgtcagtgcagtgattctgctgagaagtatctttactgacatgctctagacaccaaggaaaagccttacgagtgtagtgtctgccataagcgattttcccgcaggtgagttaactccaacctgcaccaactgcgacgctgatcgctatcccaacagcgatgtgttgagccgtcacgccaaaggacataatacgaatggaacagctgcgactgcgactccggcgcagaataagccgcgcgctccgtcgaccgcccagcctcccactcctcagcaaccgcccgctcagaccgatcctgcccgcttcctgtcaatggacggcgatgctcatccgtcgcacaatctccctgtcgcgccgcgcgatatctcgctttccaatcctgcccacctccagtcttcgtcgctgcactttgtcgcggacatcttcgcccaccatggtccgggccgacccgatgtcg

SEQ ID NO: 23187 - DNA, 850 bp, Emericella nidulans
ggatggactgtggaattgctgaaaaggtggtctctgtggtgggccacagctttggggagattacagccctctgtgtttcaggcgtgctcagtctagaggactcagtcaagttgatcgctggccgagccaagctagtgcagaccgcttggggggctgactctggttccatgatggccatcgaggccgacggagccgtggtgcaagatctgttacaggaatcaaacgcaagatccgacggaaccgcaggcattgcatgctacaacggccctcgcagcttcaccgtggctggatcaaccaaggccattgacgcatttcgacgtacgctgccaggaaaggaggtcaagagcaagcgtctaaacgtcaccaatgcattccactccgccttagtagagagcattgtcgaccgtctaggggaggttgggaaggaagtcaccttccatgacgccgtcatccccatagaacgagctactgagcatagcggcgacgctacgttggactggacctttgtcggctcgcacatgcgccggccggtcttcttcaaccacgctgtacagcgactcgcagagaagtatcccgatgccatcttccttgaagctgggtccaactcgaccatcaccgtcatggcgtcgcgggcccttgccaaccctaagtcgacgcatcacttccagtccatctccatcaccaatacaaacaagggcatcgccaggctcaccgatgcaacggtcgacctttggaaacagggcctacgggtgtccttctgggcccaccaccgcttccagaaggacgagtatgcgcagcttctcctgccgccttaccagttcgaaaagacacggcactggctcgagctcaa

SEQ ID NO: 23188 - DNA, 782 bp, Emericella nidulans
cagcgccattgaaggagatagctcgatagagacattggtcaagacacaagatccgcatggtgattcaatattaatgatggcggttgagagtcgccgagctgaagctctcaaatatctcctaagcttgggcgagtattactcggttactgacgtacttgaggatacgaacacagatggaaccactttactcagtgctgctgttcagcttgctcaaaccgagattgttgaccttctactcgactatctaacagcggcagctgacgagggtgccatcacatcttatttacgcaagtttgacgagcgagggcgcacagccgcacattatctatttagcacgcccgcagtaatgcgaagactcaaaggattactcccctggcgccaacgtgataagcttggacagacgccgcttttcgcgttgtgtagatcatacgaccatcctgaatacaaggcaatggtgaacgaggccctcacagcagctcaagagtctcaaggggatggcgagcctttgcacctcgacgatcacgtcgactccagaggcaatactctcctgcacatcgtcagcgatcccgaaatcaccatacgcatcctcagagaaagtgactgtgacccaaacgccaccaatgacaagaaattcacgcctttaatgatggccagtaaatatgggcgtgtcgaccaagttcgcatcctcttctcggactcaagagtggatcatcacctcaaggaatcccgtggattgactgctatcgagcttgccaaggatgatgaagttcgaaaccgcattg

SEQ ID NO: 23189 - DNA, 614 bp, Emericella nidulans
gcatatcacatcgaaggcccagcaacacaacagccacacatagcgagcataaaatacacaccatggcctcaaactactcgcccaaatactttaatatcaatttcccacaagaatatgtcgcccacgtcgagatcaaccggccgaaccagctaaatgcgttcttcgaggcgtatgtccgcaatacaagctacccctcccgtccctcataaccttacggagcaacgatgagctaacgtttatatgagtttgtagcatgtggctcgaactcggccaactcttcgcccagctctctactgaccccgccgttcgcgcaatagtcatctccggcgctggcactaaagcattcacagccggcctcgatgtaaaagccgcgtcgcagggcctcctatcatcagactccaaggccagtgaccccgcgcgcaaggctgtgcacctccgccgcgaagtcggctcgttccaagattgcgtctcatccattgagaaatgcgagaagcccgtcatcgtcgccatgcatggtttctcactcggtctggcgattgacctctcctctgctgcggatgtgcgcttctgtgcgaaagatacgcgcttcgcggttaaagaagtggatattgggc

SEQ ID NO: 23190 - DNA, 500 bp, Emericella nidulans
acccatggcttccagttcagcattaagctaactctgaatagcccgccctgctctccctaacgctcacagctctcctcgcaactcctgtccttgcattcttgcttgtcctcttcggtgccccgctaacgacccaccacgcgctgaccttcctctgcgcggcacatatggccgtcctctcaactttcccgcttatctacacacacggcgttgatggccccgtgtggagagagatctggggagcggcgagaccatttgatactgtgtggggtggcgctctgggaacttgtttgggtgcctggcttggggcagtgccgattccgttggattggtatgtctagcatgatttttctccccattttttcttttccttcaagcgtggatggctgacttgttatttgtgtgtgtgtagggatcgtccgtggcaggcgtatccgattaccattttaacaggggcgtatgcggggtttgcgctcgggatgcttgtggggagggtcaaaggt

SEQ ID NO: 23191 - DNA, 850 bp, Emericella nidulans
tatcgctcgtgacaaacatgcacgactccgaagtcaagttgaagggcttgttggttctttgaagacgtcgcaagacgaagaagtacttggggacatatcggagcagctcttggccgtcttctgcgatttccctgagacgaagaacataataattagcgcccatggcatgttaccaatattggagattcttgacctatgccgccgccgcgacattactttgtgcctactgaaaattgtcaatgcaatcatctatgatgattacgaaatacaggaaaatctctgctttgtcggcggtattcccatcattaacgaattcgcggcgaaaaaatatccccgggaaatacggctcgaagcagcagcgtttgttcaacagatgtaccaaacatcaacccttacccttcaaatgtttgtcagcgcgggagggttaaatgttcttgttgagtttttggaggacgattacgaggatgaacgtgaccttgttctggtaggagtgaatggcatctggagtgtttttgagttacaggtgcgtagcagcatctctttctgttgcaacgggtaccgatattgacactacacagggctcgactcccaaaaacgacttttgcagaattttatcacgcagctccgttttggatcctttgtcccttgtgttgagccgagtgttggacgaagaaggcgagttggccgaggtcgtggaaggccgcattgcaaatatcttcttcatcttctcgcaagctgagaatcatgtcaaagaaatggtatcggagcgcacagtcttacatagtaagggctttgatgcatggatatgttttcaggtactgacgatggcttaggggtttaaaagaattga

SEQ ID NO: 23192 - DNA, 631 bp, Emericella nidulans
acttggatgtccgagatctctaggtggacgactgggctcaggccaatggcataccatggaggcagtgaagaaagagaaaacctgcgcacatgcttcagacaacagggggccgagccttggaatattgttgtaacgacctatgagacactttgcagtgatctctggttctttcagaagacactttgggcacatgtggtcctcgacgagggccaccgcataaagaacagcaggtctaagcgaacgcagggagtttacagacttcgttcagagaataggattgtgcttacagggtaggcactagtcaagcacaccgccattacatgaactgacattcctccttccagcacacctattcaaaacgatctaactgaactgtggtctattttacattggctgtacccggatgttttcgtgccagccacggccaagcttttcgaaaacgcgttttccttgacagacggaaagtttgacagcatatttctcagccacattacccgcttcctaaaagttgtaatgctacgccgaaccaaatgtgattctcagatcgggctggatttaccaccgaagaaagagactgtgttttcggtgccactcaccgagttgcaactgggttggtatcgcacgatactca

SEQ ID NO: 23193 - DNA, 500 bp, Emericella nidulans
  unsure (1)..(500): unsure at all n locations
acataaccccgttgcagagactccaccctactatctgncggcatctagcaagattctcagctctgttgatcttcttccgctatgattaaactcatagcatcactctacattctgcctctgtgccgtcgtgcgagacagctgacaaggaattcaccagtgcgagaagttctccaagaaagaagaagccctcgagaagattcgtaacggggcgaagttcgatgaggttgcgagagagtattcagaggacaaagccaggcagggtaagtactttccctctcattcgcctttttgcatttccgtgtctatctacaagcgcaagcaagtacttatacgcccgtttgactacaggcggctccctagggtggaagagcaagggcgagctagagcttccgttcgaggaggttgctttctcgctggagcagagtacgactgggaacccgaagattggggaggcaaagactgggtacggataccatattattatggtggaggggaggaag

SEQ ID NO: 23194 - DNA, 701 bp, Emericella nidulans
caagaggctaggtgcagagcagacactacgcaggaaataattcaccagaaagccacagagcaagcacttccaaaatcttccaaatcacctctcctccttcgaatgccaaacggcacggcgaagatcaactggccctacctattccgacagcgcaggcgcttggaggagaattggaccaaaggacgattcacgaattttcaacttccgcaccccgcgcatatggaggaagctcatcaggaatgcgtatatgctatccagttcatcgggaaatggcttgtcagtggcagccgagacaaaactgtccgagtttgggaccttaacacaaaaaggctctggcatcgccccttgattggacatacgaaatctgttctgtgccttcagtttaacccgagcccgtccgaagacattatcatatctgggagtagcgacaagaacgtcattgtctggaggttttcgacaggcgagaagatccatgagatcgcccctgcgcatgatgattcggtcctgaacctccgatttgatcatcgttatctcgtgacctgttcgaaagacaaacttatcaagatttggaatcggaagaacctgtcaccagccgacaaggattatcctagcgttcatcagggctcgggaaattcatatccgtcatatatcgtcgacacgagcgtgataccttctcctgtactagaagaataaatagctga

SEQ ID NO: 23195 - DNA, 500 bp, Emericella nidulans
atgggttcaatcgctcccagctcagacgtgtcagtcaacaatcccttccgaacccgcattctcaacgcccagatcacgcccgtcctgacccttaaattctggaccggtaatgaagcagcgctgatggcccggttcgccggctttgaggccgtcttcattgatatggagcactcggcccttaacttccagacggtcgcacagctcatcctctcctgtctgagtgtggggatttcgccaatcgtccgctccccgtccaagtcacactggcatatcagtcgcattctggatgctggcgccgctgctgttgtggtgccgcatgtcgattcagttgaggaggtgagggagttggtaaaccatgccaagtatccgccgctggggagcagggggtccgcgaacaatcaacctatccttgggtttcggagtgtgccgaccaacgtgcaaaatgaagtgctgaatcgagagacgatgctgatccctatgatcgagacgccggaggcagt

SEQ ID NO: 23196 - DNA, 850 bp, Emericella nidulans
attgtacgagaaggaggcttaacagaatgcttaacataccttgactttttccctacgagtacccaacgatccgcagtaacaacgggcgccaatttgttgccggaatttggcgtacgattccttccccgtctgtgcgagatgtcatgcccaccctccatgaacgttctatctagcaatgatccgaaggtcgttgaacaaggctgcctatgtgtttctcggatagtggaaagctttagacacaaaccagagaagcttgaggagcttattagcccggagatgctaaaggcggtccttcgtctgctgctgccaggcaccacaaacctcatcggaccgcacattcatacccagtttcttcgagttctggcaatcacgtcgaaagctagcccccggctgtcggtagaactgctgaaaacggacgtagtcgacactctctaccagatcttgactggagtctcgccaccagaaaacattgatgaccaagctatcaagatggatagcgtacttgtgatgcaggctttgattcaccggccgaaggagcaagttaccgaaacactgaatgttatttgtgagctcctaccaggtgttcccgagcgtccaaactcgcatgacgctggtaatcccgaggtcgctgcaacatcggggtccaagccatcctcatcgaaggggttagctgagaaacgacggtctttgctcatgggctgtaaatctgagctgagacggttcgccttggtcttgctccccacactcactgatgcgttttctagcacggtcaacctggaagtacgccaaaaggttcttgtggcgcacgtcaagatgttgcaaaatctggatcctgctttgattgaggagg

SEQ ID NO: 23197 - DNA, 850 bp, Emericella nidulans
tatgatctgcatcgaaccggattggagtactgccggtttcagggccatagccgccaggtccatcgtctagctttcaacccgcaccaaccagcatggcttctttccgggagtcaggacgcccatattcggatgtgggatttgcggaccgtgcctacggatcgtggcgtttcagtatgtggaagcagagaccaatataacagcaatagcgacgctgtccgtgatgtcaggtggtctcccggcgacggagtcttgtttgcggttgctaccgatagcggcgcaatccaactatgggacattcgcaaatcgagcagtcccattttgcggattaccgcccacgataggccatgctattccgtagattggcacccggacggaaagcatatagtcagcggcggtacggatagacaggtcaaagtctgggagttttcaatcactgccgagcgcaggcagaagccgttatttcagtttaggacgcctcaggcggttctcaacgtccgatggcgtccgccttcgtggtccagagaatcggatagctccggggactggcagtcatcacaagtagtgacttcatacgacaaagaagacccgcgggttcatctctgggattttcgccggcctcatattcctttcagagagtttgacagatacgactcaactgctacagacttactttggcattctaaagatcttctttggactgtaggtgatggcggcgttttcactcagactgatgtacggtacgctcctcaggtggttaatcagcgcccaacctgctcggtggcctggagtcccagcggcaaggttctcgcttttgctcaaaagcgccctaggaggagcattcgaggtctca

SEQ ID NO: 23198 - DNA, 850 bp, Emericella nidulans
aaatccgcgcataccatctcttggagcattcaaccgcacaagaagtcgctgaacttcggcatgtatgagcatcccggccagtccggcattctcagtacccctagtctgacctcagctgataccccgagcaacgattcgagtgagaacctcgcaaatggcggtgccagctcgaggcagagtgcctcgcgttcgcttagcgacaaattgacggccatgggtctgaagcagattcgatgggttggcagatgtgaggcggataagattgtccaggggacatatgatgtgccccctaacgagggcggaaattacgcacttgtctttgacaacacattttcgaagcaaatatccaaaaccgtgaccctcgttcttcttacttacccaactgctctacctccacaatcggttcctactacacatgcggccagccaaccaggtggtgataccgagtcctcatcgtcgcgccggcggggcaatagcataatggccaaaatgccgccgcaaatccaggtccaggagggagatgggacaacaatacacaccgggcttctgctcaagcgtcgccgtaagcgccatcagggatgggcgcggcggttcttctccctcgacttttcgacgtctacgctgtcctatttccacgacgccaactctgctactctgcgtggctcaattccgttgagtctagccgctgtggcctgcaatgagacttctcgcgagatctccatcgactccggaactgaagtatggcatctacgcgctcgcaatgagtccgaatttacgtcctggaagcgcgtcttggagaaggcctcatcctccaagggcgccggcgatgagggtcattccccgagacatc

SEQ ID NO: 23199 - DNA, 649 bp, Emericella nidulans
tcgcgggttgaaggcgacgctctgatagtgtccatccgaccggaatcattagaaagaatgcttcagcttaatggctttacttttgcaggagcgcctcttaccatcgaaaaatacgaccaggaaaccgctccattattgaatcactcgattccggcacaaaacggtacaactccatctaccgcagacacaaaatcgaaaatgacggcgatactggggaggcggtattaccaacaatccaaattgctcgatctgtctaagctggggaccgacccagatctagtggctatgggcatatttggcacaacttccactgaatccaagttcttccctgcgctcatgaaggtgtgggagctgaactttgataacgccacggcgcgacgtgatgctgtcgaaagtgtcagccttgctgacaatcaactctctaatatctccgtcgttacgacgctttcccaaacattccccgatttaaagaaccttgacctgtcgaacaataactttgccgacgcacaggcacttataggatggcggtggaaatttcgcaaactgcagttcctcgatctcactggcaatcccttcagtgctgatcccaacttcaaggatactatgcttaaatggtatccgaactcaagagtttgatcaacacccaggt

SEQ ID NO: 23200 - DNA, 588 bp, Emericella nidulans
tcctctcttctcgaagcgactaagctgcttctattgcggtcgtcgctctgcacagcctggaaaaggccctctccgaaaatggcaatgtaaacactgtgaggccgtcaactatctcgacgaagtacgtcactcttttgtgtttctcccctgtacaactactaataaactgccttaatagaatggagatataacagatcctcctgccaccgaaacgaatccagatccgcctacacccggcccaacaaaatcttctcttgaatccgttgacataggtttgacgggctcggacttgttttgtgcccagtgtgtgcggaaccaacaccttttcactagtgctttggcatcctacttcccgccctcagacgatccgaattatagcgcatacgaaagggaatatcccaaattccgaaaaaatctagaagagcggtatcctcaagtgtgcgatcaatgtgaacctcgtgtgaaggcgcgcatccgccaggccggatacgaagcaaagtcagaccatctgcggcgaatgatggacaggagtaaagcaggaaaagcagcgcgcaaagcgcgacaatggaactggaggagtcttttggt

SEQ ID NO: 23201 - DNA, 850 bp, Emericella nidulans
  unsure (1)..(850): unsure at all n locations
ttactatagccgaacatcatgtacgatgttgagcacccggcgtataaggaactgggtaaaataggcaaggaaattacaaccaaggtcaagccgcgtgccgttgtagtgttctcggcgcactggcaaggtggtgatgatacggttcaagtcaatacggctgagatgacggagttgatctacgagtacgtatacccgcccttctctatgcgcgtcaactgagaccagttgatactcgtagtttctatggattccccagccactactacaaggagaagtaccccaatgttggtagcaaggagattgccaacaaggtgctcgacgcgcttcagcaggctgggatcaaggccgagggtgtcaagaggggattggaccatggggtttgggcaagcttcaagtgcggtaggtgccagatccagcaggagccatgcgcgaatcgacaaagctaatacgagcaaagcgtttgagcctgaatcaaaccnccttaaatgttcccatcgtgcaagtgtcaatgttcgatacagaagaccctatgcagcactaccggctcggagaagcggtgtctaagctccgcgaggaaaacatcctgatcattgtgtctggaatggcagtccacaatctgcgcgatttccggttcacttttaatgatgctcggcccttgccgtataccgttagctttgacgaggcgctcaaagacgcagctaccaagcccccggccgagaggcctcaggcgttggttgatctgctgaaacggggggatgcgcgacaggcgcacccgtattttgaccaccttcttcccattcacgtgggcgctggagctgcgggggaggatcggggcgagaggttatggacc

SEQ ID NO: 23202 - DNA, 850 bp, Emericella nidulans
  unsure (1)..(850): unsure at all n locations
ttgcctcacaaatcctgccttacaagaaccaccgtgtcctcttcatagacaagggagagaacgggcccgaagcggagaacgttctgaagatgcttaaaaagctggacttggaaccgttggtcgtgcgtaatgaggatcatgtgccgccaccagagatccaagatccttccggcaaggagtccggtcatgcctacgatgtaataatcgtggattctgtgaacacagcccgaatgcttcggacgtacgatgactttaaatacgtccccatcgtgctggtttgtccactggtctgcgttagcttgaagtcggccctggatctcggaatcagttcctacatgacgacaccatgcgagccgattgatctgggcaatggcatgttacctgcgctcgaggggcgctccacacccataactaccgaccactcgcgctctttcgacattcttttagctgaggacaacgacgttaatcagaaattggccgtgaagatccttgagaaacacaaccacaacgtatcgngtggttggcaacggcctcgaagccgtcgaagccgttaaacagcgccgctacgatgtcatactgatggacgtccaaatgccggttatgggtgggttcgaagccactggcaagatccgcgaatacgaacgagacagcggtctgagcagaacacccattatcgctcttacagcccacgccatgttgggtgaccgcgagaagtgtatacaagcacagatggacgagtacttatccaagccactgaagcaaaatcagatgatgcaaaccatcctgaaatgcgctacgctaggtgggtctcttctggaaaagagcaaggagtcccgcatttcgagcagtg

SEQ ID NO: 23203 - DNA, 500 bp, Emericella nidulans
ttagcagagaatggctctcaaactgtcatgatttctccgctctattcgtgcttatacctcaataatccctagactgaggctgcgccgtcggagatcggggcggactgcccgctgcagcacaagatgtaccatctggccaagtctttgtacatgtacgctaccagcaaagagggtgcgtagcatgctgggccccctatatatgcctactaacgcccgtgcggtcatatagaatactccgtccttcttctcggtttagataatgcaggcaagactacgctcctttcccagatcaaagccctctaccagcatcgacctgatggcacgcctgcgcccaaccccggcaggaccgtaccaaccgtagggcaaaatgtcagcacaatatcattgccggacatgtcttgaagatctgggatgtcggtggacagatttccatgcggaacctctggcagagctactattccagctgtcatgcgatcatctttgtggtggacagtacagac

SEQ ID NO: 23204 - DNA, 774 bp, Emericella nidulans
gcaacgggccgtctgccatgatcctctcctatattcttcacggccattttccttattattcgtctcagaatccacatcccgatccgctactgcacgcaaagctgaaggatgcaccggcgctgctgggggccgacgtagatgcgttaactgagcacttctcagcctcgcgtttgtcatactccactcaggctctccccgtaaatgtgctgttggatacccttgtccggccaagtgtcgacgttgaagaactgcaaagtatcaccaatgtggaatggcgatatgagcctgaaaaagtcgtgcctcacatagtgctaggaaatgcgccacgacccggtggtcaatggactgagaatccgatgccagcgagctgggagattcagacactgagctatgcctcaatgctttcattacctggatattctttcgccgaccattaccgcaaaactacagggaaagacctccccgcgtacacccgacccagcagacagcagacggcggactattttcggatgtatcccgaagccgtcgggattgatgacgccttctactctaacgaaaacgtatggggtgtcacacgaatccaggatggattttttattcagtcgcataatatccgctgcaaacatctagtcttggcgagcgggtatcattttctgaagttcttcagccacgcccgcttataagacctcttacatcgtttcagccgattgcagaaacgccattgcttgtcaaaggatcccccttctccgcagctgatgtgatcattgagggccg

SEQ ID NO: 23205 - DNA, 559 bp, Emericella nidulans
tttgccgagtttgtggctgtagatcagcgggcagccgtagctcttcctgacggtaggcaatcactccacattgcgcattctatcgacgagtcaaaaaccgacaagtcaaaagcgctatatcgcatgtatcctgagccaggtaggtaagaatactgactcgatgtaggcgtgcctccagaaatcggggcagtcgcaaccgacgctgtattaacagcataccatggcatcgtgcgccgcgctcaagttaagagtcacgagacggtctttctcttcggtctaggtggactagggttcaacgcgctccagatagttctgagccatataaaggctagggtgatcgtctcggacgtgcgccgtgaaaaactgctcgccgcgagagaactcggcgtcagagaatctgacatcgtccctgtcgacactccagtaactattcccgagttcatagcttcgcagggcataataatcgatacagttcttgagttcgttggaaaacgccagaccttctccgatgcgcagaagatcgtccggccaggtgggaagatattgtgtatcggcaccg

SEQ ID NO: 23206 - DNA, 500 bp, Emericella nidulans
gactatgaagcgattagttgagcatcccaactccacagaaggtcgggagcggcagcgggaaagggacgtggctcgcgagcaggacactattaaggggaatggggactcgaaagtgaaggtttccctcgatacgcgatcgcccgtggagcgttttcgacgcccgccgaacaaggctttttccgtcactgatttgatctcgcctgcctggtgcgaagtgcaatactggtatacgctcactaaacatgggaggaagcagagaacagcagcgatgaagaagggcagtacgatacacaagacgctcgaggacgagatctatacgactgttccggtagaggttacgacgaaggaggatgcgctggcgctacggatatggaatgtcatacagggattgcggacattgagggagtttggaattacgcgggagttggagatctgggggctagtggatggggagctggtcaatggggttattgaccagctttgttatgagtgtcccgaca

SEQ ID NO: 23207 - DNA, 850 bp, Emericella nidulans
ccgtagtcatatatttggcagcctaaccttggacggtcaccatagctcacaggtccctctgaacaacgaccacgctagtcagcggcgtgtcatcctcattgaagaatttccaacgatggctgcacggaatactacagttttggcttctttccggctgtcaattctacgatatctctccttgaatgggccacatggtggaaacacgtacggtagagaagtaagggtaccgcctatcgtcatggttgtgtctgaaactttttcaagcacggagtcctcattcaataatctgacaacccatcaattacttggtcgcgagctctacaaccatccagataccactatcatcgagttcaacagcattgcgccgacattcatgcacaaagctctaaacctcgtcttgaaaaaaagctcctgtcagccctgcggcaatcaaacgctgactcagtccattattgagaacatttctaagattggagatatccggaatgcgatcgcgtcattggaattcatttgtctaggtaatggcaataaaggctactggagcgatcccactgtcaaaactaggcgtacagctcgaactcgcatgaagaataccgctgttggaagtgagatgcgggaggaaatagcgcaaagagaagcaagtctaggactattccatgcagtcggcaaaatcatttacaacaagcgaagtgatgcatctgatgccgaacacgtgcagttgccctctcctccagatcacctccgtgaccatgaccggccgacagtctctatggtacatgttaatgaactgttagatgagacgggcaccgacatccaattgttcattggcacgttacatgagaattatgtt

SEQ ID NO: 23208 - DNA, 500 bp, Emericella nidulans
acacgccctacatttccccagacactgcattgcgcctaaatgtaactacgaaatttgaaaagcaatggctaactatacacctctctcaagacttctggggccctgtctccaacttcggtatccccgttgcagctgtgatggacacacagaaagacccggaaatgtatgtttacgcctaaataaacacttatactttgctgccagatgtatcaactgtatcagctggtgtgcgcagaattgacactgaagcaaagaacactttcgcctgataagcatacccaagccagcacgagctaactttgtttatatacagcatctctggccaaatgaccggcgccctggtcatctactccgcaaccttcatgcgctacgctctcgccgtttcccctaagaactacctcctcttcgcctgccacgccatcaacttctccgcccagtgtacacagggataccgttatctgaactactggaagtatgtggctatcgatcttctctcctca

SEQ ID NO: 23209 - DNA, 554 bp, Emericella nidulans
ggcgctgctacgctgtttctgctagtccgaaactctggcccatcgctggtataactggcaggtcgacatcacctgcgaagccgatggcatctttgtcccggaggacgagccagacctcgtccgcttcgtcaaggcccagcacgccaaaaagaccatgcttaggccaggtggcaacggccacgggttcggcaacctcacgacctgcgtcaatgtcggggagaccgagcgagactcgtacatcctcagcctgacaaacctcaagcacatgcaagtgaacagaaacaacagcacccggccctgcacgaacacggcctgcaggtgcagaacgtcggcagcgaaaaggtgcagaactacattggtgctgccactacaggcacgcacggcacgggcaagcagaaccagaacctggctacccagataatgggcctccgtgtccttggtgcccgcggcaatgtccatctcgtcaataagcaacaaaaccccgacctcccaaaagccttttgcgtctcgatcggcgccctgggcattatcactgaagtcaccctgaatgccga

SEQ ID NO: 23210 - DNA, 850 bp, Emericella nidulans
gctactttcgtacctgtccaccaagttaccatggcttaaaaccagcataccggctctcaagaacaacatacgcccgccgtcacgcgatgtgataatgacggcgctacctctcgccatattccaactagcaggtcatatcttgagttcaatggccacttcgcaaatcccagtttcgcttgtgcacactatcaaaggactttcgccattattcaccgtgctggcataccgcttccttttccgcattcgctatgctaaggcgacctatttatctctcgtgccactgaccttgggtgtaatgcttgcttgttccacaggcttctccacgaattttttcggcatcctatgtgcgctggttgcagcccttgttttcgtatcacagaatatattctctaaaaaactcttcaacgaagccgagcgtgcggagtcagatatacagtctgctggtcgccgcaaactggacaagttgaacctactctactattgctctgggttagcttttatcctgacattacccatttggttggtcaccgagggctaccccttattctctgatctgatgcaagatggcgccatctctcttacgaacaaagctggatcgttggatcatggcgcccttttcctcgaattcgtgttcaacggggtgtctcactttgctcagaatatcttggcgttcgtcctcctttctatggtttcgcctgtctcatattccgtcgcgtcacttatcaaaagggttttcgtgatcgttgtcgcgattgtttggtttggtaattctactacgcccgtcagggctttggaattgccctcacccttccttgggctatacctatacgaccgcaatagccatgatgac

SEQ ID NO: 23211 - DNA, 850 bp, Emericella nidulans
tgaacttctccgcagagtagtcgtcggcaattgcgaatgggtcgaggatcaaggatccgaagaattaaatccgggtaaagtgcatactgagaacctctgggttgcggaggcgctggtaagcccagactgggactactatcgtgcagagccatgtgtgaccgaaccacttgagaagctgtccaaatcggacctcgctccaaatccaatgtcggaagggtacgtttctagcactagtcagatcagagtatctattgcagggccaaatactgttggcaaatcctcccttcttggtacattaacgtcatctgtcttggacaatgggaggggaacgagcagattgggcctattaaaacacaggcacgaaatctcatccggtgtaacgagctctgttgcgcacgagcttataggatacactccaacgccatccacagacggctttgatgtggtcaactatgcctcagggaacgttgcagcctgggacgatattcacgccgcctccaagggcggtcgtctagcgtttgtctccgacctccccggctcagtgcgatacttgaaatctacattacggggacttgtcagctgggctcctcacttcgtgttcctctgcattgctgccatttgtgaggaagaggtttcttcaaggccaggccccgattctgcagaacaagcgatggacatcaatctagctttatcgtatctggagctctgcataaaactgggcatcccggttgttgtggttattacgaagatggacctcgcgtcccgaggtggcctgaggaatattctcgccaaagtgttatctgcattgaaggtctccggcaagaagccagccatgctccctgtccaatcc

SEQ ID NO: 23212 - DNA, 538 bp, Emericella nidulans
aggatgctacacatcgccatcctcgatatcgacgtccccgtaccagccgtctatgccgcccgcggcctctacagctcgcagttccggaccctcctgcaagccgccgcatcgcgactcggcgtccccgcatcttccatccacaccacagccttcgatgtagtcgggggtcactcccgccattccagagtcttcggaccgcaccacgggaatcatagaatggggtgaacggagagacggcgagtaccaatccgctcgccctccccatagacggaatcctcattaccggcgcagcagccgcagcatacgaagccgcaaagtatccttggattgtcccgctgcagggatttgtacagacggtattcgattcgtatccgcatgtcaggatgttcgggtcctgtttcggacatcagattatcgggcaggcgctgctgtccgctcaagctcctaacaaatccccgccgcaaccaccgagtgtaaccgtcgagcgaaatccgcgcgggtcagaaatgggattggcatccattaaactaactcccaa

SEQ ID NO: 23213 - DNA, 694 bp, Emericella nidulans
aataattgggggtagcgaacaagagtgcaagggtcagaggaagaagggagaaggtggggagtgagatagaaaacattcccatagcctctgctagaaccgagagatccctccacggcaaaccatgatgccgcctttaatggcactgtttgaccccgaggatcacaacagacgcttcgtgggtacaccggattatctggcaccagagacaatcaacggtgttggtcaggacgaaatgagtgattggtggtctttggggtgtatcatgttcgaatttcttttcggctatccttcttttcaatgcggccaccccggacgaagttttcgagaacatacttcatcgaagaatcaactggcccggcgaagttgaggaactggcatcacctgaagccattgacctcatgaacaagctcatggctattaacccccgggagcggataggcgcgaacctggaagagaaatatcccaatggtggagcagaaattcggagtcatccttggtttgctgacatccattgggataccctcttagaagataaggctcaattcgtccccaacctggaaaaccccgaagatacggaatactttgatgcccggggtgcacactccaggcttttactgaagaagacgagagttctctcaggctccggttacaactggctcatatattgaccgaccgcatgacgctctttataaag

SEQ ID NO: 23214 - DNA, 845 bp, Emericella nidulans
gcacccagaaatacttcgagtccaaaggactcatctcgcggaattctcagtttcacggactgacgctggaagagagagaccgacttctaggggtcgagtacaaggctgtctcgttcttatcagtaattgtacctttgtactgggtattgttcttgtgctgcggtattctgggcatggggatatggctagaggtcaataaaccgcaagttcctcgagataatggtctgtcgcctttctggaccggagcattcttcgcggtatctgcatttgtgaatagcggtatgggcattttggatgcgaatatgacggctttacagacggagtatgctcactctctctatgagaatataaaatactgattgttgtgcagtgcctaccccctcatcaccatgggacttctgatcctcgccgggaacaccctttatccctgttttttgcgcttgatcatttggtctgtgagacggatgctgccggatcaacaggcatggaaaacttggagaagtactttagattttattctagaccatcctcgaagagtaagtaagttaaatttcagtttcaggaatatcttatctgaccacatccaggtctatacgaacctttttccggctcgccacacatggtacttactagcaacagttgtcatattcaatggaattgactgggctggatttgaggtcctttcaatcgggaataaagagattgagggattgccaacagcataccgtataatggatggcctgtttcaagcattaggtacgaagaaaccttctacccgagcgcgcgcagtactaatgtctttcacagctgtccgagctggaggattctcagtcgtcaccatttcc

SEQ ID NO: 23215 - DNA, 500 bp, Emericella nidulans
ctgctcctataagcttggcatctcaactaggagaagcacgcaatgtcctccactgtttgcacaactgctgctctctcgccatgtcttcagtatattctacgtgcgctctaccggccgagtcgcttcatccgaagctgagaacgtctataaatatcatatcaatgccccagggtcggtcgaaaaagaaaacgagccagcaaagtcacccttgaataccctcaacacagccaaaatggccactctcactcagacctccgcccccgcccccgctccagctcagatcatccactccaatgcccctcgcgacatcttccccgacggcctgaagacaacgggccagcacccgccgatctacgaggagctgcaccccttcgaggacttccccaagtccatcgagggccgcacgctctggaaggcagaggactacaaggatgcgcctgagaaatggacacaccgattttcggcggaggaggttgaagaactcggtgccactgctgatg

SEQ ID NO: 23216 - DNA, 525 bp, Emericella nidulans
tacaccacgtatctcaatatcggcgtcgatggcctgcaagccctcaaacactacaactttcaaagcaagacgtgaggcaaggtacatcatcaggtaataaagacttgatctttcccctctgctcctcgaaacagaattcctactactcatcaaggctcacttctctatcctcaaacatctcctgcaaagcggctccggcattgtccatgccactcatgaaccctcgacctgcaccctcaccgtacacgttgaccgcaccaaatttcagtcccatggaaagccagcgctagcggactatctctgccgccttcacatctggcgctgcacagctgacgtttctacctgcaaggagtattatgaacgtctatatgtggtcgacggcatatacgaggagtggagacaaattgtatgtcccaacccgaaaccgaggtgaaaattcgtgcagccgaatacagtagttagagaagataatgtggaggtgaaactgtacgaggcggctaatgagggacttataaagtcgtggat

SEQ ID NO: 23217 - DNA, 500 bp, Emericella nidulans
tcttcgcaggagtggtactgacttgtctttttgcaatcttctagctacgccacaggtgagggcgattcacgtttacgacttcgacaacacatgtaaggtggaccttgagcctctaggttctgagagttgccgggctaatcgttgcgtccagtattcttaagtccgcttccaaacccacagctatggaacggcccgagtatcggatttctacaagcctacgagagctttgcgaatggaggatggtggcacgacccgaatcttctgtctgctaccggtgacggcatagagaaggaagagcctcgcgcctggaagggttggtggaacgaacggattgtgcgagctacatatacataccgtggaacgtgaactgataacggacaggtgcaattagtggagctgagcatgaagcagaaagatgcgcttacggtgctcttgactggccggtctgaagccggattttcggacatcgtcaagcgcattatcgatagcaggcatctcga

SEQ ID NO: 23218 - DNA, 500 bp, Emericella nidulans
caaggtacggccgagacagtgtatgacatttctcccaaactctgctcacagcagtcctggactggaccggctgcagcaggcccaagaccgactatagagctggtccccatcgagcgaaaacgacccgtgcttgaagcaggtctcgtgcggcggaacgttgttttgacatgtccagtgcatccccagatccgcagtcaagtcaacggtaaatatgatgatgacgagctcatgaccgtccgatactcagccctcacctgcgagccctcggggttccacaaggagcgattcacgttgcgacagaatctgtacatcaaaccccgacgaacagagcttcttatcataatccctctctgcgatgagtctgggacggatctgggtcgtactttgactagcatctttgccaatatccagtacatctcctcccagaagagggttaagacgtggaagcggcacgggtggaagaggtgcgttgtctgcattcttggcgacgggcgaggtag

SEQ ID NO: 23219 - DNA, 850 bp, Emericella nidulans
gtatggatgcgctaaccacagtacagttacgggctactttaccggtctcgatattcatctccccgaacctcgcgattgatgacaacaacaaccttgtcgattcaagccctcagacgacccaaagagcgcttgatgatctcgctcagcaagcgcctcctttgtatggggaacaccagttcgatcagctgtacagcgaagttgatccttccggttaccgcacccctggtcctggaagtggtcctggtacaccttttggcacgcttagtcgcaacctatccgccgagaaccttgcatccatgaatgctatcacccacaccgacatctccgcttcagccttgcaccatcgcttggtaaaccttgatttgcgcggacatggtcgggtatcggcatcagaacatgatcatctcggtgttccttcagacaacgggcccccctcgggctctaacacacacggctccaacacccacgcacccggaagcccagaactttcgcgcagagcctcagacgaagatgtccacgacaacataccctcgggaatggcaacaccgttcatcccccactctgctgagttggagacgctcagtcgcgtgccaagctattccaccgctgtccgttcatctgttcgtccacatgacagcgatctgccagattatcaggccgttgttgctgaaactgtccatatgtcagccccccaatccccccagcaagcgcacatccgggggtctggtactggtcgcggatcggactcttattttagcgcacccatggatttctttcatcgacctgcttttctccattcccgaagtcatagtcattccgacgacgaacgcaggattcgtctaacgcaagc

SEQ ID NO: 23220 - DNA, 850 bp, Emericella nidulans
cacacgggcttgacggcgtagaccttgactgggagtaccctgtggctggtaagtattagggttaagtatattcgctgaagggcttgtctaacgagatatttaggtgaccgcggtggaaaagacgaggactacgaaaactatgtctccctagtacgagaaatgaatgaagccttccagaagcgcaatccgtcatgggatatatcgatggctatcccagctagttactggtatctgcagcactttgatgtatcggcaatggagaaagaagtgagctggttcaacctcatgaggtaagttctgcctttcctgtaccatcccaagaatgctgactttacactgcagttacgatatgcgcggtaaatgggatcaatttaacgagtggacaggtccatatgtctttggacacacgaatgtcactgaaatcgaaattggagtagacctcttgcggcggaataatattaatctctacaaagtcagcctaggaatgggtttctatggtcggaccttcacgctgtctgatcccggatgctcggagcccggctgtgaattcagtgatgctggccttcgtggggagtgctctggcgagtctgggattctcaccttcaaaggtacacttgcattcaagtagagtagactgtctgctaatctactgatatagaaatcatggcccgccaaaagcggctaaaccaaaaggtgatcaagtacgatgaagactcgggggtcaagtacatggtctacgacgaaaaccagtggattacctacgatgatgaagagagcttcgagaagaagcgagaaatgctcgacaacgagtgctttgggggtgtcatgatctgggctattgatcaagaca

SEQ ID NO: 23221 - DNA, 710 bp, Emericella nidulans
caccacatcaacccctcagatctagagagcttcgtccaccaaatcttaactgccaataatgtacccccagcacacgccaccatcgtcgccgcttgccttgtgcaagccgatcttcgcggcgtcgacacccacggctcaaaccgcattccctcatatatgcaacgcatccgccagaacgtcctcgacccagcggcatcacctgaaatcacccaaatcacacccattgcagccctggtcgatggtaaaaacacatttggctttgtgtcagcgcacatgggtatgaagcgcgctattgaaatggcgaacgagttcggactcggtcttgtctcggtcaaacactccaatcatttcggcatgtctgcttggcttgttcaacaggctattgatgcgggaatgatgtccctcgtcttcaccaactcttcgcccgctttacccgtctggggcggcaaggaaaagcttatgggcgtgtccccaattgcatgcggcgctccagcaggcaaagaacgccccttcatccttgacatggctccatccgttgcagcgcggggcaaaatctacaaggcgctccgcagaggcgagaatatcccaacagactgggctctggaccgtgatggaaatatcaccgacgatccggcgcgcgcactggaaggcgtaatgcttcccatggtcgggccgacagggtctgcccttgcggtaatgatggacgcttt

SEQ ID NO: 23222 - DNA, 850 bp, Emericella nidulans
ttcgcaatacagttccggctctgagcatcccgttgtagaactacctcctgagcaaaccaacgtcgccctatttcaacccgaaaacaggcatatccgcgatcgcattcacccagctcaacctttcagacctcctaccgaatatcctatgccttcccttggtttcctggaatcgagacaatcttctcaatggacttatgctgaagacgaggaacttcgcagtcttgttgaagagtattcctataactggtcactgatatctagttgtcttactccgtcgtcccagtttacatggggcgcagagagacgaacaccatgggagtgtttcgagcggtgggcaggaatagaagggttgccttctgacatgtctaagacggcgtacttcagggcctaccatcagagaattgatacagctcagcgtaatgttatggcgcagcaagctgcagcccaacagcagcagcagcaacaacaacaacagggcagtaacggtaacaatcaacaaccgatgcctttgattcgcaggagaggtactcaacctattcgggtggatcgaagaaggtcttccaagcacctagcgcttctcgatgctatgaggaaattggctaaaaaacgggagacaattctgcaaaagcagcaacatggtaagcaaaagtcaatcgagcgccttggaagatgctaacttcatttctatttagcttcgcagcttgcttcgttaagaaaggttaatgaagccaatcaaccgaagcctccaatttcatctcccgctgaattcagccgtctaaagcatgaacgtgaactcaaacttcaagagaggcaggagcaataccgccaacaaatgattgctcaacagagg

SEQ ID NO: 23223 - DNA, 850 bp, Emericella nidulans
caaacaacaggcatgccaggcattccgagtcttcctctggcatggcgtgacgcgcagaggcttctgcaggtgcttgaagggcacgggtcaaaggtgccgaagaaatgggttggcggtgttcccaaggtcaagcaatggtggacaggcgacgagaagtcgcctactgtgaatctcatgaaccttcaggatgaagtggatcgacagcctatttacaacgttattggaaggattcacggaatggaagaaccggaaaaaaagatcattgtgggcaatcatcgtgactcgtggtgcttagggagtgcagacccgggcagtggaactgctgttttcctggaacttgtgcgcgtcttcggtgaactcctgacgttcggctggcggccactgcgaaaaattgagtttgctagctgggatgcagaagagtataacctgatcggttctacggagcatgtcgaggacagcatggacaatttgcacgggaatgcgtacgcgtatatcaacgtggacgtcggtgtcagcggcacggactttgaagcttccggctgtcctctctacgagcgcgttgtcatgcaagtcctaggccgaatttcagatcccgttacgaacgagaccctaaaagacatttgggagcaaaagaacaagaggtttgcacctctaggagccggaagtgactatgtggcttttcaagaccttgcaggtatttccagtatagactttgggttcaccggggaaccatatccctatcacagttgccacgagaactttgactggatggccaagtttggagaccctggcttccagtatcacaagatcttaggtcagttctggggcttgctgcttctgcagttcgcgg

SEQ ID NO: 23224 - DNA, 500 bp, Emericella nidulans
gtacgattcctaaaacactaccacctacagatcctggcgtgtcagcatcttatctccgctcactacacacaatccgatatatcgggggagcgctcgttgcgaaacatgccccagaatatatgcctaaacagtctcccaatacgccctccagttcgataacttatacatccggtggtcttctcgtccggcccaggcccggattgtctcttggccttgtcggcgcggctatagttgagggcctcgcgcgcactctagctgttgatctggcgccattcgggatcagggtgaatgcggtttcgttggggccggtccgcacggcaatttttgatgcatttggaagcaaggacgttgttgagggcatgttggagacgtacgcagagcagactgtgcttggaagggttggtgcgcccgaggatacagcggaaacgtatcttggcttgatgaaagatgggaacattacgggggcactagtgaggactgacgggggttttacgttgaag

SEQ ID NO: 23225 - DNA, 638 bp, Emericella nidulans
tcgtcttccccggcaacgcggcctaccgcgactccgtgacctcgtactgggccgtcaatgtccaactggaaccgacctgcattgtgcagccgcagtctgccgacgatgtctcggtcgcggtgcagacactggctggtgccggcggcaactcgcgctgcaagttcgcagtacgcagtggaggacacatgacctgggctgggtcgaacaacatcgaaacgggcgttaccattgatctctcgctgatgaacagcacaatctatgacaaggaggccaaggttgcgactattctgccaggttcgcgctgggaggccgtttataagaccctggaggagtacaatgttgtcgttcccggtggtaggacaggcccggttggtgttggagggttcttgcttggaggtatctcgatttgaccttttcctgatctttcaaagcgaagaattgctaattatctggctgtctaggcggaaactccttccacgccgcgcgggtcggactcgcttgcgacaatgtcatcaactacgaggttgtccttgccagcggccgcattgttaacgccaacaacaacaccaacgttgagctcttcaaggccttgaaaggcggctcgaacaactttggcattgtgaccaaatacgaactca

SEQ ID NO: 23226 - DNA, 602 bp, Emericella nidulans
accgcctgtcgagcatctgcgcccgcccaacccgcctacgcgagacgtcggagctgctagcatggaaatcgtcaccacggaggagaaatcaaggatcttcccccagtactccggccccccgcctccaatgcatcgcatcccgcccgcggaagcgccgcatggcttgccaggggccccgggcctgtacgatcagccatggcgcccgtatccccatatgaaaaccaccatgccgaaccacggcgggtcgcgatcaatgctccgcagcctccactatccacgcatcccaactaccccccaatgcacagtcgggagctgccacagctcccttcggacggtccttttagccggcccgccagcctacctgtgcccgcagcccacgcaccccccgagccccctcagccgcagcatgccaattaccacccgatgaacggtgccatgaatggcgcaccaccggaggcgtcgcccgtctctgcgcccgactacgccagaactcgcatgtcgtccccaccccaggagcagatcgccaacagcaaaggagatcccccgcagccgcagcaatcgctcccaccgaatcgacatcggacctatcttccatcgcgata

SEQ ID NO: 23227 - DNA, 542 bp, Emericella nidulans
aagtcgctgccattccaagctctggagatcacaccgaaaagaagtccaagctccctatttgtcctgccacgcccagccgtctcagcccaaggaaacagctcgctacgccaagcgcggcttctttagtgaaggcaaaactttctccgcgtgtcgcatctatcgataacctcaacctggactcccgggtgcatgcctctatcaaagaaactggtgttagcattgatgaaatagcgtcctatatccacggtccagaccccgaagacggaaagtgggtgtgcctgcaccccggctgtgagcgacgctttggccgcaaggaaaacatcaagtcacatgtgcaaacccacctaggtgatcgccagtacaagtgcgatcattgtgataagtgtttcgttcgtgggcatgatctgaagcgccacgcgaagatccacacaggagacaagccgtacgaatgtctatgcggtaatgtttttgcccggcacgatgccctaactcggcaccgccagaggggaatgtgcattggtggttacaagggaattgtgcgt

SEQ ID NO: 23228 - DNA, 500 bp, Emericella nidulans
acagacccggacttctataatccttgtcgaagtggtgaagtgacgctaatctgaagatgaatatatgtatgtgtacacgataggaacgcctgacaacctcgcacaaaccagaaagcgcggacgagaaagcacgcatcgaaaaggcaggtgggcatgtacactcgcatcatgacatctcacgcatcggcagcctcaatatgtcccgggccctgggcgacctgcagtacaagacgccgctgatctcggccgcagcggcgccaaagacggagggccagaagtttgcttgtgcaccagatccgcaaaatgtgtcttcacaggacggagcccaagcgggaacagggagagacgacttcattacggtcgaaatgtcctttcgccggattgacttgcacaaggagaagcagtatctcctcgccttgacgacggaaggagtcacgaatgcactggatgacggcaagatcatgaacgggattgcggagatgtttaatacagtcagtaag

SEQ ID NO: 23229 - DNA, 850 bp, Emericella nidulans
cagttacgatgctccttttggccctgcagctcgggggaacaagtgctcagtatgcatgggactcatctcagattatcggaatgttcgccggctgtggtgctacaatggcagtattcgtggcctggcaggtccacctccaggattcggcactgataccacctaggctgtttgtcaatcgtaacgccccgcttatcttcgcgtctgcggtcttctcaaacgggccttttcaatgcattgtttactggctgccaatatggttccaggctgtgcttgaagtatccccgacagcgagtggagtcaggtatctccccactgtcattgcagacgttgtgacatcaatctttggttctgcactcgtcacatactgggggtggtggaaccccttcctgacatttggaatggcgatgatctctctcggcggcgggcttctgtcaaccattcaccccggtatctcaaacggtcattggataggctatcagattctggctggaatcgggtactccctcgccgtcaacatggtcagtctactgctgctactaactagtaactttgattctgatgtcacacttattaggctcatatcggcgtccaagcttcactaccacccagcctcgttcccctcggcgcaacgactctcttatttgtgatctcagcgagctgtgcaatattccttgcatccagccaagctatttttcaagcgcgactcaaaaccatccttgtgggagctgtgtcccaagatacaatagaccgaatcctagccgtgggcgccaccaacatccggtccgtggtcggcccggacgaccaggtcttggtcttggatgcctacagtaaaaccataaaccaaatattt

SEQ ID NO: 23230 - DNA, 850 bp, Emericella nidulans
ctacctccaccttgacattcctttacttgacgaccgggacattcctctcggcctgtagcgccaacactttgaacatgattttcgaaccgaaatatgacgcccaaatgtcacggacgcgcaacaggcctctggtccgtggtctcgtcacccgacgtgcggccgtattctttgccattgcaacggccgccgtggggttgggtctgctatacttcggaacaaaccccacggtaactggactgtccgccgctaatatcgcgctctacgcgtttgtatatacgccactaaagcgaatgcatgtgataaatacttggattggtgctatcgtgggtggtattcctccaatgatgggttgggttgcagcagcagggcaagaagcacaacgggacatgacacctgaagggacatgcttttcggcgaaaacagtctcggcggctggcttcttggggggatcctctttgcctggcaatttcctcatttcaacgctttatcgcacaccatccgcgaggaatacaagggagccggatacaagatgctttgttggacaaacccagcgcgcaacgctcgcgtcgccctgcgctactcagtcctcatgtttcctctctccattggtctctggtgggcagggattgtaggacatggcttcttagttagcagcactgttgccaacggctggttgacgaaagaggcttacggattctggaagcaccagggtgccaatggtactgctagaggcttgttctgggccagtatctggcaattgccaatcctccttgttggagctctcgtcacgaagaagggcctttgggacggtgtctggggaggcatctttggccagccgattgaagacgac

SEQ ID NO: 23231 - DNA, 850 bp, Emericella nidulans
tagacattgctaagccggtatgtcactcctctctctgcttaatttgcacttcgtttttcccattgagcttgctgaccagtcaaggtggtcttgtaactgaccagtaattagattgatgcggaacctgcccaccgcaaggacagtagaacagctcagcccgacgatgccttgggaaacaatctcaagcgtaagcgcgatggggatactatcaaggattctaaaacgcaagagtatctttccctcttacagcaaccatctaagacccgaacgtgggcaaatgatgatcagctacctgatcctgatgagaccgactcacatgcacaagaacaagaacagcctttcgacgtcgatgatcaggaggaactgacatacgctcagaggaaaaaggcaaaactgggtcaggatgcaaacgaaagctctcatgttccagtagttgctggctatcaacctacaactgacgaaagcgatgtcaaccctcgcctgaaaaacatgaagaggagttgaggacccgcaaaaggaccaggcgcctgtttctgactctgactgcgtgcgctcaaaaacaagtcgccttctaggcttgctagacgaagatgaacaagaaacgtttgcgtcccctgcggcggccacgaatcctacgccaataatcaactccaacgttgagaagcccgaagctgagagtccggagaagcccgctgagagcgacttgacgaaagcgcccacagcagcggaagttgacacgaacatcgaaaacatccgcatttcagcacgtttatttgtcagaaatttgtcttacgagacgaaagagtcagaactcgagccggttttttcgccttttggcaaaattgaagaa

SEQ ID NO: 23232 - DNA, 850 bp, Emericella nidulans
cgtcatgcatcgaaggagccatcgagcacaaggataagatgctcccgcttttctccagcgtcacaaccagtacaatcacagagccgacagcattggatgctgcatactggcgtcgaaatctggaatcgcctgttttgttctctcctgcggtacgcagtatactcacgaaatcgaggtgccggacttttatagagatcggacctcattctgcgctgtctgggcccctgcagcagatcttccgtgctgtagaaacaaagtcagagctctcgtatatcccaactctgaatagaaatgagcctgatagtcacactcagttattagtaactgcaggactcgcgcacgctggcgggattgctatcaatctcaatattatcaatggccccggcaacactatatcaaacctgcctccttatccctggcaacataacacccgttactggcacgacagccgactaacgcgcgagtggcgattccgacctcatctacaccatgagctccttggcgcacgcagcgtcgagtcttcagagctcgagcccgcgtggagaaatctgcttcgtctggaggacgttccgtgggtcagcgagcacgctttgcagggaaatgttatattcccggctgctggatatatctcaatggcgggcgaggcagtatgccaattaattcccgaagcgagcgacttctccatcaaaaatatgctgatcaagaacccgcttttgatgaaagagtcggctgagtacgaaatcatcacgacactcaagccagtcaaaatcaccgaccttgttgagtcagattggtactcgttcagcatcgtctcgttcgatggtgcttcctggacgaaacactgccatgg

SEQ ID NO: 23233 - DNA, 850 bp, Emericella nidulans
cggtcatgtcctgtatgacaccacctgaattctagcagcactgcaagagactaatatgtctattatagttatggctgctctgatatcccccgccacgaacttcagcgtttctgccacagagtaacagatgacctctttgcttggaaagcgaaccttccctccatcctcgatattgacctcgctgatgatacaacgcctcgactccctcacctcttaatgctacagtaagtcataaaccggaatgagtaatcaggtacacgctgacgcgaggcagcctccaataccaccaaatagtaatcttcacacaccgtccctgggtctcaaagtcctacatccaaccgcgcgcaccgcgacaaggcccaggctaccaccacgcgcgcaaaatgtgcattgaatcctctattgccattgcgcgtctcctccacatctacgaacaacactatacctttcgccgcatgaacaatcaggtagtgtcgatgattttcagcgcggcactcatcctcctctacgtcacgatctcgactacgccactagcaagcaggacgggtcttgagcaacttgagggaagtagcagcgagatgacggcttatctgaatctctgcttcagggcactggatgagctgggtcagagttttgaaaatgccaaacgcacaagggactttctggtctctttgcagagaagatggcaggcaaggatgagaaggtccggggcgctgaaaagggcagggagtagccagcgattatcaaaatcctccgcgaaggatattggcggtggtaagggctcaaatatagggatgcgtcgtcgacacggagaaaagtcgaactagcccaccccaaagccgattcgcgt

SEQ ID NO: 23234 - DNA, 500 bp, Emericella nidulans
  unsure (1)..(500): unsure at all n locations
ttacaccactatggacgtcattcagaagacgctcgtcgagcctctccagccttacctccggcccgtcgtcgcgtcagtaccgcaacctgtccacgatgcgattgtctccttgatcggctcaagctgccacaacacgctcgtcgtcaaccttgaccttgcccaggatccggaatgcacatctcttgcgatctctaaagctctggngattggtattgatggcgctagtggaatcgtcaaggttccccagattctcaagctcatcctgttctgctcatctgcgggtgtgtcttttgtgtcgtatgcgcttgagaccgccagcttgctcatcacgctttcctacggagtgcgcaaccaatttcctttcagtacctacggcgagtccgcattcatcgctgcgcaggatgttttggtaggggtattggtcttgacatattgccggccgatctgcatgagcggctgcgtttgttgcagttgtgggagcgagcatttattccttgctt

SEQ ID NO: 23235 - DNA, 850 bp, Emericella nidulans
cgccgtctccaaagcgctagaatctgcgagggagtccgtctggatcctggattgtaagtggtagcagagaatatcctggcgcagactaactgtaaagcagggtggttgtcgccggaactgtaccttagacgcccgccggccaaaaacgagcagtaccgactggatcggctgctacaggccgcagcacaacgcggcgttaaggttaacattatcgtatataaagaggttacccaagcgctgactcgtatgttgccccgtcgtcttcctcagtagtggggagttgctgatgaagcacagtttcctcggcccatacaaaacaccaccttgaagcactccaccctaacattgctgtcttccgtcatccggaccacctgccagacggtcaaggcctggcggcttccattacctcttctctgcaaaacctgtctctcgacgcactcaaactaggacagatgtctgtcgacgccatgaagggtgtctacggtatccacgaaggtgtcattctgtactgggctcatcatgaaaagctctgcatagtcgatggaacggttgcatttatgggcggactggacatgtgctacggtcgttgggacactcaccagcatgcccttgctgacgttcacgataaccctgcagacattgtattccccggccaggactataacaatgccagagtcctcgacttcagcgacgttgctcatcccgaccagaacaagcttgacaggacgcagacttcccggatgggatggtccgatgtcgctgtcagtttccacggaccggctgtggaggatattcgtcgcatgtttgtcgagcggtggaacttcctctacgatatcaaatacaagtcccg

SEQ ID NO: 23236 - DNA, 850 bp, Emericella nidulans
gggcaaacgcctcgtctgggtctcgcacctctcctgcgtagtcttcgcaatcgcgatggctgcctttgcgacaggtcttcactacgctggtatcggtatgggctatctctaccttctcatgggcgtcatcatctcctcagccgtgttcccgggcgccatgaccctcgtctggaaggggcagaactggatcgcggcagccgcctctccagttttgggcctcgcaatgtccctggttgcgtggcttgttacaacaaagacagagtatggcgtcttcaccgtcgaaaccacaggagcaaactaccccatgctagcgggcaacgtcgccgcccttctcagccctgtcgtcttctcgccagtcttgacatacctcttcggccctcagaattacgactacgaatccatgcgcgccatccgcaaagtcgatgactcggatgtcgccgcggcggcgcacgtcgacctcgagctcattcccggcgcttccaatacaaactcgtccccttcacagcaacagcaagaggaagaggaaataagaaaactcaacaaagccgcatttatttcccgctgtctcacagttggcatggtaatttgtttcttgatcctctggcctatacccatgtatggcagcgggtacgtcttcagcaagaagttcttcacaggctgggttgttgtgggcatcatctggctctttgggactgcgttcggggtgattctattcccgctctgggagggtaggagcagtatcaaaagggttggtaagcttatgctgctcgatgcgatgggaaggcagtggaaaagcagtgctctggtaggccagggagacgaagagagtgaagagtctgggtctggtgct

SEQ ID NO: 23237 - DNA, 850 bp, Emericella nidulans
tgaaagtctttgctggagcttgcctctcgtgaggccgtggaatcagtacgacgactttctggaaaatggttacgcccctatcagttctctgatcgagcactatgggggctacccgccgttttccacctggtactcgatcaggaatccggacatgccggatactctgaacgtgacaattccccgcgctcggctggaagagtggcgagacaacatttacgcggcgatcaggaagggtcaattcgaaactaccagtaaggacaagccacttgtccttaccagggacaattgtctcaactttgttggtggtattctcgacgcgcagtacccctccttgaacaagctgctgggcggctgctcgcttgatgaagagcgatatgggaaccttcacaactatgggctcggcaagtttgctgaaatggcataccgtaacaaaccgggcgaaaagagcccttatggcctgacgatctccaacttcggtgccccccgagatccttgtttttggcgctggtacaaacacctccagtattatggtcgacttgccgcgacaagatatcctcaggacattacggctcaccgcgctgaagtcgtgttgtcgaacctggtcgtaaggcttcaagacagaagttcgcctcactatctcgatggacatattacgacctttcttgggccacctgcagtgaatttcatggaaagcaaagcgaagcttggtcatgagccttatgaatggaatgtacaagtgaagagctgccgcagaagtccaccatccaaggagaacccccaaaccttaacactgaggctattcattgcggccgaggatccctttagtagggttaattgcggccggaatcta

SEQ ID NO: 23238 - DNA, 765 bp, Emericella nidulans
aataaaaaggaacaaactctcccctgggcattgggcgcgcaacagcgcaccaattcgcgcgcaacggtgcgaaggccatctatatctgcgacttcacgagcacacaccttcccacccacgcccgggaaatcaagtccctctacccctctgtcgacgtgcacacgcgcacctttgacgcagcagatgaagctgcgctgaaggctgtgattgacgaggccatccagaactacgggcggctcgacatctttttcgccaatgctggaatctcaggctctaacgttcccttcacggaagtgacaggtgagcaattcgcggagacgctgcggatcaacacagttggtgtgtttttagccgcaaagcatgctagtctggcaatgaggaagactagtcccgagaagaaataccctggaggcagtattatagctacagcgagtgtggcggggttgaggtcgaatgcgggggcgacggattacagcgcgagcaaggcggctgttgtatctattgcacaaactgtggctttccaattggctgggacggggatccggattaacgcgatctgccccggggtggtagagacggggatgacagctgcgatgtacgaggctgcgcgggcgagggggacggagcggaagattgggcaactgaatccactgcagcgcggtgccgtggcagatgagattgcacgggttgcgctgttcttgggaagcgatgagagtagttacgtgaacgggcaggcgtgggcggtttgcggtggactcagtgctg

SEQ ID NO: 23239 - DNA, 564 bp, Emericella nidulans
ccacccatcactctttcccctcatttatggccgaacccgggtccttcgcgacaaggttattggaattgacaactgtctcaacagcgtcgggcaaggggccgtgctaaatattgataaaaacacggaaccttctcgcatgaacacgagccggcggagattgcgacggattaacaagtacagccaaaggttccagtggctcccatgcaatgtggaattcggaccaaacggagagtgtcagatcgcgtcctacatcaacaatcttcatcctgtaaggcacaaaaatctttaccatataatcgagcagattatcacacgaaccattccgctttggaacgtctctctggccccgcggggggacctgccacgccgcatcccttaccgcagggtttcatacccatccgacgaagagcccgagcctgaatacgacagtagcgatgattttgacgagcgttacgaggaatggcgagataaccgtcgaccgaagcaaccggagccctgcccttttcaggccccccggtctaacatgcacaagcaagttgacctttgcgaacagtatcgtgacaa

SEQ ID NO: 23240 - DNA, 500 bp, Emericella nidulans
cgggcgtcactagatataccagtgaaaccagcgacgcctctgaacgtctgcttctatcagcgcccggaagtcggctttccttcggtgcttactcctccaacctccctcgatgccagcgaagtcggcctcggctccaaagccaagttagatgaccagtccatggcggatacggaaaaagatgtgcatgtcctcgcacacctaccacctcttaatcttgagattgagcttccggaaggctatccttcgatcaaacctcccatatttaagctcaacaccaatccacgttggttacccttatgggccgtttcgaaattactggacgatggcaagcgtctctgggaagaatttggccggtctctcgtggtattcagctacatagatcatctgcaacagctggcagaaacagcattcggaatcgacgaagcttcaggcggcgaagtaccggtttcgcgggagctaaagatctgctttactcgacctcaaccgcctttccaccacac

SEQ ID NO: 23241 - DNA, 850 bp, Emericella nidulans
gagtcggcagactatgttgacttctgggcctccggtagctcaggtgcacatgctgcggctgtcaagccttacatgaactcgagcgtcgtgtatgccgatggaacgaacgcacagatccttcgccctagtctgctgccttcagtatcgagaggaaggagaccgcttagtgccataagaaaaggacgccaaattggtatacctgtcgtccgcggttttagccgcaaacagtgggagcgattgcacccgtccaagcctagccctgtggatgttcgaaactaccttcgcagagctcaagacaaaacaatgaggccgagccgagccggcgagatctgctatgcctgcgccatggaggaagcgagacctacgccaactgacttagtctttgtcatacatggcattgggcagaagctctcggagcgcatggagagcttccacttcacccatgccatcaacgcctttcgacgtcaggtcaatgtggaactaaatagtgaagaagtatggccacatgtgcgcgagggccacagtggaatcatggtactccctataaactggcggtcaactctgtccttggaggactccaatctcgaagctcaggttacagacgaccctgctgcgaatcatttcagtttaaaggatatcaccccagagacaataccagctgtccggtccctaatcagcgacgtcatcctcgacattccttattacctatcacaccacaaaccgaagatgatccaggccgtcgtaaaagaggctaatcgggtatttcgtctgtggtgcaagaacaaccctggtttccaacaaaatggccgcgtccatttggttgcgcactcacttgggagcgcaatggcag

SEQ ID NO: 23242 - DNA, 646 bp, Emericella nidulans
ctcacccgaccaggcgaatgcaagaaagccgaaagaattctggactcgtttatcaaccccgaagtagtcagcgtcgacaagcagatcccgcgcaaggtgctggaaaatgcgaaggtgagaaccgttggcaaaacattcttagcgaagctaaacagcaatcagggcctcgcgatattcagcgtttttgaagtcggcatgatgcgttcttttcgcttcggcttcggtgttgtagtcgcccgtttctttaacggaacatgggcggcccccttggccatcacgaccgggaaaatgacgaccaaaggccaattggaatggagcatctgagttcgattactgctaaatacgacagggcctggaggcgttctcgcaggctaaagcgtactttgggcgaggacgtatcaatagcagtcgggccattcgggcgcagcgccgagctcgcgggggatgcatacgaggctgatatattcgcatactgcaagacacgcacagtttttgggggttcgacattggaaggagcgactataggcgagagagtagatgcgaatcggaagatgtatcaaaagacagtttcaacgcgccagctgcttcgtggggaggtcacgctgcccccagagacatacgggctcatgaagatcctgcattcaac

SEQ ID NO: 23243 - DNA, 850 bp, Emericella nidulans
gattacggagttcggtttgtcgacttgggggacttatgtcgggcccctaatgacccaagtcagggatacaactcgtcgctagcccagcttgaagcagtcctagaaaagcagctggattcagccgacagtctgccaagcggaccattacatccgaaagatctagcaggtctttcctctacttcaccactatataaactatatctacgccaattgttgtcaatcgcgtcagctcaccccatgagacatttcgccatcctgtcgcaagtgtgattgctatcagttcccgcaaccccgcccccctggaatctctccggcaactgtatgcagatacaaatactggcccacagaaagtgcccgactggatacatccagagtaccttcggtactatgtacttgtgcacgacgaggaccgcgatgatatttccgcttctaccaaactttatgatcagatgaagcgtcatttcggcttacattgccacctgctaaggctacgcagcaatcagtgtgtcgtcacagatgatgatagtgtccaggtgccggagtgcgagtggttatccccttcagagcggctttccgaacggccaggtacgcgaaaatatataattatgtctttaaataaaagctaactgtcccagaaccacttgttgatctcgactcggatggtcttctgtatctattcgactctgatgtaatggcaatcaaagggtttgttcgagaactcgtcgcgcagtccattgtcccatttatggaaaatagggttgctgtctggaacgatcaagtagcatcgcgaaggcgtggtatcagcggcagattcatgtcgatatctcgcaaatgggccggctttggaacg

SEQ ID NO: 23244 - DNA, 314 bp, Emericella nidulans
aacaacatcctcgcgtcagagttctcgcaaccggcgcaaggaagagcgcaagcgggcccgtggaaagaaaggaactgtctacgaagaagaatacctggttaacagtgtgcgacgactgattgaacgtgttggcacgactgttcccgaagtggagaatctggttgagtctactctgcgcagggggatgagggagcgtgctgcggcgattgagaaggctacgagagatgttttgaagctgtgtgaggaaagtcaggaggaagttttcattgttcaacagaagcaacagctagaagagggagaaaatggggagcagg

SEQ ID NO: 23245 - DNA, 797 bp, Emericella nidulans
tcgagccctgcgaacttgctccgaagcgcagaattgctcggcatatgcggatcacagtcttccccaaaatcatcgccattcatctttcacgatccatgttcgaccggagcggctccacaaagaatgctgcaaaggtcgctttccctgaacggctcccgctcggtgggatcttgagccaaaagtggttcaaactgctagctattgtctgccacaagggcagtcataacagcgggcattatgaatctttccggcgcaaccacctctaccctccatactcaacacccagcgtattcagctcctatgcacagagccgcgcagccagcgagaacccctcgcgtgtggcaagcccccgtcttcctgcgagtagcagcagtaccgagccgccagctctaaatatttcaccaccggcctcaacttctactaactcaccgttgtctctaacacctgattctccatctagacccccatcagcaaccgatctcaagagcccccgtccaacaacatccagctctcgtgtttccttccaaagcacacactcgtcctctaaacagactatttctcccacttctgcagcacgcaactcttcatcacttgataccgctcgtctcagcagccccgcctcgagaagctcacttgcagaacgcaacgcctcggcaacagacacagaagccagtgcaagcgcaagtcttgcatcgcgaatccggcgacgtcgcaagacagctgataggtggtggcggatctcggacgagaagatcaaagagtgcaagacctcggacgtgctgggcatgcagaaggag

SEQ ID NO: 23246 - DNA, 500 bp, Emericella nidulans
cagctttctgccggcggttcttctcctacgacgaaatgctcgaagccttatgactcctcgaagcctcttgtccagtatgcaatgatgattgatgctggaagtcagggttcccgaatccacgtctacagatttaacaactgcggacccacacccgagcttgagcatgaagagttcaagcaaaccgagccgaaagagggtggttctggcctcagctcttacaaggaggatgcagagggcgcagcaaagagcttggatcctcttatggcggtggctatgtcgactgtccccgacgagtacaagtcatgctcaccgattgcggtcaaggctactgctgggttacgcatgcttggttctgagctgagcgagaagattttggaagccgtaaggactcgtctagagacggtctaccctttccccgtcgtctctcgggaaaaaggtggcgttgagatcatggacggcaaagacgagggtgtctatgcttggatcaccaccaactacct

SEQ ID NO: 23247 - DNA, 704 bp, Emericella nidulans
gggctattatgagggttggagcatgaacagaccttgcaatgcattctacccggaacagattcccattggagtctatacacacctaaactatgcttttgcctccattgatccggagacctttgaagtgcttgtccctagcgtttacgaaaaggatctcatgcagcgtctgacgttactgaaaaagtcagatcctgatttgaaggtcttcgtggcggttggcggctggtcgtttaatgaccctggccctactgccacagtgttttcggatattgcaggctcggaagccaaccaaaagaaattcttcagatcattggtcagcttcttgtcaacatacgactttgatggcattgacctggattgggaataccctgttgccgacgatcgaagtggccgtgaagaggactataagaatttcccatcctttatcgccaatcttaaaaaggcgttgaaagcttcgggtggtcgagatggactcagcattacgctaccagcttcgtactggtacctgcagcactttgatattgtcaagctacagaagagcgtggatttcttcaatatcatgtcttatgacctccacggagcttgggatagcaacagcaagtggctggagccccagctgaacgcccacaccaatttgacagaaatcacaaacgccctggacctgttgggagaaatgatatcagccctaataaggtggtcgtgtt

SEQ ID NO: 23248 - DNA, 850 bp, Emericella nidulans
gctgaatggatgcgggattacggtgccactgtcactcaccttacacctgctatgggtcaaatcctcgttgaaggcgcctctgcccagttccctacccttcaccacgctttcttcgtcgaagatatcttgatcaagagagattgccgctcattgcaagggctggccccgaatgtcaacattgtcaacatgtacggaacgaccgagacacagcgtgctgtcagctacttcgaaatccccagctactcgagcaacggtgggtacctggacaccatgaaggacgttatcccggcgggtcggggaatgctcgacgtgcagatgctggtcgtcaaccgcttcgagcctagccgcatctgcgctattggcgaagtgggtgagatttacgttcgtgcagctggacttgcggaaggataccttggttcaccggaactgaaccagaagaagttccttacgaactggtttgttgaccctaagacgtgggtcgagaaagatgccgcagagtcgcagggtgcgaatgagccctggagagagttctatgttggacccagggaccgtctctaccgaagcggtgaccttggtcgatacactccttccggagacgtcgagtgctctggtcgtgccgatgaccaggtgaagatccgtggtttccgtattgagctgggtgaaatcgatacccatctctcccgtcaccctcttgtaagagagaacgtgacgctggtgcgtcgtgacaagttcgaagaacctaccctcgtcagctactttgtgcccaacatgaataagtgggcctcgtggctggaagaaaagggcctcaaggacgatgattctgccgaaggaatggtgggcatgcttaggc

SEQ ID NO: 23249 - DNA, 500 bp, Emericella nidulans
cactcggcctcgccctcgtcagcggcttcggcggccttctgggcttatacattccaggctatgaggcagttggcaagggctaccccgatatcacgcacttaatgacttaccctactctctttatgtacactacccttccaaagcttgaaattggcggcagatattgactataaggccaggggcatcggcaacctcattggcatgcctcttgccatcggcattggccggcgaatcgtgctgctcgcctcgacaatagttctggtgattggagcaatcctctgcgcggcccaagagaactacgaatggcacctctggtcccgatgtgcagtcggattggcagcagggcagagtgaggccctggttccgatgatcacccaggaaatcttcttcctccacgaacgcagtaaagctctgatgggccaacaggctatccaggttagcctaacagctgtttgggtcctctttgcgggggagatcgccaacgcaatcacgccgcagtg

SEQ ID NO: 23250 - DNA, 500 bp, Emericella nidulans
ttgagaaccacatacaggagcacgttctggatgaacatgatgcttcggaagccggcctcaagaaaaaaaagggatcaagctcctccctagccaacgataatgagttgcgaaaactcttgcggcagtatgagggttatacactgaagcaaatggcggcagaagtactcaagcatgagggagctggcggaaaggcagaaaaggtcaaacaagtcttcgcaatgatctggtaagtaccaataacataatcatgctcccatttgctgaatcttatacgccataggttgaaggagaactgcagaaaaagcacaggctctgtccgcagagatcgtgtttactgctgttatgccgaaaagtgtggaaccgaacgtgtctccgtgctgaatcctgcgtctttcgggaaactagttcgaatcatatttccaaatgtacagacgcgcagattaggcgttaggggggagtcaaagtatcactacgttgatttaacggtaatcgaggaaaag

SEQ ID NO: 23251 - DNA, 613 bp, Emericella nidulans
gcgtctgacccggacttttttgcgggccgtgcaatactctcaatgcgaaactctgccttggttgagttcaatgactgtattatggactccatgcgcagtcaggagtctatgcggtattccgctgacgaggccttgacggacaatgttgctgaaggggtggaggaaatcacatgtgaattcctgcaatctgtggatctgccaggtcttcccccagcaagattatgattgaaggttggtatgctgatcatgttgctgcggaatttacgggctacagagggtctttgcaatagtacgcggatgcagattatggagttatgccgctatacaatccgcgcgtgcatcttgacaggtgacttcagaggctcagtgcatcccccggattaccctgtattcaaagcctggcgatctgcattatatgctgtcacaaacacagtttccggtccatccatgctttgcaatcaccacaaataagtctcagggtcagtctttgcagcaggtaggtgtggatttgcgggtccctgctttctcccatggtcagttatatatagcaatgtcgcgggttacagatatgcggcgacttagtgtcttgctgccgccaggtattcggaccact

SEQ ID NO: 23252 - DNA, 668 bp, Emericella nidulans
ttcctggccgaccttctgtcgtcggcattcataggggcagcgggggaggaaaggcgctcatgttcaacggtcatatcgacacagtcagtctagcaagctacgagacagatgcactctctggcgcaattggcaccaggggcggaaaacaggtggtccttggccgagggagtctcgacatgaagggcgggctcgcaagcgcattagcggctctttcagcgatcaaagccagttgcgagcccttgcgtggagatgtcattattgccgccgtctccgacgaggaggacgcatcccaggggacgagggacattctagctgccggttggagggctgacgccgctgttgtacctgagcctacgaacgagattattgcgcatgcgcacaagggcttcgtttgggtggaggtcgatattctcggcgtggctgctcacggctcaaaccatatcgacggagtcgacgctattctccatgctgggtggttcctgcaagctttggagaagcacgcaagcaggctccccattgacgatatcctggggccggcgactctgcattgcgggctaatccagggtggagaggaggcgtcctcttatccagccaagtgcaccataacaatcgaattcagagcaaacaacggtcaaacaccacagtcaataatatctgatatccagcgc

SEQ ID NO: 23253 - DNA, 850 bp, Emericella nidulans
tccatgcgaggctcaggggcgccaccagttgaaatgggcaaagctagtttgcagcatgttcgtaagctgctgcgacaactcctagatgactcctctgtaccacaccctcgcagctgggagacagcgctacttccaatattactgaaagcagccgatgaagtagacccgttagtccagaacggcgacgatatggacattcgtcattatatcaaattaaagaaaataccaggtggacgccctggcgatacttcatacgtctccggcttggtctttagcaaaaacgttgctctcaagagcatgccccgaagtatcattcagccaaaaattcttatcatcgccttcgcgttggaatttgcacgtcatcagcaacagttcatgagcttggagcatgttattcggcaagagcgcgagttccttgaaaatctggttagccgaatatcagcattacggcctaatttattgctggttgagaagaatgtttccggcttggctttggaactactagaccgcgccgggattgcaactgtgtacaacgtcaaatcctcagtcctcgaggctgtttcaagatgcacgcaaacccgaattatcacttctatggataaacttgtgaccaccccggtaaccagcgaatgtggcagtttcgatgtaaaaacctacgtctacaaaggccagcgcaagacttacatttacatctcgggttgccgaaaagaacttggctgtacaatagtgctccgcggaggaaatgcagatacacttgcaaaagtgaagaggataaccgagtttatgacctacgtcgtgtataacctcagactagagacctgcgtcatgagggatgaatttgcccagatcc

SEQ ID NO: 23254 - DNA, 540 bp, Emericella nidulans
atttcttgcgtgtctaactctcacagacttttccatttatcagtcaaatggtaactgcgaggatcattgcagcgacagcgctttcgcgattctgttagacaagaactgctggtgctctgatgttgtccccaacgaggacgacaacgttgacacttcaaaatgtgacgataactgccctgggtatccggacgattcatgcggaaacgcgggcgacagtttgtacgcctacatccagctcgggagtccgtcatcaacagcgagcgcgtcgtcgacaaaatcgacaacctcgtcaacgtcaaccacaagctccaaggttagtatatggcatctatgctgtggtttgatttcatactgactacgtgaagacctctacaacatccgacaccacgactactacccattcaagtatcactgagacccaaactcacggtggtgtggtgactactataacggtagacagttccagcgcaacatctgcagcggattcgaacgccagtacagaggacagtgacagcgactccggcctcagcggcgggtcta

SEQ ID NO: 23255 - DNA, 691 bp, Emericella nidulans
aatggcgacgctgtcagatcgatttgaattgatgaaggaggttggtgacggcagctttggtagcgttgcggtagcacgtgtacgaaccgccggttccaacatcgcccgtcggggcactctggtaggacagcttgtctgatgactaaggatcaatatactgatctggactgcaggttgccatcaaaacaatgaagaagacattcgattcattggctccatgcttggagctgcgggaagtgatcttccttcgaacgctccctcctcaccctcacctgggtccggcccttgacatttttctcgacccgctcacccgcaagctgcacatcgccatggagtacatggacggcaatcttaccagttgatgaaggcacgagaccacaaatacctggacggaaagcatgtcaagagtattctctaccaatctgtgtggtcttgccatattcacgcccaccattttttcaccggatataagccagagacatcctggtttacatccgtccgacgattcaatttagcggttttgaatttggacttttcattaccttccattatcagggaaattgcgtttcggttgtggggacgcttcaagtacttcacaatacgttcaacatgtccggctcaagtttttctgcgggaattttgccgaatattggtgtggctggatgaatggcttaacctttccgggaaagtt

SEQ ID NO: 23256 - DNA, 850 bp, Emericella nidulans
gtccttcggcgagctcctctcagttggaaattccgcgtcagcggccatctgctgcagatcttgccactttcgagaaagccctacaggaagcgcaagagtatcttttgaactctctaggtagccaggatgacattatcacggaaaatgtgtccattccgagcaagtaccaggagaaggttcgtaagttcatctcccgtgaacaggaagcgaagggtgaagatcatatccctgttcgtgcacttgttggtggtggcccgagccgcaacggcgagccactccccagagcgacgtcgcattgcgcggtccatcccgcctagtgaaggaaattgccgccaagatcggagaatttgtcgtcgagcaggagaaggatgaccttgaaagaggctacacaacctcttttgatttccccaagaaatttgcaaacttcctcattggaaagaggggcgagaatattaacaagcttcgtgacgaatttgatgttgatatcaaggtcgaagacggcaaggtggaggtcaagggacctaaggcaaaggctgatgcagccaaggctcggattatcaatctcggcaagaagctggaggatgagacgactcacgtcctgaaggtccctgcccaataccaccgagagcttatcggacagaagggtagccaagtcaatcgactccaggaccgttactccgttcgtgttcagttccccagggcagttgtcattaacgacgaccagtctgttgcggacactgctagcgaggctggcagcgctcgacctcaacgatcccagcaggcttctgacgaggtgattgtcaaaggacccagcaagggggcagacgccgcgcgcgatgagatcctcagt

SEQ ID NO: 23257 - DNA, 850 bp, Emericella nidulans
tagcagttgctaactgtcactatcatagcctcccgacaatggtcgcgctcaatacctcccggccctaggcccactggacgatacggacacactctgaacattcttggctccagactctacgtttttggagggcaggtcgaaggatacttcttcaatgatttagttgcctttgatctgaaccagttgcagaatccaggtaataaatgggagtttcttattcagaacagccatgaaggcggacctccacctggtcaaattccccctgcaagaacaaatcacacgatcgtcagttttaatgacaaattgtacttgtaagttgagccatccctttctcttcttgtctcttcttgtctcagtgctcatactggtaggttcggaggcacaaacggtctacaatggttcaacgacgtttggtcatatgatcctcggaccaacagctggactcagcttgactgcgttggatttatcccgacacctcgagaaggacacgcggctgctctcgtcaacgacgtaatgtacgtctttggtggacggaccgacgaaggtatcgacctcggcgatctcgccgctttccgtatcagcactcgacgatggtactctttccagaacatgggaccagcaccctctccgcgatcaggtcatagcatgactgcctttggaaggcaaataattgtcctggcgggtgagccgagctctgccccaagagacccagtggagctcagtatggcatatatgcttgacacatcgaagattcggtacccaaccgaaaatccaaatggtgagaaagcaatgtttcctgggcccaccaaaaccggagctggagaaaagccgccatcaggtcgagtatccc

SEQ ID NO: 23258 - DNA, 850 bp, Emericella nidulans
ccggacgctcctattcgctccgcagagagccgcgatatcattggcgcatctacaccagagccctccaaactgcctacaccattgacatctccagtcaagcctaagctgagcgtttttcacggcaaagttatcatgctctcttcagacttggaaatcggctcgcaccttcgagacactatctcagcaatagtggaagaaaacggaggcaaggtaaccactgatgtttcagaagcaaccacattcatctgccggttcagagacggcttcaactaccgtgtggcttccaggctaaataaggatgtgggaaatctgtcttggctttaccatctaatgacttacgactcttggacatctccctatcgacgtcttttacactacccaatcccgaaaacccctataccaggctttgagaaattcaagatcagcttgtccaattacgttggtgaagcaaggtcgtatctagagcatttgatcacggctacgggtgcagaatgcaccaaaaccttgaggcaggaaaatacacatttagtgactgcacacgacaatagcgagaagtgctctgctgctagggaatggaatatccatgttgttaaccatctttggctggaggaatgttacgcacagtggaggctactaccagagtctaacaataggtacactcacttcccccggcggacaaacttgggcgaagttgtgggccagacccgattggataggtccgcactcgagagtatgtttttcgcgtcagaagaggcctcttcggaaccttcgagcaacccaatgcagaaaagggaacagaacacacaaaaagggaagcccttgggctctacagatattgatgataacatgg

SEQ ID NO: 23259 - DNA, 850 bp, Emericella nidulans
acaagaagacggatcaagggagtcggacggtcctaaccgagtgccgtgggagtcaatattaggtctcccggttgatgtatgggaaaagctactgagcccgtcgcgctcgtggcacaaaagacgctttgagctcgggattaatgaccttgcgttcgtcggatggccggtctttgttcgcgaagatggaaattggagaaaacaacgacgaaagaaaaagaagaaacagcgcgcagaatgggaaagcggggagcttggccataacgatgcgacagaagattctcaggacgatggtaacgatgctgttgcagcatcgaccgagaccctgagtccgttctcggcgcttcatcccatatcccaacggccgtccgtacctaacagtcgatcttcgcaaatgtcaagcgagccattagatgctgacgacaaggatatgatgactatgttcaatgtcgtctttgttctggatccgcccttgctagaatattcaatgcgtgtacgagagatatatgacaacgtcatcaagaaattctccaaagctttgaagtgggaacagtctcggacaaactacgtatggagggaatgccagcacatcttgaacattaaggagaaggcaaaagaaaaaagtactaaatgaccgcccagtaactccctacggaaactaatgtgtgctggcagggtcatctctgaacagtctttacgccgacataatcagccagtcatcccttgccagagcgatccgtactctgtataccagtatatcagcttcgaagattgcatctgtcactttgagccctgacgtgtccatatctcttcagataccgccattgacctcgacgccgtacctcccaggacc

SEQ ID NO: 23260 - DNA, 850 bp, Emericella nidulans
ctctcgcagcaggcatcgtctttcttgtcctcttcggccttacaatggtgggccagacagttcagtttgcctggaaacggacctggtggtgcgctgtattcgctgtgggaagtctcagtaagtacttctttacccttcgctattttataccgtcttctcataccataccaccacagccgaagtcataggatgggccgggcgaacctggtccgcagaatgcccatacaacaccaatgcttttctcatgcaaatcacaaccctgatcatcggtaagccctccactatatactttacagatcttcgaacttgggagaagctaacaaatccgaagcgcccaccttttacacggcaggcgtctatgtcctccttggccgcttcatcgaactccttggccgcgactcttcaatcctcagcccgcgagtgtatctcatcatcttcgtaacttgcgacatcatttcgcttgtagtccaagccattggcggcggaatggcgtctgtcgccgctgcgcaagaaaacggcaacacaactccgggcacaaatatcatggtcgccggtatcatctttcaaatggcatcgattactgtcttcgtcctctgcgcggcagattttgtccgtcggaccctcgtccgcggctcttgcagaactataccaagacaatcgtgccgctgcttgcggcgatggttttctcgtactctgtatctatgtccggagcatttatcggaccattgagttgttggaaggctggagcgggtatcttattaccacagagagattcttcattgcgcttgatgggtcaatgatggttcgtactgtcgccatattcaacctgatccatcccgggtggtttttg

SEQ ID NO: 23261 - DNA, 500 bp, Emericella nidulans
tttcaatggtcgctgcaggcattggtcgttgcatgaattttggaattcgagcattcgtgcgtccagtttctggttgctctgaatcctttgcttcggctttggagactcggtcgatccgctgtttgatcatggaccagcctagctcttccgctttctctcgagcaggcgcgcttccctcgcgtagccagccggcaatcagaccattaagatgctttggatctggcctcacaccgcgttcatacatcagctcgactaccaaagcggcggaatcgacttcacccattccaatcagttttttcaaccagctggcgtagaaaaaccgattttcgaaccgacggggtaggaccgtgagcgtggaaagggaaactttgttaacatcctgttcggaaacagctgaggcctgcaggttcccagccagtccgagggctgcagtgtacagagccgttgaatcgtttgccgaatccttgcctgtcaccatcatgtccttgaatacagcgatg

SEQ ID NO: 23262 - DNA, 500 bp, Emericella nidulans
atctcgctatacccagttcgtatctatctaacagagtctaaacaggattctatcgtctcttcgccctcatcaacccttccttccccagctcccgtctcgtgatcaaagtccctgcgacgtgggaaggactccaggcatgccgtgacctgcaagctttcaagatcaaaacgctgggaactacgctcttctccatggagcaggccatactagctggagaggcaggctgcgtatctatttcaccatttgtgcacagtctcaggatactggttgatcccgagtaagcagccaccaatgcaagcaattgcatttatatcgttgtgagtactgtactcacaacatataacagatacaaagaccctcatcctgtgtacaacctgacggcccaagcgcagcgctggtataggcggcagtcgctgccgacaaaggtcaaatcatgctccacagtgggtgtggatgaacttctggaacttgcggggatcgatgcgctcaccatcatccct

SEQ ID NO: 23263 - DNA, 850 bp, Emericella nidulans
tatcaactgggagagttagttcacctcggtgctagtgacgatctaccagtgtcccggactgttcagacattctctatccaggctcttgatgcgctagcaaagcacaaggcgcgggcgattgacgtctgtgctgcgctgagtgtcaacgtgaatcacggtgttcttatgtttttgactcgaaaggctgtcaacgaactaagcgttgagggtgatgggaatgacgacagtggccaagacgaatggcgggatgcgttgctcgctttattgcgtactcttcctgggtcaagcactagaaccccggagacccttgtagccgctggactgattccgatgtttgtggatgtcctcaacctccgcactgataaagctcgtcgtgtttattcccgtgttatggaatttctcgacagtttcgtgctcgctgtccgcgatgcctttggaatacttactaacgccaagggtttcgacgcgctttcagatctgattgattatgaaactaaatcatcatttcagaatgtatctcggggagccgggatcccggactattacaagacatcgtcaatcgattatcagatcccatatttccaacagcagactctacgttggttgtttcggttcgtcaatcacataatgcaacacagtggcggtggatttgatcgagttctccgaaacttgattgattctccgcagctgctgacttccctgcgcctcgccattgagcacgcacctgtattcggctcccacgtctggagtaacgccgtcaatatccttagcagcttcatccataatgaaccaactagctatcaggtcattgcggaggctggattaagcaagagttttctggaggctatta

SEQ ID NO: 23264 - DNA, 343 bp, Emericella nidulans
tataggctcatcccatgccagctcgcgtcccaaaacctccctcgaccgtcccagggacggtggagacgaagagacaacacgcccaccgaacttgcgcacgctcatccttcaattcgaagttgaggacactggccccggaattccgcagcacctgcaaaaccgcgtctttgaaccgtttgtgcaaggtgacctccgtctaaatcgcaaatatggtggcacgggcttgggtttgagtatctgctcgcaactggccaggctcatgagaggtcagatacagctaaatagtgagcagggacggggcacgctatttttagtccggatcccgttgggttttgtcaaggaa

SEQ ID NO: 23265 - DNA, 500 bp, Emericella nidulans
tcccttgcacacctaacaacgactctcaccagccaacctacccacctcccacccccgcaaccagtaagtgtgatcctaccgtctctccttcccctcatcctagactccaatgcctcagtccgcgcaaatctgcttaagctcctccgtgcactcccgcaacatgacgtaaaagaccatgtgggaacactcatgccgtatataagagccggtatgacgcacttggcggctgaggtgagggtctctagcgttgaggttttgggctggctcgtctctattgcgggggatgaagtcgtcggcgttgcgggggggtgggtgaagacgttgaattgtttcttgagcgtgctggggtggcatgttgctgcgaagagcaagtggacctcgctggcgacctcaacttcaacatccgcgtcaggttctggcaatgagaacaggatcaagcacaagcggaaaagcaagttacggcaaagccggcgcaaagggtcggacgcaggtccgtggcc

SEQ ID NO: 23266 - DNA, 850 bp, Emericella nidulans
aaggattcaccccacctttgttatcacaacattcacgggagactcgtcgcataaagtggtcgctggagtgttaggggttcctacggacgagtcgacatggtcgccccggttgaaactctacttcaatgcagttaagaggtttcagctacgagagaaagagacgcccctgggcacagtcatggtgacagatttgaactcgttcccatcgggattatccgtcatagctgtgccagatggcgacatccttaagcaccgtgaagactttgttgtgaatgagaacctgaaacggttaggctgtgctggtcgagccggtttgaagctccaagaaccagcacctgctaccgtcgctaaatttcaccaattataccggacaagcgaaagaatccccctttacagcgccgtggtggagcttgtcaaacaatgtcaaatcgctttgatgatgtttggtaagctggcaccggagtatgtggatggcttactttgcgatgtcactgaagatgctgtgggagactggtggaccgatttcggaatggacctgtataacatcgaaccaagcgatgggaagctcggtcctaccacagtagcagccttgctaggtactctgatgggggctcgcaaccggcttcatgcgagcggtgcccctgtcggcaaggatgcctttgacatcgttaacctcaaacgcggaatcgggagttttcaaaaatctcagaaaattgaacggacgcggcggctggatcgccacactttggacagattacaccgagttactgcaaaggcagccaatgctgagggctggactgacgcggtcaaatcaaccatggctgagctcagcgggcacgggggcgagatg

SEQ ID NO: 23267 - DNA, 850 bp, Emericella nidulans
gagtttctggacgatctcgtggtcgatgggcaatcgatcaagatgcatgtcactcctggtggcaaggacagcaaccgggcatgctgcatggtagcaatccgctgtgggagtgacgaccaggaaccgatcaaagtggactgtgtgggaaagaacctcatcatcaacgcgcgggacgctctgattgtcatagtagctcagtcaacataccgctgcgatgacgctgacctcgaccgcgccacggttgccgacctagaagcggtcctggccagctcggtggaagacatatgggctcgacatattacggactatcaatccttgtatggccggttggagctgaacctgggaccagatgcaacagatataccgacggaccagcgtatcttgcatgtgcgaggcccagaacttgtggccatatatcttcgctacagtcgctacttactgatatcgtgcagtcgtcctggcaggaaaggtagttctgatcgcgtgttgcctgcgactttgcagggcatatggaatgcatcgtttcatcctccgtggggatgccgctatacgatcaacataaacctgcagatgaactattggcctgccaatgtgggcaatttattggaatgtgaagagcccctgttcgcactgctcgagcgccttgccgtcactggtactgagactgcacgcaagatgtacggctgtcgtgggtggacagtgcaccataatacggacttgtgggcggacactgcgcctgttgatcgctggatgccagctactttgtggccactcgggggtgcctggctgtgtactcatgtctgggagcggtttctctttaacggcaacaaggcattcctgaaacgcatgt

SEQ ID NO: 23268 - DNA, 500 bp, Emericella nidulans
ggtaccgcttgcaaacagtacaaaccgtacttcgacatttcagctaccactttattggcctgcaactacagctatacgtgaattaagtcaagcgaagtcatgtatcactggccctgagtctaatcttttcatccgatttctcgtacccattggacgctatcccgacggtcaatggccttccccctcccgcgggcatcacgcccccggagatctccttcctggccgaaatggagctggttacaatcgtccctcggcagcgcttagagggcctcgagctcttaggtgtacgtttcccttatacctataatcatccagaatctgatatcaatctagggtcccgtcgcacccctcattccaccccgccgtacaaacgttcccctctggctcgccctcctgctgaagcgccaacgccgcgcaaatatccttccaccaccctggctacatccggaatcactgtcactgatcctggatatcgaaacccgtgaccaggcctaccagca

SEQ ID NO: 23269 - DNA, 850 bp, Emericella nidulans
ccaatgactacagaattttataccgagtatatgcgggagaaatcaagaaaggctgccctattatataccatgaaccctcgcaagttccaggcgtgccaatttctcattgactaccatgaaaaaagaggcgataaggtcatcgttttctcagacaacgtgtacgcccttgagaagtacgcgctcaagctgaagaaagcctacatttacggagggacgcctcagaacgagcgtatgcgtatcctcgagaacttccaacacaatgaacaagttaacacaatctttctctccaaaattggcgatacatccctcgacttacctgaggcaacctgcctcattcaaatctcttcacattacggttctcgccgccaggaagcacaacgtctaggacgaatcctccgagccaagcgccgcaacgatgaaggctttaaggcgtttttctattctctagtctcgaaagacacggatgagatgttctactcctcaaaacggcaagcgttcttggtcgaccaaggctatgccttcaaggtcattacccacctgcagggtattgaaaatctagaggggctagcatatgccacaccggcagagcgccgcgagctattgcaagaagttatgcttcaaaatgaaagttctgcggacgtcgagaatgtcacagacgacctcttctctgaacggtctagtggtaacagggcccggcaaagcctggcgtcaagcggagctgtctacgcttagtgggctggctggtggtgaggacatggcgtatatcgagtacaacaagagcagaaataagcaactcaaggagaaacagcatcaccctctgttcagaaagctggagcgcgagcgccagagg

SEQ ID NO: 23270 - DNA, 481 bp, Emericella nidulans
caaccttgtctacttaacggcgttcacgttccagcaattgactttgacgtcaaccattttgttggcatcagtgagtactggcatactagcacatgaggtattcgaaatgggtcatacggataaagcatacgacttcaatacatatcaacaccgcgtcgaggagttttgctcgcaggactgggagtctatcgagcaaggtattgccgaacacaagtggggaaagaagttggatcgcgaactagcatatgaagtatgcttcaaggcatcgtggatcatcaacgttttgcacgatggcatcggggttccccgtgttggcttggaatcaacatcagcgtcttctgtcaacggaaccaaagaagttctggagaatgggatgcacaaaggcttcctagatcctttccaagcggttaacaaaattgattctaccgaagtcagctggactcttggcaagatggttttgtatgctgcatcgcaggttcct

SEQ ID NO: 23271 - DNA, 500 bp, Emericella nidulans
acaatgaaaacgaagaggaatacacaccacagcctaatctggggggggaacagaaatgggacaggtatattcccaggcgtctccgttgcaaaaacatactaacaacgtagacctctggtgtatccccgttttgggaaaaaaaaagccgaagtgaacgctctggatttgcggaggcttgcaccccacgaattcctcaacgacaacattataggcttctatatacgctttctagaagatcatcttcagcgatgccgccctgaagcagcacagcgagtctacttcttcaattcatacttctttgcaactctcaccaagtctcctaaagggcttaagatcaactacgaaggcgtggcaaagtggactcgcaacgtcgatatcttcagctatgactatatcgtcgtaccaatcaatgagaacgcccattggtatatggctattatctgcaacttgccgtacctggagggtatcggtgaagaagagaagccgttgccatctgagtc

SEQ ID NO: 23272 - DNA, 649 bp, Emericella nidulans
gaaaccgtcggtcgcgactcgctccgtgagaacagtcgccttacggcagccaagtggcttataaacgatgtgctcaaggactatccccaagttgttcaggaacgccgtgagcctagcaagtacactctgatcaatgccctcaatgccttgtcctctctagtttcttcactcggctccgcctttggttcacttgccgaaagttgccgtgatgctctgcttcaagttctttctcaccctagctatactgtgcagattcacgctgcacactgtctccgtatctttgtccttgcctgtccagtccagctattgtcatgcgtcactatctgtctgaatagtctcaaccgcgaggttgggcagctatctaccccacgacagtctccgcggcgttgtgtcggctatgctaatggcttgtcggcgatgttaagtacatctcggttgcagccactttatggttctgttgatatctactctcgtgtgttcactcaagctaccgaccttctgaaaacaagcagcagcgccgaactgcgtgctgccagcacgcaaattcaggtggcatggatcctgatcggagggctgatgccattgggccctagctttgtcaagatccatctctctcagctcatgttattgtggaaaaatgctctaccaa

SEQ ID NO: 23273 - DNA, 850 bp, Emericella nidulans
tttaaccgggagcgcatgcacaagtttcctgtctggctgatcatcaggtgagtctatcccactctatgtgtcatggcgctactcgcaagcagattctattggaagcgcctggctgtcctatctctcatctggttcgcgtatgagttcttcgcatactccttcagcacctactcctccgcgtgtttcgtcatcatcctcggcgatgaatatccgcgggggaagagcttcggctggaatacggcgatcaacctgttctatatccccggctcggtcgccggtgcttttgcgagtgactggctgggtccccgcaagacccttgcaatcggcgtcgggcttcaaggcgtcattggcttcatcatgtctggttgctacgaatacctcaatacgcccaagaacgttgccgccttcgtagttgtctatgggtacgtcggtccccgaagcgcacaggactgcccacgctaacacctcgtagaatcttccttgcccttggtgaattcggccccggcgacaacatcggcctttgtgccgccaaaacaagtgctacctccatacgcggtcagtactacggtatcgctgctgccttcggtaaagtcggcgcctttgtcggcacatacatcttcccaatcatccaagacaacgcccccaacgcgatcagacgaggccaggaccccttctttgtgtctagctccctgtgtatctttagcgctgcccttgcgattttctgtctcccacatattggccaggacaccatcaccgatgaggaccgtaaattccggaagtacctacaggaacatgggtatgatacgtctactatggggcagactcagaccccgcagccgactgaggaagc

SEQ ID NO: 23274 - DNA, 850 bp, Emericella nidulans
gaaacgattgacagagcaatgatcggtactactcgtcgtgttaacccccgcaatggctgcatcgaatttactcgtatgccctcgaatagcgtcaacaaagacgatgccaaagaatccgtcatatatcgccttgatccggcacgggagaagggaaagcttatattccagatgggtacggctaacccggaattagccgttcaagctggcaagctggtcgcagctgatgtgaatggaattgacgtgaactcggggtgtccaaagccgttcagcacaagtggtggaatgggagccgcactgctacgtactccggacaagctggtgtccatccttgaggctttagtcaaggaagttggcgaaccgtatcagattggaatatccgtgaaaatacgtctgctcgagactccagagctcacggagagcttggtgtcaaggctagtacgcacaggtatcacgggccttaccattcactgccgaacaacacccatgcggccgcgcgagccgtgcaattcgcgaccaactccgtatgattgtctcaacatgtcacaacgctggcgtcgcctgcatcatgaacggagatgtaacttcacgcgacgaagccctcgccctcatgcaagaatatggtgcagacggcgcgatgattgcgacagccgccgaagccaactcatcctgctttcggtctgaggcagacggcggtctcgctccctggcgcgaggtagtccacgagtacgtcaaactctgtatcgagtgcgaaaaccgctttggtaacaccaaatatctcatcaacatgctcatacccggcaaagacaaggagttcagagaagcaaagcaggctaaatgctacactgacctc

SEQ ID NO: 23275 - DNA, 850 bp, Emericella nidulans
atgtcctttccgcccagtactcagttctgagccataagtttggtggaacgatggagactaccatgatgctcgttccgaagaaatcagcggcggagacgttcgaggttcggcgctgtgaccaggagctggaggattggctggcccatcttccctcggagattcagtatgcacctgcagcaccagcgaagttgagcgaacgccaggaggtcctgcactctcaccgtgctttacttaagatggtgtacttgactacgtcgagtgccctgcatcgaccccaagttcttcccgccgttccgttcccctctatggacacagagttgcaagatatgtctcgcaacaaggttcggttcgctgcaatcgagattacgaatatcgcccaagatctgcatagtctggatttaactcgatatttccccacaaccggtgtaacggtgcttcttcctgccgtcattatccatcttctcgacatcaaatccagcgaccagaacgtccgaatgaccagtttgcagcgcttctaccagtgtatgcgcatccttcagcgtctaagagaaatctatgcttcagccgactttgcaacttcattcttggaggctgcgatcaggaaggccggaatacagcttacggtgccgcctcaagagttacagaaacgctctaataactctggagcttctcggaatacgactttgactcctcctccagattctcttgctcaaaagatacccgatctgacctatcccaagactggctcgatgggaggaatgacactcaatttggtagacgaagctcaaccagccttcgcctctacaccgccaccatccgacggtagcgaaaatggaagcactaacaacat

SEQ ID NO: 23276 - DNA, 392 bp, Emericella nidulans
cgaacgcaagacgccagaggagacagaagctttgaaacaagagcttaaagatctaggagcaacagtggtggttacagagactgagctactctctggtgatttcaagaacatcgtcaaggaggtcactaagcaagggaaggaacccattcggctggcgctgaactgcgtcggcggtaagaacgcgacagctttggcaaaggttctagctccgggctcacatatggttacttacggggccatgtcgaagcagcctgtcgccctaccctccggacttttgatattcaaagacctggtgtttgatggtttttgggtcagcaaatggggcgacaagaacccacaactcaaagagaacaccatcaaagatatcttgcaattaacacgagcaggaaagt

SEQ ID NO: 23277 - DNA, 850 bp, Emericella nidulans
tgcggtcacctgggaggagctccccgttcatactccaaggaaattacactaactctttccttccttgaagctctccgcaaggccggatatttcaagtagaatatgcgcaggaggcagtgaaacagggttccgtcgtggttggactggtcaataagacacatgccgtgctggttggcctcaaggttcggaatcccatcaactccagtaaccatccccacggacgaaatgaaccactcctaacatcggaatgtgtctttagagaaacgccgaagagctctcctcatatcagaagaaaatcatcgaagtcgattcgcacatgggcgtcgctatcgccggtcttgcatcagacgcccgcgtgctctccaactacatgaagcaacagtgtctcggctcccgaatgacctacggccgccccatgcctgtgaaccgcattgtctctcagattgccgaccgtgctcaaacgaacacgcaacagtatggaaagcggccatacggtgttggtttgcttgttgctggggtggatgaagctggtcctcatctattcgagtttcagccttccggcatgactcaggagatgctggcctgcgctattggagcacggtcccaaatggcgcggacctacctggagcgcaacctagacaagcttcaggagtccagtcgggatgagctcatcacccatggcctaagagctcttaaggagactttgtctcaggacaaggagctgacagtagacaatacgtctgtcggtgtggtgggtcttgcggacactgggaaggttgagagtttcaagctctacgagggacaacagctcctaccgctcttcgaagcgctggaccagtcagacgcaagc

SEQ ID NO: 23278 - DNA, 371 bp, Emericella nidulans
acataacatgcaaccccctatcaacctcatcaaagcattcgttcctgatcaatgctctgatgcagccggagatgtgatcaccgtcggtgccggtcagcagttcggcggggtatacgattgggcgcatgccaatgggtatcgggtcgtgggtggcacatatgcgggtgttggaatggccggtggctggctagccggaggaggacatagcatgttgtcgccagaattgggactcggcgtcgacaacgtgcagcagatcaaggccgttcttccaaatggagagtacgtcactgcgaacaggtgtcagaaccaggatattttcttcgccctacgcggtggtggaggcggtactttcggtgtcgtgacggaaatca

SEQ ID NO: 23279 - DNA, 618 bp, Emericella nidulans
tccaaagtatgcaccggatgctttttgtgtgcgggttgttcctgctgtctgtccaggggctcctcattaggcatgatggctcttttcaaccggatcacatactgcgagtaaactccaagaactatatgcaagcatgctcacccaggtattcagtcctggtgaacgggtctttccctggtccagaaatacgtgttcaggaagggcagacaagttggatcagagtttacaacgacatggagaatctgaatgttactatggtatttatataagtttctcgttatatcaaactaactagactaatatatttctagcactggcatggtctgaccgcaattactgcacctttttccgatggtacccccatggctagccaatggcctatcccacctggtcactttttcgactatgaggtgaaagtcgagcccggttatgctgggacctatttctaccattcccacgttgggtttcaggctgttaccgctgccggtccgcttattgtcgagtcaactaaaccgccaccgtatttctatgacgaagaacgcataatcgccttatccgatttcttctcaaacaattgatcaacctaccaagtagctaaacatcctctatctttctttt

SEQ ID NO: 23280 - DNA, 588 bp, Emericella nidulans
gttatggtccaggatgacatgctcaaccgcattttatatggaaggatatggcttttctgtcattaataatgctgtctcggacgctctggagcagatcacgttcaagtatcctcacgcaaacatcctggaaatcggcgctggcactggtggaacgacccggagcatcctcgacagaattgggagccgctatggatcttacacttacaccgatatttcccccgcgttcttcgaagctgcggctgagaagttcgaagatgcaagagaaaagatccagttcaaggtcttggatgtcgaaaaggaagttggcgctcaaggatttgacgagcatggttacgatgtcatcgtggccgcgaatgtcctccatgccacacgcaagctggaagagaccatgaaaaatgctcgggccctactcaaacccggcggctatcttgttctgatggagattactggcccagatgtcttgcggacgcagttcatcatgggtggtcttccagggtggtggtacggtgtggatgacggacgtgtcctgtcacccgccatatcggctcagcaatggaaccagctacttctcgatactggcttctctgg

SEQ ID NO: 23281 - DNA, 566 bp, Emericella nidulans
atccgacacgcacaacacaaagcccaatcttttagatggtgatatcctcatccatgctggcgaggttacaggggcagggactaaagaagagctcgagaagcagatttactggcttgactcacaaccgcaccgattcaagatcgtgatcgcaggcaaccacgaaaccttccttgaccgtaattaccatagccatcatgggaatgaaagagttaccatggattggaaatcgctcatctatctcgaaaatacatcagctatcctggatctcggtgctgggcaccaactgaaagttttcggatcaccgtatactcccaaacacggcaacggggcttttcagtaccctcgaacagatactacaacatgggaagagatacctaaggataccgatctcctggtgacgcatggtccgccaaaggcgcatcttgaccttgggcatcttggctgccgggtacttcgccaggcgctgtgggagatggagtcacgacctctgcttcatgtttttgggcatattcacgggggctacgggaaggaggtggtatgctgggacctgtgtcagcgggcatatg

SEQ ID NO: 23282 - DNA, 850 bp, Emericella nidulans
gaagatcactaccacatccatcctgataagatcgcggaggaaatagctcgtggaacgtcggtcatcctgacttctaacccgcggaaccctactgggcactttatctccggtgacgagttggcccacattcaggacatctgtcgagaccgcgctactctcattcttgacgagttctatggcggttacaactacacgaccgactgtgacgggacgaccatcagcggtgccgcgaatgtcgttgacgtgaacaaagacggtatgatggccccgtttgacagtttctgagaaatactgacgaagatagacgttctccttatcgacggtctcacaaaacgtttccgcctaccgggctgcgtatcgcctgggttgtcgggcccaaggaattcatcgacgccctcggctccgcaggctcttacctcgacggtggcgccaacgtccccttccaagaagccgccatccccatgcctcgagccctccctcgtacatcaggaaatgaaggccttgcaaaccccacttccgcgagaaacgcgatttcgtcctcaagcgtcttcgcgagatcggcttccgcatccaagacgtcccgcaagcaaccttctacatatggctcgatctgacctcgcttgacccgccgcttcccaaagaagccaacatatctgacggtctgaacttcttcaacgctcttcttagcgagaaggtcattgtcgtgccggggatcttcttcgacttgaacccggcgaaaagacgtgacctgttcgacagtccttgccatcactttgtccgcttaagttacggcccgaaaatggaggtgcttaagatgggtcttgatggtattgagcgggttatccgtcgt

SEQ ID NO: 23283 - DNA, 850 bp, Emericella nidulans
tcgggacttttatcgcgttgtggtcaacgatatggcaagtggccactggacaacgattttggatgaactgaagaaggattttaggacgttcctacgagatgtgtcgatattgaaggtaccagaagacccagttgcgtcaacaagtgctagcactactccgaaggcgactattggaggacgccctagcactgcccttcgcggcaatattctggaagcaattcaccttgcgtcgtctcatctagcgttcgaccacattgatcgtgacatggtccatactggaacatccatcattgtcattaccccgggaagtggcgtcttcgaagtgtcgtacgagtctctagcctctaccacagaagcgctcacaaatcgcggaatcgctatagatctggtctgcctgagcccgatgccactccactcagtgccgttgttcaaataccgcgagccaaaccgaggagggagatccagcttctcgtatggcggcgatattcaaggcggaggatattcaccggagatgcgccacccctttgcaagtctgactaaccgcacgcatttctctccgaaatcgaccttctcaagcacgtctcctgctagcggtccccgcgggccttggacacgcgcgaacgattggagttacggtatcccgcattggttggatatttcctactggaacccagagacatatagggagtctcgacgaattctgaagaaggatccaaatgctcccatcccgtttactgtgactaaaaaatcaaagctctttaaatcacgtgtgcgcatgtatgagatccagatgggaggggtcatggagagtgagcagtcaaatatttccataccgtatctcctagaagac

SEQ ID NO: 23284 - DNA, 850 bp, Emericella nidulans
agctaaataagaagaaagaagatcgtcttgtcaaggtgatacgttctgggaagatgatcgagatttctatccacgatatccttgtaggcgacgtgatgcatctagaacctggtgacctggttccggtagatggaatctatatcggaggccacaatgtcaaatgcgatgagtcgtctgcaactggtgaatcagatgtgctgcgcaaaacgcccgcacaggatgtttacggcgctatcgaacgacacgagaaccttgccaaaatggatccgtttatcgtctctggtgccaaagtgtccgaaggcgtgggcacattcttggttacggctgttggtgtgcactcaacttacggcaagacaatgatgtcccttcaagacgagggccaaactacaccgctgcagacaaaactgaatgtactcgcggaatacattgctaaactaggcttggctgccggtctactgctgtttgttgttctgttcatcaaattccttgcccagttgaagagccttggcaacgcggatgagaaaggtcaggctttccttcagattttcattgtggctgttactgtcattgtcgtcgcggttccagagggcttgcccttggctgtcacgcttgcgcttgcgttcgctacgactcgtatgctgaaggacaacaatctggttcgtctgttacgtgcttgtgaaaccatgggaaatgcgacaacaatctgttccgataaaacaggcacactaactgaaaataaaatgactgctgtcgccgcaaccctgggaactggcactagattcggcagggagatcacaggcagcatcacctacaaatagaaacggggatcggccagctgattcgaaaacga

SEQ ID NO: 23285 - DNA, 850 bp, Emericella nidulans
aagagcaaaacacttcgcgagcaacgagaattcttaccggcattcgctgtacgggaggatctcttacgggttatacgtgataatcaggtggtggtagtggttggggagactggttccgggaagacgacacaactcactcaatttctttacgaggatggttacgctaaatttggaatgatcggatgcacacagccccgtcgagtcgcggcaatgagtgttgccaaacgcgttagtgaagagatggaagttgacctgggagatcttgtcggatacgctatccgctttgaggactgcactggtccgaacacggctatcaaatatatgactgatggtgtccttcttcgagagtcacttgttcagactgaccttgacaagtactcctgtatcatcatggatgaggcgcacgagcgggcactgaatacggatgtgttgatgggtcttttgaagaagatcctggcccgccgaagggatttgaagttaattgtcacatcagccacgatgaatgctgagcgattctcacggttctttggcggtgctccggaattcatcatccctggaagaacgttccccgtcgacgtccatttctctcgcacaccctgcgaagactatgtggatagcgctgtcaagcaggtcttggctatccacgtttcacaaggccctggagacattcttgtttttatgactgggcaggaagatattgaagcgacctgcgaactagttgatgaacggctgaagctgttgaacgatccgccaaaacttagcattctaccgatttacagtcagaggcgggcgcagcagcaggctaagatcaacgcacccgcagccccaggggtgcgcgaggtgataaagc

SEQ ID NO: 23286 - DNA, 850 bp, Emericella nidulans
acggcatcaaagccgtgagtactgtcttttcagcaaatggacgacataacttacaagctgaaaacaggttaacgagacagtctacaactacatgaaatttgccaacgagatgggcaacggatgccaggatcagattgccctctgcaaagcaacaaaccgttcttcttttgccgactatgctctctgctcggaggcaactaacatgtgcagagataacgttggtacgtacttctacctgagactctgggaaagtaatcagctgattatcttccacagagggactcctactacaggctacgagcaactcgaggcgtatatgacattcgccacccgcacaatgtaagccgttgatcctaatccaggttctctatactaacataggaaaaggacccaacacccccgaacctcttcgtccccttcctccagcaagactgggtcatgaatgcttcttggcgtgaacatcaactacacctcttccaataacgaaatttactatgccttccagcaaaccggtgatttcgtttggcccaacttcatcgaggatctcgaggaaatcctcacctacccagtccgcgtcagtctgatctatggcgacgcagactacatctgcaactggttcggaggccaagccgtctccctcgccgtcaagtacccgcattccaagcagttccaggccgccggatacacgcctcttcttgttgatggcgtggagtacggagagactcgagagtatggcaatttctccttctcccgtgtctatgaggccggccacgaggttccttactatcagcctgctgcgtcgctgcagctttttaaccgcactttgtttgggtgggatattgctgagggc

SEQ ID NO: 23287 - DNA, 850 bp, Emericella nidulans
gtgctacctggaatcgttgggtctctacaagcgtgtgctcggtcgcgaccatcccaagaacttttccgtcctgcacgacctcggcagtctctgcgagaaagacggatacgccaccgaggccgcagcgctgtacgagcggtcctttgcaggccgactcaggaccctgggacacaacgccccagagaccctatgcagcatgcagcgcttagcatctcttaaagttctgctcggcgatcttgagtccgcacttttactgcttgagaacggtcccggccctcgacacggttttcggcatccagaacgccacaaccctaaacgcaatgaacaagctctcttcactataccaaaagctcggtctagagaatgaatcacgcattatatgcagccgcacaatcccccactgccgcgctgtctttggcctctccgcccaaatcactcgcgacgccgtcctgcgctacatccaaagttcagataacttcgactttccaccggacatccaagatattatcgacagctacaagcgctcccgcgatgttgactgcctgcgcgtcattcaccgtctcggccgttcatacatggacgctgggctcaaccgtgacgcagcagctctcttcgaaacgctcgtcgaggactttttggcggttaagggtcccgaagcagcggagacattcgacgcactgagtgcgctttgcgtctctcgagaacatttggactccgtggacaaagcgatgctggcatacagacagcttgtgcatatggcgaagcggacacaagatgggcatcaatcacggaaaaggatcgcgtacgcggagaaacgtatctgtgagctaaaccggcgtcgggagaccct

SEQ ID NO: 23288 - DNA, 581 bp, Emericella nidulans
gaaaacatgttcgaagctgcattgtttatacatgggaccacaaatcatctgcggcgttttgggccgggatgaaagtgtatgtctggtcacgccgataaagtatatcttcttccaaacctaacccggtgtatgaacagccaaccggtgctcgccgacgaggtccaaacgttcaaggctcttatcacgatacataaggtcctccaggagggacatccggtcgtaatccgcgaagcccagcagcatgccaattggatcgatagcttgatgaggggcgttggaggagaaggcattcgaggtgcttcgattcccagtccgcacccaatttcgcggccgcagccttactgattgtatgcttgtaggctatggtcctttgattagggagtacgtcttcttcttggagtccaagttggcttttcacagaaatcaccccgaattcaatggtatggggaacgattcgatctcactcgcgcgattactgaggctgctgctactaggattatttgagtacgaggaatatattagtctgaagacgatcaatgatcctagtattatatagtgtcacctagagcgtgtgtgtaaat

SEQ ID NO: 23289 - DNA, 500 bp, Emericella nidulans
gagttcttcctcgtccgatttggatgagcggattaaggagcagtatgctgatattcaggtctgtctttgtacggtcatatctcttacgggtgtcgctgactttgcaaatagaaccgccaaaaagtctcctggcagaaaatgagtcttgtcttttcagccatgttcgttctcttcctcatcctcttgctcggagcatacaaggcgtcggctggtttccgcgcatcccactcctctgtgaagactctgctgtccaacggaaccgccttgtttgcgcctacgaccatattaatctcgctcgacggcttccgcgccgactttctcaaccgggggctgactccaaccttgaacgccttcatttcagagggcgtatctcctccttatatgcatcccagcttccccagcgttacctttcccaaccatttcacccttgtcactggcctatatccagacgtgcatggaattgttgggaacacttctgggaccagagctacaggagcagt

SEQ ID NO: 23290 - DNA, 850 bp, Emericella nidulans
aaacaaagcagtatcagtatccggattgtcaagccatagcccgaaatctgtgcaggaggtgatggatatgatcatgaagggtaatgcttgccggacaatgtccccaaccgaggcgaatgcacctcttctcgatcccatgcggttcttcagatcaatgttgcacaaaaagacagaaatgccgatatcaacgaaccacacactatggcgacctttagcattatcgacttggcaggaagcgagcgcgcgacgaacgaaaaataggggggaaaggctctttgaaggtgcaaacatcaacaagtcactcctcgccctcggtagctgcataaatgcactctgcgatccacgcaaacgaaaccacgttccttaccgaaactcgaagctaacacgactccttaaattttcgctcggaggcaactgtaagacagtcatgattgtctgtgtcagtccatccagccaacatttcgacgaaacccagaataccttgcgttatgccaaccgggcaaagaacattcaaaccaaggtcacgcgaaatgtattcaatgttaatcgccacgtcaaggacttcctggtgaagattgatgaacagatggcattaattaacgaactcaaagcgcagcagagggaatccgaaaaagtcgcctttgccaagtttaagacgcagactgaaaagaaggatgctgctgtgcgggaaggtctcgctcggatacggaacgcctatgatcattcgctaccggagcggcaagaaagaataaataatatgattagattgaagcaggtaagccgcagaatcggcctactgtcatcgtggattgcagctttcgataatgtttgcgcaaattctgaaaacgag

SEQ ID NO: 23291 - DNA, 629 bp, Emericella nidulans
agggcctggcgaaacgagacgtttcccatccgccacccagaaaccgggaaattacttctcgagatcgagcgcagcgccagtacgctcttcggaatctttacgtctggcgtacaactgacctgcttcgttgacgatcctgatcgtggactgctactctggatagcgcgccgatcacttaccaagcaaacttacccggggctcctggataacactgctgccggggggctggagacccgtttctgggaaaagccagttgaggcggtcgtgagggaagctgtcgaggaggcgagtctggacgaggatttagtgaggaggggcttgtgtggtggcggtgcgatttcttactatcatgtaaaaagacccagtgagcgctgtgaggctgggccattgcagccggaggtggagtacgtgtatgaactacgtcttgatccgagtactatgcctgttcctggggatggcgaggtggaggggttctatctgtggacggtagaggaggttatgcgtgctttgcgggaaggagagttcaagctgaatagcgccgtcgctgttattgatttcctggttaggcatggagtcgtaacagcagagaatgaagcaggctattagagattgtagcaggagcatcaggt

SEQ ID NO: 23292 - DNA, 736 bp, Emericella nidulans
actgtctatcgtctctacggtcccctcgaaccaaaggatgtgcctataatccgctgcatcggcctcaactataaaacacacagtaagaagcttcttttaccccatcgagtgggcgatgtattgacaaattacagttcttgaaaccggaaggccgctacctacttgtcctaccgtcttcaccaagccgagcccagcagtagccgatcatgacgctccggttcctattccaaaaattgcacaggagcaatgcgattacgagggtgaactcgtcattgtcattggccgtgaaggcaagaatattccagaagccgaagctttgaactacgttgctgcttacactgctggcaatgacatttccgcccgggactggcaacgcgaggctggaaaggccggtcctgttccccaatggactttcagcaagtcttttgataactatgctcccctgggaccctgcctcgtccgacaggatcagcttaatgaagcgagtatgctgtctctacggaccttggtcaacggagatgttcgtcaggaaagccacacgtcggatttgtgcttcggcgttcggaagcttgttgcattctgtagccaaggtcaaaccctacagagaggatctttgatcatgactggaactccgggtggagttgggcttttcatgaagccacctcagtttctgaaggatggtgatgtggtgagcgtggagatagagtctatcggcaccctgcaaaacaccatttcc

SEQ ID NO: 23293 - DNA, 534 bp, Emericella nidulans
cctgtcctttctatagacctcgctccatccagagagtactttgtttcttcatctgctgatgcggttttggccaagcatcctattccgccacttgatgtctcagatgcctgtgaaacaccattaaagtgtgtcaatacaaagcatgccggacaacaagggttaagggttcgatcagatgggaagatatttgcgacagcgggctgggactctcgggtcagggtttattcgtgcaagacgatgaaggaactagctgttttgaagtggcataaggagggatgctatgccgtagcctttgcagatgtttcgaccacgcctactgaggctattgcctcggccaaaattacgggcgatatacctgaaggcccaaacaatgctgacgaatcagccgtcattcaacatgaggaagcccaatcttcgctcgcgcagatccagcgccaacgaagtcttaaagtccaaaagacgcattggctagtcgctggctcgaaagacggaaagatctcattgtgggatatctattgagtcataagtgctatg

SEQ ID NO: 23294 - DNA, 522 bp, Emericella nidulans
taatgtatccttgggctcgatctgcttggtaaagagatgtgcagtttaaaccccttttcattctgtttgctgtcgtgggtatctgtctcgcccgatgtgtgggggtgtttcccctggcgaaagccatcaactggtttatacggtatagggcacgtccacggggagtggaagtggctgatgagttgccgatcgcttaccaagcaatgcttttctgggccggacttcgtggtgctgccggtgtcgcactcacagcggacctgaagggtgcgaatggaccggccttacgcgccactgtccttgccgtcgtggtcatcactgccattatctttggaggcaccacggtgcgcatgctatatatccttggcattcggacaggcgttgttgaagaactcgagtctgatgatgagtttgatatcgaagtctctaatggaggcacttactataagcgttccgataccggattgggatacacaccccgtcgtgcagacaatattccgctcgacggagtgtcgcggagggatc

SEQ ID NO: 23295 - DNA, 850 bp, Emericella nidulans
tctagtcgtctatttccgacccgagtcggtgaatctcgcgattcagatgctggatgattcagactttagactgggcgtgcctgggccgcaggggcccatgcgcgtgcagcctgcagatttctctttcaaaagccagcaagaggcgccgacgaagacgagcatgcgggataagaaaaaaatcattaagagaacgcagaaactgaataagtatggctcagctgttttaggtgaagaacagatactaacacacggatgcgtagcaaactcgcagattgggatgacgatgagcccgctgcactggtggatacgaattccaagtttgagaaaatcgtaatattgaagcatatgttcacgcttcaagaattggaggtacatctctgcaccggcactggtctctggctgctacccccattgctctgagctgacaatacacaggaggacccggcagctatccttgacatcaaggaagatatccgtgaagaatgctcaaaactcggagaggtcacaaatgtcgtcctttatgacaaggaagaagcgggcgtcgtcagcgtccggttctcgaatccagagtccgcgagagcttgcgtcaaggtacatacataacccacgtgaacccctctgtagccgtcggaagtctgaataagtgtgctgacatcgccagctcatgaacggccgcttcttcggcggcacagcagtcgaagcatacatctcagatggaagcgagcggttccgcaagtcgaatgagaagcgcgctgcactggaagatcttgctgagaagggtctcgacgcagaagatgacgatgagaatcagcgtctcgatgaatttgggacttggttggaaagctcacat

SEQ ID NO: 23296 - DNA, 850 bp, Emericella nidulans
gatactggagctctcaccggtgatgccagtcatcaaatcttcttgaatttgaacaacctgcttgatttctcccagcggtttctcatcagactcgaacaacactatgcgcgaccagaagaacagcaaaattggggtgaattgttcatccaacacgaagaagctttccgccagtacgagccatttatcgcaaaccagatgcgctgtgataagacctgtcagaaggaatgggacaaaattcaggctgcgccgcgctcccccgatctccaacagatggtcgcgcaacctgcaacactcaatggtttcttcgtgaagccattccagcgcttgaccaagtatcctctgatgctatctgttagtatctctgagtagctacttgaatttgattcgatactgattatccgttaccaggaactgcgtaagcagatcgaggacccagaccttcaagccgacatttcgcgcgccatcgactctatccagtccgtcctagatgccgccaacgacgccattgacaaggagcaacttgccgctgcattcgttgaactggacgaacgtgttgatgactggaaagccctgaagattgagacattcggtgaactgctatgatttggcacgttgacggtaatcaagatcgacaacaataaagattcagaaagataggtgagcaaatgttacactccacagtccgacttgcgatgacagcttgttaatatgtccgcgattacagtaccacatctatctctttgaacgaatcctgctttgctgcaaggacataaaccctaacaagcagaaatcaagattggtcggcggtagtaaagataagccgaataccagcaagggcaagccccggctc

SEQ ID NO: 23297 - DNA, 508 bp, Emericella nidulans
accggcggccgtgtgcgaagcaaggcgttagaggcttgttcaatctcgggcagacatgctacctgaacgtcattctgcagacgctattgcatgatccgatcctcagtacctactttctcggtaatggtcaccaaccgcatgattgcacggttgcggattgcattggatgcgctgttgctgaagcttttgccgatttccacagcatcgacaagccggagggcttcgcggcgctcaacctgcttctggcctcctggcgtgcaagcccagtaggtgcatttccgagttcttaagctgcgacaagctgactttcgtgtagaccttggctggttatcaacagcaggatgcgcatgagtactaccagttcctcgtcgacaagctgcataccagcgcggaggggaaccgggaaaaccatgaaaaaggctgcagttgtttctttcaccgaacgttttacggcaagcttcgaagcagtgtgacgtgcgatcgttgtggtaatgtcacaaaaacggaa

SEQ ID NO: 23298 - DNA, 500 bp, Emericella nidulans
catcgtcactggatgatgctattacctcggaccctgcaaaagactccaagaaagctgcgtatctaccaaggcaggtgacaatccccgtcagtttcacaaggttcccgctcggcgttcctgctccatctccagccgaacttgagcgcatccaaagccgtctcactgcgtttgacgcctccgaccgtgaccgcattcttcgcgaaaaagccctgaatgagttggagtcatatatctataggagtcgggatctcgcagaggaggaagagtttgtaaaagtgctcaaagcggatgacttaaccgccctcactgaaagagtggccgctgccagtgattggatttacgacagtgaagacgccaagacaccagagttcaaggagaaattgaagtcattgaaggagatcgtcgaaccagcattgaagagaaaacaggagaacgctgttcgtcctgcgcgtgtgcaactcctacaggagtcacttaagaatgcccaaatggtgataagt

SEQ ID NO: 23299 - DNA, 850 bp, Emericella nidulans
tcctcgatgggtataccgtacgctcgttccattcatccaccggcgattctatcgacccgatttctgacgcggtgatagttattcgcaagcaatatcgcccttccaatgatttcctacgtctattggcgtgaagacacctcttccttccgactgacgtgcatcaacatcgccacgctgagcggcaccctcctcggccaagtcctgttcggctatctggcggaccgcaacgggcggaagaagatgtacggcgttgaactggcgctgctgattgcgtcgacgctgggcgtcgcgatgtcctcggaggggacacacgggagcatgagcgtctttgcgtggctgatctggtggaggatcatcgtggggatcggcgtcggtgcagattacccgttgagtgccgtaattacgtctgagtatgttcaacgcctattccaaatctcgaagctatggtggttaggagacagttattaacaacggctgccaaccaggttcgcacccacccgccatcgcgcgcgcatgatcgcctccgtcttcttcatgcagccgctcggtcagatcgctggcaatatcgtctcactgatcgtcgccgtcctgagcaagaagcagggacatgacgatgtcacacgcgcagttgatatcatgtggcgatgggtggtcggaatcggcgtcgtgcccggcgtcatcgcgacattctttcgcttctttatccccgagagtccgcgctttctgctggaaatcgaagacgatccggtgcaggccgagttcgatgccacgacactgttcagcgacccggcgcctctgtcgagcctcgggtcgccagagattgccgttgaggagggatatcggtatcccg

SEQ ID NO: 23300 - DNA, 588 bp, Emericella nidulans
cttcatctccactgtcatcagcatgatccggagtgagcgcggcgggattcccttgcgagtacatagtcataggacgttggtcaataggcggaggtagtggctcgccccgtaatcgcgcgcgccgcctactaagcggctcgctctcttccatctccctcttctccatgagacccaggggccgtacctcgtcagtagcttgcgctttttcggggaaaagcatgccaagaggaacgtcttcatcatcatcttcaacgttaggatgagcatcaggaggttcccaagcgagggcaacaggcttctgccgccgatgttcgctctgtttagctgctaccgcctcaagctgaagaagagttgaatgcatgccaccagcattagctgccgttcggcgcctctgtttgaggtcatgctttctttgttccagttctgcaagtaacgtagctggcggcccggtataatggaactcttcatcgtcggtaccctcgctgccttcttcgctgctctccgagttttcctccgaatcaccttcactatcagaactggactcactgtcacctacgcgtaaatgggctgtaccgagcgtttccgcgg

SEQ ID NO: 23301 - DNA, 684 bp, Emericella nidulans
tgagagctatctgaatttcgcgcagctcctcggttacggcgagaacgactggattacgtttaacgatgagatgatcgcaaagtctacaccggccgcgatgttctccaccagtggcaccggagggctaccaaaagccgcggtattatcgcaccacgcaattgtgtgccaacacctcaccatttcctacgatgtgccctatgcggttcgtcgattaatgtcgctgcccatgttccatctttttggtgctctatggacgcacattttcccagtccggtatggccagccgctatacgtcctttcccgttttgagattagccggttcgtcgcagctgtgtatcagtaccaaatcacggagacatacatggtacccgccatgatccatgcttttaatcgctgcacactgccactcgcggattatttcggatccctacgctatgtcggcgtcaccggcgcgccaattgacggggcgtcaatgcagcaattccgcgaattcctgccgctcgacgccgacgcgtctcagctctggggcatgacagaggtaggagtagttttccaaaatcggtacggcgagccaggaaacgcagctagtattggcagactccagcctggatacgaaatccgccttgtcggcgctgatggtaacctggtcgcggacgacaataagcctggggagctgtatgtgcg

SEQ ID NO: 23302 - DNA, 562 bp, Emericella nidulans
accaacatgtcttattatgacatcgattcaattctaacagatgctcaggtatggctgagcctctatcatctcttaagttttcaataatgaaggctgaacctcgctttttcacagaaattgccatgcacatttgaactggatgtccccgggcttggcattctagaaggcaatccaggggagagtgtgagtttttcctcttgggtgggaaggaacattcacgactgatgcaaatgagcagataaaagcgggatcccggattgatctcccactatggctgggcgaaatgctttctatcgggtaattgctcctcacacctcagctagtgacttgacttgtcgcgacttgcatgtctgattttcaggaagagcacgactagggacgtctcgactagttactcttgatataccgtctgcgctctcggagcgcgtgatgaatgcgttaaaggcggaccctcggactgtcgacctgcgctcgctagcgccgaaaaattatcggctgagtgaaagagtcctggagctttttaagagcaaggggtggtcgataatatagcaacgtggagcca

SEQ ID NO: 23303 - DNA, 500 bp, Emericella nidulans
gaggatgctattgctgaaatccaccgtaccctgacgaagaaggatcatgactactcggaaccacatttgtcgtttgacaagtttctagaagaagaacttcgggctggaaggaagaagcctaatctcggagtttgctttcagtcactctcgacatggggtacaggaggagagcatgttaacgtcaagacgttaggaactgcattgtggcggactctcatttttcaagatgtctacgaatggacgatcaagccgtggttggcgaaacccgagcccgagagtggccgtcagttaattcgagattttactggggtggttcggagtggtgagattatgctgtaaatagtcccattccgactggtctttgtctcaggtactgatgtatctttagtgttttgggtcgaccagggtcgggctgctcgacttttctacgaacaatcgctggttatcactcgtcgttccttggtgtgactggctcaatcgctatcactggcggccgttac

SEQ ID NO: 23304 - DNA, 644 bp, Emericella nidulans
ttagtatgaacaaccaatatacctaagatgtggcgattgtttagctactttcccagcacaggaaaggaacaggcgccacgaagcctgccagcatcatggtaccgctccgaagcaatgtaccagctcgagcggagagccattctctccaaacgctggatgcttcttactcactgtaatcgattcaacaaagccggcgactaccttttcttcattatcgccgacttctccttcttccttgtccgagtccgcgacggcagagtcaacggcttccacaatatctgccgccaccgcgcttaccctgtcgtcagggcccgggagggacagccccaattcttacctgccgctactacggctggtctacggattgagaggcaacctcgccaaagcgcctcgcttcgagacactccccaactttgacaagtccgccaactgcttccaatccacgtgcacgtcgacaaggtcggctttgtctgggcgaacctcgaagctagggaacccgatatcaaatggagagacgagtttggcgctgtcgaccaagaagatcgcgtgcgcaaattgaattcgcctcagactacaagttcgaccattcctgggaaatggacgtcgactccaactggaagttgcagatcgagaactataacgag

SEQ ID NO: 23305 - DNA, 500 bp, Emericella nidulans
tcttataagagaacaagccaggcttattcactacacccttctgatcacattgaaccgactaaactctccctcactgccaagtcatcagccgaccatgatgctctggtgacgttccacaatgcttcgatatcatggcaagcagccggcgaccctgtactcgacaatttaaccctctatgttttcatcggcaagatcaccatggtcattggccccattggaagtgggaagtcgaccctgcttaaatatgggccagactcatatcagggctggcttaaaccactgccatccagacagagcagcctactacccgcagacactgtggataatgaatgcatccatctaggacaacatcatcggcgtgacgtaagcagatgaaaaagggtacaacgcgactattgccggctgcactcttggtaagatctagaggtgcttaacgggcacaatcagtacatggctgaaagtgacggattgctcttagcggaggtcaaaatcagcgagtg

SEQ ID NO: 23306 - DNA, 850 bp, Emericella nidulans
gttggcagcaatagcgggcgctctaccgtttccaacagcttaacgcggcagaaaacaccccgttacagcttcgaggcaatcaagctagaggttggcccgccaaacgcctgggagttctacatgatccaaaccgcacatcaccgattaagccagcttccaacgctctcgcgtgcagccgacagtatcgtacgtgcgcatgagatgcacattttcaagaacgagagcatccttgtcgaagattaccgcccacagggaacgttactggacctcgtgaaccttgtccgcaacgaagggatctacggcccggcgactggagagggaggcttagatgagtctctagccatgttcttcaccattgagctcttccgcactatccaggctctccacacctgcggcattcttcacggcgacatcaaagccgacaactgcctcatccgcttcgacgacaaaccagaccccactcagcagatactcgatgaaaacacagatccccgcgaattctactattcaccttccggcgcttttggctggaaaaacaaaggccttgcccttattgactttggccgcgggatcgacatgcgtgcattcgacccgtctgtgcagtttcgttgcagattggaaaacaggggaacatgagtgccctgagatccgtgagatgagaccttggacgcaccaaattgatcttttacggtcttgcggggacagttcacgttatgctttttggaaaatacattgagagcgtccctaccgatgcaagcaaaaaaacgtatcggtttcgcgaaccggtgaagagatactgggaaaagattttctggcccgattttttgatcttctttgaatcctatacgga

SEQ ID NO: 23307 - DNA, 384 bp, Emericella nidulans
cagaccctgctgccaacaagaagaaggtcaagaaggacgtcagcccgaaaattgggaagcgaaacgacatcggaaactcaggaagaagaggaggaagagttgagcagcggagacgaggattttgcagagtctcaagatggtgacggagggtcagaagccagcgagcttgacgacgctgaaactcataagaaagatatcgaggcccttaaagagaaggacccggaattctacaaatatctccaggagaacgatgccgagctgctcgaattcggtgaccttgcagaggttgacgcgctgagcgaaggagaggacgagcaggacgaggagccggctaagaagaagaaaaaggcagcaaaggaggaggaaccggcttctaacctaacg

SEQ ID NO: 23308 - DNA, 500 bp, Emericella nidulans
agatcagctcggctatctcatgcaggatgaagataccgtacgtgatgaactgcgcaagcggtatggaggcgaaccgatatccatcaaggcggtaggcgggcgaagcgaggcgccagcaattctactcgtcatcgacaagggcaatggcattgtggatgctttctggttctatttctatagtttcaatcttggaaatgtggtactcaatgtgcggttcggaaaccacattggagattgggaacactgtcttgtgcgcttccaccacggaatccccaaggctcttttcttcagcgcccattctggaggcgaagcatacagctacgaagccttggagaagataggccgacgagtaagtaaattcgcaggcggttttcaggcatattggaacgctaataattggtccaatccgacagcctgtaatatactcagcaacaggcacccacgccatgtatgccactcccggagtgcactcatacatccttccatggggtcttctgcat

SEQ ID NO: 23309 - DNA, 595 bp, Emericella nidulans
agacgccgctctagcttagttgcaacctcatctatgctacattgggcgaacatgagaaagcagtacgtttttgattccttcggctcgatttggcgctaacaaccacaggttgagtgctatcagggcgcggtgggcctggaccagtatcttgccatcgcctactttcaggagggtgtgtctaatttcctacttggcgactttgaagaagcattggcgaatttcaacgacactctgctctacctgcgaggcaacacatacatcgattatgagcagctcgggctcaagttccggctgtactcgtgtgaggtcctctttaatcgcggcctgtgttatatttacctgcagcaaattggaccgggcatgcaggatcttgagtatgcttccaaagagaaggtcacgcctgaccacgatgtgatcaacgacgccattcgggaaagggcagaagtaagtacgttgccagtactcgcgatccaggctgacccctcagggatataccgtgttctcaatccccgtaggagtagtttaccggccgaacgaagccaaggtcaagaacctcaaaaccaaggactatctcggcaagtcacgcgtgatcgcc

SEQ ID NO: 23310 - DNA, 500 bp, Emericella nidulans
aaccctgaggtttttcgatacttgtgcacgtgattcgagcaaatgttcctccgaggccgagactacgtctgattcgcacaaaattatttcatccactgcaaagttcagagacagtcctcccctcctttctttctctttctcctccatcttcccactccctctcgataaactcacaatggcttttggcaagctttacggtcgtcctgtatgtcggattcctttttgttttgtatttgttcatatcgcaaatacaatgctatctccccacctattcaataggagctgaccgcagaaacaggacaacacccgcactattgcggtcctcgttgctgctaagcacaacgatcttgagcttgagcttgttgagacccaggccaaccctgctgccgacttcaacaagtccgatgcctacaccaagattcagcctctgggcaagatccccgcttttgagggcgctaacggcttcactctctctgaggttatcgccatcgctgtctacg

SEQ ID NO: 23311 - DNA, 850 bp, Emericella nidulans
actggcgccgattgagcactgaacttatgaagctggtcgagtcacaccttatcgagttgatggatcagccctctgtaaccgcagcgcaggtcctgatactgttcggttcatattgcgtctatcacggccgaccgaatctgtcattttccatacttggcgcaacgatccgaatctcgcaagctgtagggttgcaccgggaaccatcgcgcggtacatttgaggacaacgaagaaagaaaccgagtttggtggacgatatacacatgggatcgattcgcatcgatcacgtacggccgcccgttagggattaatgatagagactgcaacataagcagcccagcggatacctgggaaaatccgtattttgtggcacccctggcagaacaaggccataccatctgctattctgcctaccagcgagaactgaaccgtctttatctgatggcttcttcagctctagaggttattttcggttcgcggacttcgggttcatccaaggacctagccggagatgcataccatgcgctggttaaagaagcaacccagaaactacatagatggcggaacgagctgcctgacaacctagtcctaaatctcgaagaggatttccatcctgacggcacgccgtcagctagagcgcatgcgctacaatctttgtcgcttcagttgacttacgacaacattctcatcgttctccaccggcctctgctagcccgacaagtcgaccacctttcgacagatcattcaacgcccggtggaagaggtggagttgaccaagataacggccgttttaataatatctcgcaatcccaaaaaggctcgccgtttaagctctgtaccaggctcctgta

SEQ ID NO: 23312 - DNA, 501 bp, Emericella nidulans
aagaggcggccaagaagaagcagtccatcgtctttctgccttgccacaaatcgcatgtcgactatgtttcgctccagattatctgctatcgattaggcattgcgttgcccgttgtcgtcgccggagacaacctcaatatcccttttgtgggagcttttctacaacacgcaggcgccatgtggattcggcgaagtttcgggaatgatccactgtacaataccgttgtccaagcgtatatcgacacaattctgcagaaggggtataattttgagtgtttcatcgaaggtggacggtcacgaaccggcaagctgctgtcgccaaagttcggtatcctcagctttatcgtggatagcgttctatcaggtcgtactgaggacactatcatatgtcctgtcagtacgcaatatgacaaagtttattgaacagagtacgtcgattataatactgaaggtggatatcgctgacatgattagatcatacattagcgagcttcttggtcag

SEQ ID NO: 23313 - DNA, 850 bp, Emericella nidulans
ctgagatggcagaaatcgcctctctaacgtttggcaggtaggcttttttccgaaacccgcaataacactacttggtgctgactacgtcacagcccgacagacttctacgaaatcatggacatgctagacaagcgactgaacgacaagggcaagaattggcgccatgtgctgaagtcattgaaggtccttgactattgtctccacgagggatctgagcttgtcgtcacatgggcccggaagaatgtgtacattatcaagaccttgcgcgagttccagtacatcgacgaagatagcagggatgtcggtcaggatggtgagtagatatgtgtccacctgttccgtacgagccgccgactaatatgttgtctgttagttcgcgttgctgcgaaagaacttactgccctgatcctagacgaggaccggctgcgcagtgagcgatcagaccggaagctctggaaatcccgggtgaatggacttgatgattaccatggcggccacgcaaacggattgccacccccacggagagagcgacgagaccgtcgacgcgacgatgaggatgcggagtatcgcttggcaattgaagcgagcaagcacgaggcggaagaagagcgcagacgacgagcacaggcgcagagcaatggggaagaggatgacgaggacctggccaaagcgattaagctcagtaaggaagaggaagaactgcgccggcgtgaattggaggaaagcaatgcccagtctttgtttgatgacagcacacccgctgcccagccgcaaccgaccggctacaaccagggataccagcagcagagtgcagttgactggtttggcaatccgatcaacccgcagcaac

SEQ ID NO: 23314 - DNA, 686 bp, Emericella nidulans
gccaaagggacaaacagaaacatctcgccaactgcgatgcctgtaggaaggagggccagccgacggatgagaaatctcagcaccttctttcgaatgttcagggggccgaggccgaagatgactcggtgtcggcacaggagtcgctaccggagaagagtcaaaaattccatgcgcggatatccattggtggaatgagctgtgcctcttgctccaactccataacaaacgagattcgccagcttgaatttgtggacgatatcactgtcacattactctcgaatagtgccactgtaactttttgggggccgcggtcgaatgttgaacaaattattgaacagattgaggatattgggtttgaggcttcgctggacgaggtcaaccaggtcgataccgagccgtctcaaactcaaaatctggggtatattgcggagatttccattgggggcatgacttgcggctcctgctctggagctgtaacgcaagggctgaatgagctgcctttcctgactaatgctgtggtcaacttgatgtctcacagtgcccaggtcgagctggataatccagacgatgcgcagctggttgtacagaaaatcgaagatttggggtacgatgcctcgcttgtcaatataacaccaaaggcagccgagctgggctctgggcttgagaaaagaactgtatcttttcgc

SEQ ID NO: 23315 - DNA, 500 bp, Emericella nidulans
tcaaactaccccgatgccgcgctggaaatggcagatacagttggtgttggtgcgaaagggaacacgcttgatgcgtccgaagttgcggctatagaagcagagcttacgcccgaacaactgcagcttttcgcggaggagaacgattccatggtgcggtattatgaggatactctgagtaaagtccagtgcgtcctgatttgcccttctttcgttcaagtaaagcaaagcgaaactaatctcttattctttctcgtataaataggaacgccgaaaaatcactgcttgaaatatcctccttgcagcaaacgctggtgtcgcacctctctacgcaggaagaatatatcaatataatggtgacagatgcatcgaatacagagacgaatatcgggcgcgcgaacaaagagttgaagcgtgcgagtgagaggcggagtgcagcgcaggccgtgttttgggggaccgtcgggttgtgtacatggttggttgtttgggatttgatattc

SEQ ID NO: 23316 - DNA, 545 bp, Emericella nidulans
gctgccgccgtcgatgccaccgtcgccgccaatgtcgatgacatcccgatcagcttgtacgtgtggatggttgctctgtctgcctcaattgcgggcatgctctttgggtacgacactggcatcatctcagcggtcttggtgtacataaaagacgcactgggtggtcggtatctcacaagttctgaaaaggaactgatcacatcgctctgctctggaggggcattctttggctccattttcgcaggaaataccgccgatagggtacgttggattccgcttgcaaacgccttccaaagctatgctgactggtgcacgagtggggccgtaaaactgcgctttacctaggttgcgtactcttcgtggtcggcgctgttttgcaggcagctgcctacaccatcgcacaaatggcggttggccgagtcattgttggcttcggggtagggtcagctgcaatgatagtgccgctatacgtcgccgagatcgccccgtcaaaagctcgtgggcgactggtgggtttgaacaatgtgtcgattagtgaggacagg

SEQ ID NO: 23317 - DNA, 690 bp, Emericella nidulans
caagtgcgctcagaaggagacgccgacgccaaataaggaggaggagttttcccaaaatcaccacccccgagcgtccagtcaccgctacgcagtacccgcagaggcgcagacaacccgccgccatcaacgacgccaaagtgccgacgtcccaaaaacatcgcacaaatcgcagaccaacctacctcatcgctcagctgagtttgtaagcggttacacctccccacgtgcaccatctccgccggcatggccaaagcatgcatcgaaaagccgaggccgcgagcgcaagagctactcccgccctgccagccctgagtatgcccacggacacagcgcttcagatgcgtcatccgaggactctggcactgcaactcaagaacccatctcgccgcgatacggccaccatcggaatctctccccgccgcacgcgccacatgcccgccggcattcccacgaagcgtactctcgccgaccgcaccgagaactctccccggactctcagcgacggtatgcctaccgggaagcgttcaatttcagctccaaccggccctacgactcggatagcgggcgcggcccgcgccaaccaagagtctacatcgacgaagtgcgtcagtcgcgaaccccagggccatctcctagctacgcggagcccgtcttccgcgagtccgctaccgtcccgacgagccctgtcta

SEQ ID NO: 23318 - DNA, 500 bp, Emericella nidulans
ctatcaggccactcgaaagtgtagtgcacaggtttagtaggcactcgctgggatactaatttttctgatattgtctacgagacacgcctggttggtacatccaacagcctccaataatatatccagtaagcgagcgggccacctgactacgaatagactctctcgtagagctatgtaatcaagaactggctacttttataagtcaacttataggttgaggacggtggaggacttcctttatacattgctttaaagggagagttcatatagagggttggtatcaaaatccaaatcttccacctgattggagacttaacatcgtccctaaaggaactactgccgatgaggtaggtgtttgttgacttggaaacccctatgttcccgccactacagctcgtgcaacagggagataccatcttgtagttcttgatggtcatggcagccatctcgccacctcaatttgtcaagatatgcattaaagacgttatatacctatctgc

SEQ ID NO: 23319 - DNA, 850 bp, Emericella nidulans
tcatcgccattcaatgtctagggtgcttgattggactcttgctatcgaatccagaaaaggtggtcagagatgacgggacggagatcgcggccagtaccgacactattcattggaagacagaggctaaggcaatgtggaagagaggcaaaagcaagcccattcttttgctgacacccctattctggtactttggctgggtccaagcctacccgggcacatacctcgcaacgtactttactattcgatcccgagcactgggcagcttcctctctgccatcgtcggaacaatcgcaacctggctcggtggctccctcgtcgatattccctggacattgaaccgcaagcaccgagccctggcgacgtggaccctcatcgccgccctcaacagcacaacatggatatgggccgtaattatccagaacgaataccgccacactaaccctgtcctcgactgggacgaccagaggaccttcggccgggggttcggcatatacctctttgagcgactgagtgtggggatcgtcgaaaactacatatattggtgtattgggaacctttccgactcgcctggtgagcagatccggtatagctcgctgctgagggggattgagactgctggagtggcggtgggatttggggtgcaagctgtgccgacaaccttgattgtgacggcgggcattaactttgggttatggttcttcgcacttcccattagtttctgggccacattaatggttgtcaggaaatttgaggaggcggcctggaacagtgcggttcggtaggttattagcagatcatacctactagtaggtaagctactaagttcgtatgtctgaacgatgtgaggtat

SEQ ID NO: 23320 - DNA, 762 bp, Emericella nidulans
gaactaagcacgcaaaacggattgggggctcgaaacagggaattatcgacaaggaaaattgtgagattggcaggatatcacctcactttgcggggaatgccatcctagacctactccggagtctccagtaagcggacagtcgatagtcaggggactcagagcaagcggggacatttgggctctaaaagccccaattcggatttgcagtataaaggacagcttcctcttcgccccctgtcctgagtttgatttttcccgctgtcaactgcttgcaatcccctgtgaagtgtggacggagagtaagaatgcgtttctcaacaattctctcggcattcgtgctatcgagtgcggcgctggcaaagcccgcccctcaagtctccccatcctcgcaggaaagcattcagccgaaggagcagagtgttgcacaggtaccaacaggatctgcgccagagcccacgacgactgtggcatctgagccgactgcaagcagccaggttgagcagcaggagaataccaatgcagatgaaccgcagacaacgacacgtgccccagctgccacggcaagccaggagagcactgatgagcaagggagcggcttagacggtgtcttgtcctccgttcttccttcctcgagcgccagtgatgctgatgaggctgctgccccctctgacggcaccgctcctgctcccgaaacttcagcttcaacaagtacagcaaccgaacagccgacgaccaccagcagtcctaaaagcacggcgactt

SEQ ID NO: 23321 - DNA, 629 bp, Emericella nidulans
gcgccaattgagccgaaccccctgttcccaagacacttccttcgcaatctgcgccaaaatagagcctacaggggaccagtacctgtcgtgccgggattgccgcatgaccgtccaccgaaattgctatggaatcagccagtctcggaataccgttaaatggctgtgcgatacatgttccaacgaccgaaacccaatgatttccacctcttacgaatgtgtcctctgtccagtgacttataccgagcatgagttaatagaagcaccaaagacgacgcacaagaagaagacggacagggaccgtgagaaggagaaactcgaacgaggcttggtgctgacgcaatcaagctttaccgggaaaagcaggaggcggttggcaagcctgtcagccctcgggaaccactcaagcgaaccgctggcaataactggatccacgttacctgcgccgtttggacgcctgaaatcaagttcagcaatgcaaaggaactcgaggctgctgagggatttgggctaattcctgctgatcggtaccgtgacacctgcaagctctgcaagtcgaacaagggagcatgtatcccctgccatttcagcggttgcaacgctcgctttcacattgcgtgcgcgttccaggc

SEQ ID NO: 23322 - DNA, 500 bp, Emericella nidulans
gactcggtaaatccagatgcaccctctaattcgagctacacaaatggccggtctgagattcgcagttccaatagcgccgattacgggtggggtgaccattttgcgcaatcatcacagggcgggagcctcggagggccagttcagcctggtctcggagattttggacggcagggatcggtcggggcgagcctaatcccagtcgacagtcactgaacattgaccgggccataaacaaccatgtcaaacaagtggtgacagtaacacttctcccacagaagaaggggttgttcatgtttcagcatcgcaattacgaggttaaatcggcccgtcgcgggagcacagttgttccacgttatagtgattttgtctggctttttgattgccctcacaaacgatacccattcccccaactacctctacttccaccgaaacgacaagcaggtaagtcgcaagaaagcatgttcaagctctcctctccgcgtctcactataaaagcatgc

SEQ ID NO: 23323 - DNA, 500 bp, Emericella nidulans
gccgaagctccgttgaagctgtcgcctcctctagcgccgtcatcatctctccagctgctagtccatcaacctcctcactatggtcgggctcgcttcggctgctggccttgttggctttctctcggagcctgactcagaactgaaggtgtttgctctgcagacactagactctcagatcgaccttctctggacggaagtagttgatgctatcccgcaaatgtttgtttatcatctcgtccaatattgtgccattacagccggcgattatgcggcaacggatatcagactaacattcaatttctcagagaggcgctttacgaagatgaagatttccccgaacgcgaacttgccgctctggtcgccgccaaggtctactaccacctccaggaataccatgagagcatggtttttgcattgggcgctgggaaactgttcaaccttgacaacggcggcgaatttgaggagactattattggtgcgtatattccacacgatgatat

SEQ ID NO: 23324 - DNA, 500 bp, Emericella nidulans
gtgcttggatccttgcactctcttcctcgacaccctgtccattgtgacagattctgacactacgaatgacgccctcaaaccgttagttttttccactggaattaatccggccctcatgcgcctccaactcgaaacacctctacttcagtcgcttggccttgtccgtgacaccttcgcacggatgggcatcaggaagcagacaaatctcctataccggcaatcaaattataatctacttcgcgaggaatctgaaggttactctaagttagtgacggaacttttcaccactagcaataatgaacctccaaccgccgaggtcgttgaggatacgtttgagagggtgaaagcaatgataggtgccttcgacatggatgttggccgtgtcctcgacgtcactttggatgttttcgcagctgtgttggttaagcaatatcggtttttcgtgaagctgttgcgagcgagctcctggtggcccaaagaggacgcatccactagcaatg

SEQ ID NO: 23325 - DNA, 500 bp, Emericella nidulans
  unsure (1)..(500): unsure at all n locations
ccgcctctgcatcaacgcaggcgcctttgatctgctccccaacatcattccctgtgtcctgccgtggtggacccttcgaagtcgacctcgcccaggccgaccttttttttttcttctgtttaaatactcgctttctttcatttttcacttatcaaaacaaccgtcacttagagatagccatgtctgcaccaacggcggacatcagggctcgcgccccggaggccaaaaaggttcacatcgctgacactgctatcaaccgccatatctggtacaggcatgtgaactggctgaacgttatgctgatcatcgtcgtaccgctttatgggtgcattcaggcgctgtgggcgccactggagctgaagactgccatgtgctccggcctgtactactgtatcaccgggctcggtgtcacagcacgtgagatgctacgagcctcatgatggctgatgccgcatgctgacctngtcaagtcaccatcaggtatgggctcactgctcgac

SEQ ID NO: 23326 - DNA, 500 bp, Emericella nidulans
ggtggagatgccgcaattggggcgcaagggcacgcttacccttgctacaataatgacaggggtctgcctccttgcgtcgacgagcgctagcacctcctcagccttgttgggctggaacagcgcctacggtttcagcagcagccttgtctacgccgtgttgtacgcctacacgccggaaatattcgagagcagaaaccgtggaacaggcaacgcgctcgtcagcgcgtcgaacaggctgggcgggattttggcgcccgtggtagctctcatgacagacctgcagagcacgttgccggtatacgtgagtgggatgttatttttagtagcgggagcgttggtcgtgattgttccgtacgagagccgtggacgggcaagtgtttagctagatatcattcattatataccacatccaatcgggttcgatagatatagtacggccagcgcgaatacaatgagccagaggttctgataaccgtgcagttgtatgcaccgtccacttc

SEQ ID NO: 23327 - DNA, 850 bp, Emericella nidulans
caagctggtgcggaagcttgatatgagagtcatgcccattgtctgggccatgtacttcctcaactacgtgggtgttttcttacccatccagctgaccgcacctgagactggctaaccctaacgcctggccaggttgaccgcaatgccatcgcaagtgcacgccttaacgggctggaggaggatcttggactccagggcacgcagtacaatacctgtatctcgattctctttgtcgggtaagtcgtcgtgtgatatgggttgccactggctgatggttttcgtaagatacctgctcatgcagatcccatcgaatatgctcatgtcctcgggaaaagtgcgtgcctccgtctacatgagcatttgcatggccagctgggctatcgtatccgcctgcactgcactcacaaagaattacactggcctggtggtggtgcggtttttcctcgggattaccgaagcccccttctacccgggcgcgctcttcctcctctccctcttctacacccgcaaggagattgcgctccgcatatccattctgtactcggggaacattgttgcgacagcaatgtccggcctgattgccctagcgacctttgagactctcgacggctcacacgggctgaaaggatggcagtggctcttcatcatcgagggggctgtcacgtttggtgtggcgatgttgggcctgttgatgcttccagaccatccgcttacaactggctggctgacgcctgaggagcgcgaactggctcatggccgtatccttgctgataccgtaggcagcgagagctccaagggggtgctggctgggctgaaggaggcctgccgtgacccgcggctataccttcta

SEQ ID NO: 23328 - DNA, 616 bp, Emericella nidulans
caagaccagctttgggagcgcattcctcaggaatggcgtcttgcccaagacaagatcccccccgggatgcattccccagcggaatctgttacaaatgttcagtatgacagggtcaatgtgatggatatccctcggtcatgcggcttgctctccccaaaagagatcgagatcaccgaaagatgggacatcacaggtcttcttagacagattcacagccagagtttcacagcaaaggaggtcattcaagcattctgcaaggtaccaccacatttccctaaagtacgcatgagctaacgacccagagagctgccatcgctcaccaattgacacggtgcctaacagagcccctttttgagcctgctctccaacgagctcaagaattggacgaccacctccgccgcaccggctccccaattggccctcttcacgggcctcccggtctcagtcaaggattcgttcaacatccgcggtgtcgattcgacagtcggcatcgccgctctagctttgcaccctttagagaaagatgcaccgttagtgttaattctgcattccctggcgcgatcattatcgctaagaccaacgtccccaaacaatggcgccttgacttcgaaaccat

SEQ ID NO: 23329 - DNA, 850 bp, Emericella nidulans
ggattgcatcactgtgtgataggatatgggaggaagtaaaacctcagctgtgcatcgactctccggaaggccatgctgctgagcctattgaggaccttaaagtcggcccgaaggatatcctttcatattcgtggcgtgcgctccgggaatctaggtacgttgacttcaagttccgcagtcatgtaaattctaatgtagacagtctccttgtgcatgccacactgtccaacgcgacctacggcccgcagggagaatctggcttgacaagggccgactatgatcaaattgggaagagtagctttactcaacttgcagagcttcgccacagaggagctttctcgactgtcgcccagacgttcgctgcgtgctgccagcgatgcggtcaatcgggtaaccctgagatttccgcccttcctcttctttggtatcaggtaagttgactgggaggtcagtgcaagactaccttactgatattatgcaggaagcgaagaagattatttttgagaaggcgtcaaaactcacccgtcgctctgccggactgccagctttggttgggggaatcctgttgtcgaaccctggtggcccgctgttccagcaggtcattcgcgagcttcaggatgtagcctacataccggcccaacttgaagcacacaatcaaacagttgagctgcctcaagttcatgcgatgaattgtctccgagaggcatttacgaacgccagactcgggcctcacactgaaggcttccttatgccagcactaaatctctcagcggagtgcatgggatctccaatgtaagttgcactccatcacttgtaggtagtttcccccttgcctagatgggcacttcgg

SEQ ID NO: 23330 - DNA, 850 bp, Emericella nidulans
aaggcttctaaaggacacaacaccactgcagcgcggaattatacgccatataatattgatcctggatctatcacagtcgatgatggagaaagacctacgaccaacgcggtatcttctgacactacgatatgcccaagagtttgtaagggaattcttcgaacagaatcctatctctcaggttggtgttatcgggctgagagatggccttgcgctacggatcagtgatatgagcggaaatccgaccgaacatatcagcgcgatacaggatttaaggagtcaggatccgaagggccttcctagtctgcaaaatgggcttgaaatggccagaggtgcactcttgtagggttctttcacatcaagagacacccttccctccatgacgcgtactaacgactgtgccattccagccatacccccagccatggaacgcgagaaatattcattgccttcggctcactgctttcctccgaccctggtgacattcatcagactatcaccacacttatcgatgataaaattcgtgttggaatcgtgggccttgctgcccaggtagcaatctgccgtgagttgtgctctaggacaaatggcgccgatgatacctactacggtgctgcccctaacgagcacttttttcacgagtttatgctgcctgtaacaactcctcccgccacctttctcagaaacactcccacagcttactacttatgaaggcgtttccatcctgaatcatcaagctttctcctatttccttgcacgctattttaatcccactctgggtggtactttttatttactctaccttttaatcctttgctttatgctcatttctttccccttattttccctaccc

SEQ ID NO: 23331 - DNA, 850 bp, Emericella nidulans
tcatcagcgttggcgcccgtcggtatcaacccgacccaaatctactcaattcactggccggtcctgtaactggcttagtatggagtacattggccgatgtcccccaaagctatcatgtcgtcaaggcgctatgcctgctctgcagctggccttttcctacaagcagcacctctacggatcccacttttatgttatgtggcttaatgatacagatcgccatgcaacttggactgcaccgcccctcacatacgcaggatttcagcaaatacagggtggagcttgttgaggaagagctcagagacaaagtgcgaacatgggcgacttgcaatatcgttgcacaacggtaggctttaaatatgactctgcaggagttggctaatttttgatagagttgcaacgggatatggacagccgccctgtacattgtatgactggacgttgtcgtcccaagagtcgatggacccgaatttcaagcttcctgaaagcatcagacataggcttgatattgagaaattttgcgacaaggtcaccaaagctctgtacaccaaccgccgggatcctgtagggctctgcggtagccaagagcggtccacattaacatctctcctttcgcgggatttagatgagctggagactcagctcaagccacataatgactgtaagttctgtcgacaaccgtgaatgcccgggttaattagtctagacattaccgatctctatttgcgcgcatcaaatctccaccttcatttatccgctttctttgacgatttcactgccaaagactaccgcgaacgacttctctccctctttttcgcggccaccacgttcctcgaagctgcgatgaagctgc

SEQ ID NO: 23332 - DNA, 500 bp, Emericella nidulans
taggctcttgaaacgttcaagaaagactatgtaatcgaaacacggaacaagctacaaaatgagtggtcacaatttgaatataacgggaaaacagcttatgttcatgttcctttcttaacaggtgcagcacctgtaattgagaaacaagaaccaacggctcctgctaaagctgaagcaccagctaaggctcaaacgcctgtagcacaaccaaagccagctgcgaagcctgctgtgaaagctgctgaaactagcgagccatctggtggcgtgaagttaacagttgtagcttcagcatatacagctcacccgagcgaaaacggtggcacatatgtcgcccgtgtattacctgcaatgggacatgatctacctgcgaatccgaacatgaaaatgatcgctgttgacccgaaagtaatcccattcgcacctaaagtatgggtataaggttacggaaaaactatcgctatctgaattcgtcgacaagcttctcgagcctaggcgag

SEQ ID NO: 23333 - DNA, 850 bp, Emericella nidulans
gacatctggtcctcgaccagattcatcgcggccggtcattctatgtttcgggggccaaaggtccagctttgttggcctggatcgtgaggcatttgacagcttcaaactgctcaaaagtcatctgacccactgccacgaaacgagtctggctctcggtctgggaggtatacttcctgcaatttttgacagaactcccagaagcagtattgtcgagttgcagctcatgcagttcgcgctgcagtactcgtgtgcaaagacctggatcgacagcggcatacatgttgctgcactggtgggccacagttttggcgagctcacagccatgtgcgtgtcaggcacgctgtctctccaagacaccttgaggatgattgccggccgcgcgcgcatcatcgaggagaaatgggggccagacaggggctctatgatggccgttgacggcgagctcgaacttgtgcagagattactgcataacgcccatgaggccagtcccaatgagccggccgttaacattgcctgtttcaacggccctcgtctatttaccctagctggcacgacaaaagcaatgagggttgtccgcgaggtactgtccaaggacaacaggttgtcatcaatcaaggtaaagtcgctggaaacctcgcatgccttccactcgactctagtcgagccgcttaaaccagatcttgaggagcttggggaggagtcgatcttccgcaaaccagtggttgtccatgagagggccacccagaacagtgtaaccggtccaccacctttaaaaataattgcctcgcacatgagggaccccgtctactttacagagcggtgcagcggctggcaaacagatatgcatgtt

SEQ ID NO: 23334 - DNA, 500 bp, Emericella nidulans
gagtccgataccgagtcgccaatttcctcaggtgctgcgacaccgaagaaagaaaagctgaaatggtacaagaagccgaaccaccattcgactgcctcgctggtcggggcgtcgatgaatctgagttcggctactctacctgcacccgcggaggcattgatgaccccgaagaggggccggagaaaagcatatcgcaagacaagactggaagacgagatccgggtgactgtgcatattgccgagatccttgcgcgccagcggtatattatgcagctgtgccgagccctgatgcgctacggagccccaactcatcgtatggaagagtacatgaagatgaccgcacgggttctcgaggtcgaaggccaatttctctacctgcctggctgcatgatcatgtcttttgatgatccaacgacccgcaccgccgaagtcaagctcgtccgtgttgttcaaggcgtcgacctcggtcgtcttgccgacacgcataacgtttacaaaaa

SEQ ID NO: 23335 - DNA, 850 bp, Emericella nidulans
gccggagaaccaagaactggggcatccatgcgaacgaagaggaagtcgagattgacctgggcgagttgattgcgaagaatttcagccgccccgtgcgaatcctgttcagtgagccagtcctgctcctactaagcatctacatggcctttctatacggcttgctctaccttttcatgacggcatatcctatagttttccagcgaatccacggtttcaacaagggtgttggtgggctaccttacttcggccttatcctgggcgagttccttggagggttcttcatcattgcaatgcaaccctggtacaacagaaaattgagcgcgaatggcgatatcccaatccctgaatggagatgcccaccagccatcattggcagcatggctttcgccgctggacttttctggttcggctggactggatataccggcaatacacattggatcgttcctacggtatcaggaattctcaccgggttcggcttactatgcatcttccttcaatgtctcaactatatcattgatacctatcttgttttgtgagtcctttcatgttgcaccgtgaccatatgtctaacgatattccagcgccgcatctgctttagcggcaaacagtatcctccgttcctttgctggtgcaggatttcccctgttcgctccttatatggtaaggcagactctctctggcaaggtacggcgacgctaacctgttaactctgtagtttaatgccattggagtcaactggacgggaactctcctcggttgcgtagctgccgtcctcatgcccattccccttctcttctatctctacggccatagaatccgttctaagagcaggttcgccgccgaatat

SEQ ID NO: 23336 - DNA, 850 bp, Emericella nidulans
ggcttgcctttggagtcgtgtggcccgctggtacgaatgatctctcagagtatccaggagcaaatttgtgatttctacccccatgttcacatcgaagaggaagctctcgatcctcaccttccctatagcgcttataaaaacgatgaattgcgcattgtggtcaaattgaacattaccatcggccaacataccctggttgaccaattcgagtgggatatcaatgacccgcataatagccccgaagaatttgctgcgcgaatgacgactgatctttctctttcgggcgagttcacaacggcaattgctcattccattcgcgagcagtcacaattgttcacaaagtcgctttacatcgtttcacatccattcgacggacggcctgttgaagatccggacctgaaagcatccttcttaccttcaccactcacttcgtcctttcggccgttccaggccgccaaggaattcacaccctatctctacgaactcaatgaagcggagcttgagaggacagaggtatcatttcaaagagaccagaggcgacaaaagcggtcggtcaatcgtcgtggtggccctgccctgcccgatctcaaagaccgccagcggacaattcgcacgttacttgtatcgtacgttatcccgaacaccgctccttcgctggaagagagtaatgtgttcaaacgatcaggttcgagccgtcgcggacgtgctgcggttggtctgcagagggaggtgatgactcgtatgagtcggatagtgacgagtctttcgtggttggttctcctgccattggccctcatctggctcaggcacggccgcacgagagcatgcaggagctgctactgcagaatgc

SEQ ID NO: 23337 - DNA, 850 bp, Emericella nidulans
gacaggaaaacagatgattagcatggtattcccgtcgggtctcaatctcatgcgcactgattctaaaggcgcagctccttcttctgagaagtactctcctctccaggatgggaacgtcctcattcatgaaggccagttgatgtatgggatgctcaacaaaaagatcgttggtgcgagtggaggtggtgtcatccacatcatcttcaatgaatatggggcagatgctgctgtggcattctttaatggcgcgcaggccattgttaactactggctgctacacaacggtttcagtatcggtattggtgatactatccccaacgaccagactattcaagccattgaggagtgtgtgcgcaagcggaaactggaagttgaggagattactgccactgcgactcagaataagctcgaaccccttcccggtatgaacgtgcgtgaaacatttgagagtaaggtctctgtcgctctcaacacggcgcgtgatgaagctggtactgccaccgagaagagtttgaaggatttgaacaatgctgtccaaatgtcgcgatctggatctaagggttctatcattaacatctcgcagatgactgctgtcgtcggtcagcaaatggtcgaaggcaagcgtattgcttttggatttaaataccgcactcttcctcacttcacatatgacgactactctccagtatccatgggctttgtggaaaattcataccttcgtggcttgactccgactgaatttttcttccacgctatggctgttcgagacggtctcatgactactgctgtcaagactgctgaaactggtcacattcagcgtaagcttgttaaggcttgtttggaggacatg

SEQ ID NO: 23338 - DNA, 698 bp, Emericella nidulans
acatcaatcattcgcgatgttgacctcggcgagatgctggagatccattacacgcccgagcaggaacgcaggctcgtccgtaagctggaccttgcgtacgtcctgctgctgattattgccctcacaggctagactaactgtctttttccaggctgatcccaatcatgggcctcgtctactgcatgcagtatatggacaaggtggccctcagccaagcgacgctgcttaacctccgcgaagacctcaacctgcacggccaggagtattcctgggcctcgaccatcttctactttggctactttgcatggagctggccgagctcctacctgatggtccgcttgcctctagggaagtacattggcgcatcggtgtatgtttttcttattttctgctgcccccgccagcacatatcaatactgacaatgcagtctaatctgggccaccgtcctgctgtgcaccgccgccaccaaaaacttcgctgggctgatgacagtgcgcttctttctcggcgtaggagaagctgccataggtccaggctttggtttggttattggcatgttctacacgcgggaggaacaaccagccaggcaagtcagcccccagtcgccagccgctacctgacgaagtagttcaccatctgacagagcacatagacaagccgcctggttccttggcaacgccgtctcaaacctcatcag

SEQ ID NO: 23339 - DNA, 850 bp, Emericella nidulans
ggccgccaactttgcgctatatgcatttgcaccagccatcctagtgacaccccttggtgcgcttagtgttttgattgggtgagttctttcctcgtcctacgaaaaacttcgcatcaaccggcgcgttgctgacgcttaaaagcgctgtcctagggtcttatttcctcaaagaaaggcttggcgttttgggaaaactgggctgcgctatgtgcttgcttggatcagtggttatcgtcctacatgcgccgccggatcagccagttgatacgattgacgaaattttgcaatatgcgctccagcctggtacgcctcaacaccggacatatcgttcacgattgcctaacatttgacccttgctgttctaggatttctgatatactgccttgctgtcgcgatattcgcgactgtcatgatttaccgagtcgcccctatatacgggaagaggaatccgctgatctatatttcgatctgctccaccgttggttctgtttccgtcatgtctgttaaagctttcggcattgccctgaagcttaccctagggggccacaaccaattcacccatgcttcgacatacgtgttcctcatcgttaccgccttctgcattctcacgcagatgaactacttcaacaaggccttgaacgagttctccacctcgatgtaagtaaccctacttgcaagtattgacatatctgacgggcccagcgtcaatcccttgtactatgtcacattcaccaccgccacactctgcgcctcattcatcttgttcaaaggattcaatacaacggatgccgtcaataccatttcgctactctgcggttttctgattatattctccggggtctatctcctg

SEQ ID NO: 23340 - DNA, 721 bp, Emericella nidulans
cagcaggaagctgcgcggaagcctctgacggaggaggagaagcaggccgcggcaaaggcagaatatgaaaagctcctcaacatgcgctccggaggtacatacattcctccagcgcgactccgggccctgcaagcgcagatcacggataagaccagtaaagagtaccaacggatggcttgggaggctttgaagaagtcgataaacggtctcatcaacaaagtcaacgtgtcgaatatcaagtatatcgttccagaactgtttggcgagaacctagtccggggacgcggtttgttttgccggagtatcatgaaagcccaggcggcaagtttgccgttcactcccatctacgctgccatggcggcaattgtcaacaccaagctgccgcaggtcggagaactcctcttgagtaggttgattatccagttccggaaagctttcaagagaaacgataaggcggtctgcatatcatcgacgacattcatcgcccatctgtgtaaccaacaagtggtgcacgaaatgcttgcggcccagattctgcttcttctgcttcacaagcccactgatgacagcgttgagattgccgtggggctgacgcgagaagttggccagcatctggaggaaatgagcggtccgattgccttggccgtatttgaccaattcaggaacatcttacacgaggccgatatcgacaagcgcgtgcagtatatgatcgaagtacttt

SEQ ID NO: 23341 - DNA, 500 bp, Emericella nidulans
agcgggtgtgtatgtctctgccaagtgatgatcgctctgacgttgaaagaacaaccggacttcccaaaggcgtggagatatcgcactataatgctatcgcgaactcttctcagctcctcgcaaagagagccattatatcgaatgaccatagaggcaagagccgcaaagagcggctcgacatggcgggggatcggtggctggctccgctgcctatgtatcatgcctatgtattcttgcccatttcattgtacccttccttagattgcatgagaactaagtgattgcagggccaaacatactactgcctcaacgcggcccgcctaggcgcaaaagtcttcatcatgaaatcctttaatgtcgaccaatacctcctctacatggatatttaccgcatcaatttcatggcctccgttccagccatcatggccacgctcgcaaaacaggcaaatacctcgagatataaccttcgcgcagtggaaatcgtaaccagcggctctgca

SEQ ID NO: 23342 - DNA, 850 bp, Emericella nidulans
ggcaacgacggacactgacaaagtcgttcgtttgattgaagatggtcttttatcagattcggcaagatcttctcagggtttacaggcttccaaactgcggactcagatattcaacttcactacgtgggtcgtccgcatgggatcaaaaaacgacctcaggaagattgccccgaaagttattgccgggttgatagacttcatccgttcccagggatggcctagtccgggggttagcgggcagcggctccccagcacagatctgagcctccgtgcgcttgcgtacgaaagcatcggtatcattgtccccaaagcggatctcaagttcagtgatgggcatgaaacggtctcgtatttcgggctgattaaatggttgttcacgtcgtttagctgtgacgactccggccctcaaattttcgtcagcattgaacaggccttgggcagcattcttaattcgtcaatagatgttaaggacactgactcccagaaggaattaagccattatctactgtctcagatgaggacatatccagggaccgaggatgaggaaacagggtgcaggatcgtgcgtggcccacagtatgctgcagtgcggtttgccaacaggtttttgccattctacaatgtcgttgcgcgctggatcgatcttatggccattgcaggtggcacggacatacgccaggagatcgcagaggaggggagaaagggattgcatccatattggttccggcttttgaattcaaagcaggaaactagactgacccagatcccatctgattcctctgctgattcaacctcctacttcgattttccgagttttgctgaggttacaaactttctccttttcactgtg

SEQ ID NO: 23343 - DNA, 500 bp, Emericella nidulans
actacatcaactacaagtatgtttaagagtcattggagtctggagtgctggtctattggcgaagccaaatgtcgggagttgactaatatgtttttgcaacttgcaggaagatgtccgagaacctggacgttgttcgccgtcgtttgactcgtcctctcacatacgccgagaagattctgtactctcaccttgacgacccccagaaccaggacatcgagcgtggcaagtcctacctcaagctccgccctgaccgtgttgcttgccaggatgccaccgcccagatggccatcctgcagttcatgtcggctggtatgccgtccgtcgctactcccaccaccgtgcactgtgatcacttgattgaggctcagcttggtggtgagaaggatcttgctcgcgcgaacgagatcaacaaggaggtatacgacttccttgcctcttcgactgccaagtacaacattggtcctgagagccgcctgggtcgcttgcgttggcaaaggtct

SEQ ID NO: 23344 - DNA, 850 bp, Emericella nidulans
ctcacaagcgaccagctcaaggcactgaaattaaagcctggcattaatgacatgtccttcagtgtgaacaaagccacgtgtacggccaacatgtatctatggcgcggagataccccaattgtcatctcggatattgatggaaccatcacgaagtgagtttttgttgtgctgtctgtctgcataccactaacctcaccaggtcggatgccttgggtcacgtgctgaatatgatcggtcgagactggactcacgctggtgtggccaagttgtataccgacattgtcaacaacggttacaacatcatgtatctcaccagtagatccgttggacaagcagataccactcgctcgtatatctatggcgtttgccaggacggatacaggcttccgaaaggccctacgatcatgagtccggatcgaacgatggcggcgcttcgaagggaaatctacttgaggaagcccgaagtgtttaagatggcgtgcttgcgggatattctcggcctcttcaacgggaaagagaatcctttctacgcgggctttggcaataggcttacggacgctctcagctaccgatctgtgaacatcccgtccagcaggatcttcacaattaactcgaacgcggaggttcagctggacccttttaagcttgaacaagtacaagagtagctatgtctctatgcgtgagctggtggatcacttctttcctccagtcagcttgctggttcaagctggcggtgaagaatataccgatttcatgtattggagggatgttcctcgagattttgacgacatatcaacgacagatagcgaggatgaaagccaagccgacgaagaggaagaagtagacaatg

SEQ ID NO: 23345 - DNA, 682 bp, Emericella nidulans
actcgtaatgggatcacgcctctcctgcatgcgatttcgaacaagcaagaggacgtagcgattcttctccttaagcaccctaaccttgacagctcctctatcaacagcatggacgccaacgagcgaactccgctttcctatgcctcagaatacggtcaggtctggctaactgatatgctgctggaaaagggcgcagattcgcaactgaccgatgttgacggacgcgttcctcggtcgtatgctgccgcgagagtagaaacccaagcagccacgtctccaactcaaacagaacaagtccaggccgactcaggcgaagttcccgcgcaagcgcccatcttcttgtctatcgatcacggacgcctggacactcttgaaaccctggtcagcctgggcgcggatccgagccagcagaatgaggacggccatacaccactgcattgtctggtaaagcggtcaggaagacagccagttctggcccccgaggacgagcaggcgattcgctatctgttagagcatggagcagatccatggataaaagacaaatgcgggatgacggtgctggatatggcgcgggcgtacggctggggtgaactgatgggaggcatcctgaggtcatcgtttcgtagaattcgcggggaagacagccatggcagttgggaggacgcaaatatacccccaatgt

SEQ ID NO: 23346 - DNA, 467 bp, Emericella nidulans
gagaagagagggataggggaggagggagagaaggagttgtgaaaggaggggaagtgatgatggggaaagggataaagagagggataaagggaggagaggggatagggatggcgaatagggagggggaggagataggaagatgagagatgatgggaaaggaaaagaaaatatagaggggggaggtagaggaaagggtgagggagcaaagataaggaaggtgagagggagggggaaaggatgaggagagagagaggagaagggaaagggaggagagaaagggagggaagaggagcaggagaggggagggggggagggaagggaaagggaagggaaggtaaggaaagggaagaataggagggaaggaaggaagaaaagagggggggggggtagggtagagggaaggagaagagggggtgggggtgaaggaagtgtggaaggggggtaaggaggaatgagtagggtgctgg

SEQ ID NO: 23347 - DNA, 850 bp, Emericella nidulans
cagtcctgcgctcctatctcgaagacccttccaacaccgatatccatagagagttaaccttgtctatagtagatcagcttgaaatttcatggtttaacgccgctatgtacaaccccagtcaaacgctctgcacctggcgcagcaggcagtatgctaaccacccaaacagcgcaaggtgctttgggttacgtcggaagccgctggtgaacgtgccccgacgtgctcgtctcccggtccatgagaaaaccgatgagacctggtttccgtacccccagcaagtagagcccgtcccagccattcatagaaactgcgttctcaatcacggggtcgagttggggaaaattatttggcatctgtgcggtggactctattccagcggacaagacggccgagtaccaacggatattgagcagatcgtgagcaaggcctatgaggatctacttcgctggcggaagaatgtacccacgtgcatcgaatacgatgaagactctttgccggacgttttgagcttgcagtgagctgctccgaccctactttcagcatcatcaaatcttgttctgtttcttttagtccttttctgactgtcaaagcatggactaccacacattcataatcacagccctgagctatctcaaaacgtccatccccaataccgagtcggacgtggcgacacaggggtcagttgcatccgcccaggatagatgtatcgcctcagcccacgccataaacagactcgtcacaatgtataagaaccgctggagctacgggtaccaagcagtgcacaacttccatcatttctacgccgccctctttatcctcatggaggacttgaataacccagccagccacg

SEQ ID NO: 23348 - DNA, 850 bp, Emericella nidulans
gcagaaaaaagatggtactcgatcacgttctcattgaccgtatggccgcggaagatgatgatggcgaagacttagaatccattcttcgtcacggagccaaagcattatttgatgacgacaactctggcgacataatctacacttccgaatctgttgataggctgcttgaccgcagccaggcggagcaggccacgaatccagacacgaatgtctctgcttctgagtttagctttgctcaagtatgggccgccgatagccaaggcctggaagaccaacttaatgttgcagaagaagatccaaccataagcaaccaaacgtgggagaaaatactacaagagcgtgaacgggctgcggctgaggaagcacgaaagaaagcagaaatccttggccgcggcaagcggaagcgggcgactgttgactactcagctgttgatgccgatccggcccctgccagagcgcttgcgagtcgcgagactgagagtgacgcggaattccgtgaggatgaagccggagtagcctctgattacagcatggaagacgatattagtgtttacgaaggggcgaccataaaacctaaaggtaattggcctatcgcaattgctttgttcaaacccccagaaagctaattccatctgcagttcatgcatttcagcgggtcatactccttccacaagttgcccaaactcctcagtcagtccaagcaccaacgccgaacggtgtagggatgaatggccatgtggaccgcaatggggatgcttgttttgtctgcggccgagttccccaatgggatcttgcccactcaagctggctggagttgaacattgcggtctctgtggactcgctcattatg

SEQ ID NO: 23349 - DNA, 850 bp, Emericella nidulans
ataatcgcggaatgatgatggagagcaccgaggaaatcgactacagcaaagattccgccaaggatttgaagccgccgtacagttatgcgactctcattgcacaggcgatcttttcgagtgaagaggagaagctgacgctcaacaacatatacaactggatcatggacaagtacgcattctaccgacattcgcaaagtggctggcagaactcgatccggcataatctttcgttgaacaaagcgttccaaaaagttccccgtcggacggacgagccgggtaagggtatgaagtggcagattgccgcggaatatcgtgaggaatactggaagaagcagcttcgcaagggcgcccaatcgtcggctccgtcgtcaccagcgacgaaggaccccacgcgaggtaccgccaccagcgggatggaatctgtcttctccgctggtaagaagtcgccccctgtctcttcgcctagtttcagctcgtttcccgtggcgcctgtggaggcgtacacgcctgaacgcggatcgcgcgctggccggaatggtgcaataaagcccccttcgcttcggccgccgaacccgcgcgactatgaagagccgtcgccgttaccccaccggtccgcaacgaagaacgcaactggccttagccgggcgtacgggctctcagatgcagctacccggtcgccgccagtgctatcgtcgtcgtattacgacgatggtccgtcttctatgatcacgcccgcaccacaacgccatcagccccggctcccgcctccaagcactgctcagattccgtccaagttcatgccaatgagctcacccgcgcagttctggaagttcgccgacatcgggagtac

SEQ ID NO: 23350 - DNA, 553 bp, Emericella nidulans
agagcacttcggtttggccaacctccaagaggattccatcgacgatgatcagatcgccgccctgggccgttctataacggctcgttcaaggctgtctgagcccgagctggccagaagactcacatcaatcgggaccacaggcacaatggatcccaactacgaggtcgactttgaggacggtaatgaccaggccaatccgaaaaactggtcgctcaagtacaaagccatggcgattgctatgctctcatataacacactgcttatgtgagtcagtcagggttgggctgttttttttttttttcagagttcaggataactgaccctcaaaagtgttctacattcgacgtcttacacatccggaatctcacaaatcgccgacgagtttggctcctccacaactatcgtaacgctggggctcactttttacctgatcggtctggctattggttcgatgatcatggtcccgttgagcgaggtctacggcccgaagcacgtttcaattgcgtggctgggagtgttcacgggcctgatcatttcctgcgcgctggcaaag

SEQ ID NO: 23351 - DNA, 850 bp, Emericella nidulans
gccgtatcaaggacagccactgcgccattggaccgtctgaaagtgtatctcattgcgaagaccggatcgccatctcctgtcgtcaccgccgctaaagatggggctccattaaaagcagccgggagggcttcgagatccctgatggatgcgttgaacgagctatggaaagctgggggcattcgcagtctcttcgctggtacgtgaggttttcatagcaataagaactaaactgactggtgaaggcaacggattgaatgttgtcaaagtcatgcctgaatcagccattaaatttggcgcttatgaggttagtttaccccgtggatatagcatttacaatgtggataacatgtgctgacacgctgcagtctgccaaacgtgctttcgctcgccttgagggtcacaatgacccaaaaaggctccaacccacttcacaatttctgtctggcggatttggcggaatggttgctcagtacgcagttattcaggtactcactaaaaaatgaccgtctaacaatgaaacaggtgctttgtctatcctcttgatacattgaagttgtacgtgcctgtttttgcttttggtactttcatgtgctaatctatgttagccgaatgcaatgtgaagttgtcgaaggtggtctgaaaggaaatcaactcatagcggcgacggcccgaaaggtatggaacaaaaacggcattttcggattctttcgtggtctgcctcttggcctcattggaatgtttccgtatgccgccattgatctgtcaacttttgagtacctgaaacgcactcttcttgctcggaaggctcgcgaacacagctgccacgaggatgatgtccctctatccaact

SEQ ID NO: 23352 - DNA, 850 bp, Emericella nidulans
gttacgaatttggatggggactagggttgaggcttcaagagcccaacagttctatcgtcaggcggcctcgaaaaatcacccaggcgctatgctccgaatggctaaggcctgtcttgcaggagacatgggattgggcaagcgctatcgagaaggtatcaagtggttaaagcgagcggcggaatcatccgatgctcaatacaactcggcgccttacgagcttggactccttcacgaaaccggttacggagatgatgtctttgtcgatccgtcttatgccgctcagctcttcaccaagtcggctgatctaggtcatgtagaggcctgctaccgtcttggggatgcttatgagcacggaaagctgaattgcccaaaggatcccgccctaagcattcacttttacactggagctgcgcaaggcggtcatccacttgcaatgatggcgcagtgcgaatggtacttggtcggtgcagagcctgtgctggaaaaggatgagttcgaggcgtacgaatgggccaagcaggctgctgagctcggtgagttgtctgacactgtttataataattccggctaatgtaaaacaggtcttgcaaaagcacaatatgctgtaggttacttcacggagatgggtattggatgtcgacgtgatcccttggaggccaacgtctggtacgtcaaagcggccgaccagggagataccagagcggtgcaccggatcgcagcaattcgagctgcggcggacggtgtcaacccagcgcaggccgctgcggatgccaacgggaagaagcgtaaaaatggtacgtctccagttttgacttattctactaattctaattgatgaatgatccagatg

SEQ ID NO: 23353 - DNA, 308 bp, Emericella nidulans
agcgtgatgctgatcaagaggtaacgtcgtggctagagtacagggttgagaaacctcatcatgatgaatctgaagactcaaatcattcagcgccatcaaacgaatgtacgctcttgcctggggagctagccatggttgaagtcacaatctgggtgcgagatatccggttcgtccgctcacttaacaatggacaattgaagctcgaagaaatcctggtccttcgggtaaaggatggtagagatcattttatctctacctacgggaattggcttcctacggcttttggacgtagcttggaggagctcact

SEQ ID NO: 23354 - DNA, 850 bp, Emericella nidulans
cgctgaggccaaggccgagggtgccgcaagtggcggtgaaggcgctagcggcaacgagggccgcaagagggcgggaggacgtactcgtggtcgcggtcgtggtcgcggccgtgtaggtcgcggaacacgcggaggccgttcggtatgttgtttcaagcctttttccttgtgttcagtaaccattaacgtctttgacaggcccaggccacggagggggcggaagagcagcccaccactgcctctggcgagaccgctcctcttgctgaggtcactaaccagaacgatgctgctcccgccaccgagtctggcaagcccgccgggaagcctcgtgcccgtcctcagaagcagcgtggtccccctgaggatggcattccttccaagaccaaggttatggtggccaacctgccatatgatctgagcgaggagaaggtatgctcctaactcgtcccactcacatattctgtgattgctaaaccacctctagcttaaggagatctttgccgcctaccagccagtttccgccaaaatcgctctccgccccatcccccgctttatgatcaagaagctccaggcccgcaatgagcctcgcaagggtcgtggcttcggtttcgtcacgcttggttccgaggagcagcaggagaaggctgtgcaggagatgaacggaaaagagattgagggccgtgagattgctgtcaaggtcgccattgacagccccggcaaggaggatgatgttcccggtgaacccactcaggaaactaccgaggctccggctcaggagaacactgctcctaccgctgcctaattgacaaggtcgtttctgtcccgaacgaacgcggtttctatccgatga

SEQ ID NO: 23355 - DNA, 597 bp, Emericella nidulans
acgcggctacgccactgctgaaccagacctcaagtccgccctgaaggccgacatccccgcgaagcgggaactcctcgccgaagtcaagaaacaaggcgaccaaggtattggcgaagtcaaggtctccaatgtcattggcggcaagcgtggccccaaatctatgctctgggaggggtccggactcgacgcaaaccaaggaatccgaattcacggcaaaaacatcaaagatgtcagaaggagctgcccaagggccctaccggcacagagaatctgtccgaagccatattctgctggttctaacgggggaagtcccacgaaatccatggcagcgcagttttcaaaaaacggctcaggaagaggacctggaaacaaaacctaaacaggttaagcgatacaaagaaatcccccaaagccccataaaatcaaaatgcgggcctaaaaaaagccaatctcaaaggttttaaaagggctaacaagaaaaacggggacaacttagcgaacccatccttcagaaaaaacccccacagacaaattaccccccacaaaaataggggagggaaaaaaaacaggcaaaagttaaaaagcgcggtcacagaa

SEQ ID NO: 23356 - DNA, 500 bp, Emericella nidulans
ggcacgagacctttccgaagcggtagtgtacggagtcggctagctcggcgacgccacagaggctcatctggtgcaacctcgtcaacaattggtgcgattggcgctggcgcccttgcacttggggttccaggcgctaatgctagtctaccccgactgactggatttgccgtcgcaagcaaaaaacgcaacagggactttcaccagcttttccgcagtgtcccagaagacgattaccttattgaagattatagctgtgctttgcaacgtgagatcatcttagccggacgcatttacatttctgagggccatatttgcttttcaagcaatatcttaggatgggttaccacgcttgtcattagctttgatgaggtggttgcgatcgagaaagaatccacagccatggtattcccatatgcaattgctattcagacgttgcatgcgcggcacacattccgaagtcttctaagtcgtgaatcaacttacgacttgatggtcatatc

SEQ ID NO: 23357 - DNA, 607 bp, Emericella nidulans
gctccatcccgcgcgtccgaccgtccgccatctaggttcagtgttgaagatggcccgacatcggccaggacctcggattacgggcggaactctatgggtgcagagatatcggacctgaaagagcaggtcaaggcccttgagaagcaacttttggatcgtgaccaacagctagaggagcaggcaaatacactgtcagatttccagaggacattagaggagctggaaggatcagatgcgttgtcgatccgtgcccagctacgagagaagaatgaacgcattgcgcaactaaccatggagttcgacatgcaccgcgccgactttaggagtacactcgacaccttggaagtagcggcttcggagaccgagcgagtatacgagcagcggattgacgagcttatgcagcagaacaaggaactacaggatcgcggggaggatgttgaggctgttgcacgacaacttaagcaactggaggaactcgtctcagagctggaggaagggctagaagatgcacgccggggtgaagcggaggccagagcggaagtggaattcctacgcggtgaggtcgaacgtacgaaactggaattaaagaaggaaagggaaagctctg

SEQ ID NO: 23358 - DNA, 850 bp, Emericella nidulans
cgctattgtattgcacacatgctagatatgtgatcgacccggttcaagcggtggaactggtggatgaaaatacgattggcatatgtgcgattatggggactacctataccggccactatgaggatgtcaaagctattaatgacctgcttgttcaacgaaatatcgactgtccgatccatgtcgacgccgcgagcggagggttcgtggcgccctttatctgccctgagctggtgtgggattttcgtctagagaaggtcgtgtcgatcaatgtctcagggcataaatacggccttgtatttttacaactcttcctgaatgaacgagcgaaaaactgacaccaggctaggtctaccccggtgttggctgggtcgtctggcgatcgcctgagttcctacccagagagctcatcttcaacatcaactatctcggcgctgagcaagccagtttcacgctaaacttctctaagggcgcttcacatgtcattggccagtactaccagctcatccgcctcggtcgaaacggttacaaagccatcatgcagaatctagtccaggtatcgcaaaatctcgcccgtggcttgccagacctaggtctccttatcctcagtgacaacacaggaaatggctctggcggcgtgccactagtcgcatttcggcttccagacgatgaaagtcggctgttcgatgagtttgctgtttctgctgttctgcgccgtaggggctggggttgtacccgcctacaccatggcaccaaggagcaataatctaaagctgatgcgcatcgttgttcgcgaagattttacggcccatcgatgtgggattctgattcaggatatcaaaatggccatcta

SEQ ID NO: 23359 - DNA, 500 bp, Emericella nidulans
cccaaacccagaccgcatcaaggcggtcgtctttaccaaccctaataaccccctgggacggtgttttgcgccctcggttctacgcgaatgcttagcattctgcgctgagaaggctcttcactgtattagcgatgaggtctacgccctgtcttcgttctcgagttcggcgccttttccgcgctttactttgattttgtcattactcgatgacactttgcctgcgactttcgctttccgggtccatgtcatatggagcgcaagcaaggattttggctgaaaggggctgagactggttagcactttagttgtgccccaagcaacattttcgtttattcactccaacaaatcctgggtcctcacctggttaccatatcttaaccagttttttagggctgataatatcgcagccaacgaccctcacggttcggtttttgctcccgagctccttgagtatcctttttaagatcctcatgccataacctttttggtcacgaacctcc

SEQ ID NO: 23360 - DNA, 500 bp, Emericella nidulans
tgcagaattccggacccaccttttgaattcgacaatcttcttacaaagataggaagatgcctgggaagtgatggaagatatgctgaggcagaaagactcttgttttatgtcttgagattccgagagagagctcgcggaccagagcaccctgacagccttgccagtattagcaatcttggttcagtacttgcaagccagggcaaatatcagacagcaaaagccatgcatcggcaggcacttgaaggttacaagaaggtgtttggtcctgagcatcctgctacttatgccagtgccagcagccttgggtcagtgcttacacaccagggcaaatatgaggaggcagaggccgtgcaccgacaggcacttcagggttatacaaaggtgctttgtcctgagcatcctaacccttatcagtctcagctactttggcttagtacttggatgtcagggcaaacatgaagaggcagaagtcatgcaccgaaggcacttcagggttatag

SEQ ID NO: 23361 - DNA, 548 bp, Emericella nidulans
cgggcttttatctgaaatttgcctgctaatggtcagaacaactaccgccgcaaaatgcaggcctccaagagtcctcggctggtcgggacccaataccaagtagggttgtcgattcttttcgtcggctatatcctcatgcaagtcccttcaaacctgctcctgaactacatgggccgcccgtcgctttatctcggcttcttcattgtcgcctggggtctggtgtccgccgtcaccagccaggtcacaaactacgccgggatcgtcgcctgccgcttcatcctcggtctggtagaggctccattctttgctggagtgctgttctacttgtctaaatggtacaccaagaaggagctggctctgcggatgagtattttctattccggctccttgctcagcggtgctttcggaaacctcatcgcagccggcattctcgatggcctggcaggcgcgcgcggcctgtccgcctggcaatggctgtacatcatcgaaggcgcaatcacctgttttattggtctagtggtctgcgtcgtgctcccggacttccctga

SEQ ID NO: 23362 - DNA, 850 bp, Emericella nidulans
tattacgcaccggaatggaggaccacacatatatgccgtcgccagagaactggaggtttccattctacaccctgtttctggacagattcgtcaacggcgaccctactaacgataatattaacggaactgtctatgaacatgatttgaactccaaccagatgcgacacggcggtgatgcacaaggcctggtagacacactcgactaccttcaaggaatgggaatcaaggtctgatttttgttttcgtctcagcttcagccttcgctaaccagatcttgtttaggggatctacctcgcgggtactattctcatgaatcaaccctggggcgcagacggttattcgattttggacactacgctgctggatcagcacttcgggaccatccaaacctggagaaatgcaatcacagagattcacaagcgtgggatgtacgtcttattcgacaacactatcgctacgtgagtctgctggttttccaagtcaaatgcgcgaatgctaactacacccaaggatgggcgatttgatcggattcaaaggttatttgaacgttagcgccccgttctctgtcaaagagcacgaagctgtttggaagtctgaccgtcgctacgtcgattttgattttggaaacacctacaatcagacctgcgagtaccctcgattctggaacgagactggctggcccgttgataaagacgttcgtgatgagctacaaggttgctatagtagtgatttcgatcaatacggtgacagggaagctttcggtgtatatccagactggcagcgacagctggccaagtttgcatcagtccaggatcgtctccgcgaagggaaccccagcgaacgcgagagc

SEQ ID NO: 23363 - DNA, 514 bp, Emericella nidulans
cgactagaactccagctatacccctcacgtggattagtgagctaactccagcgccagatgaaccgcgtcgctccggtcgctcgaccaagggccagcacaagagcctcgacatggtcaacgaaacgccaacaaagaaaacgaaagctaaagcgcagcccagagataaacccccgaaaccctccgcagagcctacccccgcgcctagcgaggaggaagagattatccggtgcatctgcggcgaatatgaggaagaggaagacatcgagcgagatatgatttgctgcgatcagtgttcagcatggcaacataatgattgcatgggtttgacattcgcgaagggcgaagtgcccgatcagtacttctgcgagcagtgcaagcccgaagaccatccggtgctcatggacaagatagcaagaggcgagaagccatggttagaggtagcggaacgaagaagaaaagaagctgaagagttgaaacaggcacgacgcaagaagggaaggagaggaggcaagag

SEQ ID NO: 23364 - DNA, 500 bp, Emericella nidulans
agcagtgaccaatatgcaaacggaattggagaagcacctggacagtgctcgatcttttgaacatccagacatgaggctgttgcacataccaagcgtcgcagtcgattcaggccctccgttgtctccacgacaaatgccgcaagatgatagtcgacggccatctataatggatacatcgagatcaaatatgattcgtccgcctgtaccccctcatttgtccgcctcgccccgtcgttatggctcaattggagcagcaaactcttctcccaactacagccgccctcaggtcccgtctatagttactccgcagccaccagtgcctcatcctctatcatccgcatcctcgccgcccggcccaaatcttgcgcggcgacatacctcggcagatatacgccaacatggatggccgccaccaggtatttcaccatttcctctgaaccagccgtcctcacagggcccatctccttggtcgccatcaccgcttcgcacaccgacatcga

SEQ ID NO: 23365 - DNA, 502 bp, Emericella nidulans
acgatacccttcgccgagtcttcgactcgcagtccttttggcgcgatttctccgagtcgtcatccttctcccccgaccggaagccgaccggtcttgttcagaatcagtacctcacaagtcctgacgggttccgggcctttgcccaggtatcgctacagaaatgtcaggcgatcgtatctcgagtcctctccgcgtcgacggtggatgaatatcggggcctggtacgtcagttggaccgcctgagcgacctgctgtgtcgcgtcattgatctgtccgactttatccgtgcctttcacccggatccgcccgttcaagaggcggcaggccaggcatatgccttaatgttcgagtacatgaacgtgctcaacaccacaactggtcttcatgatcagctacgggccgcgctgaatcagccggaggtcacggcgcattggtcttccgaggagaccattgtcgcccgtatcctgctccaggattttaccaattcggcgatccatatgcc

SEQ ID NO: 23366 - DNA, 500 bp, Emericella nidulans
tcatggtcatggccatggacacgtcgttccaagagcacatacaacgccttctgaacggcggtcaaatgaccccgcagcaggggcaacccggcgataccgcgagtcgccgtatcccatgctctccgtggacgaagcactgaggcaagtttcagctcacactccggagccggaggttatcgaggttccggtgaatattgacctcgtcggatacgttatcgcggaagatgtttacgccgccgaggcggttccagcataccttgcaagtatcgttgatggatatgctgtcattgctcctgaatctccagatgacggacacagtacaaagggaatctttcctgtggcttctattacccacgccaatgaggagggagcgctagcaccgcttgagccaggcaccatcgcccggataacaaccggcgcttctttttcgcccaatgcgaatgcgggggtcatggtggaggatactttactagcggcatcgacacctgatggcaggaaga

SEQ ID NO: 23367 - DNA, 849 bp, Emericella nidulans
actcatcaaatagaaagagtggtccgaagaagcgcaaacgtggtaatgacagtgatagcgaagatatcatccgagccgttgactctagctcagacgagtcggatgtcacaccgactgcgacgcagacaacgtccggtcgacaagtgaaaaggccgtcattatatgtgcctccacctcttatcccaagtcttcccagggagggcagtagccttgcagggacctctgacagaccccaaacatccagatcgcgcaagcctgtccctcgaaaactgaaaagcacaaatattcgatgttgtgtttgcgaccgcagtcatagtccaacgagcaatactatcgtgttctgcgatagatgcaaccgcgcatggcatcagcattgccatgacccgcccattcagagcgaagtagttgcaatcagagagaaggaatggctctgtcgggaatgcaagcccgcaaatattaccatactccatccgacagtcgttaggagcaatccaagtcttatctccaagcctccagctcaccctcctttgacaatacctaagactgaagtaggaggagagcgcttttctacagattgccgccggcggttcttgtcaactctatcgcatgccgcgctcgttgagcttcttctcaccatatcgaacaaccatccgacagtgcctatgtttcctgagaatatggaatcgttgccatcttccaattttgcagcgtcgcaggccattgtaactggagccgcagctacctctacttcattacctactcatgcgaataatgtcgcgtccgttgttttggcaaacaatatcgatgaacagactcctgagtttgcttcggggcgtcgtagtggttaca

SEQ ID NO: 23368 - DNA, 500 bp, Emericella nidulans
tgtatattgctatcaactttgctttctttgtttgcttggtcgactggtgggaggattaccaggaaaaattgtatcaggtcaagtatgctggaggccatttagctgtgatgaatacacctgggctggtgctggccgctgcccggaacaacccattaatccctttgctgggaatttcgtttgatactttcaacctctttcatcgctgggtcggtcgggttattgtcgttggagcaatcatccatatgtccgccgtgattgctgggctaattgcggagcgtgaggcccctgatcaatatttatcctcgtgttggctcttcttaacatcagcagatggtttcgagacgactactcatattatatgggaagtaccattttttatctgggggatgattgtacgttttcttctccgctgatggacttttcagggtttactgattcagcaggctctttttggatttattctcatcgccatacaatccgtctctctacttcgacatgct

SEQ ID NO: 23369 - DNA, 706 bp, Emericella nidulans
agttttcggagcagacccctgagccctccggaccgagggcagaaaaccaagaggctcgctttggtattcttctagatgaactagtcaagcggtgtgtgggttctgttcagcgagacgaaaatggtcgtgtattctactcgacggaaatcaggcttcggtcaaagggaggcgattttcgatggcaccttgtccgcctggttcgggtcgataccagcagctttgggagcggcgaggctttctggtacggcacttgtactgatattaatgatcgcaagaatcttgaaagggaactcaacacggcaatgcaacagctcatcaaccagatggaatctaagacaaagtttttcagcaatatgtcgcacgaaatacgtacacccctcaacggcatccttggcaccattccattcattcttgatacctccctagacacagaccaaaggcgaatgctcgattccatccagaatagttcgactaatcttcgcgaattggttgacaattttctggatgtgtctagggttgaagctgggaaaatgtccgtggtcggttccctggtttcatgtgccatcggtgaacgaagatgtgtatcgtacagtcttatttaaggcaatccacaaaggctttgaaatgaactttcttatggccgtggtttttccgctatggtaatccgtgataggtttctatttcggcaatcccgataaaccttgtg

SEQ ID NO: 23370 - DNA, 844 bp, Emericella nidulans
acaacgattctagaagccagtcttctataccctaaccgctctgattccgtctgcactcaggcttgtccgcgatcgataggcgcctgcttcttccaacagcggtcatctatctgttctgctatctcgacaggtcgaacgtgggtatgcaggtcgtttcgctcgaggatagccagacttaactgttggtagggaacgcaaaatcatgaattcgaccactggcgacaccctgatggaggccaatggcatctctggtcaccagtacaccatcgcgatgatggtcttttggtggcgtattttgtctttgaggcgccgagcaatcttgcgctcaagtccttccatccgcacagatggcttggattcctcgtcattgcgttcggtgcgttgtgcactggtatcggtttcacgcacacctttacagaaatggcagtgctgcgcttctttctcggggcggccgaggcgggcgtgttccctggtatgttattctattttacttctggtataagccgagcgagcgcgctatccggatcgctatttatatgtgcagtgccacactatcgggcgcgttcggcgggtacgatgaactgttatcagtgcgcaataggaactcagattcttatatgttagggtcatcgcatacggagtcgggcatctcaacggtcatcaaggcctggaaggctggagatggctctttatactcaaaggagtccctagcagtgagtgggtatctgccgcacgctgacgaccagatggctgagtaattgcagttactcttggactccttgtgttcttctttcttccaagctaccctgaaaaagctggctggctctgccctgaagaaaggagc

SEQ ID NO: 23371 - DNA, 500 bp, Emericella nidulans
agtcgccagaggataaagagccagttggccaggatactaatcaaacgccggccgcggacactacgaagactgaacgactgaagactcttgaagatatcaccaatccggctaggaggaatgctgctagcgcgctaactaaagtgtttgtggaccagatctccagtgccctggcgggagggtctttcaaaatgtctgaaggcaagacgggggaggaagttggtcagcaacttggcatctcagtcgaggaggctttgtatcaaaatctaatggggggaggtggagaggctacctcagaagcttataagatacaactgcgggcgattttgttcaacgtaaagaagaacccttctctacgggatcgtctgctcgtaggtagtttaactcctgatgccctctctagaatgagctcccaagagatggcaagcgaggagctacaacagaaagatgctgagatcaagcgagaggctgaaagacagcacatgatcattcaggaacaaggg

SEQ ID NO: 23372 - DNA, 850 bp, Emericella nidulans
gatggatgagctcaaggccgagtcagaggacgcaaagaagcaaaacagacatgtttctcctcgccaaccagaagagtggactaaataccctcgatgacgtccaaaacaagatctatcccgttctggagtggcacgatgaatcgctcaagtctatatttgattctattgaaaagatcccggtcttgccggagctagattgaacaagcgcacgaacagataaccattgctgttttctcaattcttgcaccctacgtcctgcccatccttcagcaggtgaaagctgagctgcagactggatcatccgaagtcatacatagcagcagggatcagcatcatgtggtctttaacgatgattcttgcggcaatcccactcattcgatgctttccaaagatcacttttcaaatattcttaatgaaccggccggtcgtgtcgcttcccaaattgtcaaatggacagtgccgcagctgatggagctatgggatgatgaagaggctgacatagaaccaaccctggatagaatcgtttccggtgtcttccatcacccggcctcgcgacgtggtggaagagatggcgccagagaaatccgtcgaattatgtttgagaccgtgcaaaagtggtgggaagggaaatcggaacgcgagattcgcagtctccgtgagcagctttcccgcgaaggtgtacgggagggcaggaatcacaaagagagcgtgcacgattctggacatggctgtggaaaaccacttagcctgcacaagggcccgcagaattccagtcaaagaaggaagcccgaagtcggtcgcatcgagaaaatagcttcagaagctgctggtggaggggctctgggtggcc

SEQ ID NO: 23373 - DNA, 850 bp, Emericella nidulans
cagatcctagtgatcctaacacagcaggcaaactcttccttgagcacgcaaagaactatcttcacaaggagatggaaacccccagtctaactacaatccaggccctggctatattaggcatgttttatatagtgagcggaccctgtcgtatgatgattagcgtacttacatgaacaggcgactggcgctgacgccgcgggctggctccaccatggaatggcgaaccgcttgtgcctggacatgggcttgaacctggacccagccggatttcaagagatgaatatcttatcacaccgagaaattcagctgcgaaggcagatttattggtctttatacttccatgataaactgtcttctaattacactgggcggatttgctctatgctggtacgctctttagtctgttcttgaataagctctaacgtctatagaactcgcaaggagctgtcaaagccccagaggatgaagaagtcccggatacagatagctccgctcagaaagaatttaagcagctacgacgagcaataattggcattagccaaatacaggaaaggattatactctcactgtaagtaggccactgaacacgcttacgagcacctaacaccttcagatgggccccaaagcccctattgaaagagcatcagcggtcttctttcctccattcttgcctgcttgacctcaaatcatggttctatgacctacctaccgaactccgaatcaatcgcccaaccccaaacacctatccccaagcctacaccctccatatggtctatcatactacaagaatcctcctcgctaagccatacatcacaagaaagcaacccgaaacggatcgcgaagcagtcaa

SEQ ID NO: 23374 - DNA, 458 bp, Emericella nidulans
cccaagctttttgataaacgcacattgaacccttcccgcccaaacataatgtcattgtcggccgcaatggttccgggaagagtaactttatcgccgtcatgggggtagttctcagcgatgcctagactcacctacgcagagaggagcgacaggctctcttacacgtatgaggtcgtcctgcccctcgggactcaagcttatagcgaggaggaaggttccggctcagcggacatgtcagcgcatgttgagactactttagacaaactccgactagcgtttccctaccgtaaagcccgagctcgtcccctcgccgtacaattggtcttaagaaagatgaatacactcatgacaggatgaatgatactaaaatcgacgaatgaaccaactagagttcgccggtttcttggtgaaccatcccgactaatctcctccctatggtctattcacggtcttacaaa

SEQ ID NO: 23375 - DNA, 850 bp, Emericella nidulans
cgtcgcggatacgtcaccgcattcgtgaacccgtgttgggtcatgggccgactgatatccaccggtgtcctgaccggcacactgaacatcccttcccaggggccctatcggttgccgttcgctctacagtggatatttcctctacccttgttcattgtcgcgtggttttgccccgagtctccgtggaccaatcttcggcgatcagaaatctcgataatcagctggggctgccagcttctcccctgctgggccatccagaactacatcacttacttcttcagtcttgccggattatcgcctggcaacttgttcaagatcacgcttggtattgtttagacgccgtacaaggtccccgccagcaactgacctcgtctaaggaccatctcgctcgccttcatcggcacttgtctctcttggttatttcagacgcatatcggccgacgcaccatctacctgaccggtcttgttgtaatgctgcccttgatgctggccgttgccctcctgggcgtagcgccgcagtcctctggtgtccaatgggcccagtgcgcgctgttgatgatttggttcttctgctacccccaagccccttcttcttaactcttaagtttttcatttgcatttcctcttactcaccccggtatttaacgccttaggatgcctattggaccgattccatacgcaatcgcagcagaaatcggggccagcaatctccgcaacaagaccatctccctgggccggggcacatactacatcctctccgtcgccaactcagtagtgtcaccgtacatgctcaatcgctctgaaagcaatttcaagggaaaagcggcccttccagccgctgtatttacag

SEQ ID NO: 23376 - DNA, 850 bp, Emericella nidulans
gccctctgtcgtccgcattctctggcccaaccaggtcccaagcttgaccaccattatcctcggcggagaggccctggatgccgaaaacattgccacctgggttggtgcgagaaacgacatttgtttgataaacggatatggtcctacggagacctgcgtcttctgcgtaatgcacacatttaccagcaagacgcaacgccacgacgtcctcggccgcacggtaagctcacggtcctggattgggcgccctgagaaccataaccatctagcacctgttggatctattggtgaacttcttgtggagggcggcactgtggcccgtggatatgtgggcgacgaggaaaaatcctcccaaagcttcctcagcaaccacgaggcggcttcccggataaccagaggcgagagacaggcggatccacgcttccacaagaccagtgatctagtccggtacaatactgacggcacaatcagctacattgggagaaaggataggcagattaaactgcgaggacaacgaattgagctttccgaaatcgagcatcagaacagagacagcttccacccaacacgcagattgcggcggaggtcgtgcttccacacggggagaaggagcaggcctttctcgctgcttttatatgtcaggccgactcgaatgatgaacagagggggctccttgccgaatagacccctgaggtcgcaagccagctcggtcaactgaagcgcttgcttgctggcgcgcttccaccgtacatgcagccgtcaatcttcctgccgacgaactggatgccaatcacgtcagcaaagaagcttaaccgggcgttcgtacaaaataagtgcttaatgccgtgtg

SEQ ID NO: 23377 - DNA, 327 bp, Emericella nidulans
tcaataattattgacttcttgttatgtacgtgtgtatgcagacctcgatagcttgtagaaatgttaaaaaaacaaaaaacaaatgggaccatatagttcttatattggtataaaccctataccctatgaactaacacaaataagaaactgcttatgcatagcacatgtaacccatttttttttcttttcttgatccttcgttttaggctcggaaactatgaatgggaagaccatcggcctaaaacaggaatgtggaaaggtacgagtggcggtgaagtcttctccttcacaggctgcgatgatgaccagacctcggctgacactccg

SEQ ID NO: 23378 - DNA, 390 bp, Emericella nidulans
agctccctgcgtgttttcgtcgaccgctcccacaggtatttctaacgacgccatgggatctgttcctcaacacccgttctttctccgcgtgatagaaatgctgcaatcgtacgaccgtagctggcttctcccgtacattacagtcatgtactcgaccggtccgcttttcttatccgtgatttggaaagaatacatggcagagagtcctgccgaagcggcgcgtgtccgtatactcatgcaggatgaatacaaccggttctcctggagtttctttacccaccatgtgggcaacagctggcacggaaaggatgccaggttgatcttctggatgggacagcactggatgctcttgaccgtcgccggatttgtacttgccggcgcggttggatt

SEQ ID NO: 23379 - DNA, 457 bp, Emericella nidulans
  unsure (1)..(457): unsure at all n locations
gaaacatgaatcgcttggtgtgtaccatccggataccatagcctcnttgcataatctggcacagacctacgaatgtcagggtcgtctggctgaagcagaagacctcgcggtgcaggtgctcaagaccaacaagagggtcttggggttgaagcaccccagtaccgcaagatccatggccacccttgcagtagtatatcgcggccaggggcgactagaagaagcagaggaactactaatagaggcagtggacatcagccaacacgtcttcggcactacgcatacgtacactgtgactatgacgtccgaactagccacatcatattatctccaagaacgatggagcgaagcagaagagatccaggaccatgtgctcaagctccgtatggagaagctggggcctatgcatccagtcacgctgttgtgcatgtatagacttgccctgacctggagggcagcg

SEQ ID NO: 23380 - DNA, 479 bp, Emericella nidulans
tggtagaatctacaaagtttcctcacagtggaaatcaacgctttttgaacagggctaaacaaatgatcatatggcctttcagtggcttcagcattttaatacatctacaaaaagcaaggttcaacaaggccaacattggctacttctctttgactgccatggctcacatcttacatatgaattaattgcatattgtcataataatcaaatcattcctttctgctttatcccaaagacaacctattttattcagccccttgatggtcaagtttttcagtcatacaaattccactataaaaccaacaacaaccacatcgcggagtggggtggctctacaacagataaagctgacttccttgaacaagtcccaaaggcacgtgaagatgcatttaccaaaaagacaatccgtgatttatttgctaaatgaggcatcttccctttacgtccccagattatcctttataaacttgaggcagaac

SEQ ID NO: 23381 - DNA, 850 bp, Emericella nidulans
cacaggatccccagcaacggctcatgcttcaagtcgcctatcaagcgctggagtcagcaggctacttttcccaaccatccccaggaaaagatataggatgctttattgcaacctgtacagtggactacgaacacaacgtgaattgccatccagcttccgcctatgcagcgacagggctgttgagaagcttcctagccggaaaactctcacatcactttgggtggcggggcccctcactatgtgtggatacagcgtgttctggctctgctgtagcattgcatcatgcatgtcgggcaatactgagcggcgattgcacggccgccctggtgggcggcgccaatgccatcaccagtcctctcgcatatgataatctcgcaggggcatcatttctttcgcctacaggtccgtgtaagccatttgacgcgaaggctgacggttattgtcgcggtgaaggcttcgcagcgatctatatcaaaaagttatcacacgcaattgcagatggagatcaggtcctggcaactattgcaagtacagctgtggaacagaatgacaactgtacacctattgttgtgccggacactgcttcgttggctggtctgtttaagaaggtaacgcagcgtgcgcatcttcactcaagggacatcagtatcgtcgaagctcatggaacaggcactcaagctggggatccagccgagtatgagagcgtgcgggacgtgctaggtggtccaaggagggtagggaatttagctttaggctctgtaaaaggcctggtcgggcacactgagggtgtatccggaattattgccctgtgcaaggtcgtcctgatgatcctgaacggacagatccctcg

SEQ ID NO: 23382 - DNA, 326 bp, Emericella nidulans
tccatagcaaaagctcacggtggccatccaaatgtagcaattcgcatcatggtagccgaatcaccgacgaagttcctcgtcggtcaaagccgtgatcagccgccccgtagagagtgcgtcaactatccggggtctacgaaatataccgagctatagatgaatggctacaaccatgggttcgtggggagccgttcttgcatccatagatgaaaaaatgggcccccctgtggctgactgcccccctttctgcgtacaccctggcctagccaagtgttggcattgcagataacctccgtctgtcggtcatcatagcatggaatacggag

SEQ ID NO: 23383 - DNA, 714 bp, Emericella nidulans
tctcgtcacagctacgcgaacggtttggccggcggtatccgatctgcggtggatcaattattatcatcgtcggcgggatccttcaagccgcagcggtgaactacggcatgttcgtcctcagccggttcgttgtcggctttggactgggaatagtggctactgctgcgcctccgttgcttactgaagtcgcctacccgacgcaccgtgggaaactcgtctccttctacctggttacatggccgctcggctcgctgatcgccgcctgggtgacatacgggaccttcaagatggaaggctcagactggagctggcggatccccagcgcactgcaatgcttcttctcgcttgtccaggcaatccttgctctcgtcgcgccggaatcaccccgttggctcatctaccaaggccggagtgaggaggcccttgccattctgacaaagtaccacggccacggggatgctgactcccgcctcgtgtgttttgagatggccgagatcacggcgacgctcgaaatggagaaggtccagcgcctgtcccgctggaccgagtggctctctacgcgggggaaccgccatcgtctcttcctggcttgctatatccccgccatgcttcagtggtccggtaatgcactgacatcgtactacctcgccaaagtgctagtgactattgacattaccgatccaaagacgcagctcatcatcaacgcctgtctct

SEQ ID NO: 23384 - DNA, 561 bp, Emericella nidulans
atgcgattatttgtggtcccaatctccactcgaagagccctgatctatgcccgactcttgcgcaaggatgtttcgaaggagcggtctatcctagaccgagtcacggacaaggctgcggaaacctgggcgaaatgggaagaggctgataaaggctggaaaacgtgggtggtatcgtggggaaatcgagtccagcaacgcataccttatgaagaatggggactgaaaagcatcccgtcgcttaactttcaacgtcgaattgacgagtcacatgggtcgaataaagtggaagtcttgttcccaggcaatgcgattaaggaggagaaacttattcccatgctacacaagctctcaaaggagcgacaggagttacataaacgaaggatgtggtggagcttgattgcagcgccctttacagcgccaattgggctcatccccttgtatgttttgcatggtcgaactgtgctcttgctctgatggttgaactgctaatcacaaacgcatgcagaatacctaatatcccgttcttctatctcgtttacagaggctggtcgcactggcgag

SEQ ID NO: 23385 - DNA, 500 bp, Emericella nidulans
ctttccaccgccttacatttgaaacttttttcaattctgcggttagataataccaagaaccacccggggatagaaggatcaaataggctttgaatcgcgaattcggttaaatttctgccgtattcaaggtcgtggaaagccagagagaagaagcttggctgccctaattccctcatcgaaatggcgcctatcacgaaacagcgcccgtccgcgaaagacgacgatttcgtcctaacattatccgacgatgagaatgaccgatttgacgagccccaggatgaagacgctacttctatgtcctcaagcaaaaagcgcaaaagggaggctggtgagaatgctgcgccgacaaacaagaagatgaagcagcagcaacatggaaagcaacaaaaagggaagaaggggaagcaggcgtcaatggagaaggaggctagatccgatgatgaagaggaagaagaacaagacgcgggcgaggacgacggcgcgctagactcagagtttga

SEQ ID NO: 23386 - DNA, 835 bp, Emericella nidulans
cggaccccttccttgcacggaacctcatcgtctaaggatggagacagttttcgttcgactagcccaaaatcccagacagaaattcagcggaataagaaagcaaggcctgttgaaagagcgatatctcaggatgacaaggacttacccgagaatgggccagccagtaatactcgctcaaagtcctctcaaaggagcaagtcggtcactagaggtagtgtgctaaggcctgttccgcataatacacaagaatctctcatattctccaggcgtcgttccaaaggcaagctatacactgcactaagaacgaaggtagttgattgggacgaagatctccgagcaagtgatggttcgcttgagccacaaccccaggaagatgccgattttacttctgtctcttctccttcatccagcggtgctcgctataccttcaataaaagttccacaggttcttggacaagctctgccagaaagaaacaagccacgaagattaggagacaatctggcactggaagcaagatgaaacctagaaggcgcgtgaacaacaaagccaaacatttattaacacaacacatgaggtccaggaacggcaataaccagtgcagcccaaattcaagcagttctgagaaagagccagattgtagtaccgcagcaggcaagcatgacatatgcaatgggatctcaaggagcctggcttcagagagtctggctggagccaataactcgtcgcaagcttgcaaaacggaggacataagcaccggggtattcaaatcttccttgcctcagaattccaataactccaacaggcaatctatgtttgagactagtttgagggagg

SEQ ID NO: 23387 - DNA, 392 bp, Emericella nidulans
  unsure (1)..(392): unsure at all n locations
cataccgcgggatgttgtttatgaggatgttgaaggcgtccagtccgctctttggtttctagagaagctcccaccgcttgttactacccgtgaggtgtgccctcctcctttgttcttactgcctgtcgttctgctcgggtgaagggaaaccggataggtggtgtcactaaagcagtgcagatcgcanacctcaagaagagtctaaagaatgtcgcgctcgggaaggcgtttgttttacaaggaggtatggctcttccttcgattgactgaggaagtagacgctaaccgtgtccaggggactgcgcggagttgttcgattactgtaatcaagatatgatcgaggccaaagtcaagcttctgctccagatgagtttggttttaatctggggtat

SEQ ID NO: 23388 - DNA, 500 bp, Emericella nidulans
aggcgtgctagagcagctttaaacacagcccaaggccatcagaagtctccattcaaactctcagaacaaaacagagatttattcacatatagcaagaaagaggacgagtcacataacggaataggcgtagtcaagaccaagcaacatgcaatccgttctccagcctattatcggccccaagaagacggccgaagatctgtccggccgtgttgcaataataacgggcggagcatttggcatagggtgagtctctgagccctgaagtagattcacgctgacaaaatgccagctatgaaatctcccggacgtttgtacagaacggcgcccgcgtcattatggtcaaccgtaaggaagaccaagggcaagaagcgatcgacaaaatcaaggaggaagccgggtccgatgcaaagatcgagtgggtgccgtgtgacatgggcaatctggcccaaatcagagaggtcgcatcgagatttgtcgagaaagaggagcggttggatctg

SEQ ID NO: 23389 - DNA, 850 bp, Emericella nidulans
agcagtgggaaaggtgactacgtgagcttggtagacaatcctgagcgattcacagggtacgcaggagccggtgcgaaccaggtctgggacgccatctaccgcgaaaactgttttctcaagccggtacccgagcttgagcaatcgtccttcactccgctgggcggactccaggctatacaagatttccaaaatgttctccagaaagagtcgaagcggccagatctgttgccgttggataatgagtgtgtagagaagcgggtcttccatcggctcattagtggaatgcatgcgtctatctcgactcatctgtgctgggactaccttaaccagaccaccggacagtggcatcccaaccttcagtgtttcaaggagcggcttcacaatcaccctgagcgcatttcaaatctttatttcaattacgcgctggtggctcgcgcggtgtccaagctgcggaagcacctggaaggctacacatattgcctgggtgacccggcgcaagaccaagacaccaaagagaaaatctctctcttgacctctactcttgctgaacgtccacaaatctttgatgagaacgtcatgtttcaagatccgggcgccatcgacctcaaggaagacttccggaaccgctttcggaacgtcagccgactgatggactgcgtaggctgtgacaagtgccgtctctggggaaagctccaggtcaatggctacggcactgctctcaaggttctttttgagtacgacgagaccaagaacggcgagaatcctcctctgcgccgaacagaactagtagccttgatcaacacgctaggccgtatatcccacagtatcgcggcagtgcgaagtttccatc

SEQ ID NO: 23390 - DNA, 704 bp, Emericella nidulans
gatgatgctgtgttacagcattgtcttactttgagaccctcgccgaatgcctctcgcttgaacaccccgcctcctacatgccctcgctcaccgacttccgcaacccctttcaaatccactcaaaaccttcccgtgccgtcctccacaacatgcaagaacgcctcgaccgcttcctcaagatcctcttgtctcacccaaccttctccacccacgaacttctctgggaattcatcctcgttcccgaactccagcctcaaatgatggccgaccgctctcaccggaaagcccaggctctgtccgaatccatcatcgaagaccatgacccaatcacttcagaaggcatccgtgaagcagagcagttcatttcccacgcgcaagacatggttcacgcaacacacactcacacccggtctctcctacgccgcggacacgcccttcaaaatgcgacctccgacatcgcggacgccgtggccctcgctgcatcggtcttctcaaccctcaaatactcaaccaacgcccttccaccatctcacgttgatgccttttctcgctacgcatcctacctctcaacgtcaacttcagactcctctccactcctccaattcctgtcgaccctctcctcaatcgatacgactacctccgcaattttatcttcactctcgcgccctctctccctaattgcgtctttaaattcctcaacacga

SEQ ID NO: 23391 - DNA, 500 bp, Emericella nidulans
gaataagatatagaatatagtgaagagatagaggtgaagtcaaagagaagtgaaaaaagagaaaagtagttaaaagcaataagatagtaactaaaaatctaaagagagattagacggcgtaaaggagatcacggcgctctcgacaatatagacaaagtccttgccggcattctgtggtcccagaaattgactccgaagcaacggctggtgaaacgaacgcctccgcctgagaagctcgccagagatcccagcagcgacggagaggagaaggaggacgtggaagccgcgcaagcccggagtaagttggtttcgacgctcggtatcgaggatcccatctttacgaaacagtggcacttgttcaataccgtacaagttggccatgacctgaatgttactggcgtctggctggaaggaatcactgggcacggtgcaacagctgcgattgtggatgatggcttggatatgtacagcgcgatcttgagcccaggctacttcccgat

SEQ ID NO: 23392 - DNA, 735 bp, Emericella nidulans
gatgagcccggcacgcgtgctgaggtagagaagagcatgaagcgcaacttgacgcgcggtgctcgctattcgttctgatctatatcatgaactatctcgatcgaaacaacatggccgctgcccgtttgaagggtcttcaggaagacctcaacatgaactacgacgagtacgcgacgtgtctgagtatcctgtatgttgggtatattctgatgcaggtcccgtcgaacatcctcatcaaccggatccagaggccttcgctctacatctcgttggtcatgactctgtggggtctgatctcgactctgtcaggcgtcgtccacaactttagtggaatggttgctatccgtttctttcttgggttcgtggaagctgctttcctcccgggagctctcatgatcctgtcgaagtggtacactcgcagggaactcaccacgcggaatgcgattcttttctgtggaaacctcatttccaacgccttctcggccctgatcggagccggtgtcctctccaacatgcagggcgtccttggccatgctgcatggcgttggctcttctggagtatgtcttgctaaaatacaccttctactcctgttttagcacagtcactgacatagtatagttgagggcgctgctacaatgaccatcgccattgctgctgcgatcatcctcccggatctgcccagcaacacgcgcggcttcacccaggaagagcttgaagtcgctcagctccgaatg

SEQ ID NO: 23393 - DNA, 500 bp, Emericella nidulans
  unsure (1)..(500): unsure at all n locations
aacggggtacggcagctcccctaatcccctatccctcgcctagctactgtacccagactgactcgcgcgacagtctcctccaagccggctgctccaaagtttacatcacctcgcgcaaagcctcagcttgcgagtccgcagtagcagccctcaacgccctcccaaataaacgccccggcgcacaagcaatctccattccagccgactcctccaaagtctctgagatcgagcgcctggtatcagaagtcagcaagacaacgtcccatattgatatcctcttcgccaatgccggcgcgacctggggcgaggaattcgaaaagttccccgagtcggcattcgacaaggtgctcgacctgaatgtgaaatctgtctttttcaccatccacaaattcttcccccagctctccgcaaaggcgagtctcgaggatcccacgagcgtgattatcaccggatccgtagcgggaatcacgctccgcactcgaggctagaacgnaagcttc

SEQ ID NO: 23394 - DNA, 850 bp, Emericella nidulans
cacagcaacctctccttacgtgattctctgtggacattttctgggaaagatcttacggcgtggggtgacgtccaggaggttttgcaacgggaggacgtgccgaagtcgattgaagtgcctctcgatttctaccccttgtcagtactcttgaacaaagggattgtattaggagtggagcccgaaacaattcaacggcgcgatgtcacgttcgtagtgttgaaatttgctattcgagtacgttctcaaattcattacagttcaaacgcaggctacgttaacactcgatagacacatctcttcctgccatacttcttgcagcacagtcttgttcagggtgatatccctgcagcgcactcactatgccagcatttctcccatctttcatacttcccgcacgcattggaaatccttctacaccatgttttggacgaagaagtggacaatgtggcgcgtgatagcaaatttgatgatcaaattcctaaacatgaccctcttctaccctcggtcatctcatttcttcaggcctcacttccacccagcatatacttagatgttgtcgttcaatgtacgcgcaaaaccgagctccgatcatggcgtaccttattcgcctacctccccgccccgaaagaccttttcgaacaagctcttaagctcaactccctcaaaacagctgtggggtatctgctcgtcttacaagcgtttgaagacgagtctgagggccacgatgccccggttgaagattatgttgttagactgatgatattggcgtcacagagaagcgactgggagttatgtgcacagctcgctcggttcctggttgctctcgatggctctggcgatatgctccgcc

SEQ ID NO: 23395 - DNA, 380 bp, Emericella nidulans
cgaggacgttttacaggccgatgctcgggcatcgcgggaataggaagactattctgtatccacagtcccatattttggctctcgtccgttgtcgttcaacacgaaagatgcacgccctgagaagcaagggtgggttaatttacgcacggtgtcaagcagaccaactcgcactacttgggttaggcgttgggattttttgaagaacggaatatttggttgcctagtgcagggcatgcggacgggcgctgttgaagaaaccgagaggatcggagtgctgctttgcagtattcggccggcattccaggaagagaggaggctctgttatgaggttaagactatgtgtaacaacatattagctttatgcagaaacttagaaggag

SEQ ID NO: 23396 - DNA, 500 bp, Emericella nidulans
ctccgcctccgtccccgtcgtcttctatatcgtccgatacgtccggcgaaattcccaactcacccaacactctgtcgctcataggggcaaaccaagacgaggactacagcgggttctgcaacgaccaggttaccgtgtgccgatgggaaggatgtgattttaaagacctcgggaacatggacgacttggtccaacacatccacaacgagcatgtcggtagccggcagaagaaatattcctgcgaatggtccgattgtactcggaagggtcaaacgcatgcaagcggctacgcgctacgtgcgcacatgaggagccatacgagagaaaagcccttctactgcgcgctccctggtatgttttattaccccttcgcttctttaccatttgtttcgcgtaacaatgagctcaacgcgatgcttacaatccgaccagaatgtgatcgcagtttcacccgttccgatgccctcgcaaagcacatgagaaccgtacacgagactgag

SEQ ID NO: 23397 - DNA, 837 bp, Emericella nidulans
cacggagcagcacgtcgcattttgcactaagtacatcgtctagcatcaccttaagggctgctagcagttctagtgcacttgcttctcacgacggtcatacgcctggtggagccagaactgtctctccgtacgtttcttatgcactgccgaagagcaacagcgagtataatcatctccgtcagaaacccagcgcagattactcttcccgtatatctcagtcgtacaaattgaccggtcctcgtcctcaaacccgatcttctggactctcgaactcggagaccgtttctatcccttccgatcctgatagcaatggactgcccaccactactctgcgcaacaaaatcaccttgtcgcgcaagcggagcacttcgaaaactcagcaagcgctcaatgcaaatacagaccccaaaaagtctgacttgatgcctcctcctaagctcccggcttccgccacctggaacaacctttcgacaggaaaggattcgagtccgaccctaaagccatcatacctcaagtctaggcggcaatcttctttaactaatgtggcaaatccagcgctcagaaaaccgagcttcagcagcgagcagagcctgtcactatcacctactgtctctcgggagtctcatgaaagcgataactcccaacatcggtctgcgtcttcaattctctcgccggtgcacaagattatcagctcagcgaagtcaaatatggcagccacttcgcaaactgagaaccgaattgagacagagattgcgatcgcggacgaggaaatgcgaagattaggcaccaagcggaaggattttgaaaaagctgcaagggagttggatgaattgcgca

SEQ ID NO: 23398 - DNA, 500 bp, Emericella nidulans
aatcaagggacggacggagtccatgcggatggcgctgttgaccttcagcttattggggttacagtatgtactatgatcttcatcaacactactcttaatcgaaatctgttgaatatcgatgtgtttgtccatcgtatgactgactctgtcttccaatagatttacctggggcattgagatgacctgtaaggatcaaattcctgacgaacatgcctttgaccattcctctaatcacctcctcttgcgatagactgcactccgtacctcctccaactgggcctcaccaagtcacgaacgtcactcgtctggatcgccggacctctttctgggctggttatacaacccctcataggtgtcattgcagacaggtcacggtctaaatggggaagacgaaggccatttatgattggaggatcattgattgttacggtgtgcttgttggtgctgggatggcaacggagatcgtcggtgtctttgtcaaggacgcggagaaagtattg

SEQ ID NO: 23399 - DNA, 500 bp, Emericella nidulans
tccccgattactcatccagccataccctcctccgattcagatggaattcgttccagacagcccaggtgtatctgcactgcgctgatattgctattgtgggtggtagtggttcatcacctagccctacttcgaccacatccactgctacctcaacgactacaccttcttccaccagttgcgcgtccgcaatctctataccggtgacgttcaacgcgcatgttacaactacctatggtgagaacgtgtaccttgccggatccatcagccagctaggttcctggtcgactagctctgccgttgctctatctgccagcaaatatagttcgtccagcccactatggaccgtgacagtcgacctcccagtcggggccacattcgaatacaagtatatcaagaaggagtcggatggaagtattgtctgggagagtggcccgaacaggagctacactgtgccgactggctgttcggggacaaccgccacagagagtggtgcatggcgg

SEQ ID NO: 23400 - DNA, 500 bp, Emericella nidulans
cacgacacggaacagcgttaccgccattaccaatatggccgcttcactaacttgaagcctatctaccgcaatcaggacacatgatggacgtacgtgctccttgacagcccatgcttagcagactatctcacattcgtaccattttagaccctcgtctgcccttcattcaagactcctcgtctacgccctcattctacttcgtaaagaaggccgaccctgcctcttgtatggcgacctttacggcctccgcgccaacgttaagcatccgaatatgccatcctgtaacggcaaactcccaatccttacgcaagcccgcaagcatttcgcctacggtgaacaacaagattactttgatgctccgaattggttaaggtttgtaaaatccaaaattctgcttttgaaaggtcttactaaacggcattggggggcaggatttattccgctatggaaacaaccggtaatctttcggcctggcctgcgttatgggcaaagaccgcccc

SEQ ID NO: 23401 - DNA, 500 bp, Emericella nidulans
ggaacgagccgattgccctaaagttaatcgatgcattcatgatttgatctagggacaggccatcgcgcgacccggccagtagggtatctgcgcttatgatggagcgcttttatatgcagggctgtcgaaactctcttcggtgttggctgaacaactaaagactttcggagcgcgccctgagcagcgggtcgctatcttaatgaacaaatcattttggtacccagtcgtcgtccttgcagtgctgaaatccggggctgcattcgttccactcgatcccagccaccctaaaaataggttgaagcagctcattagcgagatagagccctgcgctctaattacgacttcggttctttctgaattggcagacgacatgggatgcccttctctcgcgatcgacaccgatctcactcgcagtaaagaaggctcgactctaacattacttccaaaaacaagcgcaagtccaaacaatgctgcctaggttatcttcaccacagcagtac

SEQ ID NO: 23402 - DNA, 500 bp, Emericella nidulans
tgtccttggacaatggctgcagcctatcgtcgagcagcttccaccgtccgtccaggatgtcgtgctgcatcccctcgctccgaaagcgctcttggttctgctggcgcttgccttcctgcgccagacaaaccgaatactgaccaattggtcaatgaacaacggcgaacgcgacaggtttgaccatgaacgcgaactggtccttctcacaggcggctgcagcggcatcggcaagcagatggtccttgatctagccaaggcgaacgttcgcgtggtaattcttgatattcaagaaccctcttttacgctgcgtacgtggaaagaaaacaagttcagaacttcgttcacctattgactgactggatgcagcatccggcaccgcattcttcaaggccgatatcacttcgtccgccagcatcgccgaagtcgcagagaagatccgcgcagagcatggcgatcccccagttctcatcaacaacgcgggcgtcggcacgatggcacga

SEQ ID NO: 23403 - DNA, 391 bp, Emericella nidulans
taagcatcacccggctcttcaccgctcgttcctcgaattcctcgacctctacggctatttctcatgcgaggatctggaggaatccgaggaagaaaccgtacattgagaagaggagacgcagcacgaagcggagcgaaggccgttacttgggacacagaggcacagacggtcgcgttcgtaccggcctggtgatgcctcgaatgtgaagacgttcttcaccctgctcaaggcgttcattgggactgggatcatattcctgccaaaagctttccgcaatggagggatcctgttctcgtcggtcgctctggtgacggtcgctttgatctcgactctgtgctttcacctgcttctcgagtgccggagacggtatggcggagggtatggcgatctt

SEQ ID NO: 23404 - DNA, 721 bp, Emericella nidulans
ctcaaccaggctcttcaatatggtcttcctcgaggaaatgcccagctaatccaggtttgctctgtcccttagtctccatatttcctactgatcattgttgttcagtggttcgaaagtcttcagaggagcgtccacggcctcgatgagaacggaggctggtcgtgctgcattggcaatggaagtcaggagctcattcatcgcgtcatccaggtcttcactgatcctggggacccagttcttctcgaaacgtgggtctcactccctttgtatgcattcccggacgcaggcgccgctgactgaagccatagaccagcatatccgtatgatttcctccaggaattttcagagtggacattttagcaccttgctgacagggaccacagaggcgtcgccgggttccttcgcgcagacggacaggagcttatcccggtctactctgacgcccagggcctcaatccggccagcctggagcaggcattgtcggagtggcccggagactcgccgcgccccaaagtcctctatacaaccccgactgggtcgaacccaaccggtcaatcctgcaccgagagccgcaaggccgagatgtaattactcctctgcccagccactgctccagacctgagactgacagttccatcccgacacctatagtctccgtctggcaaagcgattcaattttatcatcctcgaagacgacgcatactattatctcaactacgga

SEQ ID NO: 23405 - DNA, 850 bp, Emericella nidulans
  unsure (1)..(850): unsure at all n locations
gggattccatcaggatgtaattctcctattcaccactatgtatggcgagatattggaacggggctgatcagtagtatgcagctcttcttcgatgacgacggtacagtctacctgagcagtacataccgcaagcaccagcgcaccatcacgaatggttgccccctcaaggacttcgcaatccacatcagcacgatcgacctgcaaacaggggatgtaaccagcgcaccgaaactgatccgctcctcgtcttctggagtctctgagggctcgcatattttcaaaagagggaaatactactaccttttcaccgcagaagggggcacagaatccggacacagcgagtgggtgtgtcggtctgagagtagtccctttggcccgtgggaggctggacctgtcagcgaggtgaatccgctttttggcagcgggatctcaccggatgatgaggtgcagaatacaggccatgccgtttatgtagagaataccacggaaattggtgggctgtgttcctgggcgcccgcgccggtgtggagggagaacgaaaancggtgggaggggagtgtttttggtatgcacttttctctttttttgactttacccttcagtctacacttgtgagaggtagaactaacctgtggcatgcaggcagagaaacatttctctcccccgtaacatgggagaacaactggccggtggtcaactccaagcgtagaataaccctcgccatagatacgccgcatctgtaccactacacgtcgtccgtggaatggagagacgatttcacctctggtaccctccaactcggctggtacagaaagaacacgccactgaagaaagattacgcccttctcgc

SEQ ID NO: 23406 - DNA, 775 bp, Emericella nidulans
gacttatcgccttgcttccttggtcgtggataccatatgctgaattagtgaggctcgacaagcccgctggaacttactatttgttctttccatgtgcgttctccacgcttcttgcagcgaccatggcacctgcagtttcaatcctccaagttcttgggaccacaggtcttttttttattggtgctatgataatgcgaggagctggctgtgcaatcaatgatttatgggatagaaatctggatccccatgttcagcgcacaaagttccggcctatcgcgaggggcgcaatatccccgggtcaagcgctaatcttcactggtactcaactgctggcaggactaggtatcctgcttcaatttccgtacaagtgcctctggtatggaatcccaagcctttttctagtgggctcttaccccctcgctaaacgcgtcacttattatcctcaggccgtcctaggtcttacattctcttggggtgccataatgggattccccgccttggaaattgatcttgtaacagagccaaatgctttgatggccgctactgctctctatgccagctgcgcatcatggactgttttatatgatatgatatatgcgcacatggacattaaaaacgatgttgcctgcggaacaaggcaattcacttcacacgacataataccaagccatctttttggttacaggcgccaagcacattcttgttgtgggggtagaactgtgcgggcggttattaattgttttgagaaaaattgttaaaagggcccccccccccc

SEQ ID NO: 23407 - DNA, 551 bp, Emericella nidulans
cttgtcgacgaattcagatgttcgtggatgtactgacgcgtctaaatgtatgtgatgttgggattagtccaggctcacggtcaacgccgattgctctactaatggaacaacacgaaggaatgaacacatatttacatgtagatgaaagatctgcaggattttttgcgctcggtatcgcaaaagcgaaaaaacgttcggttgcattattatgtacgtcaggaacggcagcagtgaactactatccagctgtatgtgaagctttccattcacgagtgccgcttatgggcttaacagcagatagaccgcatgaattaagagatgtcggggcaccacaagcgatgaatcaatttaatttattcggcacgtttgtgaagcaatttacagagatggcactttcccgaagcgaggtgaagcgaaggaccactacctcttgcatgacaacgcagcgcatgataacaaggtggttgtttaagcgcccaaggggccgtgcaaatttaatatttacacgtgggaacccgcttaacccggatttttattttaagggtatggga

SEQ ID NO: 23408 - DNA, 850 bp, Emericella nidulans
tcgcacggtggacttggagtagccatggctggctgtataatcttccctccgtcgacttcgccggaggcggcccggtccatattgcctcaggctgcgctgcattggcgtacgcagttgtcctcggcaagcgcaaaggctacccagacgccagtatgaagcggcctcacaacacgactctggtcttcctgggtaccgtctttatttggactggctggcttgggtttaatgtatgttccgttgacactatcttctcatgactctgatctaacttgataacagggcggttcgaccctcaacgcaagtgtccgtagttacatggccgttatgaacaccaacatcgcaggctccacgggcgtcctgggttgggtcctggtcgacatgatccggaacaagggaaaattctctatggtaggagcttgcgaaggcgccattgctggccttgttggtatcactccctgtgcgggatgtgtcactttctggctgggcgccctagttggtttccttactggcatcgtgtgttccgcgtgcaagaacctcaacgagtggattcgggttgatgaagggatggacgttttcaaactccatggagtcggcggtatggtcggctcattcctgactggcattttcgccgatcagtacatctcggcgttggatggcgattccctcattcctggagccatcaacggcgagggcgttcaggttggaaagcagcttgctgagatctgcgccatctccgcttattctttcggtgtgacctgggtcatactcatggtgatgaagttcattccatacctggggctgcgggccaacgaagaagctgagatggtcggactggaccgatccttcttcg

SEQ ID NO: 23409 - DNA, 845 bp, Emericella nidulans
gtccgcgtcgcgattgaaggttgtgtaagtttgttttgatccatctggatctattctgtgattatttcaggccacttacatatttctcagggccatggttgtctacacagcatttacgcttctgttgagagagctgctgcgttgaaaggatgggatggtgttgacctattgatcattggaggcgacttccaggtgcgtttcaagccacaaaacggtcttcattgtcacatctaatgatacattaggcggttcggaactctaacgatatggcctgcatgtctgtacccaacaaatataaagaaattggggatttccatgagtactatagcggacagcgaactgctccctacctgaccatctttgtaggtggaaatcacgaagctagtaaccatttgtttgagctttactacggcggatgggtcgctcctaatatctattacatgggtgccgcaaacgtacttcgttttgggccccttcggatcgccggcctctccggcatttggaaaggtcgcgattacagaaaaccgcattttgagaggctcccgtacaatgacgatgacatcaaaagcatatatcatgttcgagagcttgacgtgcgcaaattgcttcaggttcggacgcagattgacgtgggattatcacatgactggcccagacagattgaatactgtggtgattggcagcagcttttcagagccaaaccattattccgccgggattcgcaaaacggaacactcggtagtacagcagcagaatatgtactcaaccgtctgcgtccagcatactggttctctgctcatttacacgtgaagtttgcggcttccgtccagcatggcccgcaggaa

SEQ ID NO: 23410 - DNA, 850 bp, Emericella nidulans
ggcggtgctgcgacaaacatacaccgacttctcggcggatattgcgagctcgatgggtgcgatacgggccaaagcggataccgtcaaatcttcagctgtcgaagcttctgtgccgtcttacgaaggggatgcaggccgggcgcgtgtcaaccttgggaagaaggagctcgctgaagagtctgaacggcttgttgcgcgagtcgatgacctacaggatctgattgaggatctacggaaagacgtggtcagccgaggagtacggccgcttcctagacagctggagactgtgggtaaagatatcagcgccgttacaaaagagatcaagaagatgcaagaattcctcaagcgagagaaaccaatttggaccaagatctgggagaaggagctgcagcttgtttgtgaggaacgtgaccagctcaccatgcaggaagatcttgcagctgatctgcaggatgatctggaaaaagcagcccagacgtttgctctcgtcgagcaagcaaccaagcagcaggccatgcaaaacggcaacagcggccctacactgcgaaatacctcgcgtaatgtggtgattgacccggcagtggatcctatgaaagcaaaggacagtgtgttgggcgaagttcgcgctctccagcccaaccatgaatcccggcttgaggctatcgaacgagctgaaaaagcccggcagaaggagctcgaaactcgccgtgtcgatctattccagaaggaactgggcacctttgttcaggagggaaagctgaagaagagtggcggtttcgaggaagccgaacgtcttcgtcgggctaaagacgagcgcaatcgcaaggagatgtggaatatagctcaagcc

SEQ ID NO: 23411 - DNA, 549 bp, Emericella nidulans
ataaagataacaaaaagctgaagactctttctattcatagacgtcttcgtgtaattgatcgaaaaaaagccaaattactcggtgaaatgctctgtaccggaatttcaggtcgtcatctagaagaagatgctggtaatacgacgcatacagctgatggttcattagtagactacaaccgtcaaggaatgccttcaatcgagatcgtatctgagccatatatgcgtacgccagaagaagcatatgcatatgttagagaagttaaaatcaatcattcaatacactggtgtatctgattgtaagatggaagaaggttccttacgttgtgatgcgaacatttcccttcgtccagttggtcaagagaagttcggtacaaaagcggaactgaaaaacttaaactcattcacttacgtacaaaaaggtcttgagcatgagcaagtgcgccaagaaaaagaactgttatctggtggcatcatccaatcacgaaatctggatccgatacgtaacgcgtctgcagcatgcgtggcaccgagctttccctatagtgagctg

SEQ ID NO: 23412 - DNA, 460 bp, Emericella nidulans
ccataactttcgccaacctcggcctggcaacctatgaaaccgacacaatctctgacttgttcgatgttctctgcctgaaccgatatttcggctggtactcgtacacgggagacctggagtccgccggaaaggcactccatgaggaactggacggatgggtggccaagtacccgaccaaaccaatcatcatcagcgagtacggggcagacacaatggcgggactgcactctgtgctgggactgatctggagcgaggagttccaaatcgagttgctggatgtgtatcatggggtgttcgaccagttccagaatgtggttggtgagcatgtatggaatttcgcggatttccaaacaaaggagggcatacagcgggtggatgggaacaagaagggtgtctttaccagagaccgcagacccaagggggcggcgtttgccttgaggaagaggtggatgaatatgat

SEQ ID NO: 23413 - DNA, 850 bp, Emericella nidulans
cactctcgttcccacctcagagcctagcgcctctgagcctagcacttcagagcccagttcatctaccggtactccagggacttcgaccagtgatcctgatcccacgagtgccactgagccgtccagtacttcgacctcgactcccgagccttcaggtactgtgacttcaagtacttcgacttcgagtcctagtactagcccccccagcacttccagcacttccagcactagcccgtctagtaccttgacctctacctcatccccctctacgtcttctaccttaacgcccagtgccagccctaccccgtctactacagtcaccccgtcccccagcatgtctgttacttccactagcgtggcaccctcggccaccgggtccctggccaacaacatccttgtcatcgcccgcgactctacgcaggccagcgttgcctcgtccggcctgaatggctacggaatccccttcacgacgctcctggtccctcaggccggcgtcgagctgccggccctgaactcctcctcagggggcaactttggcggtatcgtcgttgccggcgaagtcagctacgactacggtaacgataactggcgctccgccctgacggacgaccagtggaaccagctgtacgcgtaccagctcgcctacggcgtgcgcatggtccagtacgacgtcttccccggtcccaacttcggcgcctcgtccatcggcaacggcggctgctgcgccgacggtgtcgagcagctcgtctacttcacggataccagcgacttccccacggccggcctcaagaccggctccagcgcgggcgtctcgacctcgggtctctggcactacacggcttccgtcacc

SEQ ID NO: 23414 - DNA, 850 bp, Emericella nidulans
  unsure (1)..(850): unsure at all n locations
tccattccgtcaaggagttactgcagcatcctgagatggtcaggcgagatgtggcgccctctgcactgaaactttggcaggcattgctcgttgtttccaaggaagaagataaccgtgctatgggagctgaatgtgttgggcggctggcgttacttgaccctcctgcctacatcccacaattccaggtaagtcatattgcccacactatttttccgccgctgactccattttcccgtaaaggaatatctggccaacggagatgctgggatccgcagcatcgtggtatctgctttccgattcacgctctccgactcacgagacgtcttcaatgatgttctcagacccttgattgtgcccctcctcgtcaacatgctcagtgaccgagatctaggcaaccaccgtcttgccctgacaactctcaattcagcaatccataacaaactcgctctaatcctccctcacctaggcgaactccttcctgcggtccttggagacactcaaatcaaaccagagcttatcagagaagtgcaaatgggcccattcaagcacaaggtcgacgacggactcgaactgcgcaaggtgagttcttgtcccaagcttcaatcccaccaccttcctctattcaggcgagttttccgctaacaaacaacagagcgcttaccaaaccgtctatgccgcccttgacaccttgttctccctctccacatcaccgaactctacagccgaatcctagctggaatcgacgacgagcaagacattcgttcaatcttgcacctcatgacctcaaaacttatcaccctcgcccccgaagaactcagcgacacctngacgcgctctcagacgctacacc

SEQ ID NO: 23415 - DNA, 314 bp, Emericella nidulans
tgtaaggagttaagagtccgttaacgggccagacgccgctagttgttgcggccggaggtgttaatgatgggcggagcttggcggcggcgttgacattaggtgcgtctggtgtgtgggtgggtacgaggttcctggcgacggaagagagcggcgcgagtaagttgcataagcaggctgttatcaatgcgcagtatggtgagacgaagagaacgcttgtggtgtctggaaggccactgcggttgctgccgaatgattatatcaaggagtgggagaagaagcctgaggagatcgcgaggttgacgtctcagggaatt

SEQ ID NO: 23416 - DNA, 500 bp, Emericella nidulans
atccatcgcgacagtgggccactggcagatttggactggtaagtccagcgtccccgaggagcgcatggcgatcgagtcggtccttcccaccgggtatggggacgcaaaatacatctgcgaacgcatgatcgacgagaccctccataaatatccagacagattccgggccatggtagtgcgccctggacaagtcgccggctcaagcaccagtggatattggaataccatggagcatttttcttttctagtgaaatcgtctcagactctaaatgccctacctgactttgatggtgtgctgtcatggaccccggtggatgtcgtggccagcacgctcgtggatctcctcctgcttccggaagataaaaccccgtattccatctatcacattgataacccagtccgccagccctggaaggagatgaacgtggtacttgcagatgcgctgcatataccccggtcgaacatcattccattcgagaaatggattcagcgggtcaagg

SEQ ID NO: 23417 - DNA, 760 bp, Emericella nidulans
tgtcctatactttggaggaaaccataaatcattgcttaaatgctctggcagacaaggatacgcctatacggttcgccgcaagcaagtcactgagtatagtgaccttgaaattggacccggacatggcaacagaggtcattgaagcggttactggatcacttgaggagaatattttatacgagacaagacagggtaagattatcacgccgtctgaggcaaggcgagtcggaacaagcacactgaagcggaatctaagcgcggtcgacgctcagagatggcagggtttgattctcactctaggccatttgctatttcggcacgcgcccccagctcagcagctgcctaatgtactgcagccgcttgtgtcggggctggactttgagcaaagatcttcaactggtacctccgtcggaactggagttcgagatgccgcgtgctttggtatatgggcgatatcacggaaatatacaactcaagaactccttgcaataaatcggcaggcaatccattcgtctgtcgctcaggatgaggtgagcattcttcagatgcttgctattgagcttgtctgtgctgcgtgtgtggacccatctagcaatatccgaaggggtgcttctgctgcgctgcaggagctcatcggtcgtcacccaaataccatcgtggagggcatatcacttgtacaggcagtggattatcattcggtagcacgacgttcaagggctatggtcgatgttgcaaaggcaactgttgctcttagttccct

SEQ ID NO: 23418 - DNA, 500 bp, Emericella nidulans
gcgaattcacaggagttgaatcagggtcgggtgccgaaaaaaggataaaaatagcaagatgctataattagattaatgaataaaaagaatagaaaaacgggttttggggttagccttcgtgagtaaccaggtcaagcaaatattaaaggcccagtctcaaagtttttccgccgagaggcgtgagaagacagcagtttttacacgattccggggccaggaaggtgccataggtgatcaggcgtgttaaaaggagtagacgcacatgttgcgtcatacagcggcctctcgctttggggtcgtggaatcccaaggctgcggtgtccagcttctttgtcgcggggatgtggcgttagcaatgggtttgcctatttacggcatcatcgctggcactggcatggcctcagacgggattggtcgctccgtgcctgctcccggacaaggcatcctcactaatgaacaggaagatgctcagaaccctgccccgatccggacagcgctcg

SEQ ID NO: 23419 - DNA, 850 bp, Emericella nidulans
ctccatggccatcctgttactgggccgtggtatgagtcccggaacagtgtagtcccaaagatgcagctcagagaccgctaataccgtatagactggcgaaggggcgaaagactagaagaagaagggaagctactctcgctattcgccgactcccctcatgccccattctcgatacacagttttgtcaagcacggagcagatttctgcggaaagcatccaggggaatggtttgggccaactgctacagctagatgcatacagtagggacccttgttttcaaaagggcggggtacgaaagctcacgtaggagtttagaggccttgcagcgagatacgaccagtcgaatctccaagtttatattgcagatgacaactcggacgttcatcaggacaaatttatgagtgtgtccagggatgaaaaaggcactgttcgcccgacgctcatactgctgggtctcagacttggaatcgaccgtatcactgcagtatactggaatggactaaaagccgtgctacagctgccacaatccgtggggatcgcggggtacgtcatgcaaacctggagtattattggatgtatcagttgctaaaggctatcgaacagaggacgtccgtcagcttcccattattttgtagctgtccagggttcgcatttcttctaccttgacccacacaacacccgccctgctctaagatacagcgaatcagggacgtacacggaagatgaagtcaatacctaccacactctgtcgactgagaagactcaacatccaagacatggacccaagcatgctcataggattcctaatcagagatgaggacgattgggaagactggaaagctcggattat

SEQ ID NO: 23420 - DNA, 595 bp, Emericella nidulans
  unsure (1)..(595): unsure at all n locations
cggaggtttttagggctgaccgcaacctgaagataccggctcctaattccacctcaccacccacagattttgtggtcttattccccgcctatctcataaatctcgtcacttccgaaatcgtggaataaaggctcccagaaagagtccgagcgtcttctgtccaacgtcatgcagtcaatacagcacgaagtcatgcagcatgatggtgatgataccataggcccaggagccttgtggctttctaatgtacatgaaatgttgtctttcgtattcttggccgaagattgatacgaagcacataaaactgcttattaccagtatgaccgcctgttggcaatcgtgaaacacgactcggtgagctcagaatttaacatctatcacacttgtatgaagctgctcaagacaaagttgtacaagatgattgtgccatccattcttgagtctcagcctcttcccggctttgtgacaaatgagacgaatcgattcctcggacagcttttaccatctaacaacaatccatcctacgacatggacaatctccgtagtcttttgaacaatgcatacaangcgatgaaagctttgtatctagaggact

SEQ ID NO: 23421 - DNA, 500 bp, Emericella nidulans
tcagtttattctcgaggacttgggccatgttctggagcaaagtgtggacgggcttagggcgaagaagattgcgttcgatctgttcaaggaacagccatttaagggtaggtctatttccttatgttgtacggccactgtgccaggggcagaaggatggtccaaacacgtatttacatgtgctgatccgcccaggcgcatatgtctactacttgaaattcattctccacgattggtccgatggccaatgccaccgaatcctcacgcacatccgggaggctatgcgtcccgagtcgaagctaatcattgaggaatttattcttccagagaaggattgtcctatgctatcggccatgtgggactgggagatgatggtcttttgtaacagtttcgagcgctcggagagccattggaggaaagtcctgagtaaagctggtttccaagcaaagttctactatcctcccggggatggacaggtgagattcttgcagagtaagggtacg

SEQ ID NO: 23422 - DNA, 318 bp, Emericella nidulans
taccctaggctcgagaagcttgtcgacgaattcagatgatacaaatggttttttgtcggatgaggttttaagattagggggtataaatagttacttccatacaaataataaaaatgaaattgatttatcagttatacgttatgtaaaagatagtagtaaatatgatttgtctcaatactccaaaatagatgaatgtctatttgattttgatagaagaagagtttcagttgctatagaaaaaaatgcttacgaacgaattatgctttgtaaaggtgcagttagagaagttgtattaatttgtagttttataaaagaaaa

SEQ ID NO: 23423 - DNA, 850 bp, Emericella nidulans
gtagtggctgtactgaccctttatatagaccggcgtaatcagcattggtgcgcttatcgcctaccgcgagtcatacgcgcccgtcctgcttgcccgcaaggctgcccgactgcgcaaggagccagggatcccgtccctgcggtccgtcctcgataccggccggaccccgaagcaggtctttgtcgacgccttcacgcgtccgatcaagttcctcttcctgtcgcccattgtcttcctcgtttcgctcttttccaccatctcctatgggtacctgtacctcatgtgcaccaccatcaccagtatcttcgagggccagtacggctgggctccttcaatcgcaggccttgcgtatctggaattcggtatcggtagtatggtcggcctcatcgttaccggtgcaatcgggaacaagatcgcggccgatcatacggccaagggtatattcaaaccggagtcccgtctgccgccgatgatctttgggtcgctggccatcccgatcgggcttttttggtacggctggagcgccgaggctaagacgcactggatcgtgccgattatcggtacgggcgtgttcgctgtgggattgatggttgtgttcatggttgccaacacgtatctcgtcgactcgtacctgctgcatgcggcctcggtcacggccgcgaacaccgcgctgcggtcgctcggcggtgcgctgctgccgctggcggggccagacatgtatgatgccctcggtctgggatgggggaactcgttgttggcgtttattgcattggcgatgtgtgcgtgtccggtgttattctggaagtacggagagatgattcgcacgcatccccggtttcagatccggttg

SEQ ID NO: 23424 - DNA, 850 bp, Emericella nidulans
gccttctgaataaggcgcacttgattcattgcgatcttaagccggagaatattttgctgaaaaagtcagtccataattccgttggtgcatttgggtaaactaacggtgtctcttacagccttgagagccccattattaaggttattgactttgggtccgcctgtgatgaaagacaaacagtttacacatacatccagtccagattttaccgctcaccagaggtgcttctcggcttgccgtatgtaacagaaatagctcactgttattggcgatctttggctaatttctctagatactcttccgcaatcgacatgtggtctctcggttgtatagtagtcgagctgtttctgggcttgccgctattccctggatcctcagaatacaaccaggtgtgtcgcattgtggagatgctaggtttaccgcctacctggatgttggaaatgggaaagcagtctggtgaattctttgagaagactcaggacgagttcggacgaaagagttaccggctgaagagcctggagcagtattcccgggaacataacacaaaggagcaacccagcaagaaatatttccaagcatcgacactggaggaaatcattcggagttatccaatgccaaggaaaaatatgaaacaggcagagattgagagaggtaagaatcctgtactgttccttatttgacaactaacaccgctgcagaagtcaacaaccgcgttgcattcattgacttcgtccgtggtctgctgtcgatcaatccgctcgagcgctggtcgccgcaacaagcaaagctccacccgttcattacacagcaaaagttcaccgggccgtttgtccccccaatgaacttgaag

SEQ ID NO: 23425 - DNA, 425 bp, Emericella nidulans
catgccataccctttccgacgatacccgccgacgagaatatgatgcgagattaaacctttaacgagagatggaagatgatgatggagtacccggcggagagggcggattctggtcatcatttggattcagttcagcagaccgtgaagagagatcgaacgagcagtttggatctgtgttcgaggagatgctccgggaagagggtatggatggggcgggtgcacaaggagcagtgtcgcatttttggtcgattgttgggggcgccagtggtgccgctcttggattcattgtggcgaatgccccgggggctatagctggtgctgttgctggaaaccgcctaggggctgtccgagatgctcggggaaaaagtgtctatgaagttttcttggagctgccagcgaccgaccgtgcacggcttctgagccaa

SEQ ID NO: 23426 - DNA, 497 bp, Emericella nidulans
ctatttcaataaatgccttgaatcttgaacatggctgctatccgccaagccgactcggacctgggtgttgggttccctcgtccatgccacgttcatcggctacggctaggaagagtcatagcaatcgacaagaccatggcggcggcggttctgggaagaagccaagcaaacaaaagtcaagtgggcatttaaacgcaacatacaacggtactgctggatccgaaactggaccgtcttcgcaggtcgactggccatcgcatcgttctggagaccaatcgatcgcagcagccgcagccaaatctaacggaccggtcgatagcttgaaagcggacaccaacggacgtggttatccgggcggatatgcgaagggaaatgcagacatgtcttacgggcagacgaatggtggcgtgtcgccgaatggtggactcgccgggccggcttcacgtcgtacggataagtcggtcactgggaccaagaggacaacttcgaatgcgtcg

SEQ ID NO: 23427 - DNA, 850 bp, Emericella nidulans
cttgatggcattacttggtgaaatgaaactcctggaaggacgtgtccatctacctggcggcactgctaaccgtgccgagctccctgttgatacacgtactggtctcatcgagagcgtcgcttactgcgctcaggaggcgtggctcgtcaacgacaccattaaggaaaacattattttcgcttctccgttcgatgaacgccgctacaacgccgtgatcaaggcctgcgccttggagcgtgacctggaaattctcgacgctggtgatgaaacgcttgttggcgagaaagggattggtttgtctggtggccaaaagcagaggatatctcttgctcgcgccatctacagcagagcccggcatctccttctggatgactgtctcagcgctgttgactcacataccgcaaagcacatcttccgagaagcgctgagcggtcctttgatgctcaaccggacgtgtattcttgttacgcacaatatcgcactgacagcgccttacgccgacttcatcgttgctctggataatggtaaggtcagtttccaaggtaggccggacgaagcaggtgcttctaaagctctaggcgaggaacttgccaaatcaagaccaggctctcggtcaagctctagtccccctcgatcccgtcgcccttcgaattcggccaacgatgataacgagtcgcacgcgaacggcatccctaacggaaccgctaatggtaccgccaatggtgcagttaatggaactcccggtaaaacactccagaagacagctacctcaaagaaacacgcagagacgaaggcagtccgtagcataaaatggcctatcattaagatgatcttttctcaatgggcccct

SEQ ID NO: 23428 - DNA, 850 bp, Emericella nidulans
tgcgcgtgctggcatggtcgcaccagacgagactacctttgagtacctcaagggccgccctcttgctcccaagtacgacagcgccgaatggaagaaggctgtcagctactggtctagcttggcctctgacgaggatgccgtttacgacaagaccattctgatcgacgccaaggacattgttcccacaatctcctggggtacctctcctcaggatgttgttcccattacaggcgttgtccccggccccgacgacttcgaggatgaggctcgcaaggccgcctgcaagcgcgccctcgagtacatgggcctgaccgccggaacgcccatgaaggacgtcaccgtcgacaaggtcttcattggctcctgtacgaactctcgcattgaggacttgcgcgccgctgccaatgttgtgcgaggtaagaaggtcgcctccaacatcaagcgtgccatggtcgttcccggctccggtctcgtcaagcagcaggccgaagccgagggtctcgacaagatcttcattgacgccggctttgaatggcgcgaggctggctgctccatgtgccttggcatgaaccccgacatcctctctcctcaggaacgctgcgcttctacctctaaccgcaactttgagggtcgccagggtgccggcggccgcacacacctcatgtcccccgccatggccgccgccgccgccatcgtcggcaagctcgccgatgtccgtgagcacatcgctgagagcccccgccttggaaaggttcagcccaaggtcgacgtcaagcctgaagccgaagacgttgacaccgaggaagaactagaccacatccttgaccagcccgccgacaatgaaccccat

SEQ ID NO: 23429 - DNA, 365 bp, Emericella nidulans
tctacggcgcgtccaccacctaagtacttaactatagctcggaggcggaccttgcctgcgacgtcttcgacctgatcaataacgaagccttcgcggcgaatacctgcttcgacatctacgaggtcaatctcatgtgtcccctgcaatgggacgtacttgctttcccaacagagcttacgtaccagcccgacggggcgccgacggactacttcgaccggcccgatgtgaagcggtccatgcacgcacctgagtcagctctatggtctatctgttcaaacctcgccgctttcatgggctgtgatacctagccctaagtctgataggtctcttttttgctttctcctttttctttcttccattcttac

SEQ ID NO: 23430 - DNA, 500 bp, Emericella nidulans
aatgaaccccatacaaacacgcacacccctgccaccaccttcggccagttccgcccattctccgccccatggctgactaattttttttatttatgcagaggccgaggccgcctcggcctctgagctattccagaagtagtgaggaggcttttttggaggcctaggcttttgcaaaaagcttcacgctgccgcaagcactcagggcgcaagggctgctaaaggaagcggaacacgtagaaagccagtccgcagaaacggtgctgaccccggatgaatgtcagctactgggctatctggacaagggaaaacgcaagcgcaaagagaaagcaggtagcttgcagtgggcttacatggcgatagctagactgggcggttttatggacagcaagcgaaccggaattgccagctggggcgccctcttgtaagggtgggaagccctgcacagtaaactggatggctttcttgccgccagggatctgtatgcgcaggggatcaagatc

SEQ ID NO: 23431 - DNA, 500 bp, Emericella nidulans
  unsure (1)..(500): unsure at all n locations
tttcgtgccgctggttctgtccagggtgccttttggtgtgctgctgtcggcttcgccttgcggtagtcttgtggtgcgttggtctgctgtctggcctcgctggggtgtcggcggcgtgttcggtgcagctttgttcccggtcgccggggcttgtcttcgtgcgggtctggcggttcctttcccctgccgtccgttgcagtcgttggccgtccccggttgccggtgtgttcctctgtggtcgcngcttttgttttcttgccctttgggtctgcgtgttctgggcggtccccgtgtgcccgttttgttccgtggtccgcctcttccttgctttggggcttttggccctcttccgttggctggtgggtttgtctgtggtcccttcttgggcggttttttcccccgcgttttcttttttctcgccccccccggtcgtgtgggtctggtgggtcacncgggcggggcttcctgttctggtttcctccggcgttgcccgccccggg

SEQ ID NO: 23432 - DNA, 677 bp, Emericella nidulans
cggaaacagagaaaaggagagtactgtaccaaaagagataaacttaaatcgagtctaatataaaagacacaacgaaataacaggctaattacgaaaaggacaagatgatagaaatattagccgtccaccaaggattcacggtttccagggtgtaacactcgttggggtaccaagaagcttcatcgcaagactaactagggtctaagcaaggtagatagtaacggtgactggcaccctaaccacgtccagtggaccgttgcccgtgacggtcagatgggttaccaccaccgtacctcttgcaaccacaaggtcttccgcattggcaagggctccgacgaggccaacgcctccaccgacttcgatgtctccaagaagcagatcactccgtatgtccctctaccccttttaacctcctcaaaaccactaacagttgcagtcttggtggcttcgtccgctacggtgaggtcaagaacgacttcatcctgctcaagggttccgtccctggtgttaagaagcgtgtcatgaccctgcgcaagaccctgtacccccagaccagccgaagggctaccgagaaggtcgacctcaagtggatcgacacctcctccaagttcggtcacggtgctttccagacgcccgaggagaagcgcgctttcatgggtaccctcaagaaggacctc

SEQ ID NO: 23433 - DNA, 850 bp, Emericella nidulans
agcgcgcatctcaatgtgagttcttcgcgtaaaacatatacttatagctgcttccgatgctaaccgataccagctcgttgagaagttgcctaaccgggattatctcacgcatgcccacttctacttgatccgaatcagtcaaatcgacgatagagaagtgttcaaaatctgcttggaatattggaccaggctagtgcaggagctctatgaagaaatgcagcagcttccgatcaccgacataaaccccttggtgagcatgggcgtgagtggcttgtctaatggaggcgcaccacatcccaatacccttgccggctatcccctccgcaagcacaaatatgatgaggttctttcgagtttgcgcacggtcatgatagaaaaaatggtgcgtccagaagaagttctgatcgttgagaacgaggagggtgagattatacgcgaattcgttaaagacagcgacacaatccaattatacaaaaccatccgcgagtgtctggtctacctgacacatttggacgttatcgataccgagaatatcatgattgaaaagttagctaagcaggttgatggtacagaatcgtcctgggcaaactgtaacacactttgttgggcgatcggatcaatatccggtgccatgaacgaagagaccgatcaagcgtttccttgtccctgtcatcaaagaccttttaggcctctggaaaatgaagaaagggaaaggcatcaaagctgtggtgcccagtatgatcatgtatatcgtgggccagtacccgcgtttcttgaaggctcattgcaagttcttgaagacagttgttacctccctgtttgatttaatgcacgatacgcatgaaggtca

SEQ ID NO: 23434 - DNA, 500 bp, Emericella nidulans
ggctcatgggcgccgcccgcggtgtcgatgaaggcctgatcaccggcgccttcgactcggtcgatttccagcgcactatcgactatgagtcgtacagcgccgtcgagcaggccaacatcaaggccaacgtcacggcgatggtgcagctgggcagtgtcggcggcgccttgttcgccttccttgtctgcgatcgcattggccgcatctgggcagcaagagtgctctgtatgctctgggtgctgggaatcgcaatcttcatgggtcatggacatagcttgggtgccgtctatgcgggacggcttatcgctggtttcggggtcggccagacggtcgttgttgggccggtctatctttcagagattgtatgttcttccctctatactcttcgtcggccatccagcatcgtctctaacagttggtcttattctgctttacaggcgcccgctcaggtccgtggtctctgtacgtgcatcttcaccggcttcgtgtacctgggcatc

SEQ ID NO: 23435 - DNA, 850 bp, Emericella nidulans
tgtcgcagttcgctagttctacccgtgtatagcacaacccggttactgacatcttcaggtgcattgataaacaaggcctactgctgaaatctcaaggcgacgcactcacagccagccagaaatatttcgcaaaagaagacaatgaatggcctgagggtcaagatattgatctttattccgtcatcaagcacgtcaagccccatgttctgatcgggacatccaccaaacctgggtcttttacagaggagaccatccgcgagatggcaaaacatgtcgaccgcccaataatcttccccctcagtaacccgacgagattgcatgaggctcagccgcaggatatcaccaagtggacggacgggaaagccctgattgcgactggcagtcctttcccgcctgtagagtacaacggcaccaagacggaaatcggtatgccttctgaatatctcctatcctcattatcagattcatgtacttgaggctaatagtatcagccgaatgcaataactcaaccgccttccccggtattgggctcggagctgtcctctcacgagccagccgcctatctgagaagatggtcgtcgcagcttcaaaggcactagcagcaaaggctccagcgctggaagatccaaacaagccacttcttccagacgttgagaatgtcagagagttgagtttgaatgtcgccaaggcagttattcagacggcagtgaaggaaggattggcccaggaagagggcattccagaggacgagaaggatttggaagactggatacgggctcagatgtgggaggcaacctatcgggatttggagaaggctgattaaagcatgccaggcagaagctcgtggtat

SEQ ID NO: 23436 - DNA, 584 bp, Emericella nidulans
tacaatattatgccaacagacgggttgctgttgttcccggaggatgtggagaaagatgattacttgcataaccctgaccccagcgatagggagggggagtgcgatgtttggaataagcggggcatgattaacgtcggcgggttggtgctgcttacaattgggtttttggtgctgtttattggttatcctgtcgtgtaggtccctccgttccaattatagctggggatgtggactgacttgtggcagtacggctatgaaaggatttgaaaagacacagtcgggttgtaggtcgggggatacactatgccttgatgttggggaccggcccttgctgtctaatatacgcaggggcttgatagaccctgatacgccggaatcggcatattcgaagatgtcggcagacggcaaggagtggaagcttgtggtaagttggactcggagctgctgctcaacttcttgctaacaatgtctagttctccgacgagttcaacacccccggccgtacattcttcgacggagacgacccttattaccaagccgtagatatctggtacggcgtgacccaggacttagaggttagtcag

SEQ ID NO: 23437 - DNA, 500 bp, Emericella nidulans
actactgccgtgtggccatggcaatactgatgaacaggcgacatatcactttcatacggatgaagatgctttagcttatcgaattattggtgtagcctcccgcatgtgccttgagatggggctacatagacgagacgcactggccaaaaactttcctgacgaagcacagtggcctgatattgtcaggatattctggtcgatttactctttggatagacggtggagtcttggtacgggactgccgttttcaatgcacgatgaagacattgaccaaatggaaccagtaagaaatgccgatgtttctagaccactctactcactggactcaggatccatcattacagtacctgcgatgcatgatcacatacaaccgcatcatctccaaggtgtggtactctggtttaggttcagacggagccacggacatacgtcgagacgagattggctacttggactaccaagttctacagtggtataaacaaataccggattctctaaag

SEQ ID NO: 23438 - DNA, 850 bp, Emericella nidulans
ggctggaaagagcgcggtctgagcatcgcgacgaaatggtatcccctacaaccagggcaacacagaccagaagttattagggagaagctcgacgagtcattggcagagctgggaacagactgcgtggatatcttctatcttcatgcgccagatcgcgccgtgccgtttgcagagacgctggaagaagtgaacaagctctatcaggaaggaaaattcaaaaagctcgggctgagcaattatacaagttttgaggttgcagaaattgtcatgacttgtcaggcgaggggtctggttcgaccgaccgtttatcaggcgatgtataatgcactcagtatgacccctgctcctttagtactactttggggtagaggactaacgatctcacagttcgcaccatcgaagccgaactcatccctgcttgccgccgctacggactggacattgtagtctacaaccctatcgcggcaggcgttctagcaggagcatacaaatcgccgtctgttcctgaacaagggcggttcagcgcacagagccccacgggacatacgtatcgggaccggtacttcaaggacccgactttcgctgctctgcggatcatcgaagccgcggcgaacaggcacgggttgaccatggcagagtgtgcgttccggtggttgaggcatcactcggcgctgagacttgcggttgacggggatggggacgatggtgttgtgatcggggttagtagccctggagcaacttcgagaggaatcttgcggatcttgagaagggcccgttgccggtggatgtggtggaggcttttgacgaggcttgggggttgacgaagggtagcgtggtgaaatattggcat

SEQ ID NO: 23439 - DNA, 804 bp, Emericella nidulans
accggaacgtcaccgaatcccttcgcggacccagaagtagcagagcgctatgcagccctctacgagaaagcaaattatgaatgtcgtcatgtatttgaccctacgatgacctggacgagggaggaagagaggaggctcgttaggaagattgatgccaaagtctgcttatgggccgtacgtcccccgacactatcttatatgtacactcctgttgcaactggatggagtcaagctgatgctgccatgcacgcagtgcgtcatgttcttcggtctgcaggtcgaccgcagcaatctcattcaagcggtgtcagacaacatgctcgaagaactgggattgtctactaatggtccatacctctccaatccactctcgcaccaaactgaaactgacatacggatataagggcagactacaactctggcaacatagtcttctatctctcctttctcctcgctgaactgccgagccagctgctctccaaagcgctggggccagatcgttggattccgattcagatgtctctgtggtcgctcgtcgcgctctcgcagtcctgtctgtccggccgaggctcgttcttcctgacccgttcgatactgggcttgctggagggcggctttatcccagatatcgtgctgtggctgtcgtatttttataccagcagggaattgccaacacgtctcaggtatctagctcctttatctaacctagaggagggatttgactgatctgagtagtctcttctggacaactctctccgtaacagagattattgggtctttcctagcatttggtgtactgcatat

SEQ ID NO: 23440 - DNA, 850 bp, Emericella nidulans
tgtatatttatagtagtgcccctgctgttgctgcatgcagacctgatgatgcactgtcaggccctggatatcttatatatattgtagaagagctgctggccccctgacgaggcagcaatcatgcttgtaatacctgagttgaccaagaacctggatttctatatattcctgaaccgccaacggcagatgcgacagcttgaccggattgtcaccaacaagtgccatgtcatcctcaacaatcagaaggatttccagccggcaatggcatgcctcaggtgtcttgtcagtgcccagacacagctggtgtttttgacagcgacattacccctgacagaggaagcacagttcctgcaacacattaagcataaatgcagcaaggttggcatccatcacgcgcggacaagtcggcgcaatgtcgtgtatcgcgtggtttggccgtcactgccccgaggcgtccctcgcgagccataccagtagttgacacagcccaatgtgcagggattcatccagcagcgcatccagcaggcctgtgatggccaggtaattgtgtacaccaatatcaagagccaggttaatgctatcagctgtgagctgggctgtgaggcatactatagtactgttctggactagacaggcatgatataacagttccagagcagccagacctgtattattgccgcgacaagcaccttgggcatgggcatcaacatccccgacatctagtacatgatctatctgggtcggctatagacactgcttaactacagccaggagagtaggcatgcagggcataacagcttagcaagcaaggctgttatcatgcacccccagggctgggatgaccttgatc

SEQ ID NO: 23441 - DNA, 751 bp, Emericella nidulans
gaccagtggtttcgcttcataattcccatgttcctccacagcgggtttgttcatatcggcttcaacttgctcgtccagatgactatgggggccgatatggagcgaatgattggttggtggcggtatggattggtttacctgtccagtggaatctggggttttgttcttggaggtaactatgctgggcaaggtgaagcgtcctgtggatgctccggtgcactgtttggcattctcgcgctgttcgtcttggaccttctttacggatggaatgaccgccagaacccttgggttgagcttatcattatggttcttggcattgccgtctcgttatatgataagcctcctgccgggtttggataacttttctcatcttggcggttttacaatgggccttgcgctcggactttgcgtcatgaggtctcctaatgctctacgtgagcgcattgggctcgctcgcagtccgtacgtcgccatgagcggcggtgttgctgcagaaaacgccgatccggaccagaacaagacgtcaactggttccaacataggcggccttggaaagtttaaccccaaaggattcttcgccggccggaagcccttatggtgggcttggtggcttgttcgattaggcgctttggtcgctgtccttattgggttcatccttcttattgtgaacttttataagtacccaagctcgaactgttcttggtgttacaggttcagctgtctggtaagtctacagctggtgcttcttttc

SEQ ID NO: 23442 - DNA, 500 bp, Emericella nidulans
cgacgggcagcaggccctaacccatatcgcacaggcctctggcaactccgagatcgtgatgcgccacaaccccgttgacgggttcccccaggccattttcttcaactcagagtctcatcctgcaacgactgtggccgagctagcacggtccctccgccagagtgtccacggctacctcatccccagcagcattaaatccctccctggccccattcccactgaccacaatggctacgtcgacgaaaaagccgtcgacgaggccctgcgcgctctcaccgcatctgctgactcgaactctaccgaataccgcgtccgcgagctcttcgcccaagcccttaatcaggtcgtcgacgaagtcaccgcagatacagacttctttgccgctggcggcgacagtctttcggcgggcaagctcatctccacactacgtcgtgagttcggtatccgtctatctggcgacgtcctgtttctccatcccactgttggccatatcacagaga

SEQ ID NO: 23443 - DNA, 850 bp, Emericella nidulans
attgaactatgctgattggacaggcacatcagaagccccttccatgcgacagttgcttggcatcaaggatgaggatgagcaacaaaagcaacgagaaaaaactgcgtacgtagagcggcttttggagggaacttcactaacagatgacagcgacctgttggaacgagaggtttctgggatttcgcttgacaagccctcaagcgatgaagatattgactgcggcattatttccgtgaagattgcggatttgggtaatgcatgctgggtgggccaccactttacaaatgacattcagacacgccaataccgttcgcccgaagtcattttgggatccaaatggggtgctagcaccgacatctggagcatggcttgcatggtaagttttgccccaattttccatggcgataactaactcgcgtaggtttttgaactaatcaccggtgactacctgtttgatcctcaatcaggtactcggtacggcaaagatgacgatcacatagcccaagttattgagttgctcgggccattccctaaatctttatgtctctcgggtcggtggtcacaagagatattcaatcgcaaaggcgagctgcgcaatattcaccgactccgccactggtcgttacctgatgtactacgggagaagtatcacttctcagtggcacaagccaaggccattagcgatttcctcctgccgatgctagaagtgctaccggaacgacgggccaatgccggcggaatggcatctcatgaatggatgaaggatacgcgaggaatgcaggaggtcgacttgggcttgacgcccggcagtcgaggcgagggtatcgagggatgggcgacggaggtgaag

SEQ ID NO: 23444 - DNA, 500 bp, Emericella nidulans
ccgtgctgggcgcttccttcgtctcccgccttcatgtacggccaatgttgctcctttgggcaagtatctcctccgcggcgacgaggtgccttgcttatataccgatgggctggagtgacgagctgtctgaacggtttgccccctcttttctgacaggtgcattcctgatcttgctaatcatcacccagatggagtcccacggttccaccactctaccggcctctaacaccacagagggcaagcggctccgaagagcctgcaacggctgtcatcggatgaaattgcgttgttcagggacgaaaccctgcgcgcactgtcaggatacagggaacgactgtgcgtacgcgttcgtagcaaagctggggaaaccgcgggggagccgcaacaaaaagaccatcgagcgcgagagggagaggcagaggcaagtgagcgcagccgcctcagagcaaggtgagggcaatggtgaggccgagcccgatacgcggtcatcctcgccggca

SEQ ID NO: 23445 - DNA, 850 bp, Emericella nidulans
gccggccccgccggcgctttcctcgcgtacctagccatgggcctcgttacagccggcgtcgcatacgcggcgggcgaaatcacggctttcatgcccagcacaggcgggtttgtccggcacgcgacgaagttcgttgagcctgcgcttggggctgcgacggggtggaatttttgtacgcactgcctcacttaagtcgcactcctactatcacttctacacttctacattcacttcccctccccttccccgcggccgttcagggagctatatgttgacatgaatggactacagggtatacaatgtccatcacggcgccagcggaagtgaccgcagccgcaacactagttcaatattggcacgtcgacgtcagcatcgcagtctagattaacgtgttcgcgctgttcatcctcgtgatcaatttctgcggcgccagaatgtacggcgaatctgaagtgatcttctccagtctgaagatcatgctcattgtaggcctcattatcgggggtattgtgatcaatgctggcggcggtccagacggcgagtatatagggtcccagtactggacgacgccaggcgcgttcgatacttacgttacgagtgatgatgcaagtcggttcctcgccttctggaaggtcttgctcacagccgcgttcagttacgggaacatccaggtcgcggcgatatcgggctcagagaccgggaacccgcaaacggtcatcccccgcgcgatgaggaagacgttcgtccgggtgtttctgttctatgtgctgagtgtctttatcgtcgggctgattgtgccctcgggcgaacgaggtctctctctctcgacggcacagcgtcacggtcgccg

SEQ ID NO: 23446 - DNA, 850 bp, Emericella nidulans
gttgagaatgccttcgaattcatcgaccagctcactctgaaatggggcctggaccggtcaagcattgaggatgcgtatcctgcaaccgccttacaagaaggtcttatggcaattacccagggagagcccggtacttacatctaccagaacgtctacgagctgccagcggatattgacctggccaagttctgtgctgcctgggagtctgtcgtcaacaccaccgagatcttgcgcaccaccctgcttcctaccgacactgcgagcacatatcaggttgtgatcaagccgtcttccatcgactggaaatatccagccagcgtggaagagtacttgaaatcagatgcgcagcagacaatgctatatggagagccactggccaggtacgctctcgttccaggcaccccgggcggctcattatcgacatttatctggactgctcatcatgccctgtatgatggatggtctctgccgcttctgtggaaacgagtagaggaggcgtacaagggcagtggactctcacatcaaccacatgttgcccctttcaacagatttattgcccatcttcgagacatggatgctgaggccacatatgccttttgggaatcctatctgtcctcgtcaaatccccccaagttcccgcaattgccctatcagacatacaaacctcgtgtcaacaacattcatcagcacgagttcagcctcacggccactagtcagtcatcaggaatcacaacctccactctcattcgggccgcctggtccctcctcatgagccaatatacagatgcaggcgacgacattatcataggcgttaccgtggctggaagaaatgttatgttccggccgtaac

SEQ ID NO: 23447 - DNA, 850 bp, Emericella nidulans
catggtccgctagatgacgaggattacgacgacgaggaggatgaggactacgatagtcaggaggaggaagaatacgaggaagacgaaatggtttgtcgcacagactgctacagtaccaagaactcgaactgatgatgttaggacgccatgacggaagaacagcgcatggaggagggccgacgcatgtttcagatatttgcagctcgaatgtttgagcagcgggtgttgacagcctatcgcgagaaagtagctgaacagcgccagcagaagcttattgaagagctccttgaagaggagaacttaaacgagcagcgcaacgccaagaaagctagggaagcccagaaacgaaaagacaagaagagactcgccaagttagcaaaggatgaagaaaaggctcgaagagaggcgcagaaggctgcagaggaagctgccgctaaagctgagcaggagaggaagctcgaggaacaacggaaaaagaaggaggagcaacggaagaagcgggaagctgaacggaaagcgcaggaagaagagcgtgctcgtaaagaagctgaaaagcacaaacgtctgcgagaggaacgagaaaggcaagaggaagctgaacggaggcagcgtgaacagaaggagcaggagaagaagcgacgagaggaggctaaacgaaaggagcgtgaggagcgagaattgagagagcaaaaagccaagcaggaacgagagcgtaaagctcaagatgagcagtcgaggagggaacgggaacgagttgcgcaggaacaagccaagcgggcgcaaaacttgcagcctgtgtctcctgtgtcccctcctccggagtctgcggcgcctgtggtttcaaagctca

SEQ ID NO: 23448 - DNA, 500 bp, Emericella nidulans
gcggccgggctcccttgtcctagatctgctgctaaacctcaccattgcagatccctcggtcccgcccactatccaaccaaactacatcagccactccgcagacgtcgcactcctggctgcgttccttagttggatagacagagttggacacgctgcaccttttgcatcctcagtctcccgccgcatcttgcccaaatcgtcgcttgacctgcaagattccgaacaggcgaagcgtgccatccacgacaccgtgatcggtgagtaccatatatgcggctcggtcgcgatgggggatgcgctggactccaggttgcgagttaaaggagtagagggtcttcgcgttgtagatgcaagcgtgtttcccaacaatgtgtctggtaatataatgagtagtgtctatgcggttgcggagaagggtgcggatttggtgaaggaggatcacgggctgctctagtttgcggcttctggtggctttgcattgtggctctgactgctctata

SEQ ID NO: 23449 - DNA, 500 bp, Emericella nidulans
acgaggaaattagagcagcaggtcgctctcggggctgtccatctggtcgtggagtaggcgatgtagacgaaatcccaagcagggcacgaaatatgggccgttgctctgttccaaggtgggtcaacatggcaaaggtcaatgtctcatcatctacctcctccggcgcacttgtgggctgttcgacttgctcagacagccacttatcaacggcgagtttggtcttccgggactgccgaaggaaatggtcacgatactcttccggaacgtcaatgtccaatttctgcataggaatatgctcttcaccagacaggtccgcggcgcccagttctgctgtgagtaggaatggcggccaattaggaagttcccggcgcccggaaaccaactccagcacttcaccccaactgacgcctgatgggatatcctccaactcatcttgctcacacaccaagcagcggcatgactctgatgatatatcgcgggcaaaaacggcctccagtcgg

SEQ ID NO: 23450 - DNA, 500 bp, Emericella nidulans
agcgtgggcatgggcgtcggacggccgagcccctatcccaacccaggaatgcatcttcatcctactccgtcgcctcctcagtaccagccctacggcgttccaatctcaccatacccggaaaacccaaactcgcgtatcatgaatcggataccggtgagcgatgccggtccaccaccgcgagaccctcgtgagggttacatggagtcacccgttaggctgccgtcaatatatccttcccccgttgccaacccgcagccgccaccattgccgcaagcacagacacacagaattagctatccatattcctcaacatggtctccacagcagcagcagcaaactccagagccccgccagggcttcatggagccattctctcctagcagccagatgcggcaggctcagacaccccgcagtcaccgaccttgggcagcgccaaagccaaagccaactaggcttgagctcctcgcccggggcgcaagttcagcagtcaccagcttctc

SEQ ID NO: 23451 - DNA, 850 bp, Emericella nidulans
agatcgcctttggcacgaaccaggggccgtggataacctgggtgtgatccccgccaaagctcccgaccgcatatccgcggctgtttgctgacccattcgtgttcgcaggaatgggaacaccagctgagatcctcactgcatccgcttattttcgctgccgtgtacactgttgcagacctcgtcgcacgcactctcggactcacccccacatcacgcgctgaattgctcatcgccggtcccgggataacgcaggccgttattgcagccgtcggcgatttctatacttggaagctagctcggtatatttacggggacagaagtcatgagtcttgggcgacggtacggatccggtcaaacgctatagaggccgatgctgatcagctgcagcttgcattaaccgtcgtcagtccgtggcagtggttctgttccaccagaactctgtccaactgtctcgagactacgatcacaatcatcgctctgtatttgtggccgtggggatgggctataaactcgcggtccgtcaggcgtacaggtcaagataagagtgtcagcatttttaggtatgtctttagcatgataaagtgagcggcactgactccacggagattacgtcaatgtctcttgctggccgcgttcgcgtgtatcctacgcccgaccaacataataatctgggtaggcctagctagtgtggctttataccgaagtgcctggggagagaggcagactcttgctcgagaggctctaatctgcgggtgagtgcgccccaagtcgtgtgtttcacaagctcacgtctgcagttcctccgttctggcagtgtctactgttgttgatcgtttcttctacggattct

SEQ ID NO: 23452 - DNA, 774 bp, Emericella nidulans
gctacgcctcaacatcgccctcccattcagaaatagtatcacggcttcatgacgccacaatcgcgattacgacgcttgtccccatcacgcgagaggtactacaagcatgtccgcgacttcagtgcgtcattatcatggcaacaggtgtcgaatgggtcgatatccctgctttccaggaaaagggcgtgaaggtgatcaactgtcctggcgcgaacgtgagcactgtcgcagagcatgctcttgcactttacttcgcatctaggcggaagatagtcgagttgcatgatgctgttatgggtagtgacgagtacgccgagaagcggacgctcattcaccggtttggtagtgggccaccgcatacgacgcagcaggaggttgtggctattattgggtatggtgcgttggggaaaagaatcgagatgcttctccgtgcactagggatgcaggtcctcattgcggagcggaagggcgtcatgggcgatgatgtacgggaaggacgggtggcttttgaaacggctatacagcatgcaacggtggtcatggttgctgttgcgaagggccctgatacggtagggctgattggcaaggacgagttgacggcgatgaggagtgatgcgctggtgatcaatgttgcgagaggagggatcgtggatgaagaggccctagtcaacgcgctaaaggagggttgaattgcaggtgcggcgaccgatgtctttgatggggagccgccggtgcgtgggcagtcggtgttgctgagggagagcgtgccgaatc

SEQ ID NO: 23453 - DNA, 500 bp, Emericella nidulans
ccaaaagccactaaaggtagaggccgccaaacgtgtacggcagagcattcaacaaggccgagacaacaggtacgaagtagatgtggttaggtctatcatcttcatgcaggaatccctccacgagatagagcgcaaacggctcaccgccgaagtcgagacatcgaccatcatatcggtagtcggggacctctcgctcggcgccaaaaaccataatttcaagtcacaaacgttcaagatacccacgaactgcgacctttgcggtgaacgtatttggggtttatccgccaaaggctatgactgcagggattgcggatacacctgccacagcaaatgtgaaatgaaggttccagccgagtgtccgggagaacagactaaggaagagaagaagaggctgaaagcggaacgtcaagaacaagccagcgccgcaccagctgttgaccttgcacctaccagcgcctcatcaacagctccatcgttatcacgacgggacacgagagttc

SEQ ID NO: 23454 - DNA, 674 bp, Emericella nidulans
  unsure (1)..(674): unsure at all n locations
tataaggctgcagcaagtgctgcacctgagtgtttgtcaaatatatctgtccctgccttacagagtatccttctatttacgattcttggaatgattacccctaccaatctgaacatttggacgttggtacatgtcgccatgtctcattgcattgacctcggcttacatcgggagccgcggtatccttccgatttctcgccgatttccctatcgatgcggcggttcgtattctataccgtttataaccttgaccggtcgatcgcaaccatccaagggcgtccactcggtatccgcgacgagacattcgatctgcgaatgccaacccttgccgatattcccatggagccggggatgcgggtggacgggctgaatgggcagtacgtacggttctcagacgatatggcattatccatccaccgcttcaagctcgatcgccatatttctgaaataaaaattctattttatcatctgccgaccgaagggggagtcttccactggccagctgaccattccgcagaccaggcacgcatcaaagcttctctggatgggtggctcgccgaggtcaaacagattggagtagttgcagatgcacatcagaaagatgcagccgagtcagcaaaacttcgcctcaagaggcttnaactgggagtcccttatcatgcagtgcgtacact

SEQ ID NO: 23455 - DNA, 827 bp, Emericella nidulans
cattgccgtcgttggcatgtccggacgcttccctaacagcgacactcttgacgagttctggcggctgctggagacggcaactacaacccatcaggtcatccccgagagccggttcaatgtcgatgacttctatgaccctactcgcgcaaagcacaacgcgctcctggcgcgctatggttgcttcctgaagaaccccggcgactttgaccaccgactcttcaacatctctcctcgcgaggcgatgcagatggatcccgtgcagcgcatgctcctcatgaccacgtacgaagccctggagatggcgggctactcacctccaacccccgccgcacccggtgacagcgagcaggcgccgcctcgcattgcaacctactttggccagacaatcgacgactggaagagcatcaacgaccagcaggggatagacacccactatctccccggtgtcaaccgtggttttgcgcctggccgactatcccactttttccagtgggcccggtggcttctacagcatcgacacaggctgctcatccagcgcgacagcactgtgccttgcgcgggacgctctgacggcaggcaagtacgacgccgccgttgtcggcggtggtacgctgctgaccgcgccggaatggtttgcaggactgagccaggggggtttcctgtcgctaccggcgcttgcaagacgtactcagacagcgcggacggctactgccgtggtgagggcgtgggtgtagtaattctcaagcgtctggctgatgctgtccggtccaaggacaacgtcatcgcagtaatcgccggtgcatctcgcaactgcaatgcgggcgctg

SEQ ID NO: 23456 - DNA, 850 bp, Emericella nidulans
tgggaagagctgaagttcttgttggatcacccccgccggtgtttcacgctgcttttcccgcgcaatgctacctggtggctgtttgcgattctggtcttgttgaatggcatcgacttgatattcttcattatcctggatcttaacgatgaaaccgtcacttcactgtccactggaatcaaaatcctggacggtcttttccaggccacctgtacccgcactgctggattcgctgtggtgtctattgccgacctccacccagctgtccaagtctcctacatgatcatgatgtacatctccgttttccccattgccatctcactccgacgcacaaacgtatacgaagaaaaaagtcttggtattttcgcagatgacgaagacgacgacgacgacagccagacagcacccagctatatcggcacccacttacgcaagcaactcggttttgatctctggtacgtttgcctgggcctcttcatcatcacgatagttgaaggcgaccgcctcgaaaataaaaaccagtactccttccagatctggtctgtcctcttcgaggttgtctccgcgtacggcaccgtcggtctttctctcggttatcccggcgtcaacgcctccttcgtcagccagttccgcgttctttcaacactcgtcattatagcgatgcagattcgcggccgtcatcgtgggctgccgtactctctcgaccgcgccattttgcttccctccgagtccctgcagcaaaaagaaatcttggacgcagagcgccgcatgcgcagacgcgcgtcgaaccttagccagattggttcattaggccggcagcagtcgcaggctgtatctgagaataatgccgctg

SEQ ID NO: 23457 - DNA, 850 bp, Emericella nidulans
ctacgctatggagaacgccaaggacataattgcactcggattcgacctgaagaagaccttcatttacagtgatttgaagtatgtcagtaaccacatcctgatgaacacctgggagttctcgaaactggtcaccttcaaccaggtccgtggggccttcggattcaatgagagcacgaacatcggtcgcattttcttcccgtctgtgcagtgtgttgctgcgttcgctacgtcatatcctgagatctggacggacgagcctctgaaggagcgcaagaaggagattgctgagatccagtgcttgatcccgatgggtatcgaccaggatccctacttccgtctccttcgtgataatgcgcacaagatgcgcttcccttctccaaagcctgcactcattcactcaaagttcttgactgccctgcagggtgctggtggcaagatgtcatcgtcggaccccaactctgctatctttatgacagacacagctaagcagatcaaggtatgtcagctgagtgaattaacatctagcacaggctaacaaaaatagaccaaaatcaacaagtacgccttcagcggcggccaagtcagcattgaagaccaccgccgcctaggcggaaaccccgacgttgacgtttcctacatctacctgacgtacttcgaggatgacgacgccaagctcgaggagatctacaagagctacaagagcggtgagctcctgaccggtgagctcaaggcgctggcgatcaagaagctacaggaatacgtcgctgagttccaggatcggaggaaggaggttacggatgagttgctcgagaagtacatgactccccggcggctggagtggagcggaacc

SEQ ID NO: 23458 - DNA, 850 bp, Emericella nidulans
cctgatgcgcagctggagggtgagatgacaaatgccagctggggagttcttgacggtttgttggcattcattccccttaacctgccgtatgcgaccattgctgaagcagttactaggcgtcattgagaccgactttcccgatttatggagcaaagttgccgtgcgcacccataccgtcggctccctcttgtggattccgcgagaacgaggcatgacgaggttgtacgttgagttgagcgcgacagccggagaacgcattgataaggctaaggcaacaccgcaatatgtcatggagcgcgcaaaggaggcaatgaagccgtttagtctggagtggaaatcgatcggtgcgcttacgacctcactttaattaggttgtcagtatagatatgagacttgacgctgacaaaaactgtaaagaatggttcggaaactacgtcgttgggcagcgcgtggcgagacatttctctgatcctgattaccagatcttcattgctggcgatgcacgtccccttccgtctgacctctttctcagtttgtctaacaggttctttaggccggtcactgccactctgcgctcgccgcccaaggtgcaaacaccagtatgcacgactctttcaacctggcatggaagctgaacctagtggcgcgtggcctagcctctccgtctctgctggagacttacgaaactgagcggcgcaagatcgcaaacgacctcattgcctttgacgccgagcactgtgctgcatttgaggcaggcgaagccgcccttgccaggaactttgatgagaatatccggttcatctctggggtcggagcggagtatgacgctagcattttgacgcaaaccaaa

SEQ ID NO: 23459 - DNA, 500 bp, Emericella nidulans
cttagtgtccctcacaatgactattttctttcttatgggatcgcaaaaacccccgcaactaacaaaaccacccaaatagcggcctcgcatggcacactaccgatgatgttctccgtgagggtttctcccggtacggcaccatcgaagaagctgtacgtctttttaccgaccttgcggcctaccctctctcctcgcgtaagaactagcattcacagattgcaggtcgttgtcaaggaccgcgacaccaaccgcagccgcggcttcggcttcgtgcgttttgccagtgagcccgaagcagacgcagccatgggcgccatgaacaaccaggagtacgtgcctaaccatactgcctcttctcaaacttaatactgactcctccagattcgacggtcgtatcatccgcgtggacaaggcctcggaacggcctgctgcccgcaacggcggtttccagggccgcggaggttacaacagccctgccgacggaggctaccgtggcggtg

SEQ ID NO: 23460 - DNA, 850 bp, Emericella nidulans
actgtagatcccatagaagcgcgcgctgtgcacgatgcgtttttccccactgaaccaagaacagcctctaatacgcttatacctgacggcaagctgtacgtcgggtctgtgaaaacgatcattggccatctagaaggctgtgcaggcattgctggagtcctcaaggctgttctcgccatcaagaatcgcaccatccctccaaacatgcattttcacgagccaaatcccagagtcatcccattttgtgaccgtcttgaaatcccaacagtgccgataccttggccggatactggcagatcgcccctgcgcgctagtatcaacagctttggatttggcgggacaaacgctcatgccatcatcgaaggatacgacgcgctgagcagtccagtacgggaggctaccataacgcctgacgacctcttcattgggcctctattgttctccgccaattccagctcgtccctggttgctaatgtcaagaacatggcggagcggatcagatctgacccgtcaattgatctggaaagtctggtgtggacgttatacgctcggcggagtgtcttgccagtcaaagccttcttcacaggtggtaccgtccagcgattgctcaactttatggatcggttcgtggctgagtccgaagaaaccacgagctcgacagccgggataaaataccagccgctgaatcccaccgaaactcccggcatccttggtatcttcactggccaaggtgctcaatgggctttgatgggtttctctctcctacagcagaatcatgtcttccgtgcagctatcgagcgatgccaggctgcattggccacactgcatgttagttagttaactaacgtta

SEQ ID NO: 23461 - DNA, 794 bp, Emericella nidulans
tataatatcggggactatgcggctgtcaaggagaccgattgctattgtggagacgtcgatcccgcaaaggacgatctggtcgatgatgatcagtgtaccacgcagtgtccggggtatgcgccggatgtctgcgagtgagccggcaaaaataacgcttgagaaacgctgacagcctaggtggtggaagcgaggcgtggtctgtgtacgtcgttggcgaggcgagaccggatttttggtcgtccgaaactacacctagcgggaggtctgatctttggtcccatgggactacatccagcacgacgagcgtctcagagggtcagccaactgctgcatcatctgccacatcgactccgactgggacctctacgtctgaagctgcctccgcttcctcctcgtctccagccagcgtctcaagcacgtcggcctcggcttcgaccagtattgaaccgaccccgactggaaatagtgccagtcgccgctacagcttctttttctaagaaagtcgttagctcagacgtctagctgtgcgaaatgagagcaagcgggttctgaacgagttctacaagaacgacaccaccgcgcttcgtgggggtaaaataagcagatcaaatctccccttgggtaaggccagtgtcaatggaacagcgattttgtatcacttctgcagtattggcgtgctaccgcgaatagagtcgattcgacttcctgcagctagctctctaattacttagatgacaccagttagatttatctcgctgaggtctatgtacaacaaacatcgctctagcgctata

SEQ ID NO: 23462 - DNA, 500 bp, Emericella nidulans
gctgcgcaatagtaaaaccagaaatggggcctttcaagttctgcagtatagacaagaattctccgacgtgtccttagggggggagatgctgcaatcaataccaacagatctgggcacactacatgtcgcagcctactgggggcttgcacatactacagagatacttttgaccaatggagcgaggcgtctatgaagtagacacttataaatggacagcccttcatggggcgtgctctcgaaatatgccaatgtcgccgccatactggtcgaaaacggggctgatgtaatgcacgtgtatacaaggctggactccattattttgggcggcgttcaagggtaatgaccagatcattagtcttttactagaccatggtgtcaatcatctctctcgaggtacgtacggatggactgccttgcactgggctgtgtccagccgccacccggaggccgtgaaaatcctgcttgagcaccacgcccggtcacaggctaaggatacagag

SEQ ID NO: 23463 - DNA, 850 bp, Emericella nidulans
tgcggattcaggtgaaatgaacggcacagtaagccgcgcgctacaccttgatctgtccagcgttttagcgcaagtcgaggaagtcgtatctcacggcttattcttcttatgctctcagtcacgggtggtgcgatccttcgctattactgtgcttcgacttataacagagtttgacagtgctctcggcaaagagaacaccagaataatcaggatacttgaggctgactctcagcaaattctggatgtcaacgacgagcatctaacggtcgccgaaaggagccgtattcaaaaaggaaaacgacggagtgcctcccaaaatactctaatagagctttgcagcagcgaggtttcatacgattcgactttatggtctaaggtgtttcccaacattatccgcataagttttgagacttgccctttcgctgtcacactagggcgggaaattgtctgcgcaaggctcgttcagatgcacaaagctatcaccgccttggcagaatctccgcagcaccctcagtatcctcccatcgaccctgcgcaagctcgcttgctggctaggaataacacgactgcggaaatcatgattgaacagtggaaatcatacttggttatggcttgtacaacactcaatagcgttggtgcacagtcccaaagtcaactggccaacgcccagcataccaggaaatcatcaaaggggtcacagtcgttcgacaagatcgggtccgctagaagcctctttgcgtttgtgataccgttgctttccgccgaacgtgcgtccattagccatgcaatagtggttgctttgggataaaatcaataaatacctttatcgaatactcctcgagtcgctgca

SEQ ID NO: 23464 - DNA, 850 bp, Emericella nidulans
agccagtttacaagtaatacataggctcgcatatgtaccctgacagggattaaccgccgactatctacagcccatcacccctagactgatggatcaatagagaggatgaacagtacagtagagacctacctccgcatctatacctgctatgactagagggactggaacaggttactcctacttgcagagctagcaattaatagctgtacattaacagcaacaggggtcagccccttctacctaagccatgggtataacctcagcctatttagccctaccgaggaggtagagcaactagccgaagaaccagccaagagtcctatccagaaaggggaagctattatacagaaagttaaggaagccctagactgggctcaagcctccatggcctattcctaatagaatacagagaatcaggctaataaacacaggagcccggccacaaactaccaagtagaagataaggtctggctaagtctgaagaacatctgtacagaccaacccagcaagaaactggactggaagaacgccaagtacaaggttataggcctagtaggcagccatgctgtacggctgaatacacccccagggatccatccagtcttctatgtagacctgcttcggctggcttcatcagatccacttccttcccagaagaataatgatacccagccccctggcatcattgtgaacggcgagaaagaatacatggtagagaaaatcctggacaaacgtcccaggagatacaggagaggtcaccggctggaatacctagtaaaatggtcaggctatgctcggccaacctgggaagctgccacagctttggaggaagcacaagctctggatgagt

SEQ ID NO: 23465 - DNA, 749 bp, Emericella nidulans
ggtgcgtcgcgggaagctcggaagagcaaagagctggaggacgctgtaaagaatgcgctcgccaatgtcaagcagtcggaccgccaacctatcgacccggagatactgttctaccctttattactcgcaagcaggactctaagcattcccttgcaagtaacggctctcgattgcatcggcaagctaatcacctactcttattttgcatttccatcggcgcaagaagccaagccatcggaggcagatgctacggcagagcagcctcctcttatagagcgagccattgacgctatatgcgattgcttcgaaaatgaagctacgccaatcgagatccaacaacagataatcaaatcccttctggctgcagtattgaacgacaaaattgtggtgcatggagcaggtcttctgaaagctgttcggcaaatctacaacatgtttatttactcaaagtccagtcagaaccaacaaatcgctcaaggatccctcacacaaatggtcagcacggtctttgacagactgcgcgttagacttgatctacgggaattgcgcatccgtgaaggcgaaaaggcgcaggcggggtcttcggaaagtgtgactattgagcctgtcgttagcccgccatctgctgaggacgatcaggcatctgatgttgcttctgtagcagcggatcaaccggtctccaaggagccaacggaaaagctcactttggagagcttcgaatcgaacaaagatgttaaacagtcaatgat

SEQ ID NO: 23466 - DNA, 850 bp, Emericella nidulans
cgccggcggtgtttattaccagacctttgtgctctcgcccatctggtgtcgccgcatctcctcctgggtgtgcggttgggcctatgtcaccggccagatcatgatcaccctcgcggtgaatttcggctcggcgcagttctttatcgcctgtttgaacgtctttgaggacgagaatggtgtcggcctgaccgactcctgggaggcttggcacacctacgtgatcttcttggcgatcacgctcgttagccatgcaatccccgcgtttggaaatagatggctcccttggttggaggtagattaacgcttttctttcgctttttcgcttgatccccctcttaagtcgtgtgctaatggtctcaagtcttttgccattttctggactctggccggtgtcgtggctattgacatctgtttgctcgtgatcgccaaaaacggcaggcgcagcgccaagtgggtgtttggccattttgagccccagactggctggcccgacggctggtcgttctgcattggcttgctgcaggcagcctatgcgacatcctcgaccggtatgatcatcacgtacgttttccccgttttgatacccctgtgcactgaggaaaatgctgaaccaagccccgtagaatgtgcgaggaagtgcgccagcccgctctgcaggtccccaaagcgatggtcggcactatcgtgatcaacctgatcgcaggtcttattttcctcgttcctgtgtgttttgtcatgcccgatctcgccgagctcgcagccttggcgtctggccagcccgttccgtccatcttcaagtccgccattggaaactccgtcggcacattcctcctcctgctgccgttgatta

SEQ ID NO: 23467 - DNA, 777 bp, Emericella nidulans
cctattctcgtcggacgaggccctggaaaggcaggtgaagcgccaccaaggcatcgtgcaggtcccctcagtctcctacgatgacctgggcgaaataggtgtagatgaacggtgggagcctttttacaagctgtatcccacaatagaaaagacatatcctgtgctgtaagttgatcttgcgcatgcgagatacatccaacacgtctaattgttcgcagccatgaacgggcgaaaatagagaaaatcaatacttcgggctactatatacccttgagggctctgatccctctctaaagccgacacttctcactgcacaccaggatgttgtccctgttgctgatgcatccacctggacataccccccgttcgaagcacactttgacggcgagtatatctggggccgcggtgcctccgacgacaagaatagtttgactggtattctgtctgccgtagagggtctcctttccgagtcggactggaagcccagacggactcttcttctggcattcggattcgacgaggaagtcggcaccaacagaggtgctaagcagattagcgacgtgttgcaggccagatatggaaacgatagcgttgctgttattcttgatgagggcgggtttggatcccagcctcttgatgataaaactatatacgtccaccctgcgatcaccgaaaagggtcatattaatctgcattttgagctccatgctagaggaggacacagttctgttccccttccacacaccggcattggtatcatctctgagattgttgttg

SEQ ID NO: 23468 - DNA, 849 bp, Emericella nidulans
tctctccatcgtcgttggtttaatgctcgtcttccgcaaccaaacctcgtacaaccgcttctgggacggccgtaacggcatgacaactatccacaccacaatccgcaatctcgtccgtactatcctctcgaacgcctacagcaccgcgcgcccaccaacgcccgctgagaaacacgacattgagcgtactgtccgcatcctaactgctatcccattcgcggttaagaaccacctccgcgcggaatggggcgcagctttcgagactgattttggcggcgcctctgcctctaatttcgccggccttggtagtggtctcccgggtttgttgggtagtgacctgagagagaacgggacagcggtttacaaccccgtttatgcgggcttgttgccgccggatctccaggggtatgagggagagggactgggtctccccttccagctatctttctttgtagatggatttattaagcgcggtgtggaaagggggtggttcaacgcgcctggagcaagccagatgcaagcgcagctaaacgtgctcatggacgctttcggcaaaatggagacgataaagctaacacccatccctgtcgcccatttgattcaccaaaaacaggtccttgcgctgtatggatgtgtgctgccatttgcgatggtcgatgacatggggtggtggacaatcccaattgttagcttggtgatctttacgctctatgggatcgaggggattggatcccagcttgaagacccgttcgggtatgaccggaatgatatcaagatggatgctctcgttggggatgcgcggatggagattgaggctgtgttggaggagtggaggagggtcatggcggt

SEQ ID NO: 23469 - DNA, 850 bp, Emericella nidulans
cagggaacttatgggtcgtgtcaacgccaagcaaaccgagttagacgccgtggtcgaggagagggaggtactgcaggaggagttgaagactaccaaagaggagttggaagcattgaagagtaagctcgccgaaaagcctgaggcgccagcggaccagggcacagtcgttgactctacgccggcatctgagttcccaattcctacgacccatgcacccgcaccgacggacgacaaacgagtcaaggcgctggaggagaaggtgcagcgtcttgaagccgatcttgccgagaaggagagtgttttggctgccaaggatgctgagcacgagaccaaggttaaagagcgggctgagagattgaaggaagttctcaataacaagatggcttaagttagggcaaaccatcgacaggagattgaacgcttgacagctactcagggtggagctcatgaaggcgctgaaggtgcccaagaaactccagggacaccgcaacctaaacagcagcctcccgcaacgccaagcaagtccgaagacggccttccagacttgacggatgcccaggctagacaactcgttgcgcgaaacgagaccatccgcacaattctccgcaacaacattaagcaacaactcgccaaggagagagagaagcaaggacaagaaactcaatctacccaggatgccatcgcagctgcagagcaaaaattcaacgatgagcgggaggcgctcaggaaagcgcacgaggagggaatggaggaaaagatcaagtctgctgttgagctgtcggataagaaatatctggctaggatcagcatgcttgattccaggtacagaaacacacaggccaaggtcgac

SEQ ID NO: 23470 - DNA, 740 bp, Emericella nidulans
gcaccaaaggcggatcatctctgcgtactcgttcatgggtgggagcagcttcacatgtccgaatatggcaataaatagctaatgggtggaattatcccttctctaacagactatggggtaatccttcacatatgggcagtattgcttcagccctgcgaaaacgctacgacgaaaagcaactacatatcctcgtcgcggagtgcaacaccggcaacctcacatacgatggtatcgaagtatgcggagagcgacttgcgcatgaaatcgaagcgacgctaagcaagctagaggctgacgggcacaagatgagaaaactcagcgtggttggctactccctgggaggcctgatatcgaggtacgcgatcgggttgctgtatgcccggggctggcttgacgatgacaaactcgaacccgtcaacttcacaacctttgcgtctccgcatctcggagcccgagccccggtcaggggtgttcaaaatctgctcttcaacgggttgggctcccggactatctcgacttctgggaaacagatgttcttggccgatacgtttcaggatacagggaagccactgctcagcgctttagcggaccccaacagtatcttcatagaagggctgaagaggttcaagaatcggtgtgtctatggcaatgtggtcaacgaccgcaccacggccttttacaccacgatcttcgcgagcgaagaccacttccgggatctggagaataaaaccatcaaatat

SEQ ID NO: 23471 - DNA, 500 bp, Emericella nidulans
gggcctcgatgagaacttcttcttaaagtaccattctgaacgaacgaaccagtgccgtctactgcattacccagcagtggaggaggaactgctgcgagctggcaaggccgagcggatcgcagcgcatacagatttcggcactatgacgattctcttccaggatgaggtgggcggattggaggttgaggatattcatgagaagaacaagttcaatcccgcaccgtatatccccggaacagccgtcgtcaatattggcgacttgctcatgcgctggagtaatcatgaattgaagtcgacgatgcatcgggtgagggcaccacctttggtagatgttgaggatgggagtaccgtggagaagaaaaggcggatgacgagaccaaggtactccattccgtactttattagtcccgatcgagataagatgattgaatgtctaccgaactgtcacggggaagggaggccgaagttgtatgaaccgatcacgagtagcgagtatattg

SEQ ID NO: 23472 - DNA, 500 bp, Emericella nidulans
gtgggggacttgtacctcaccaaatgcgaagaccttgggtttgtcatgctcaaccttgttccattccgggttctgactttgcaccacagattcgatgttattgagctttcgtccggattcctctcgattcctgaagacgactggcttcgtctggtcgataaagttcattcgtacggcctaaaggcgaaacccgagctaggaattcagtttggggccggcggcgatacctcggcggctggtctcgagtcactcggcacgtccgaccctggaaaactggtgaacctgggacggaagttcttggatgcgggtgtggagcgtctgatgattgagtcggagggtatcacagagaacgtcaagtcatggaggacggacgtagtgtctaagatcatgaaggagcttccgcctgaacgggttatgtttgaagcagcagatccccaagtctatacttggtacattcgagagtttggcatcgacgtcaatctgttcgtcgatcatagtca

SEQ ID NO: 23473 - DNA, 793 bp, Emericella nidulans
atggctgagcagctggtccttcgcggcacccttgagggtcacaatggctgggttacttccctggctacctctctggagaagtaagggcaccgatttgcatggataaaatacgtatatggaactacatgcgaatccgtgtgtatatccatatacgtatcgcatagatttttttgtgctggttgaaaatggacaatggttctgacttgagatttttattgatagccccaacatgctgctctctggcagtcgcgacaagaccaaaatcatctggaacctgacccgcgacgagcaggcctacggctaccccaagcgcagacatgagggtcactctcacatcagatccgactgtgtatgcctacgatccgctattccccgaaattcgtggcccaaagaatgtgcaaagagcggggttcagacggaagggatatatgacaatcagaatcagtttgactgatgagtgtgcttggacgtataggtgatctcctccgacggagcctacgctctgtccgcctcttgggacaagtccctccgcctctgggagctttcctccggccagaccacccggacgttcgttggtcacaccaacgacgttctctccgtttccttctccgccgacaaccgccagatcgtttccggctcccgtgaccgcaccatcaagctctggaacactcttggagactgcaagtacaccatcaccgacaagggccacaccgagtgggtttcgtgcgtgcgcttcagccccaacccccagaaccctgtcatcgtctccgctggctgggacaaactcgtcaag

SEQ ID NO: 23474 - DNA, 779 bp, Emericella nidulans
tgaatatccaacccccagccaaagcagctacagcacatccacagagccccaaaaaatggacgtttcaagactaatcacccttccacccccatacccccgccattacccggccgtcaacaatagccatcccgaactagtatcctatcgcactctcgttcgctcgataagcgaccacaccgagatcaagtccacgcggcaacgccacgccacagactccgataacctctgggccgcccaccgtgtacgcatcaaagaccaccgccgtcaattccgcgccaacatccagagccaaatccaagacgggagcatctcctttgccgaagccgcagaggctgaagcagccctcatcgaagacgagaatcagcgtgaacgcgctctcacaaagcaacttttcgattcctaccaggataccgtcctcaaaccactgcaggcaatcctaacggaccgtatcgaccgcgcaacagtgtgcatcgacgacctccgcagcaaactcttcgacgacgcacagcacgaaacaccagatcagacacaggaagaaggcgacgagaaaccggagctccttgagaaactcacccagctcaaatggctcttcgaggcgcgcgagcagcttcatcgcgaaatgtacgacctaatcacagcccgcgatgagaagtataaagccctcgttatccttccctatcaacaatccaaaaatgaggagaaaatccgcagcacaacggcgttcttcgcacgcgatgccctcgaccgccgggcaagctatgaaagtaacgccctcgccc

SEQ ID NO: 23475 - DNA, 500 bp, Emericella nidulans
gtaccttctccagcttctccgacccaaacttttaactcttaacaatccatcactgtggcttccattagagcatttggtcctaaaatcgcacccatcgcaaatcttgtacagtacggaaagatgtctgtgtcgagtgaccgtcgcgacatcatcattgtcggtatgtaacgagtcgttactttctgctttaccccgcaaatattgataagttcaaggacggctattctgatgagcatattccaggtggcggtatcattggatgttgctctgcctattacctgacacgacacccttctttcgacccttctcgccactctgtgactctaatcgaagcatccgacatcgcaggaggggcatcaggcaaggcgggcggccttctagcgctgtgggcatatcccagcaatattgtcccattgagctacaaactacatgcagaactagccaaagaacacaatggaaaagatagatggggatatagggaagtcgggtgcgcacaactg

SEQ ID NO: 23476 - DNA, 850 bp, Emericella nidulans
gctatcagaagaggatatagacaatatcattacctttatctcttcatcacaacgtacgcgccgactatcttataaacaagttattgaagaactaaatcttccctgcggagaaactgcacttgctcgagcacttaaaaaacgaggctattcccgatgcaaaactcttcaaaagccacctttatcggacgatacaaagcgtgtacgtcttgcctgggcccttgagcatgtgaattggacaattgagcaatagaattgaatactttgatctgatgagacttgggttactccaggcttccataccagaatctgggttactagaagagcaggagaagagctagatgagacctgtatttgtttgtctacccccaaaaagcatggttggatgttttggggatcattttatggagatactaaaggcccttgccttttctgggagaaagaatggggctctatcaatgcagagagttactgtgagcgaattgtgcctattattgacggctatcttcgcctgaaccgacagcaaggtaactatctttgtcttatgcatgatggagcacctggccatgccagcaaagatactatagcagagcttcatgagcgtagtatctatcctattagttggcctgccttctcccctgatctgaaccctattgagatggtatggaactggatgaaagactggatccaagagagatatccagatgaccgccagctatcttatgatgccctacgagaaattgtacgagcttcatgggatgcagtccctacagactttttgaaaggccttattgggtctatgcaagccagatgtcaggcagtaatcgaggcagagggtggccatacaaaatat

SEQ ID NO: 23477 - DNA, 850 bp, Emericella nidulans
  unsure (1)..(850): unsure at all n locations
agtgccgctgagataaagcggggcatgggaggattgcatggcaacaaggtaggtttctaaacgctcatcgtacggggtgaggctaataatgtagggtgctctggtttttcgctttgtccttgatgacagctccctctgcttcgttaattgccatctagccgcagggcagacgcaaaccacgcaccgcaacaacgatatcgccgctattcttgagactgggtcgctgcctgtggagacaagcctgacttctcggctggatcactttgttagtggtggagatgggtcgatgataatggaccatgaaatatgtatactgaatggagacctcaactaccgcattgactcggtgccgcgacacgtgatcatcgaggatattcgaaacaataatctcgcanaacttctcgaacgagaccaacttctcgcatcgagacgtaagaatcctggatttccgctgagagcgtnccaagaggccccgatcacgtttgcttcgacatacaagtatgatgtgggcaccgatgaatacgactccagcgacaaaaagcgatcccctggctgggtgtgaccgggtcctgtataggggcctaggtcggattaagcagcttgagtaccggcgccatgaggtccgggcgtcagatcaccggccggtgagcgcaacgtttaaattccgcatcaagacagtgctccctgagaagcgagaggttctgtgggaagcctgtcagaaagaattccaggccgaaaagcgaaggctcgcgtcagaggctaggtgagcaccaagctggtatttgtctcggaatttcgcatactgacataatacagcattgagtacctcatcagcgtactcggaactaac

SEQ ID NO: 23478 - DNA, 850 bp, Emericella nidulans
attgtggttggcgtcttcgccatcatcgccggccttatatctttctaccttattatgcgacatgccacccattacagcaaacccgtcgaacaacggcagtacgtgcaccgaccgtttttcgtccgcctcgtttattttccgatgctaaccatgtccttgccttgttttagtatcatccggatcctgctcatgataccaatctatgccctcgtctcctggctcagcacctactactacaaacatgccgtctactacagtgtactgggcgactgctacgaagcgttcacaatctcggctttctttgcgctgctctgccattatatcgcgcccgatctgcacagccagaaagattacttccgcgggatacaaccgaaaaactgggtttggcctctaacttggcttcagaaatgctcgggtgggaagaacgggatatggagggttccgcggagtggtttgacgtggtttaatgtagggacgccaggagacattgtgcgcgcgcgattggaggtgctgacatggtttgttaggtcatttgggttggcgtctttcagtactgttttcttcgcgtactgatgaccattgtggcagtcatcacgcaaaagtttgatttatattgcgagtcgtccctcaatccggctttctctcatatctgggtaggtgccgcgcggaagcttcgtgaatgggtgctgacattatcaaggtgctggccattgagtgtgttgccgttactattgcaatgtactgtctcatccaattttacatacagatcaaggacgaaatcagcgagcacaagcctttcttgaaggttgcgtcgatcaaactcgtcatcttcctgtcattttggcaatcg

SEQ ID NO: 23479 - DNA, 746 bp, Emericella nidulans
ttgcaggcttgattggatttcagggttttattggttggtggatggtcaagtccggactgaaggacgatctttttgcccccggaagccaccctcgtgtcagtcagtatcgtttgacggctcatttgggagctgcgttcgtctgctatacggcgatgctttggaatggtctcgctatcttgcggtctcatcgccttttgtccgacccggaagccgggctcaaactgctggactcgctcaaagaccccaagcttaagcttttccgtcggtctgttgccggtttggcccttcttgttttcgttaccgccatgtccggtgctcttgttgccggtctagatgctggacttatctacaacgagtttccctggatgggtaacggacttgcacctcccatgtcggaattgtttgatgataggtactctcgccacgaggaccgttcagaccgttggtggaggaacatgctagagaatccttctctagtgcagctagaccatcgtattctggctatgactacgttcacctctataatggctctttgggcatacacgcgcaggtcgccgaacatgaagcggcttcttcccccttccgcgaagaaaggcgttcacggagttgtcgccttcgcttgtatgcaggttggactcggcctgacgaccctactgtacctcgttcctaccccgttggcttcagctcaccaggctggaagcttgttccttctaacctgggttctcgtccttggtagtcgcgtctgg

SEQ ID NO: 23480 - DNA, 850 bp, Emericella nidulans
aaccataccgtctaccagaagctctcgagaagtggtcggtgcccctactgcaaaacctccttccacgtcacatgcaactcatcttcgagatcaacctgtacttcttgcaattcgtggagaagaaatttcccgatgaccgcgagattctctcgagagtgtctataattgaggagtctcatccgaagatggtcagaatggcccatgttgcggtcattggctcccacaaagtcaacggcgtcgccgagttgcactcggaccttatccagtccactatattcagagattttgtcgcgatctacggcccagacaagtttacgaatgtcaccaacggggtaaccccacgccgctggctccatcaggcaaaccctaggctgtccgacctaattgcctccaagcttggaggctacgatttcttgaccgacctaactctcctagaccagctagaagattacgcagacgataaggatttccagagagaatgggtagagatcaagacctcgaacaagctccggcttgctaagcacatcaaggaaacgaccggatatagtgtgaacccaaactctctgttcgacgtccaggtgaaacgcatccacgagtacaaacgccaacaactcaacatctttggtgtcatcaaccgctacctgaagataaagtccatgtctggtgaggagaagaagaaggtccagcctcgcgtctccatcttcggcggcaaagcggccccaggttactggatggctaaaacaataatccacctcataaacgaggtttcagtagttgttaacaatgatccagatgttggagatcttctgaaagttatcttcatcgaagactacaatgtcagcaaggcgga

SEQ ID NO: 23481 - DNA, 850 bp, Emericella nidulans
ggacaagtctctacctttgtcggcttgaaccgcttagtgtacgagaatgttggtctcctgcgccgttatcttgacgaatgcgatatggccatgacaaacatggggttggagagtatttacccggaaatattctccaccagtccggttcaagacacagtcaagctgcaatgcatgcttttcgcgatgcagtatagctgcgcgcggtgctggttagattgtggcgtttcgaccagaatcgctgcggttgtgggacacagtttcggcgaactcactgcattgagtatttccggtgtcctcagtgttcaggacaccatcaagctcgtagctggccgggcacgcctgatccgcgatcaatggggaagcgatagaggcgctatgatggcagcctaaggggatgagagtaccatccagcaactcctggaagaagcatcccagcagacgccgtccgaccaccctgccaccattgcctgctataatggcccgcgcagtttcacgctaggaggatcaactgctgccattgagggggtaaaggaaaccctgcttagcaagtatccgtacattcggcacaaacggttgaatgtgacaaatgcattccactgtagccttgtcggaaacattgtggagcctctaaaccagctgggcgaagaattgacgttcaactcccccgtcattcatattgaacattcgtcttctactccatcgaccggagcgcgcccgtcgtccacgttcgtcgccgatcatctgcgtaagctggtgtatttctaccacgcgattgagcgtcttgcccgagcttatcccgatagtatctggcttgaagcgggctccaactctacaatcaccaccatggctg

SEQ ID NO: 23482 - DNA, 850 bp, Emericella nidulans
cagactagcctactacgccgggcagcagctggcgggcgtcttgagcggctcgacggacggcatccgcgtgctgtttggcagccctgagggaagagagctgaccgcggccatgtactgcgagcataccttcaactgcatgagttacgcacagatgcgtgaagtcacgaacctcctcgctgagcggattggccgcaccggagagacgctcaaggttctcgagatgggcgccggcacaggaggcaccacgctcatcatggcgccgttcctggcgaccctggctgaatcgggcgccctgcccattgaatacactttcacagacatttcccccagcatggtcgccaacgcccgtcgccggttcagcaagcaatacccgtttatgcgtttcgccgtgcacgatatcgagaagcccccggccgacgagctcaggaaccagcatctggtgctcgccagcaatgccatccatgccacgcacaatctcggggtctcgctgtccaacatccatcaggcactccgccccgatgggtttttgatgatgctggaaatgaccgaggtggtcccctttgtcgatcttgttttcggcctgctcgaggggtggtggctgttcgatgacgggcggcaccacgccgtcgtaccggccgagcactgggagagtgagctgcacagggccgggtttggccacgtcgactggacagacggcaacctgcctgaaaataccttccagaaagtcattatcgcgctcgcgtcgggggctcagggagcccgtctgcccaagccagggcccgtgcagaccctcatccccgagttgaaccgggagaatgttgaggcgcgcacagcgacagcagagagccta

SEQ ID NO: 23483 - DNA, 819 bp, Emericella nidulans
gaaatagtgtactgacgaggcaggtccgcatcgccgtcgcgaacaatgtcagcttcatggccaccagcggtggccacggcactagtctgatttacggcaccgtcaaagggcttgatatcaacctggccaactttaacaacgtggacatcgatctggagtccaacaccgtcaccgttggtgcgggcgcaaagctgggagatatcactgagccgctctataaagcgggcaaggccatccgtatgccccctcattctctccttctccttcttaagcatgccgtctaatagagacagcccgcggcaactctccctgcgtcggggttattggcgccactatcggcggcggaattgggtacgaaacagggctcttcggcctcggcgtggacgcactcgtctctgtccgcattatcactgcgacgggcgagctgatcactgcgaatgagacctgcaatagcgatctcctctgggctatccgcggcgccggtgcaaacttcggcatcatcaccgccgccacattcatcatgttcgaccagccgaacaacggcgacgccgtgatcggcacgtttgtgtataactcatccaagagtctcggcgtcttcgagtacctctctgtcctcgataatgtcctccctcctgaactgggagtgcagctctcgatcgggtacgaccgcaccatcaacgagaccctcttgaccgtggacatcaagcacttccgcccctgggccactttcgtcgaccactgggagcatcgcgaggcgctcggcccgatcagccggaacgtatcgaacgtcactcttgtcgagctgtacgctggcctcga

SEQ ID NO: 23484 - DNA, 850 bp, Emericella nidulans
cgcggtctaggaatgatggctatgcggagtatacaagtatgtggccgaagcccccagcttggagtttacattctgagattcgcaaataggagaacgaggtaatcgtgagagtgccacggcatctgatgttgacggtagacacgatcgcatcctcgttcgtcacgaaattcgaagagggtgtaccagttcatgcgattcttgctgcattcttatgtcatgggggaccggaagacatcgagccgtatgagctttggacaaaaaactaggcgaccaggaaggatttcgagcattgcatgccgatcctttggccggactttctgcgtgcgtccttgcctccgtccgtctcgggcagctggaagagtgttcgaaaggcgaaactcgagttcgaatacgagtcctctcatcaaaatatcctggcccagcaagagcaacgactgcgcaacgcctgggaaagtgttgtcgctgtgttcccagagactgattgggaaacgttgtcctactattggctgattgtgaacaccaggagttttttctatttaatgcctggtcaggagccaccggaggatagaaatgacgccatggcattgttgccatttgccgattacttcaaccattcagatgtagcagtatgtgcatttgcacatggcttggtactggaatgctgaccctcacagtgcaatgtgaaatttgatggccaagaatacgtttttagagcttcaaaaacatttagtaagcccctagtggagttatttttttgctatacaagctgaacaagcttcccatgcagataaaggggatgagatttttatgagctacgggccccatccaaatgactttctgtttgctgaat

SEQ ID NO: 23485 - DNA, 850 bp, Emericella nidulans
gacagtgcgtttaccatgtctttcgaccctgtgtatgatcctctgcttgaggctgtcaaggatgctaccaatactggtattcgcgtacgtgttctttttctagattactatatctactgctgacagtcgttgcaggaggctggaattgatgtccgcatgagtgacattggtgccgctatccaagaaactatggaaagttacgaaatcgagctgaacgggacaacgtatcctatcaagcctatccgtaacctcaacggtcataatattgaccagcacgtcattcacggcggcaagagtgtcccaattgtgaagggttcggatcagaccaagatggaggagggtgaagtgttcgccattgagacctttggtagtaccggaaagggctacgtgagagaagatgtaagttgttttagagccgcatgcttgattgaaagctcatgatcattagatggaaacttctcattatgcgctggtcgcgaatgctcctcaagttcctctgcggctatcttctgcgaagagcctcttgaacgtcatcaacaagaatttcggcactctgccttggtgccgtcgttaccttgaccgacttggccaggataaatatcttcttggcgtaagtattgttgtaccccaaatcgagcatctagctaatgccctcccagttgaacaacctggttcaatcaggaattgttcaagattacccgcctctttgtgacatcaagggctcatacaccgcccaattcgaacatgtatgtcccagattttgccttccggacatagagactaaccctggttacagacgatcgtgctccgacctaccgtgaaggaggttattagccgcggagacgactac

SEQ ID NO: 23486 - DNA, 850 bp, Emericella nidulans
ctgctcttaggagctaacgcttatctgcaccatattctacgcaatcctggtaaggaagagtctgactcagaagagcctctatcgaagccggtggatcaaacccagctgaggaacgattgggcagatgccgatggcgagaaacaacacgacaggaatagtttagaggaaaaaaaagaagcacctggggaagaagatacaatgactcttctctggcggtatatactacttctggccagatacgacacatcttacgacctccgggaccgtgctcgtctatataaggcccttctttcttcgccctcgtcgactcaaatagcgaatttgcttctccttgccccaaagccggttccgcatgctcctagcccgtctgaaaccaggaaagacctattgattggctcatcaacgcttgttctgggaaacgacgctgggatccacggtttgcagggttacgaaaatataccagactgggtggaagcaggccacgagccggaccccagccttcgcgtgtcggatgttaaagccgataaaactaccacggtggcgactactgcaggtgagcagcttgacagagctctcaaggagcatgaagcgaacatagctgcctcaagccgagcgcacgcggttcgcgggagagtagccgctcctgctgcaaagaacaagacccttgatcagtggctcgatgaacccgagcccgaaacggacgaggagactgagtatgaagaggtaacagattctgaggagggagatgaagagtattcaacggaatacgaaacagactctgaggcaggagatgaggacgaggaagaggaagaggaagaagaggaggaagaagaagaagaagaagaagaag

SEQ ID NO: 23487 - DNA, 551 bp, Emericella nidulans
accgactcccagaccaaactgagcaggcggcctgacatctcactaggttcatcaagcaatactctccggcatgtcctcattgcgtagcgattgcacccacttggcagactttatacgagttttattatgtgagcatcttgaagtgtgcttttgtgtgtcattgtctgacaggaaatattagacttcgaatcccctctccgcagcctctacaaaacaatctgacagctggtctctgaactcgttcgagggcttttacaacttccattttgccgccatgaattgtctggcatacggtgatttgtgcaagaagctcgaaatcgacggttacccaaccttttctttataccatgatgggaagcaagtcgaacgatacgatggagcaaaaacaatggaggctttcagtgagtatattgaggagaagctggaagctatcaaacctgggtcacgccccgcgaaaggtcttaagctaccagaacccggtgataaggcagtcgacaccaaggcgaacccgggatacgctgcttccaaggacaaggaccctgaggctggcg

SEQ ID NO: 23488 - DNA, 500 bp, Emericella nidulans
cctttgaggaagccagtcacgcaatttctcgatcattctcgctgccaccaagctatctttccgcacgaccgcatctcccttactttcaatatccgcagctacgaacctaatcgcaaaagtagatataagcatgaccatggtcagtacacacgcaaagcacaattctcaacagcaagtgtccggttgctcgcgtcatctcgagagccaacactttacgaagtcctcgatgtccccgtaacggccacgccggccgagattaaaaagtgcgtttacatgtcccatcaagctcttaccactacctcaaccatacagtagagagtgcgagtgctatgctgacatatatatcatacagaaagttctacgccctctccctcgcccaccacccagaccgcaatcccaacgaccccagcgcatcctcgcgcttcgccaaaatctcttccgcctaccaaaccctcagcaacagcgcaaagcgctcaacatatgaccgggaccacggaatc

SEQ ID NO: 23489 - DNA, 850 bp, Emericella nidulans
ggatgacacagtcacgagcgtcagttggatacaaagggtaagccgacgtcttatgaatgtctgggagcttatgttgataaacatctagggtacgcacctttcaattggtacggggaaaggtatggtgcaaatatgggatgcagagcgctgtcgccgcctacggaccatgattgggcacaccaatcgcgtaggggcgttggcttggaacgatcatattctgacatccggctctcgggatcggcatatttttcatcgtgacgtgcggtctcctgaccagtatcttcgtcgactttctggtcataagcaggaagtgtgtgggctcaggtggaacacggaagatggtcaactggcatcagggggcaacgacaataagctcctggtttgggacaaattgaacgagacccctctttatcgcttctcagaccataccgcggccgtgaaggctatcacatggtcaccccatcaacaccacttactcgcatccgggggaggtactgctgatcgaacgattaagttttggaacacggcgacgggttctcttatcaaggaggttgataccgggagccaagtctgtaacctggcatggtcgaagaattctgatgaaattatcagtacgcatggctatagtcagaaccaaattgtcatctggaagtatcctcgtatggagcagattgtgtcgcttacgggccatacttttcgtgtgctctatctagccatgagccccgacggccagacagtggtaacgggtgccggcgacgagaccctacggttctggaagatattcaacagacgtcccggtagggagcacggacgcgagggcagcaaattagcggaatggggtacaattcgg

SEQ ID NO: 23490 - DNA, 500 bp, Emericella nidulans
tggcacagcatggccgaggactggcgcgcatcatacggtcgatttacatcgacgttcgatccgtctaacggcttcgtctccatcgatcaacaccactacgactcacttcttgagattcttcggactcgacagctagaccagctttttacggagagcgaactgcaagacgtcgatcagagctggcataaactcgagccgtggaatgataccgtggaagggctgaagctgctaagcagcaagttccgcacaagcacgctgtccaacggcaacgtctcacttctcgaggacctcgtgcggcatgcctcgcttcctttcacggatatcgtgagcgccgaacattttggcgcctacaagccgtcaccgcgtgtatacctgggggctgctgagaagctggggttcaagcccgaggagtgtatacttgtggcggcgcatttgaaagatttgaaagcggccaaggcttgcggattcgggacaatctacgttgagcgcgttggagaaga

SEQ ID NO: 23491 - DNA, 754 bp, Emericella nidulans
caatgattctcccaacactcgtgtgactcgaaacttacgttcaagccgggatgcgcgtgctgctcaacttgataatgctaagactgccagcactactgctagcagtgacactagcaatcaaaatatcagcgccactaacaataccacccccaagcacggcagcaatcggccgtcgcgcatcataacgctcaaatatagctctggcaaggtcagttcctcgaaggagataaaccgcgcaacgcctgcaactcctctgactgccacacctgcctccggtgcttccaccagcactcgtgaaacacggaacagccgagcacgggctgccgctggcccccctgctgttcctgcggctcagcctaattccagccggactgatcccgcaccttctgccattgcggctcccgagacccctcgaactaagcgtgccaaacgcggttcggtgaccgaagaatcccccagaagtacgaggcaatcgacaagactgagaggtcatgctcatgacacgcccacagaaaatggggtcaccgactctaaaccattggatgcaagcccattggctcctggtgccgccaataccagaactagaaaccgtaatcggcataacgtcgatgctggtgccaatgtatctactcgcagtcgcccaccaacctcagccgccaaatccccaccgcctgaagatactgcctcagaagcggctgaggcgtctaacctagcagatgtggagacttcacatactgcagaatctgcgtcatcc

SEQ ID NO: 23492 - DNA, 850 bp, Emericella nidulans
gccaacgctgatggagctgtaggtcccattgttggaggggattacggtccgtatagacaggtgagttttctcggcgcctcattattaactttattatctttaccgtggggactgactgattgtacattcagtctgaacgaacagaaattcatcgcaagtacgccgagaagttgattcagcgcggccacgcataccgatgcttttgctccccggagcggctggacgcccacgcgagacatcgaagccaagcgggccttcctccggggtatgataggaaatgcgccagcctgttgcctgcacattcggaagaacgggcagctctaggggagtcgcacgtcattcggttgagagttgaggaccacccgtacagataccctgtttacgatgatcttgtgtatggcgagacaggacacaagggcccgcccaccaagttggatcttatcgaccgtgtttacgatgatcctatcctgatcaaatccgacggctatcctacctatcatttggcgaatgttgtggatgaccatctcatggaaattacccacgttattcgtggcactgtaagtttaaaaaaaaaaaagctagtgggcgggtattgacgcgcctaggaatggatgtcgtcgactcctctgcatgttctgttatataaatgttttggctggaaggcgccacgcttcgcccacgtacctctgctggtggaccattcagggcaaaagctcagcaagcgcaatgctgatatcgatctgtcacatttcagagatcagggcgtatttcctgaacctttgctaaattttgccgcgctgttggggtggtcacacaaggagaagaatgatatctttgaccttaagaagct

SEQ ID NO: 23493 - DNA, 751 bp, Emericella nidulans
accacagtgaccatgaccacgacgaccaagccaactccccacaagccgtcgccaaaccactcagccgcgctcaagctataaccgctgttatcgccctctcaggagtcagttttcctaaacaccacagggtcgggcatcctgactgtctccctcccagccatatcaacctccctctctcttccagccaacctcctcctctggcccgctgccgtctatgcgctcgctgccggctgcacgctcctgacattcgggtcgctcgccgatgtggtaggcgacaaacgggtttggttgacggggagtatcctcttcgcagactttaccctggcatggggtctcgcccagaccgggacgcagttgatagtcttccggcgcttctgggcattgccgtggcaatgtgtctcccctgctccgtcagtctaatgacgagaacattcccgtcggggagggcgaggaatttgggctttgcgaccatgggggttggacagccactggggtactcagtcggtctgatcctgggtgggatctttgccgattcaattggatggcgatacgggtactatatcagtgccatcatcagtgttctgctctgtgttctagcgttttggagtcttccggatgaagtgcccaagggcgagccctggatgagaggtttaaagggaatcgactggataggcgcggtaattatcggtgtctccttagcactgctatcgtttgttctggcgtcagtactttcctggacctggttataccc

SEQ ID NO: 23494 - DNA, 319 bp, Emericella nidulans
catcttttctatggctggatacgtcctttggggatagtttgactatacgggccgaattcgaccaggccggtgaggccgcgtcagatacgatcctagctgagatggccccctgcgcgaaggactatgttgataataggtgcggcggaggagatcgactaccggctctggagaccgtttgtgcgaactgggaacggtgcatgaaccgcgatccggccaaggttgggcgggctaaggtgtcggcgcaaaccatggcgatcatcataaacagcttcatcgacccgatcagctggaaagcgatcgtaagttacattacttcacc

SEQ ID NO: 23495 - DNA, 410 bp, Emericella nidulans
aacattcaaccgtatggctagcaaaggaccaacagccgtgagttctttcctatgaaatacggtactgggataagaatagcaggcactttgaagcggcctgcaacaggtcgtcttgaaaatattgaaagcagaagcgtccgaaaacaatagagagctttctatccttctaaccctgtcagattctggcatgggccaccctggaaagagacatgtgattgaactactcgattatttttaccatacaggaccgaatggaactcacttgtgccttatcttcccggtgatgatatccgatggggagggaatgacaatctgtgggaatacgcacgaagcaggctatattcgagccatttcccgtcaaattctcttgggcctcaactttcttcatcagttggacatcgtccattgtg

SEQ ID NO: 23496 - DNA, 500 bp, Emericella nidulans
taaagtcctgcaccgaatctgcagtgacgcattccatgtatatggcgattattgggttctgatgggcgccgtgatggaactggcgccgagtaatcccgcccaacctctccatcgcgacatgcgcttcagtcaccctatagtcgagtacctcaagcctgatgcgcctgccacttcaatcaattttctcgtggctctgagccccttcacagcggagaatggcgccacccatgtaattctgggaagtcacaagtggcagaacttatcgaatgtgtcaatggacgcgacggttcgcgcactgatgaatcctggagatgcactgctcattactgacagtaccatccactgtgggggtgctgagaccacgggcactgagactcgtcgccttcttaccatcacaatgggtatcagccagctcactccgctcgagagcaacttggccgtaccgcgtcccgtgatagagagtttgacgccactcgctcagagactccttggctgggcaa

SEQ ID NO: 23497 - DNA, 850 bp, Emericella nidulans
cgacggatgacctcaattcagtgcgaagtggaatcagttgccactccgcgatctccctccaagtgccgctggaaggccgggtggccgaggacgaggatgaccaagagcaggacatccaagaggtttggttcccaggcggacatgcagatatcggcggaggctggacactcggcaaaggcgaaagttgggcattgagtcacgcgccattggtatggatggttcaggctgcgcgagatgcagggctcgaattcgatcccgcgaaaatgaagcaattcgaatgtctggaaaagtttgagggcgaattcagccctatccggcaagatatcaaatgccaaaagagctggtgcgaagaccccgctcacgaccacgaccccaaggaaggcgagggtagtacgcacactgccgcgaatatggactggacgcagccgtctagctccagccagagattcagggccgccctgtacgcctcgagcacggagggtctcctgcacgactgcctgtcattcaacagcggcctatctcctctttccgtgctcacctggcgactaatggaatatctgcccttccgccgcatggacctgcaggaggacggatcgtgggaaccgatccgctggccgctgccgtgcggcgaagttcgcgacatcccgaacgatgcgcagatccatgtgtctgcaatccgccgcatgaaaaaggacccgaactaccgcccgggcaatctgatcctcgggggcggaggacgtggggtgcgccgcgctccagaggagtatgggatcggggagtgggtagtcaaggcacatgagggagacccggtgcgggagatctatgtgcgcaacagagtagcgaaactgcg

SEQ ID NO: 23498 - DNA, 850 bp, Emericella nidulans
ctgggtaaaacctgtaaggtacgagcacattgtgcggcaagatctagtggcgaggctccaggccgcctttcagagtcgctattatggtgtggaaatccatgcattcggctcgttcgcctctggactgtatcttcccaatgccgatatcgatcttgtcctcctctccactagtttcaggcgcaccggcgtcaagacgtttggcgagagaaagggtcagatctatgcattttctgccttcctcaaaaatcagaatattcgcgttcccggctccgttgaaacaattgcacatgctcgggttccgattctgaagtttgtggataagttgacgggactgaaggtggatttatcatttgataacgacagcgggctcatagcaaacaggacgtttcagcaatggaaatcagagtaccctgcgatgcctgttatcgtgtcggtgatcaaacaatttcttcttcttaggggtctcaatgaggttcccaccggtggcttgggaggtttctctattacctgtcttgttaccagccttctgcaacacatgccccacggtaacctctatccaaacctgggtagtgtccttatggactttttccaattctacggtaataattttgactacgaaactgttgggattcgtatgaaccctcctggctacttcaacaaagtgagtgatctaatcgtttttggcgcatcacgcatccgctgattcagaaatacagagggtttatggggtctacaaagctaacaatggggccccgtctttctattgagaacgcgaacaatccagatactgacatatctggcggcactcgtgaaattgcgttgatcttcgagtctttcgcagatgcattcc

SEQ ID NO: 23499 - DNA, 708 bp, Emericella nidulans
ttgccaaaaagtatggtgtgagctgtttgacgttgtctagaaggcatcaaggtgtccagggctcaaaaaagcagcaatatgaaaatatgcagtttctcaatgctcaacagacagaagagattatagactacatcaataaacaggcaaagagaggcttattctgctctaatgagatggtcaagaatattgccgaagagattgctggaaaaaggcagggaaaaactgggtttcgcgctggcgaaagaagcacgatgacaagcttgtgagcgcctatacaactggcattgattaatcgcgcaagaaggctgattctgccttcaagtactcgctatatttcaatgcattaaaggagaagatggaggaatatgatgtccagccagaggatatcacaacatagataagaaaggtttccttattgggatcctctctgaatgcaaaaggatcttctccaaggagtcctatatagctgaggggactaagcagcgccttaaggatagaaatcgtgaatggataactactattgcttttatttgcgctgatagaaccttactccccccaggcctggtatatcaatctgctgtaaacaaactacaagatacctggcttcaagactttcaagagaaggcccacagctgcttctctacctcttcagcttctgggtagaccaatgatgagataggactggcatggctttgagatatctttgac

SEQ ID NO: 23500 - DNA, 722 bp, Emericella nidulans
gaactcgattaccatttactttcggttgacgacttgcaacatcgattctcaacgtccgcaaaaggtcttcaaaacgaacaaattccccaactcatctcaaaatacggtaaaaccagccatctcctccaccatcaagactattcaaagcaattatgggttacgttctcggaggattcggcagtatccttcttggaggtggtgtgctggtctttgtcgcgtgaaagcctcttggaaagcctcctgcaagagccaatcttgctttggctatagttctcattgctgtgtgggttatccaggctgctttcaatggctggcaagattggtcgtcttctcaggttagggtgtctaatacaaccacgctaccagaccaatgtatcgcaattggcaacgggaatcggaattcactgagtgcggccgatcttgttccgggagacattatccaagttaaaaagggaaacaaactacctgctgacgtgcgttttattcaagtctctgctgatgctaagtttgatcgatctattctgtctggtaataaaccttgctccctgtaatactctttgctaaacgttcacaggcgagtctgaaccagtgcctggaaccgtagactctacgaacaacaacttcctcgagacaaataacattggtctacaaggtacctactgtgtctctggtgctgctctgggccttgttgtggggactggggatcagacggtttttggaag

SEQ ID NO: 23501 - DNA, 850 bp, Emericella nidulans
ttctcctcgaggcgggtgccgatatcaatcgtggtcaagtcggcaccatgggaactgcactgatggcagcatgctgcactggctggaagcacatggtgcggctgttgatcgagcatggggcagatgtcaatgcgataggccacaagcccgactgctttccacttcatgctgcagcgtaccgcggttatccaaacattgtacgatccttgctcgacgcaggggcggatgtcaacgcccgggggggcatgtacggaacggctttaattgccgcgtcttatggactcgaatctgatatctgcgagattttgctggagcgaggcgccgacccaaatatcgttgctgggaggtatggcactgcggtggcggctgcgtatagcggcggatactatggaattcttgacctgttatataggtacggcgcttcccccagtctccagggtggtgagtttggaacgccattaggagcggctattgatgggtcctgcgagacgttggttgacgagcttttgcggcgccatggcgtggaccctaattgtcccgtcggaaagcacggttccgcgctgcaagcctgtattgccgagagaggtgatggtgacgatgcctggttgatccttcttaaagctggggttgacgtcaactgtcgcagtggtgtcagagggtccccattgatcgcggcagctgccacaaacgagtacaagattgcggaatatatgctggatcacggcgccgacgtcaacgtggaaggcaacttgtactatcctactgccgtccatggcgccattaaagccgagagaatggacatcttgaagcttctggtggagaggggcgccaacgtcaacatggcaaactc

SEQ ID NO: 23502 - DNA, 850 bp, Emericella nidulans
ctaccttgtcgcccaagccttttccggtggcaacatcgacctcgacttcgaccatggcgtcggcggcttcttcgcctcatttttcacctccaccaccggcctggtcctagtcgcccttgcctcaacctacggtacctattttatcggcagtatcctctactgcgatccgtggcatctgatcacctcttcctgggcatatttcattggcatgccgagcacaatcaacatcctcaacgtctacgcgttctgtaactggcacgatgtttcttggggaacgaaaggatccgacaacgcagctgcatcgctcccatccgcgcaaacaaagaaagctcccggtggtggagatggtgacgcaaaggggaccttcgtcgaagagctcgacaagccgcaagctgacatcgataccgagttcgaattcacggtccgccgcgcgcttgccgagtacaaggaacctgagcctgataaaacggtctccctggacgacagctacaagacgttccgcacgaacctggtgcttacttgggcgttgagtaactcgttgctggcgctgttgattaataacgccggggttagtacgttgtgtttgacggtgagtcccgcctcccttcttcaaacctcacccggtcctttccgggattagctccttcactacggtttacggttgagcatggttttggtatgtggtggagtctggctgactgtgtttttcttgcagacgacatcaacggtccggacggcgtggtactttaagtgtctgctctgggcaacgtcaggactgtcgatcttcaggttcgctggggcgctgtatttcctggcgaagacgggggtgctgtgttgctttgtgagaaga

SEQ ID NO: 23503 - DNA, 614 bp, Emericella nidulans
ggaatatttgccccacgccctgtccttgttaagagagcgggagttccgcgagcagcaaaagaattatactgattgtgttcagagggtgggaaactgcctatacagcgacgggagatataatgaagctgaagagctgcaggcgcagataatggcaactcgaaaagaagtgctaggatcagagcaccctgacactttaactagcatgtccaaccttgcatccatatatcagaaccagggtcggttgaaggaagccgaagaactgcaggtgcaggtaatggcaacttttaaacaaatattagggccagggcatcctgataccctgacaagtatggccaaccttgcatccacataccggaaccaaggacagtggaaggaagccaaagagctgcaggagcaggtaatggcaactcgaaaagaagtgctagggtcagagcaccttgacactttaactagcatgtccaaccttgcatccatatacttgaatcaaggttgcttgaaagaagccgaagggctgggggcgcaggtatttgacacctttaaaaaagtcctagggccagaccatccctctactctgaccagtatgggcaaccttgcatccatatacttaagtcaag

SEQ ID NO: 23504 - DNA, 460 bp, Emericella nidulans
cttttagcgagtgttattaagcagttcgtccagcgatacgatgttggcacaagcgatatgatggagctgttcaccaagcacagcaaggaaggaacaagatcctcacgtgcacagctacagtcgacacttgaactcctctacagccggttcacaaaagtcttcatcatcctcgatggactggacgagctgagatcggagaaggagcaactgccgttgctcatgagcctcgccccgaacggctcgccttacacggtgaatctgatggtgacttcgcgtccagtgccgaatattgtacgccatttccggcattggccatcgctgggaggcagcataatctgcgatggttgtaacgctgagggtctcgctgtgcagtaccactgcgcggattgtgaggattacgacctctgccagagttgctataaagccggtacgcgctgcgggtataagggacatacgtacc

SEQ ID NO: 23505 - DNA, 500 bp, Emericella nidulans
caaccacttttttacatgctgacgcggtcatctatcttccaacagccaccatgccccgagttcgcgttagttcaagccaaaattgccatgagaaggaaggtcggctcctactggctgtacaggctattaaaaaaaaggagattacatcaatacgcgaggcagcacgtcgcttcaatgtgcctgaatctacactacgtacgcgactacgcgggactacaaatcgcgccgaatctcgcgcaaatggccataaattgactgagattgaagaggaagtgcttaagcagtggattctctctttagatctacgcggagcagctcctacaaaagctcatgtacgagaaatggctaatattctgcttgcaaagcgtggttccaccccaatccagactgtcgggcagaaatgggtatttaattatactcaacgccacccgagcttgagtctcgcttggaaggcaatccaactgccacgagccaagcagagacccaaggtatttatgctg

SEQ ID NO: 23506 - DNA, 850 bp, Emericella nidulans
gtatctcttcgccggtgccctcacaatcacctggggtctcatcctcgactttgtccttcccccagacccagtctcggcccgggggtttaccgaacgcgagcggtacatctccgtcgcgcgtctgaggactaacaactcaggcgtccgcaacacgcacttcaaaatgggccaggttgtcgagctgctcctcgaccccaagttctggctgatcttctttaccgcgttcctggctatgatagccaatgccccgatctcgacctttaccccaatcatcatcaactcatttggatttagtactctagagagtcttctcctcgtcataccgtccggtttctacgcaggtaccatgatgctcatcttaccatacctttcctacaagtttgcgaacaaaggcatccggtcctggctggtgatcgcctgtcagctggtcaccatggtcgcctcattactccttctgcgccttccgctgaacgaaacaggcggacttctcttcgcatgctacattatgcccacaatgggtgccggatatgcggtgctaatgggtctccaaatcgcaaatatcgccggctacacgaaacggtctctttcttcgtcgggcttgtatatcgggtactgtctaggcaatttcgttggtccgctctgttttcgagagcaggattacccgcggtacgttccgggattcgtggtcaccgtggttacaacctttgttgctggggttttggtcttcgtctatcgggtggtatgtttacgggataatcgacgacgggacaagacgggcattctggagggttttgagcatgcttatgaggatgatttgacggataagacggtaagttcactctaccgggct

SEQ ID NO: 23507 - DNA, 500 bp, Emericella nidulans
tgggaccgccacctattaggacagcagtgcagaacgaacacttcccggattctcacgcgcatggatacgatgatcataatccatacgactaccacgcccaaaacctaggtcgtggccatagtccttacgacaacagcccatatgaccagccgtacgcagatcactctccagttggtaactaccacgccatgccgttcccaccgcaggcctaatcccctggccctcaatatcctgtaggcgtcgcagtttcttcaacaaccgagatgaatcgcccgatcccattccgacagccttctctttgccttcctttccggcaaccgtcgcagtcgcggtcagggccctaccgccagccttctccgggcttcagcacccaaccgcccagctacagagggccgtccccagctgccgttccatccgtcccctcatcacccccaccaccattcactgcaggcgtcccgcagcaaatcagcgacccgggccggcccccgagtctcctccag

SEQ ID NO: 23508 - DNA, 655 bp, Emericella nidulans
tatctcaaacactctaaataccccagaggtgccgaccgagcggagaagagccgactccgcagcgcagccactcactacaaactcgtcgagggcgagaatggcgaggaagaaaagctcatgctaaaagataaagaggtcgtctcagacccccaacagcagtaccagattgcgcagcaggtgcacatggagcagcacgcagggatcaacaagaccactgccgccattgccgtcaagtaccactgggtccggatcaaggagaccgtcagtcgagttattcgagactgtccgcactgcaaggaaacgctgaagaccccaacaccgacttcgaacagcgctgccgagacaccgatggatacggatgagcagcaggaggcacatcagcgtaaacgatcggtccaagaaactccagctcacacccatatcgacgcccacatgtcacaagccgaacccctccaaacacctcagctcatccatcaaacccaaaccacaatccacccaggccatcaacatcagcatcagaacccgttcacaacaccgcattcttctatcctccaaggccatgtcggctcgcttagcgactacacagccgtcccgcttgacccgcaaatcatgaatctgcatcaaatcccacgctttcaaacgcaggaaacctcaa

SEQ ID NO: 23509 - DNA, 319 bp, Emericella nidulans
ctgcatcgcgtctctcccgtctcctagcccttctcaatccatcaatatctggcctcatcgggacaattgttaagtccaacaaatcgtccgcttcccgtaaaacactcagcgcttaccgccagggcaaaatctccattattattgccacggatcgtgcatcacgtggcttagaccttcagtcattaacacacgtcataaactacgacgtcccagccagcatcacaacgtacgtgcatcgtgtcggccgtacagctagagcaggcaacgaagggtcagcctggacccttgttgcccatagagagggtagatggttcacaaa

SEQ ID NO: 23510 - DNA, 850 bp, Emericella nidulans
atgtgggcagtggccttgattcctatcgtgattaacatatttgcacggcgcgtgctgggtgccatcgaggtcgccgcgggcatcatgcacatcgtcttcctgccagtaaccatcgccgtatttgtcattctggcccctcgcaacccgaatgagttcgtctggaatacgtttgtcagtcttggtggctggaaaaatcctggcgtagcatattcggttggtctactgggggtcattacgcccttgtctggtaaccccgcctcctcctttcctgctataccctaaccacacgcgtaagggagtaagctaacagatcctgtccaggcgtcgatggcgtaattcacatggctgaagaagtcaagaacgccaaaacggtcgtcccgcgctctatgatctatggcaccctgatcaacggcatcctcgccttcggctacctcatcgccatcctctactgtatgggtgactatatggaggcactgcagagcccaacaggttaccccattatcacaattgcctaccaagcaacgggctccaaagccgccacgttcgtccttatggctatgggtatgttgccggggtggattgcgctattcaatggtctcgcatctgtgacccgtctagcgtgggcatttgcgcgtgataacggtctgccgttctctgacttctttgcgcgcgtcgacccccgcttcaaaatccctatccggcctcttttactagttgactactgcatctgcctgctctcatcatccagatcggctccagcactgcatgcaacgctatcctctgcttcgcaacttgggtctctacatctactacctgaacgcctggggctgctcgttacaagcgacttaca

SEQ ID NO: 23511 - DNA, 639 bp, Emericella nidulans
actccaaaaaataaaatgattgagtccaaacttggctaagcagggaggagcatgacccttgcaatctattttgtaatagactgaagttcccttgcatttgccaagcagcagcagttttcgatgtcccagagtcaactctccgtggccgactacgaggatgccactatcgcaaagaacaacgcgcaaatagcaataagccatctgaaacccaggaggcatcagtacgatggatacaatcacttgatagccgtagagcgcccccaaaacatgctcaagtcaaggagatggcagatctacttcttcgggaggctgatcctacgagatgtacaccagtaggtgtaaattgggttggcaactttgttaaacgccataaggacttgtaatcctgctttgcgcgaaaagtcagctacaagcgggcagaatgtgagaatccaaaagttatcaaggcctattttgaccagttacaggaggcccgaatgcaatatggcattgtagttgatgatatctacaattttgatgaaacaggatttgccatgggggttgtggccactgcaaaggttatatcacgacgcgaagaaattggcaaaccgcgtcttggacagccaggcaatcaagaccattacgcagggctggagctcg

SEQ ID NO: 23512 - DNA, 500 bp, Emericella nidulans
gactatggctagtgtgggatatcaggaaagtgacttgtttattcgccatgatcgccgtttgatccgaatgcctgaaggtgctcaggaagatgatcttgatattggcaacccattgcttggcgagggggaagtcaatgcggccgtcggccgggtggaatatgatatggatgagcaggatgagaagtggctagaggattacaatgcaaagcggcgagaggatcagtatgagcctatcaagccggccgtttttgagatcaccatgacgaagattgagaaggaatggcacagtcttgaaaaacgaatacccaaaccaaaccccaagccttcgcagacacaggagcctcgatcaagctccgcggttgttgtcaacggcgagaccacaggaccaggtgaaagtcaggacacgaaatgtgctatttgcgatgatggcgattgcgagattgccaacgcgattgtttttttgtacggctgcgatcttccatgcaccaggatgttttggg

SEQ ID NO: 23513 - DNA, 850 bp, Emericella nidulans
ccttatttcccccatattttttttcccccccgttttacttcatttcctacattcagtttcatgttttgtacaaaactgacattcccagccgcatggtttggatcgcttatcaatgggccaattgccgacaggctcgggcgaaagatgtcgattaacctggcggtcgtcatcttcatagtgggatctgccatccagtgcgctgcagtcaacgtcgggatgctctttgctggcagagcggtagctggtttggctgtcggcatgctcaccatggtcgtgccgctgtatatctctgaggtatcgattcctgagatccgtggtggactcgtggttgttcaacagcgttagtttgattatccttcccagaaccagccggaaccccaagctgactgtttgtagtctctgtcaccatcggtatcctggtcagttactggatcgactatggctccaactacatcggcggcgctcgctgcgcgccgaacgtcccctacgctggcagttcctttgatccctataccgacgtcccggcaggtggctgtacaggacagtctgaggcatcctggcgtctgccgctcgctgtacagatcgcgcccgcaatcatactcggtgctggaatgctcttctttcccgactcgcctcgatggcttttgatgaaggagcgcgatgacgaggcgctgtctgcgctctcgagactgcgacggcaggctcgcgatgctcctgttctgcgaaacgagtacctggagattcgcgcgtcgatcatgcttgagaatagtttcgcgcgcgagaactttccgaacctttctggtatcaggcttcatgctgctcaggtatgatctgcttatgagcacggccg

SEQ ID NO: 23514 - DNA, 850 bp, Emericella nidulans
accgatcctgttgagatcagcctcgtgcggaagctcgacatgtggataatgccaacgctctggctgatgttctggttgaactacctggaccgcaatgccattgctttggcgcgtctcaacgatctggaagaggacctgaacttatcctcgtccgaatatcaaacttgtgtttctatcctgtttgtgggatatatcttggggcagatcccgagtagtgcgtacaatcctctttcgcttggcttccgtatcactgactggcaacaacagacatgatcctgactagagtcagaccttcgtggtacatggctggattcatggccctatgggctgcagtcagtgcactgactgccctggcaaaggacttcaagggcttactgctcacaagattcttcctaggtataaccggtatggtaccctctacgtgtacccatgattgagattgaaatcgatcctttttccgctgacttactccagaggccccattctatgcaggtaccgattattctatcagtaacgcacttttgatctaccgctgacaaatcaggcgctctttacatgctgtcgattttctacaaccgcaaagagatagccacccggatctccattctctatactggaaatattctcgccactgcctttgccggcctcatcgctgccggggtctttcatggtatggacaacgtgaggggtgtcaagggttggcaatggctgttcattctgcagggcacggtgacctttgtcgtcgcggtgctctccgttttcaccctccccgacgatcaacgccatacacgatggctgtctcctgatcagcggaaacttgcctacgagcggatcgttgctgatactgtag

SEQ ID NO: 23515 - DNA, 850 bp, Emericella nidulans
gtttcaagtctgaaggagtactgcaaagagctgctccgatctttgcgagaacgctctccagactgacttgttaggctagatttccagcttgccaactatcagaaccgtggctatccacatgcactgattacttcggacacttcgaaagctgaactggaggaccagctgtcagcagttgttgagaacaggaataattcattgcatacggttgctccaacagaacgtccggttgttctcgcatttggtggtcaagtggccaggtcagtcggcctcagtcgccaggtttatgactcttctgcggtcctccgaacacatctgagtaattgcgatgatatcctcacctcagccggtttaaatagtatttttcctgctatatttcggaaggagccaatcgctgatgttgttctgctacactctgcgttgttttcggcccagtacgcctgcgctatgacctggatagaggccggggttatcccagctgccctaatcggccacagttttggccagttgactgctctatcagtcggcagggtcctttctctaaaggacggactcggtttgatcacagaacgcgcaaagcttatgcgggacgcctggggcccagagcatggctcgatggtttcggttcaggcagatgtccagaccgtcgctcgcctgatgaaagcagctgagaccaaggatccaaaagatgcgctcgaaattgcctgttttaatgggccgaccagccacgttgttgtcggcagtgcagatgccgctgatcgcctggaggccgctcttactcaggagtctatcaggtataaacggctcgccgtctcgcatggcttccattccaaattcactgagccgctac

SEQ ID NO: 23516 - DNA, 500 bp, Emericella nidulans
cctcgagaaccgggcttagaggagaagcttgtaacgccagaatggctgcacgaaaaccatggcaattatgcattgccgtggcggggccagcttgagcccgacgaagacacagaagatccgcttaagaagaagcgcagacgcgaaatgtggttcaaacgctttcacaatacccttctgcaaagcccgattgtaccattggtcattcggttgacggtctggtctttttctttaacagctctggcgcttggaggctctattcagcgactttcgagcgactttccacgtcctcaacggccctcggccttgatggcaattattgtcgacgctgttgcgttggtttaccttgtctacatcacctgggatgagtacacagccaaaccgctgggactccgctcccccgctgctaaagcacgactcattcttttagatattttctttattgttttcgattcggccaatctcagtctggctttcgagtccttatcaagtgccatgtggag

SEQ ID NO: 23517 - DNA, 850 bp, Emericella nidulans
ggaccgtactctggtatcgtaggcatctcgctggctgacggtgaggctttgctcgcccttgccgaggagggccctgtccatgtggacttgtggatcgactcagtcatggagaaccgcaccacttacaacgtgatcgcgcagacgaaaggaggcgatccagacaacgtcgtcacgctcggtggccactcagactccgtcgaggccggaccaggcatcaacgatgatggctccggtatcatctccaacctggtgatcgcgcgcgcgctgaccaagttctccaccaagcacgctgtgcgcttcttcttctggacggctgaggaattcggtctgctcggcagcgactactacgtctcctcgctgtctccagctgagctggctaagatccgaccgtacctgaacttcgacatgatcgcgtcgcccaactacggacccctcctatatgacggtgacggatcggccttcaacctgaccggcccggccgcctcggacgcaattgagaagccgttctacgactacttccagtcgattggccaggcgactgtcgagaccgagttcgacggccgctccgactacgaggctttcatcctcactggcatcccggctggcggcgtcttcacgggcgccgaggagatcaagtccgaagagaaggtcgcgctctgggccgccgaggccggtgttgcgtacgatgcaacctatcatcaagtgggcgataccatcgacaaccttaacaccgaggcgtacctactcaactccaaggcgaccgcgttcgccgtcgcgacgtacgcgaacgacctcagcacgatccccaagcgcgagatgaccacggccgttaagcgggccaacgtcaacg

SEQ ID NO: 23518 - DNA, 843 bp, Emericella nidulans
ccagatatgtcttagagccagtgcaggtcactggcacaacttttgccctcaacggtaccacactctcctaccagttccacgtcgatgagccctccgccgacttgcggtccgaccatttcggcggctcaatcagcggccctatccccgtcgatcctgagcccatcgttgatgggtggacagggatgccagaccgcgtacggcgcgagttccctgatcaaggcagaggagactttcgggtacctgcgtttaggatccggcaggctgaagggcatacagtctcggcgtttcggtatcgggagcatgaaatcgttccaggaaaggaagtctctgcgtctggactaccaggggtctttggggatgctcatgatgcgaccacgctaattgtacggttggttgatccatataacgacttggccgcggagttgaagtatacggtctttccgaagtatgataccgtggtacgcagtgcaagtatcacgaataagagcaatagtgacgtaacaatcgagtcgcttgcaagtctcagtgttgattttccttttgacgaactcgagatgatcggactacgaggcgactgggccagaaaggctcatcgtctgcggcgcaaggtggactacggggtacagaggtaagtatatcgtttgcacttttttttttttttttttttttttttttggtatttcttctgggacaatgctgactcttactactgcagttttggcagcacaaccggattctcctcgcatctgcataaaacgttcctcgctctccccacccgtccaccaccgaataacaaggtgaaacatgggggttctcgctcatctacagcggatcgttgccctt

SEQ ID NO: 23519 - DNA, 500 bp, Emericella nidulans
gaagtgattctaccgtcatctcatctgtccctctgctgctgccatgaaccgcttcttcacatatcgacaatccaagcccagctataatgctgcgctgccgagtcttccatcatcttggtaccgtttggacgccatgtacagtcttgagcgccgcgccattttatcaaagaaatggatgctcgtctcgcaccggccaaggttcaccgagacaagaagttacctccagctgcaggagggagtcttctctctctcctcattctagaccctcaaggtaagataaacgatttccataatgtctgcaggcatcgtgcatacccgttggtggaggaggacgctggctcggttaacatccttgcctgcaagtatcacggtaggcctccctgcatcaggtgtgagttcagtgttgatgttataggctggtcgtctggaataaacggcaagctcgctaatgcccctcgataccaggaactggacggctttgacaaagagaaaagcggcct

SEQ ID NO: 23520 - DNA, 755 bp, Emericella nidulans
ctacagttccctactaccgagaccttcactggcttcaacagcccctcgcgcatcgaaggtgatgttgagaatctacaaatcacagggcagattcccgccgacatcgacgggaccttcttccgcgtgcagcctgaccatcgctttccacccatctatgagtccgacatccacttcaatggcgacggcaatgtaactgccatccgcataacaaacagtaccgcgcacttcaagcagcggtatgtgcgcacggatcggttccaggctgagggtcaggccggccgcgcgctgtttgggaagtaccgcaacccgtacacggataatgaggccgtcaagggggtgatccgcacggcggccaacacgaatatcttcttctggcggggaatgctgcttgccacgaaggaggatgggccgccgtatgccatggatccggtctcgttggagacgattgggcgctatgatttcgagggacaggtactgagtccgacctttacggcgcatccgaagtttgaccccaagaccggcgagatggtgtgctacggttacgaggtatatcgtcaaacttctgttctcatatgttgaagtgagtctgacttatctccacaggctgggggaaacggcaatgacggctcttgcgacatcgtcgtgtacaccatcgacgcaacggcgtcaagacagaagagagctggtacaaggcgcccttttgcggcatcattcacgactgcggcatcagtgataagtgggtcgtacttcgtatt

SEQ ID NO: 23521 - DNA, 850 bp, Emericella nidulans
aacgataatatccacgcgtggccagaggctcttcgtcaggcccgcgacaaggagcttgtcatgtcagcttttggagcgctggtacaatatctcaggctcctaaaactcgagcgggatctgataacaatcggcaacttctcttggtacgatccaataaagaaggcgtccagccttgtcctagatggccagactcttatcaacatggagatctttgctaattcctttgatgggggtgttgatggaacgcttttccagctcctcaatcgctgcatgacgccctttggaaaacgaatgtttaagcaatgggtatgccaccccttggtagatccacaacgcatcaacgcccggttagatgctgtggatgccctaaacgctgattccagtgtacgggaccaatttgcttcacaactcactaagatgcctgatctggaacgcctcatatcccgtattcacgccgcgaattgcagggcgcaagattttgtaagagttctcgaaggctttgaacagatcgagtacaccatgagcttgctcaaagatagtggctctggagaaggtgttattgggcagctaatcaagtccatgcctgacctgacagaattgttggagtattggaaaactgcattcgaccacaatcaagcgaaggagtccgggatcttggttcccaagccaggagttgaggaagactttgatagctcccaagagaccatcagacaactgcaccaagacctcgatgatcttctaaagcggacccggcgggagttaggttctacagctatctgctacagggacaacgggaaagagatttaccaaatggaggtgccaatcaaagtgaagaacatcccaaggaact

SEQ ID NO: 23522 - DNA, 850 bp, Emericella nidulans
ctcgagaggatctacattcgggaccttctgcggcaccgcgtcatcgtcgagagggagacactcgtgaaggagtttcaggtgcaggaagctggagcggaggcgacacacccggtgcgcgcgacgctgagaaatgttgcaacaggaaaggaagagactgttcgggctcagtacctgattggtgctgacggtgcggccagcaacatccgcgaacagatgaaggtaccgtttgacgggctaggaacggatatttactgggcaatcatcgactgtcaatttaagacagactatccgcatctgtttggtatgagcatgatcaccagtgagcatggggggtgcattgtcatcccacgcgaagagggattcacccggttggtgtcaactccagatggatgtccttgtaggctcgaaagctaatgtctacagtttctacatccaggtcaacgaggagacagcgcgccgtctgcatcagacgcggcaatccagacggaatgcctcttctgtgggcacaatgcgcgtcgacgatcacggtatcacgcctgacgaagccctcgaacagctgcggaagatcctggcgccctggacagtcgaattcgcttcaccgatcagctggttctctgtatggaaagtcaacgagcgcgtcgcccgtcacttctcgtcgcccgatctgcgtgtgcacctcgggggcgacgcagcacacgtccacagtgttctgggagcattcggcctcaactcttcaatatacgacgccgccaatctgggctggaagctcgggctctgcatcaggaagcaggctctaccatccgtcatcttaccgacgtatgacagcgaacgccggcttgcagcaaaccga

SEQ ID NO: 23523 - DNA, 850 bp, Emericella nidulans
cctgctggaacggtctctgcgcgagcgaagagaattgctgcgaagtctctttatggagataccgaaccgctttacatgggtcaaaagcctcgatgctacgtcagccgattccgaagccgttctggactttttcaagagtgccacagagaacaagtgcgagggtataatggtcaaggtgctcgacaatacgcttgccactaatgggtccgacagcaccaactctagcatcactgcaacgccgaaagcagaagcaaaggaaacgaagaaaggtggccgtcgaaaagctttattgtcctcgtacgagcccgacaaacgactcgaatcctggctgaaggtgaagaaagattacagcgcctcatcagaaacattggaccttatcccagtggccgggtggcatggcaacgggcgaaaggcaaaatggtggtcgccgatcctccttgctgtgcgcaaccccgaaactggaggcctccaagctgtgacaaagtgcatgtccggcttcagcgataagttttaccaagcgaataaggaaaaatacgaggaggggagtcctaatgtgatatcgcggccgagctacgtcgagtataatggtgagccggacgtgtggttcgaaccacaagaagtctgggaaatggcatttgcagatatcacgctcagcccgacttatccagctgctattggcttggtaagcgacgaacgaggtctcagccttcgctttcctcggtttctcaaagtccgagaggacaaatctatcgatgaggcctccacgtcggactaccttgcgctattgtacagaaaacagtcggatcgagcgcgggctgaggaaactgtgaatgcagatcagatggcagac

SEQ ID NO: 23524 - DNA, 500 bp, Emericella nidulans
gcggaagatgtgagaccatttgttgatccggccccggccaatcgctggaaaagagctgttgaagatgcactaccaccaggctacagattgattgcagaaattcagcttattgggctattacaactcatctatgctgcaccatccattgccgatagcatttcggcggtaagctccactagtgtcggtacgggcttgctgggatacatgggcaacaagggagccgtcgcgacgcgcctgctagtaggtgagactacgtgtatcatcttcgtcaactgtcatctagcagccgggtcagacaaggccagcttagatcgacggaattgggatgcctctcaaatcgtcgctcgaacgaagttcgacgcggtggatactgactatactcttcgggatgcgccctgcgaaacaattggggacgaagattacgcattctggttcggagacctgaattatcgcctggaggatatccctggcgatgacgtacggcaggttcttgcacggca

SEQ ID NO: 23525 - DNA, 500 bp, Emericella nidulans
caatggcggaataccttcggcaaacccacgggcgctcttctaggctttatgaatgccgtttaccccatcgccaaggtcgccggattgttccccgccacctggatcggagaccgatacggaaggaagaaggtcttgtatattgggtttgccctgcttcctatcggggcggctttgcaaggcgcgtcgcaaaataccccgatgttcatcgtcgcccgattcctgatcggctttgcaacgtcgtttctcgcccagccttcgccgatcctggtgaccgagctggcatatccgacgcaccgggcacgggcgacggctctatacaacacctgctttgtaagggaccggattttgaggcccgaataatactaatcgacctcagtaccttggggccgtcctcgccggtggtccacattcggacattcaggtttcagtcggtgggtcctgagatcccatccttctttacaagcataccggctttcatttgtttcaattttgggtccggg

SEQ ID NO: 23526 - DNA, 850 bp, Emericella nidulans
tcctcctgtacaagctctgctactacaccacaccatttgaggaggttggacagatggcgattctcaatgcttcctacaagttcccttcatatcctccattttcgagccggctgaaaatgctaatctgtgagtgaccgtctagattgcatgatctccactgcgtactaatgccctacagcctcgatgcttcaggagagcgcgcaaaagcgcccaaatatataccaggttctgcgtgaagtctgccaaatgcaaggaagagaagtgccgatcaaagatgtacgcttatccaagatatccgtatatttccgcttgctgacaatgtcagatctatgcccatcgctcgacttcggaagcacgccgataccaggagctcccgccatccccaacagaagcaccgcaagtaggtgccgcattttctccgcctatccaggagactcagattagcattcctgagattgctccgatgcgtcgcgggcggccaacgagacctgatgcctctcaacacaactccgcacgtccaagtccatcgcccttccggggagcatccacagatccgttcgctgcgctggatggtaaaaagcctcaagagcccggcgatgaattctcggataggatcccttcgctcgaccagattaacatcttgcacgagacgaaaagcaagttcgatcttgagccgagtaccgcagatcgcaacgaggacgaaagacttgctcaaaggcttaccaatgccctggccgatgaggcgtttgccaagcgctcgccactgctcgagagactgcctcggagcctgcagcagtcacacgcaaccgccaacattgaagacctctgtttctgtagaatacaatcatta

SEQ ID NO: 23527 - DNA, 500 bp, Emericella nidulans
gaattttctgcttcttccggcccatcatatgtcgaagacggcatgtcccgttcctttacggaagcaaacatcaactcgccgtccccttcatcaaccagaccaccaacctccaatggcggcaaagaccatcacaaacgccgcggctcacttggcatcttcggttggatgaagggtgccagcgctgggttgggctcctcgctcaagaagtcggatgtatcaccgcaaatccaaacctcaacaacctccaacaaaccggagactcagattacggcacccccaacagtatcaacagcacctgcttccgcaagcatgactgtccgcgccacgtcgcgcctcgcgactcacgataatgtcactcttgctgcaaaagaacctcatagcaaacccactgaatcggcagccgaggagttggcaacctttgcaactcgaaccagacatccaacgcgctctgacgagcccactgatgagcatgggcggcgtccacgctacatggagcgacg

SEQ ID NO: 23528 - DNA, 850 bp, Emericella nidulans
caggatatgttgtttacagtctccggtcccaccgcaggggctgtccttgttgagtggaacgtcgagcagtctagcaagggttcagcagctatgtgggactcgcatattcgtgtcgggggtgcccttgggtccaaacttcagaggcagcagtgtccgaagaaaacgggcagtgtaaacccagagtgcattgccgcttccctcttactgcacctcacaccaacttcaaatgcataccttgaaaatatctgggtatgggtggccgaccatgacttggatgcccctgagcaggaccagattgacgtgtactcagcccgtggtatcctgattgagagcaaattggcctggctctatgggactgcttcagagcacagtgttctgtaccagtatcagctgtcgggggcaaagaacatccttatggccatgatccagacagaatctccatattatcagccatcgccgcgagcgccaaaaccctttataccaggactattccccaatgatcccttgttcaatgattgcaaatcaaatccgctcaagtgcgctgtatcctgggcagttcgtatcgttgattcatcttctatatgggtgcttggaagtggcctctacagcttctactcggactactcgcaaaattgtcttgaaacaaatgattgccaacagagggactttgagatcgagcaaagcttcaatatctgggtctataatctctgcacaagggcaattgtcgagatggtatctcccttccggggtgtccctacttacgcccgtgataacgttaatggattgctttcgtccattctagcctggctaggtggagctgagcagaccgcgggtgaacgggagttcctag

SEQ ID NO: 23529 - DNA, 842 bp, Emericella nidulans
ctggacttcgtcagaaagcaggatacgagaaataacggcaacgttctgtggactgaatgtcgaggctgtatcaaaaggcgcttcattctttagtcttggcatagactcagtcactgctcttcagtttgccagaaggctgcgtgatgagggattcaaggtttcatcatcggaaattatgcgtttttcctgtgttgggtcgttgacaggacatattgaatcttcttccgcgctgcaaactaatggtattgggaaaacggagacggctatctcaatcgaaacctatgcaaagcatattcctctgcttggaaagaatgactccatacgtcgttgtttgaatgtacaccactgcaatcaggaatgatcacgcaaacgatcagctctggagggaaggtgtatattaatcctcatccaatccgtctcagggacaacgtgaaagtggagaagctcaaggaggccctgcgtcacgttgttcaggctaacgaaattctgcgcacgtcttttcacctcatcccggatctaggagagagctggattggtgccgtgcatgaagagcctaagtttgagtggagtgagatcaatatgccatcaggcgccaatgctctgtctgaggttatgaacctctatacgttctgtgaagaggcatcttttgagaggccaccgattcgttctggtcttgtcaaccagccaggctataggatcctcatagctgtcctacatcattccctttacgacggtgcctacctaccgttcgtcttcgaggaccttgcaacaatctatgcagggaggacccttgctcaacgaccacagttcttagaatggtcccctacatgctctcagggcag

SEQ ID NO: 23530 - DNA, 850 bp, Emericella nidulans
gcacggtgcttagttgacgcctcagctgacccaaatccccaattcaataatgcgccattttccgtactaggccatgacctcctgaccaactacgcatccgaacaccttatttgcacatatcctcgactgcctttgacggtcatttttgcggcactgtatgcttatgtcgggcctaaaacactcaccgcaatggccagagaatggggtgttgaacatgctgctcttcctggcggcgaggtagaccccggcctccttcaatttaagagagtcgagcccgggaccgatataaatgcagagcctctcaaaggcactacaaggccgaatgaagaccagaaacattggcggaaatcgatttcctctagcgtcgtgtacgacaacgagttcggggatccagatttagcaggcgtaccaccctccgaatcacagcccgaagctctacaggatgtcaagcccgtaacggttgaacaagctagtgcggcttttgtgcgggctataatgggaaagatataccttcacgccggccgagcagcagccaagcgatttttcgaacagcacatcctctcgcgacaccttgatatctctagcctgttcaacttctctttgcccacccgtgatttggcccaactctgtgcgcgtgaaaactatgagcctccagttgccaaaatcatcagtgaaaccggtcgccgtagcagacaccctgtcttcgttgttggaatattctctggtcaggataaattgggcgagggcgcaggcgccagtcttcctgaggctcgatcaagggctgccgttgccgctctcaaaggatggtatctttacagcccgttagaagtccgcgtacccagttctatgg

SEQ ID NO: 23531 - DNA, 500 bp, Emericella nidulans
caacgcgagtggatccgcaaccagaagcttgtggcgcgcagggcaagggctgaagaaagactcgcaacgaaagccgccaaacttcaaatcagcgaccgaaatgctgggtctgagcgagttctgtccgacagccccgttgaatcgccgtctgacatgaacggccatgtagatggcactgacgtgccggtcgagaacggttcagtgccgagcatcagattcgacgaaactcatatggtacttacgccccagtcttcacatgatacatactcgatgcggtcctgccgccaccgctcaacaaactccattagccgccatcgccgccgtacacacaaccgcgaccaagacttactggaaggatttgagttcgactcggatattgatatgcctccagaggagcctctcacaattagagcacccagcatgcagacgtcactcagcgacgggcacgatagcacgaccgatccatggaatgcagtgtgtgtggtcgggctgcgagtgta

SEQ ID NO: 23532 - DNA, 534 bp, Emericella nidulans
accgagaaaagagataccctcatcgccatcgaaaagaagtaccaggcacaatggaaggaaaacaaggtcttcgaggttgacgctccctccctctccgaggtgcctgccggcagcatgactcccgacgagctccgtgagaagtacccgaagttcttcggtaccatggcctacccgtacatgaatggtaccctccatgccggtcacagtttcacagccagtaaggtcgagtttatggctgccaccgcccgtatggagggaaagagagcccttttccctcttggtttccactgcaccggtatgcccatcaaagcttgtgctgataagcttgccgatgaggttaagaagttcggaaagaactttgaaggctacaaggatgaggacgaggagacggctgccgtcgccgccccaacccaggaggttaaggccgagcaacaggagaagttctccggaaagaaaagcaaggccgccgctaagactgtgaagatgaagtaccagttccagatcatgctggccatcggtatcccattgaagaga

SEQ ID NO: 23533 - DNA, 463 bp, Emericella nidulans
gaattcttatttggctgtggcactggtctgtactcgaactggctcacaccaaaccatcgcggaccaccacgagacagaaagggtatttccgagaaccattcctattccatcatggatgttaaagagattgatggagtacgcttggtaaagttaaggtatgcatagtcgttagcggtggcgcaacttagctaacagaatcaggaatccttgggggaagaaagaatggaacggtgcctggagtgatgggtctgagcaatggacacctcagtggatggagaagctgaaccataaatttggcaatgatggcgtacgtttccatactccagcagaccagcaggtactaacatgcctgcagttcttctggatctcgtacgaggatctactgaaaaagtaccaacatttcgaccgcaccagattgttcggaccggaatggacgattacccaacagtggacgagcttgaac

SEQ ID NO: 23534 - DNA, 850 bp, Emericella nidulans
gccccctgccacttcggggccctgccaggatgctctgccattgacctggtccaggttcttgttcacagggtagaggaggcctttcaacagggaaaagatgctttactactcctactagatgtgaaaggggcatttgacgctgtaatacaccaacggctcctttcttacttatgcctgcaaggatggcataaaggcttactccagctacttaaggactggcttactggccgctctgtatctgttcatatcaaagaaggcactgccacagcaccaattaaaggcggactcccccagggatcccccctatccccaatactcttcctgctatatgcagcaagaatagtctctaccttagagggctccttctgctatgcagatgatatgggcatattattaactgggaataccctggaagagagctcacaacaactggtagaggcctataagcaaattactgccctagggacagagacaggccttcctttctcaatagagaaaacagagatacaacacttctctagaaagcagcagcagcatctccccacagtcactctacctggtataggggggattataccatccctatatacacgttggttaggagttcttctggatacaaagcttacttttaaagcccacattaatttggtctttagccgcgggaaacgactcgcccagcacctaaagagacttagcaatacccagcgcggctgcccagtggcctccatgcgggcagcagttatacagcgtgttcttccaacagctctgtacggggcagaagtcttctatacaggcaaacaacaaaaaggggtagttaactccctgctttctctcttccgcacagcagccc

SEQ ID NO: 23535 - DNA, 553 bp, Emericella nidulans
ctcacgatgctcccattgacaccaatcctggctatcgccggcctcctggctctcatcttccggctctccctcatcggccgtcggcccaaaaactacccaccgggccctccaacgctccctctgctgggcaacatccatcaggtcggatagcctcatttcagcaacacggcaggcatagcatgccggtcaaatcatataggcttgctggctaacaagcactgcgaacagatgccctcccgcgacgcccatctacaattcgcaaaatgggccaaggagtacgggccgatatacagtcttatgctgggcacacaatgcctgatcatcctctccagcgatgaggcagtcaaagagctcctcgaccgacggagtggaatctactcgcacagacaggagatgtatactgggcagcagctgtgcagcggagggctgcggatgcttatgatggtattgtctcaattggtcactttacaattagggcctgctaacaaggtgatttcagggttatggaccaacctggcgaatcatgcgcaaaatggttcacgggctccttaat

SEQ ID NO: 23536 - DNA, 850 bp, Emericella nidulans
ctttagcatagtatgaactaacttgatgctcaatgttctcagtcatcttcggtgaaatcgtccctcaatcaatttgcgtccgttacggccttcctatcggtgcctggatggccccctgcgttttgggcctgatgtatctaatggctcccgtcgcctggcctgttgccaaattgctggacagattgctaggggaggatcatgggacgatctacaagaaggcgggcctgaaaacccttgtcacgcttcacaagacactcggcgaggcgggcgaacagctcaactccgacgaagtcactattatcagcgctgttctggatctcaaggagaagtctgttggcgctattatgactccgatggaggatgttttcacgatgtcggctgataccgtattggacgagccgaccatggacctcattctctcgcaaggatattcccggattcctattcactctcccgagaaccctaggaattttatcggtatgctcctagttaagatgctcattacatatgacccagaggattgtaagcccgtcagtcattttgccttggcgaccttgccggaaacacgtccggagacaagttgcttagatattgtcaactttttccaagaaggaaagtctcacatggttctcgtctcggaatttccgggtgaggatcgtggcgcccttggagtggtcaccttggaagatgtaatcgaagaactgattggcgagtatgtacctgaacttgccaaggcgatagagacttcaagactgattcgttgttttgcagagaaattattgatgaatcggatgtctttgtggatgtgcacaaggcaattcgacgtatgaatcctgcaccttattcccgc

SEQ ID NO: 23537 - DNA, 795 bp, Emericella nidulans
caaccctcccactgccgagttcagccacggaatcgcgtacaaacgctgcggagactactgaggggctcttgcctacaattctgccctcgatcccagtcattgacagtctcttgtctggccttggcggatcgactgctactgaggctggcgcttctactgttggctctgaaaacgcgggccagactgagaccacgtctgctgtccaagctccaggcaccgaagctactggccaaactgccacctccgttgtgcaggcaccagaaactgaagctacgggtcaaaccgctacctctgttgcagtggtcccttcaggctctgaaaccaccgctcaggtcggcacctcgtctgttgccgatgctccttccggaaccgtctcctcagcatcaacgtccacaggcgcgattcacggctcgggctctggttctggctcaagccaatcgtccgcccgcacggtcaccaagacccgcatccagactgctcttcccggcgccaccaagcctgcatccctcctctccagcagcagcggcaagattttcgagcgctcgaagcccctctacgaaagctacgcctcgtcttctttcatcagcgttaaggccaacggcgccaagggcgacggctcaacggacgacacggctgccatccaaaagattttcgacagcgcaacatctgaccaggtcgtctacttcgaccacggcgcctacgtcctcactgacaccgtcaaggtcccctccaacatcaagatcgttggcgaggtctggcccgtcctcatggcttacggcgacaagttctccgacg

SEQ ID NO: 23538 - DNA, 850 bp, Emericella nidulans
gggcaacccctacctcgacaggctcggtttggaacaacaagggtgcggccactaccagcgcggccaagaagaccctagctcagattcagaaggaggaagaagcccgtaagcaacgctctgctgcagctgcagcagcggcggccgctcagaacattgccgcgactacccctactccctcttctactggaaaacgttatgcggatctggccagcaaagctcccgctgcctccccggttagcgccggctctggtgcttggaccaccgtcggtgccagcggcaaggccaaagctcctcctgttgctccaaccgggccgcgctccaccagcggaccagttcctgtcgctgcatcgccagtccggccgaaggcagtaacggcgactaccacagcgccccggaccgttcctgccaccacgccttcgtcgaaccctatccgggctatggaagagtttaccaagtgggccaagttgactctgggcaaggggttgaacagtaatatcaatggtatgtttattcctaatgggagattctgaatcaaactaacgtttttatagtcgacgattttgtccagcaattactgcttcttcccgcagaggcggaaatcatctccgattccgtctacgccaactcgcagactctggatggccgacgatttgcggacgagttcatccgtcgccgcaagctggcagataagggaatcgtggagtccgtttcgacaagcgcccttgcggagaagaacggcggagggtggagcgaggttgcgaagaagggatctgctagcacgtctcgtgaaaaagatacgagcaacgcggcgtttaagatggttgcaccccgcaagaagggcaagcggtga

SEQ ID NO: 23539 - DNA, 850 bp, Emericella nidulans
gggattctctgcctttgggatgacctctagcattcctggcttccgtgatctgatgcagagtcacgagaattcgcgcaacccgactcctcacctccccggccgcgagcccactagcccgacgaatacaaacccgtatcagagcccgcacggcgacaggggagacgtggatgacgtggacaccgacggttctgatattcagaatactaaccaccctggacttagcggcttgcgagactcggctgcgttcggttctatccgtcgtgtgggatccggcatggacctgccttctattgatcgcagccaatcctccagtgttgcaggtaaccgtagcttcagcaacttgggtagcctgggtggtcttccttctcttggcggcgctggctggccgtctagcggagcggttggcactcctaccaaagacaggtctgcttttgctacaggatttggcgaccccatttttggctcgatggctgaccttcagtctccgagtttggcgacgttgggagcgggcggactgtttagccctcacgctggaatctcaaccagtggaagcatcggtcgctcgagcaaactaggttctctcttccctcaagcgatgcaggaacaaattcaaagcgagcaacctaggcatgacctcagcagtttcgatgagactcaaacgggtgagtctattctatcactatcaaagaattctctaaccacgtcaggtcatcaagcagatgcacctggtcaaacggttcctgcaactacttccacttctcatactccagtttctgctgtaggctccattccaacttccatggttccggaaggtcagcaagcaagccaggctggaagcacggctggctca

SEQ ID NO: 23540 - DNA, 812 bp, Emericella nidulans
gcattcccggtccccggaacgaccttcgtctccggtatgagcgccttcttgaacatcagctacaccttcatcggtcagattacgctacccagcttcatcgcagagatgagagaacctaaggaattctggaagtctgtcactgccgtcacgatcgcagagattattgtcttcagccttgtcggggctatcgtctacgcatacactggaaaccaatacatggcggctcccgcatttggcgcgatcggcgacgaagtctacaagaaggtttcattctcgttcatgatccctaccatcatcttcctcggtgttctgtatgcttctgtctctgcgcgattcatcttcttccgcctcttcgagggtacccggcacaagggcaaccacacctttgtcggctgggccagctggatcggtatccttgcggctttgtgggccgccgctttcatcatcgccgaggttattccgttcttctcggatttgctctcaattatgagctcacttttcgattcgttcttcggcttcattttctggggcgtcgcgtacctccgcatgcggtatgatgaccacgggccgggcttctacagaaaccgagggttccgaggctgggttggggccattgtcaatgtcggcttaataggtattgggctttatttcttagggcctgggacttacgtatgttgcttgcccgttcttatttcgatccacatgcacaaatcaaggactaacgtatatccgtataggcatccgtcgaaagtgttatcatagattacagagcaggaagctttgggggaccgttcacatgtgctgataatggg

SEQ ID NO: 23541 - DNA, 500 bp, Emericella nidulans
atatttaccaaactaaaaggctttcaaaacaggtctatggcatgcttctagcccgagaattgccccaggtcaacgttccagaaagctaccttcctctggatctcaacgctgcgcgcatcaacatcgaaaaggccgcctatcacggattcgccaaggcccaggtgaagatgggagccgcatatgaactgggccagcttggctgtgatttcaacccggcattatccttgcattacaatgcacttgctgcacgccagggcgagcctgaggccgagatggctattagtaaatggttcctgtgtgggcacgaaggcgtattcgagaaaaatgatgaactggcattcacatacgcccaacgggcggctcaaagcggcctacccacagcggaattcgccctgggttacttctatgaagtcggaatttatgttcctgttgacatcaaagaagccaaaagctggtatgctaaagctgcagcgagcggaaacaaagatgctactggtcgg

SEQ ID NO: 23542 - DNA, 850 bp, Emericella nidulans
ggactggcaggctggagatggattttcatcctcgaaggagtcatcaccggtgccattggcgttctagccataatcttcctcgtcgacttccccgacagagcccacaagtcctggaagttcttgagcgaacgagaatgcgcatttgttgtgcgccggatcaaccgtgaccgatcggacggggacgccgaacccttcagcctgaagcggtttctgaagccagcgcttgatttgaagatctggggctttgcagtgattttcttgtgagtaagcccgatcgatgttacagtaaatatggctgaccggaccagctgcgtcacgactgtcagctatgccattgcatacttcctcccgatcatcctctccgagggaatgggcttcgataccggcacctcgcaatgccttgtcgcgccttcctacgcggcagctggtttcgtgatgtacggtacaagctgggtaggcgacaaataccgtatgcgcggaccagtcctcattttcaacgcgctcctctgcatcatcggattgccgatgatgggcttcgcgtcatccaatgccgtacaatacgtaggcgtcttcttcactgtcgccggctccaattccaacatccccgccgtcatggcgtaccaggccaacaatgtccgtgggcagtggactcgcgcgctgtccagcgcgactctcgttggatttggaggcattggcggcattgcagggagcttggtattccgggaacaggataagccgcattatcggccgggaatctggtgtgccattgcttgcaacttgcttcttatgcttatcgttgtggtgcagagtatttggttcagaatcgccaataagcgagcggagagggggg

SEQ ID NO: 23543 - DNA, 791 bp, Emericella nidulans
aaagcagaacaagggtgacacagtagagcacgttgacgaagaagcgtacaagaatttcgattaccgtattcatgacaacgaggactatacacctgaacgatgcgaggaactggaaaccgcttactggaagtccctcatgttcaacaacccaatgtacggtgcagatatgccgggttctctcttcgatgaccgtattacgtcttggaatgtcgccaagttgccaaatctcctcgacgttattggtcagaaggttcctggtgtcaacactgcatacttatacctcggtatgtggaaggctacattcgcgtggcatttggaggatgtggatttgtatagtatcaactatatccactttggcgccccgaaacagtggtatagtatatcccaggaagatgcgcctcgtttcgaacaggcaatgaagagtaagttggttccgcgaggaccagtcccggcaggcagcagctctaaccacaaattataggtatctggcctagtgatgcaaaaacttgtgaccagttccttcgtcataagacttatcttgtttcacccagtcttctcaagtcccaatacggcattacggtcaacaaaatggtacattatgagggcgagtttgttattacatacccctacggatatcattcaggatacaatcttgggtacaactgtgccgagtccgtcaactttgcgacggagaagtggcttgattacggtcgggtggctaagaaatgcaactgcgaggccgatagtgtctggattgacgtggaagagatcgagcgtaaacttcgcggcga

SEQ ID NO: 23544 - DNA, 516 bp, Emericella nidulans
atccattgcccagatgggtataccgaaagctccttactagttatcgcctacactatgtttgccgaaggcatttctgcgagcgaagcttggcttaggcttcacagggaaaagaagcggaatttcttcgcctacccttccgacgtcgcatatctaaagaatgttcaagagcgaatacttcaagaaagccccgcgaatcctccaacataccgcgtgtcagatccgcaatggttcaaatactgcgacggttctttgccaagtcgaatcttgccatatatgtacctcggaaatctgtcacatgccaataacccggaaatgctctgggagcttggtatcaggcgtgttctcagcatcggtgaagctgtaacgtggagtgactcggacatcgcaagaatgggtgctgaaaatctgatgcatattaccaaagtgcaggacaatggcattgatcctttgacacaggagtttgaccgctgtcttgagttcatccgtaagttggcttatcccgttaaattgtgtcct

SEQ ID NO: 23545 - DNA, 850 bp, Emericella nidulans
gccgtcaaagcatccactacagtgcctgccgcagaactggtaccgggagatctggttttgttcacagttggagaccggatcccagctgacatacggattaccgctgccacggacctcactcttgacgagtctaatctaacaggcgaaaatgaaccagttgtcaagtaccctgacgcgatttgcaaccagaagaacattccaacctctaagattgtgaccccgccccggtcgccattttacgacgcaccggcgagcggcactgtcggtgcagatttacgtttgaacgagcagcacaacattgcttttatggggacactggttcggtccggatatggccagggaatcgtcataggcaccggtgctaaaacggagtttggcagcatctctgcctcacttcaagaaattgagagcccacgcacgccgttgcagctgtctatggatcgcctaggccaagaactaagttatatctcgtttggagttattgccttgattgtcgttgtaggcttgatccaaggtcgaaagctcctggacatgttcaccatcggcgtctcgctcgcggttgccgctattccggaaggtcttccaattatcgtcactgttaccctcgcacttggtgtactgcgcatggcatcccgaggagcaattatgcgacgactcccgagtgttgagactctgggttcggtgaacgttgtctgcagcgataagaccggaacgctcacactcaaccacatgactgtaacaaaaatgtggcatttcgactgcgctgagccctttgaggtacaccacgacattgcgtcactaaccccggggccagcagcttgcaccgttctccagaaaagcaacagccgta

SEQ ID NO: 23546 - DNA, 850 bp, Emericella nidulans
agatacgcacaagcaaatgcggacattgcccgtgtgctcttggctcgccaggaatacgaagaggctgcagagaaggcagaaacagcactgatgttgtcgtcagaggaggactccgaaaagttcgagcctgaaatgtacaaaaacttgcgcttgtccgcgcatctgacagccggtcttgcgcattactatatgagagccatggacaatgcaatcgacatgttccgcgatgcacttcaagaagcggataactcgccagacgtcgtttgtctgctcgcacaggtcctgtgggcaaagggcggcgaagaggaaaggaccgttgctcgacagcagctgtttgaatgcgttgagagctacccagatcatgttggagcggttacacttttgggggcgatcgcgcttcttgacgacgacagagacgtcatcgaggccgttgagtccgatctccacaacatgatcaccagagacgatatcgagattcatcagagagcgaggttaatcaagctcttgactgcaatctccgcgtgcgttgctggtgattcagatgtcccaagtgagacgagacgtatcggagaggccgctgcggcggtaatgagagcgccttacgaccctcaaggctggctggaactatcctcggctgcacaagaatcacaccctgctgaaatgggcgtcaagaccgctctgcagagtgttcctcctcgaagtaatcttgacgctagcgacttgtcaaaggcatattcacagaccggaaaggctagcgatgcactgcgggcgatcatggttgcgccatggatgcaaggcggttggcaggaactgagccatatagtctcagctacctagtcaaaattgtagg

SEQ ID NO: 23547 - DNA, 476 bp, Emericella nidulans
tctcatgcatgttcggccttccgcaccgcgaacacagaccgggcatgtttatctgcgttggcccacccgctttcacttttctagctctcgtcggtatgaccgcaggtctcccggaacagttcgaaatcctgcacgactaatcctccatccaagacgcccgcatcatgaccttgattgccgtctccgccgccgtcttcctctgggcgttgagtctctggttcttttgcattgccgttatcgctgtcattcgtgagcgcccgactgccttccacctaagctggtgggccatggtctttcctaacaccgggttcacacttgccacaatcacgctgggcaactggctcgacagtacaggcatcaagggcgtcgcgaccgcaatgtcaatcggtatcatctgcatgttcctcttcgtcttggtcagccatgttcgagctgttatccgtcaggacatcatgtacccgggcaaagatgaggat

SEQ ID NO: 23548 - DNA, 584 bp, Emericella nidulans
tgaaacgggcaaaaagctgtccgagagccaagtcctcgacgagatcattaacatcttcatcggcagcgcaacgcgcgccaacctcctctcctttgggctatattatctcgccaccaacccagacgtcgtcacaaaagctcgcgaggaactcgacgccgttgttggttccggccccttcgagcacgcccacctgtctcaaatcccctacaccgagggcatccttcgcgaatcattgcgactcagcgccacagcaccaggcttcaacatcgagccgatcccgtcgccgggcaatgagcccgtccttctcgccggcggcgaataccaagtcccgcgtacgcaacctctcatcgcgctgctgaccgccgtcaaccgggacccggaggtcttcgaagaccccgaatccttcaaacccgagcgcatggtcggtgagaaatacgatgctcttccgtcaggcgtgaaaaaaggcttcggaaatggcaagcggcagtgtttcgggacacggtatgcgtgaggaaaggagtcttttggtgctggcgcggttattaaagaagtgattttagcttcagatagaagtataagggacc

SEQ ID NO: 23549 - DNA, 337 bp, Emericella nidulans
aggtttgatagtgcttggagctgggcgttgcaggatctgctgcaattgtattatgaggtgtcgaggacaggtggcgagacagaggtggatctggcggcgaagcgatgcaagcatattgaggatgcagcagaccccaggctcttggatgtgctgcagcggattgtaggcaggttcgagcagcagcccgtgctgtcgtccatgtttacgcagcttgcgcagcgatgtcgcgattcgttgctgcacggaccgagatacctagcgcggcctgatcagcagggcccgcgcacaacgatcagcgcagaaggcgatatcacctacaccgagcaggaacgggctg

SEQ ID NO: 23550 - DNA, 499 bp, Emericella nidulans
tcgaagcaccctgatctggtcggtgcatcacgcgctgatcgatggctggtctgcagcacttgttttgaagaaggtgatccaggccgctggagggaaaactgtccagcctgggccgcctttctccaatgttgctgcggcattagatcagtggagatgcactcacagagcggagcaagatgccttctgggccgagcagcaacccaaattgtccgaagggaaggaagagtttctattcccggttgcagggacgggcgacgacggagaatgccagcaagaagaaaacctcgtcaccctgggccactattacacatctctcaaaggcgcagccggagcgtgcggcgtaaccttaaccgcattctctacgctgcgtgggcgctgtgtctggggctgtacgcaaacaccgataatgttattatcggcaccgtggtgtctggccgcaatatacctttaccaggcatcttggacgcattagccgatcgtcagcacacttccattccaa

SEQ ID NO: 23551 - DNA, 850 bp, Emericella nidulans
cacagtaacgtcgcttgcatttcttccgcctggccgcgagaatctttttgtgactgcgtccgaagccaatgcttgtgtgcggttgtgggatctgcgcacagcacacagcaatcgtcgtggccgccctgctcttcctctttcgacgactcgagagccagatagccatatcaaataccgccggttcggggtcacctccatagctttaggcggcgatggctcacgattatattcgctttgccgggacgggacggtgtacgcctattccacttctcatctagtccttggccacgcccccgaactttcgttgcacaatgaccgtccacggcgctcgggcgggtctgataaagacggcctcggacctctgtatggctttcgtcacccgcgtcttcgggtttcctcattctatgtcaagatcggtgtccgcaaggcttctggggacaaaccagagatgttggcagttggcagcggcgagccttgtgctgtcatatttcctacggacgagaggttcctagacccttcgacacaacggctggctactcaaccagatcaatccccatcaatcccgtcaacacctttgttttccactcgctctggtctgcgccgtaccaattcaaacattgggttatcacaacgcctggaggacacgatcccaatttatcatactggcacacctttgatcgaaggccacaagaaagaagtctctggtgtgacgtggacagttgatggcgagctcgtcactgtgagtgatgactacagcgctagatgctggcgtgagggtcctgatgcaagggacctacgcgtaggcggagagacagagggccgcaggtggcgatgcggctgggctgatacg

SEQ ID NO: 23552 - DNA, 751 bp, Emericella nidulans
gggagcttgtcgcgcttatgggcccctcgggctgcggcaaaacaacgcttctgaacgtcctcgcacgtcgtgctgcatcatcgggcgctaaatcctccggacattgttatgtcaatggtggcgaggttgataacgcaacgtttggcagaattacttcgtatgttgagcaggaggatgcactaatagggagtttaactgtgcgagagacgttgaagtttgcagcggatttatcgttaccggggtatgtgatttccgttacaacttagaactgactaatgattctctcaatgtttaggttcgtaagcaggtcagagcgtgttgagaggatacacacccttctcgaatctttcggtatccagaaccaggcctctacgcttgtcgggacaccgattaggaagggcatcagcggcggacagaagaggcgagtcagtgttgccagtcagctcatcacctgtcccaaaatactgtttctcgacgagcccacgagcggacttgactcaactgcgagctatgaagttatttcgtatgttaggaagctggcgcgggctaataaggttggttaaatgcttttgctggccagtgcaatactaacttgcgaagctcatcatcatagctagcatccatcagccatcgacggcgacattccaactgtttgataagctcttgctcctttccagtggaaaaacctgttactatggccctgttaagcaggttccatcgtactttggaagtattggatatcccatccctc

SEQ ID NO: 23553 - DNA, 500 bp, Emericella nidulans
tattctaggaccacccttttgaggacgagttggggtcagacttaggccgataatctacaagatgggagcagtgaggagaacaaagacgaagcgcaggaccaggtatttttgaccttttttttgtgccagaatatccgaactggggtgaacctatgacactgacaaagatttttcagagattatgatcaggtccgcgcggatgtggaaagctcgaagcaccttgcacagtataaggcgacgaaagaccctgaagaccttcccggcctagggaaacattattgcgtcgaatgcgccaaatggttcgagagcgactacaatttggtcgctcataggaagggcaaaaaccacaagagaaggtcggttgtccggcgcaatctcaaacatcgaaaccccatctaacttcttctgatcgcagacttcgtctactacgtgaagaaccccattcacagaagatcgctgaggctgctgtaggcctgacgacagacaatggcccgcgccgg

SEQ ID NO: 23554 - DNA, 539 bp, Emericella nidulans
tcctctgtgtgcacggtggcctttccccccttatcgatacagtcgacaaaatccgccttattgaccgcaaacaagaagttccccacgaaggcgccatgtgtgacctcctctggtccgacccagacgagattgatggctggggccttagtccccgcggcgcaggctttctcttcggcgccgacatcgtcaagcagttcaactacaagaacgacctgtctctcattgcgcgcgctcaccagctcgtcatggaggggtagaaggagatgttcgatgctgggatcgtcactgtttggtacgcactgaactagtgctatggttgcgggaatgctgatgctatcctggaattaggcgaagatacgagcagcggtggcacagtcacaaggagcaatggcgaccaaggtcggagtaatggcatcttgtccagtggtgtcgataagcaggccctgcgtagccctggacgaagatatagggtctttgaagccgctgcgcaggatacaaggggtatgcctgcgaagaagccagttgctgattatttcttg

SEQ ID NO: 23555 - DNA, 500 bp, Emericella nidulans
gttcgccgcgatctataacgctaccaaggaggtcttttcttatttgtcttctctcgcgtcaactcggctacccggatatattgctcaagcgcacgccttcaccgccgtctggaacgacgagcatgatcgcatcaagggcgggctggcggatctgtcggatctcaatgcgctttacgacgggttcctggatgcgtatgatggcctaatcatcgaggtcgcgaggcggcggcacgtccggcaccgcgtcgagaagatcctccgtgatgcaaggaataaattagatgccctgtatgaagaggatgttaatgcccgcgaaacgtttcgggtcgaacagggcgactatctaccctctgacatttggccggggttgagtcgggagccgatgcgtgttgagtttcatcgtatttccggtgggccgttgaagggcgtgcttcaatctccggatcaagctcaaagtcctcagcctaatgaaggcgagcaactgggccatcaagacccac

SEQ ID NO: 23556 - DNA, 850 bp, Emericella nidulans
agatcatgattgagatagatagcgccaagcgcagccttgctgatgctgagcgacgtgtccaagagctgagtgcagcacacaagccctcaaagacggatgcgagtcgagtaaaagtccttgaagaacaaattgttggcctcgaagagcaaattgaggatctccgctcacagaaaggtgggatcgaggaagaaatccaggcgcttcagaacaagattatggaggtcggtggtgttagattacggagccagaaagccaaggtcgacggactcaaagagcagattagtcttctctctgaagaaatctccaacgccgaggttgcgagatctaagaacgagaagcttatcaaaaagcacgaaaatgcccgtgcggaagcggagaaggaacttgccaatgtcgctgaggagcttcagaagttgaacgaggatgttgccaaccaagccaacgatgcatctggatggaaggagaaggtggacgaagcacaagacgtgagtacggccaaaccagctgcgggatggaagctaacaactgctaggccttggaatctaagaaagccgagctcaagaccatgaaggcagaattggacgaaaaggtagcagagttaaatgaaactcgggccacggagattgagatgcgcaacaagctcgaggagaaccagaaagctttagcggagaacgaaaagcgtagccgttactggcaggagaagctgagcaagctgactttgcagaatatcagcgatttgggtgaagaccaacagcctagcgaattccagaccttcaccaaggatgagttagctgagatgaacaaggactctttgaaagcaacaatggttgttttgaaaaaaaaacccaaa

SEQ ID NO: 23557 - DNA, 850 bp, Emericella nidulans
atgtctggtccaaaaggggtggtcttgttgctgccgaggcccgcagcccgttaagccggtcccaagagctgtcaacgccatctggtccggcctctcctttttctacatcttaggcgctttgattgtcagcatcactgtatttccgacaaacgggaatcttttcggcggtgacggcgtcaacgccagtccctttgttatcgcgtttcgcgaggccggcctaccgggccttgcccatgccatgaacgccgtcatcttcatctccgtcctctcttgcggcaatgcgcaggcctatggcgccacgcggacccttgtcggcctcgccgagattggtatggcgcccagcttcctccagaaatgtgacaagcagggacgtccttactacgccgtagccctaactttcctcgtcggcggagggctgtgctacctcaacgtcagcaactccggagctaccgtctttggttggttttctagcctcacctctctttgcaccctgtacctgtgggggatgatctttgtatgtcacatccgcttccgcgccgcctggaaggcccagggccgctctgtaagttccctcccctggaagacctggacgtggccctggggatcgatatacggcctcgtttggtgtatcctgctggttatcgttgagttttatctagctgtttggccgcttggtgagccaagctctgccaaaaccttcttcgccaattacgtttccatcgtggcaatcgtggtgctatatatcgcggccaaaatctactatcgggggccgctctgggtcagggcgaaggatatcgatctcgatgctggccgtcggttctatgtcgacgatattgatgcattgaaaagg

SEQ ID NO: 23558 - DNA, 484 bp, Emericella nidulans
cttagaaagtagcagcagcatctcccacagttactctacctggtataggggagattacaccatccctatatatcatggtagttaggagttcttctagatacaaagcttacttttaaagcccacattaatttggtctttagccgcgggaaacgactcgcccagcacctaaagagacttagcaatacccagcatggctgcctagtagcctccatgcaggcagcagttatatagtgtgttcttctaacagctctgtacagggcagaagtcttctatacaggcaaacaacaaaaaggggtagttaactccctgctttctctcttccgcacagcagccctggctattatcccagcctacaagaccacccctactgcagcactcctccgcgaagcagacctaccagacccagaagctctactcaacagcatcctccggagggcagcagtgagatacatgagccctgatactaaacacccaattgcctaaa

SEQ ID NO: 23559 - DNA, 850 bp, Emericella nidulans
tcgctgtgacgggatcactccagctaatgaccaacccaacaaggcgaatgcaaaaaagcaacccagattctcgactccttcatcaacggctcgtggcgtgggagcccagggcgcgagctgcctaagcacgtgttgcgaaatgcaaaggtttttccccacgcaatataactacgcttgtgtttgttttcgattaacgcgttgctcttatgaaaggccctcgcaattttaaccgtcacaaaagcgggctttcttggctccctccgctttggctcaggcatcctcatcgcgcgtcttcctgaaagtaatgatacagaccgtccagatggtggtagtggatggtcgcccccctccgcgataagcaccttcggtcttggcttcggcggacaagtaggcttcgaactcaccgatttcgtcttcgtactcaacgacaccgactcggtaaccacattctccaagctcgggactttgacgatttctggaaacctcagtatcgcctttggcccgcttggcaggaacgcggaaattgccggacgctcagcaccaatggcgggggaaagatgatgagctttgccaaaacaaagggactctttgggggtgttagtatcgagtctggggttctcgttgagaggcgctcggcaaatacgaagttttatggaaagaaggttacggcaggtgtgattttggagggcgatgttgatgtgccgggaggggagcggcaggctgtggaggagctgatgagcgttttgggagagctttttgccgcggatgccaacatcaacggtgagggtgaggatggtgatgggcagcgaggtggagatgtcgtggagggagtacctgaacttgacccttc

SEQ ID NO: 23560 - DNA, 500 bp, Emericella nidulans
tgtatggacctgcccagcactccgccgcaccccaatccggctccacgattttcaagactggccagcctcagcggccagggcgccccatggacatggccgaatatgccagcggcaagattcctttcgcagaaccttcaaacgctggtccgtcacaatcacaccgtactccgggacccagttctagcaaagcctcgaagccgtcgcccaattacccagacggcgagaagatccaacttccggagcttgcgactgatagtgaagaccaggattcagaggctgaaatgctccctgtgcccagctgggcgcacccgaagcagctcgaatcgctccttcgggatcaggagggcatggaggttgactctatcttcggaccgatagcgccgttctcgctggaggaaacattcaaggcggataagagaatcaagaagttccgcgagcggacaagcagcgcaaactgggcaggaccggatggactgacacaagaggaaatccggagggat

SEQ ID NO: 23561 - DNA, 629 bp, Emericella nidulans
tcttttaagcaagcaaagagcaggagaagaagaagtagaagaagaagaagaagaagaagaagaagaagaagaagaagaagaagatgatgatgatgataatgatgcaaatacctcaactctaatcagtctaagcgacttggcaattacataccagcggcagggacgatggaaggaagcagaagagctaaatgtgcaggtctttgagctccgcaagaagtttcttggctcagagcatcctgacacactggttagcatggccatctgtcatcaacgtacgggtggcagtgacgatggaaggaggcagaagagctagaagtgcaggttcttgagatccgcaaacagatgcttggcccagagcatcctgatactctggcaagcatggccaatctagcatgcacgtatgggagccagggacaatggctagaagcagaagagctgcaagtgcgggtccttaagatgcgtaagcaggtgctttgtccgcagcatcctgacactctgcaaagcatgaacaacctagcgcatacctggcactccgaaagaaaagtccacgatgccctagctttgatggaacgttgcgtagaacttcgaatccgagtgctgggctattctcatcccgcttccgaatcctc

SEQ ID NO: 23562 - DNA, 500 bp, Emericella nidulans
cgttgggaaacggattcgcatgcggagtcgacgcctgcgttcctagctttgagggaatacacgaccatcgtgccctccacctccatcaagcgtacttgctctatctcgaaattggactatggagcggtaacagccgcaagattgagatttcagaagcatttcgtcagccgctggttactatggtgcgccggggaggtatgttccatcactctgcctatgcgcctctgccgacgcaactggacgaggctggccacagcttaagcgaggcatggcacgcctgggcgtacaaagaagcatacaagcgactagtataccgtctctttcggctcgaagcccaggtctcgatggccctccttactgcaccgctaatcacttacgcggaaatgtctctgccccttccggctccatcatcgctatgggatgccaggtctgccttgcagtggaaggaagcatgcaatgcattgtcagcgtccgcgtcatcatcggccaatgcccgtatt

SEQ ID NO: 23563 - DNA, 757 bp, Emericella nidulans
actttcaagccgacccttatccttcatggaggcgcaggcgccatccaccgctcgacgctcccaccagagctttgggcgaaatacgaagcgtccctcctcacctacctccgcgccacaaggcacttgttggacaatggtgcccgcgctcttgatgccgccatccatgcggtctcgctcatggaagacgacgagctgttcaactgcggtcgcggtagcgtgttcacaactgcgggaacaatcgaaatggaagcttcagttatggttacgacggtgcgaggcgaggacgatgtgccaaataatagtgacaccatgaaacgcggtgcgggagtcatcggtatcagaaacgtgcggcatcctatacaattagctagggaagttcttacccgcactgggcaggatgagaatggggatccgaagggtggagatggaagccgaaatgcgagcatgcattcgcagctcgcggggccgtatatcgaagaactagctcgtgagtggggtttggagttcaagccggatgaatggttctggaccaaaaagagatgggaggagcaccggagggggttggaaaaaagacagtcgcaggttgaatcggagccagtgcttggatactgctaccctagtcagggcactgttggatgtgtctgccttgatcagtggggtgacctcgctgttgcaacgagtacagggggttgacgaacaagttgcctggtcgggtgggtgatacgcccactctcggagcaggattctgggcggagac

SEQ ID NO: 23564 - DNA, 500 bp, Emericella nidulans
gcattgactgctgtgccaagaaagaatgtgaatacgccaacgacggctacgcaagcacctgtggccggtgctgcttcgggtgctggcgccgcaccggccttgacgcccgagcagagcaaggaggcgctatttgctcgactttcggagctggtgaaggctgcgcccgtcatgctattcatgaaggggacaccgagtgcaccgcagtgtgggttcagtcgacagttggttggtatcctgcgtgaacggagtgtcaaatacgggttcttcaacattcttgccgatgaggatgtgcgacagggtttgaaagagtttgcggactggcctactttcccccagttatgggttaacggggagttagttggtgggctagatattgtatgtacccccttcttcttacgtcccgtattggttcatgctaactgattggcgtttgacacttaatacaggtcaaggaagaactcgagaatgatcccaatttcctggacagcttctccattaac

SEQ ID NO: 23565 - DNA, 662 bp, Emericella nidulans
tcaacggtcccgtctatcagaactccttagtaaatatttctaggtatatatcgtattacattccattctttacttggatctctcagtatcgactatcgtaccttcgcggcgatatctgtgctgccctgacagtcgcttcaatttacattccgatgggtctttcattatcaaacatcgcccacgcacctccaatcaatggcctctattcattcgtacttcagccgttcatatacgcaatactagggagttcccccttgctcgtcgttggcccagaagcagctgggtctttgttgactggagccatcgtcaaagaaagcgtcaatcagggatcgtcaggagaggatgacgaagccgcaaatgccatagttgtgggggtagctactgcgctggcagggcttatgatcttagtcgctggaatattccgactgggtttcctagacaacgttctcagccggccgtttctgcgaggctttatcacggccatcggcttcgttattttcgtggatcagttcatacctgagcttggtttggcggctgaagccaaggctgctggtgttacacatggcagcaccgtggacaagctgctattcataatcagaaatattactcactcacatagcttgacggcggccgttgcattcacgagtttcgccataatcatg

SEQ ID NO: 23566 - DNA, 677 bp, Emericella nidulans
tgatcgaagacgacatctaccgcacttcgtcacagtatcgtctgtggtccttcaccgaagagactttacgatctgtgcgacaaaatacaaacagactggctagcgaccgggtacgagttgcgctgcgacgagcgcgcgaagctcgacaatccgccaactcatctgctgcaggcaccccaaacgcgaatgccagcgatgtagacagcaagaccagcgaggagaaggatatagagtgtttgacaccagaggaggagcaggacttggtgcgatattactgcgagcagattatccagttaggggagagctacaaacccccattgccgacgatagttagagtatgagtcttcgcaaaaccccgtttctcataactttggaatatagtccctttgctaatgcgttcatgctaaccaggccactgcaatccaatacctccgccgcttctacctcaccaactcgcctatgacctaccatcccaagaccatcatgccatgcgccctcttcatcgccaccaagacggacaactactacatgtccctgcgccatttcgccgacggcttcccggcgacacaacagcagaagatatcatcgcgccagagttcctcgttatgcagagtctccgcttcaccttcgacgtccggcaccctttccgcggcttagagggtggcatcatggaactc

SEQ ID NO: 23567 - DNA, 753 bp, Emericella nidulans
ctcacgtccacgtcagcgtcgaatgcgtccgggtcgggcttctcgagcgctaacgattctgtctgacaacgagcgatgctcgccattaacaactgagcgggttataatatcagaagactatcgacgcagccgtcgttatcgtcatcatcaccgtcatcgtcatcaagatcatgccgtccttctacaaaaagagctccccgtctttgggttcagctccagaccaagttcgagcgccaaccaccgagtctaagctctccttacggtcacttttcagtcgcaaggcgcgcgctccagcggtcaccgaaccacttgccgttaaggctcatagccgtcaggcaccagcaccggcactggtaccggaaccagaccgggagcaggagcccgattcaatttcatctgcccttcccccaacttcaagcttaccctcgccttcatcacttaggccagagctggattcagagatagagtcgccaaaggaatcacaaacccaagcccagactacctgggaggacatcgacccgccgacgactctcctttctctcgcagcggatcactcaatctcatcggcgtccatcgcatcccgctaccagcaatccacccaaactgagcctacagttccagttccaacctcagacccaaccactaccatgctcacctcttcaagcccatcaccctccactccctccctcctcccctcctacagcgacgtaagcggcgccgtcatcgtcgacgcctacgggacgccgcgcttcc

SEQ ID NO: 23568 - DNA, 850 bp, Emericella nidulans
ccacattcatcaagcttccggagcccccaggggctacccggagattcatcttgtgcaccgtggagcggatgataccagcggagcggacttccttgcccaacatacaaactctatcacctggcactccgatgtgacctttaaggtgcagccccccggaactaccttcctctaccttctcgacggccctacgactggcggagacactctcttcgcggacatggcacaggcatacaagcgtctctcgcctgaatttcgcaagcgtctgcacggtctaaagaccgtgcactccggcgttgagcaagttaacaacagtctgaacaagggcggcattgcccgccgtgaccctattatgacggaacaccctattgtgcggactcacccggtgactggggagaaggctctcttcgtgaacgctcaatgtatgaccattctgcccattaataaaatttcccgtttacagctcaatttgttttcaaggactaacaatgcacccgactagtcacgcgttacatcgtcggctacaagaaggaagaatccgatttcctcctcaagttcctctacgaccatatcgccctatcgcaggatattcaaacccgcgtgagatggcgccctggcacagtggtcgtctgggatgtatgtttcaaatctatgccaactccacccccgacactttgtacgctaacctaactactctagaatcgtgttgcctgccacagtgcgcttttcgactgggctgacggccagagacgccacttggcaaggatcacgcctcaagcagagcggccttacgagacgccgttcgaaggttaatggttccgttcactagttcggtgcaaaaatcatgacgatg

SEQ ID NO: 23569 - DNA, 500 bp, Emericella nidulans
aggtcatcctaatcactggaggtctgtccttatttaccatacccggagggcttcataccttattggtgttattgacgacgcctaggaacggccggtctcggagcagcagcggccatccatctcgccaagcactctccttcgcatatttacatcagcggccgcaatgcgaagagtgccgacgccgtgatccagcagacacagaaatcaggaaccaaggtatcgtttctggcgtgtgatctggcctcccttgactcgattaagaaggcggccgacaccatcctggcccaggaatcccgcctcgatctgctcatgtgcaatgccggtatcatggcggtgccgccgggcaagaccagcgacggctacgaggtccaattcggaacgaaccatctcggccacgctttgttgatccagaagtgtctgccgctcctgcagcagacggccgcactccccggagccgatgtgcgcgtcgtcatccttacctcgctggggttccgcatgca

SEQ ID NO: 23570 - DNA, 522 bp, Emericella nidulans
ggttcccgaagtcacatttcatgcattggctggaagtcatgagcctttctgggtgggtttcagagacatttcacaacatcacagctttgcaggcactggggaaggtcagttacgttgaatataaatctgaagatttagtactaatgtgcagatgcagcccccttggttagctgacttctacatgatgcaaagcgattcatcctgaaaggtcgtcagatagcagatgaagcgccactacagattttactgtgtggggctggtatttacaccaagaacggcaataatccgtgaaatgttccagtcagagcttcctgactggatctgcctttacccacaggttcctgagaactggaatgcagaattgcaggcgctcaagggacatactgacccaattgtgtccgtggccttctcacctgatggccggctgttggcatctggctcgtttgaccacacagtacgcatttgggacccgccaccggcgctctgaaggaagtcgtcagctctgagggacctgctatcaga

SEQ ID NO: 23571 - DNA, 458 bp, Emericella nidulans
taagccctgcgcgaagtgccgcggcgtaagcatctaatcccctgtgggtttgggggccatatatttcacaccgacagagttcaaatcacatattgactaccacataagtcacctaaattaatatggacttgacaaagattgttgtcatcaccggtaagtatcgagccctctccatgagagccatagcgagacctgaccgtcacaggcgccaacacgggcatcggcttcgagaccgtgaagtcgctgctgcgctcgaatcagcgatattatatcttcctaggcgggcgcaatctagagaaagcccaggcggcttccaagcaacttttttccgaatccgcccatcacgtactggagccgttccaggtagatgtcgagagcgatgagtcaatcgaggccgcgttcaagcatatcgcgtccaagtacaaccgaatagactgcctgataaataacgccggtgt

SEQ ID NO: 23572 - DNA, 756 bp, Emericella nidulans
cgctatttccagtggatgggtactcttgcagacgaaacttacgacaatatactactcgagaacaaacccgaagaccttggagttatcggtgaggcaatagctattctgggaccgcatctagtggatatcctcaagggcaagacgtctgcgttgtcattattgacgaaaaacaacttgttgtcccgtgtctatactgaatggtgctcatcaagactatacccgcagatgagcgcgtattgtcacgagctaggtcgtttcaacccgcaactgaaggttcttgagattggcgccggtactggttcagccacactgccgattctgaaggccctgaacgattgcagcggccgatttatccagcgttatgatttcacagatatctcacccggcttcttcgagcctgctaaggagcggctaggtgatcttgccaacgtggtcgagtttcgcgtcttggatgcggggcgcaatgcccaagagcagggatttgaggaaggcgcatacgacctcatcgtcgcatgcaacgtcatccacgcgacgccgcggattgatgagaccctccgcaacatcagacccttgttgaagcccggaggcaagtttatgctaatggagatctctcgttataccctttattttaacatagtttttggcctatttgaaggttggtggcttggctatgatgaaggtcgcacgcgctccccccttcttacggactctgagtggtgtcagcgattggaaaaggctggctttgctcatattgaa

SEQ ID NO: 23573 - DNA, 850 bp, Emericella nidulans
aaaagctatccctctttcgttcgctctcttgagcgtgcacgtcaacagctgtcaaggctgggctgtacgtgggatcttctcagcgaactctgccggcccaaagcggactctcgggtgaacgagccagctttctctcagccaatgtgcacggctatccaactggccctggtcgaccttctgaacgaatttggggtatcgccttcggctgtactaggccattctagcggcgaaatcggggcagcatatgctgcaggcgctctttccttcagagatgccataagtgtatcatactaccgtgggaagctggccagtgaactccttgctgagaaccaatccccaggagctatgatagccgttggtgcaccgcccgatattgccgagcagcatatcaacaagctaggtactgatgttggacgcatgcgcattgcttgcttcaatagcccatccagtgtcactgtatcaggtgacgtagcggctattgaccgtataaaggaggttttggatacggaagggcttttcaatcgcaagctgattacccacggtgctgcctatcactctcaccaaatgaaattaatagaggacaagtacattgcagcgctcaagggtctgaaagccaagcccgttagttcatctatccgcatgtttagttccgtcacaagcaaggagctggacgaatcgactgttcttgacggtggatactgggcgcagaacctggtcagtccagtcctcttctcgcaggcactacgaaccatgtgtgagcaggactacaatggtttgcccattgacacgctcatcgaggttggcccacattctcaactcagtggtccagtgaaccagatcctcaagacaa

SEQ ID NO: 23574 - DNA, 850 bp, Emericella nidulans
ttctctgcagtactcgccagattttctttcctacgatagcgcgaacaggttgctcggctgtgtccggcagggaatccaatccctcgttactaacggagatacccatgtcggacagctaaacaccgtaacgccgaaggatatcctgcaagtccgtgcttggaatgacaagattcctgccgttgatggatattgtcttatccatgacttattcaatgaacagcggctactccgacctaacgcacaagccgtctgtgcctgggatggcgacttaacataccaacaactggacgagatgagcaatgcgctggctcaccacctagtgaccttgggaattggtcccgaagtaatggtagcgctgtgtctggataaatctaaattcgccatcattgctcagctcagtgtcctcaaggcagctggcgtcgttgtgtcaatcaatccaaagcacccaacgcagcgcctggaactcgtcctcaaagatataaacgcaaaggtgatgctgacgtcgcatcagtattcatctcagttcaggaaccttgtcccgcatattctgcacatggacgagacactattttctgccctttcttcacaaccccagcctccaagtacgaatgttacccccaacaacgctgccttcattatctacacaagtggcagtaccggtatgccaaaaggtgtcattttaacccatctttctctatgttccagcttccgcgctcatggcaagatttacgaaatgtctcccagtactcgttcactccaattcgctgcctacacgttcgatgccagcattagtgatatctggggcactatgtcgcatggggggtgcgtctgtgtcatatcagaagaggag

SEQ ID NO: 23575 - DNA, 850 bp, Emericella nidulans
cgctaatagacgcagctgttcatgaccgctactctgggagcagtagacaaggtcgccatcagcacggcggccatctacggcctaaaggacgaccttcatctcgtcggccagcagtactcgtgggctggttcgatcttgtcaattggagtgcgtcttaccctaggctgtccattcgctctacttttacagctggctaagaagagtaggcgattgtcggaatgtggccgtcaacgtatcttgtccaccgattaccgtcggcaaagtacctctctgcatgctcggccggatggtctatcctggcccttctcatgccggtctctcggaactggagtgggctgatggctctgcgattctttatgggtacttctctttcactcctccaagccacggagatgagatgacgagacgtcagatgctaatagtatccactgacaaggctgcctcgaagcgatcatcgtcccctccatctcgctcatcattgccggattctacacgaaatctgagcaaccaccgcgtaatgccctagtttttgcggctgcgagctcgatcatcaacggtttcctctcatgggctgttggacacattccgtccagtgcaccgctggcaatctggcaatacctgttcctaattaccggctccgtgtcaacgctctggtcaatcttcgtattcgtcttcctgcccgactcccccatgaacgcctttttcttgaacgagagagagcggtatcaccgccgtccagcgcctggcagagaacaagaccggcattaccaataggcaatggaaatgggatcaagcactcgaagtcattatcgaccccaagacatggatccttttttctttcaatatttcc

SEQ ID NO: 23576 - DNA, 704 bp, Emericella nidulans
ggtttgggtatgtcacatctagtctttgccggatcaacgattggagcttggttttatacttttacactccaggccccgatgtccccaggtcgatatagatgtccgccatctcctccgcatccccgaagatttcgtgatcgaacaggaagctgaggatgaattcgagtgcttgactgtcgacatcacttgccctcctggtgcggcaagcaaggacggtctcccggtcctggtttggattcatggtatgcgggatacgatgcattgggtgtgatggactgggctgagagtagtgtttaggcggttcacagattatgacgttttgctctgcggcgtccaagatctgcggtacgttgattctaaagccctatgtgcatcgaattttgaatccggttttctaatcaagtatgcttttagaccccacgaggctcgtcgctgactcgattaaatctggccagccgttcatctttgtctccatcaactaccggctcaacattttcagcttcggagacggcggggagacgaacttggctatcaaggatcagcgattgggacttgactgggtgcggaggaacattgctggttttggcggcaacgcggtacgggttctcggtctgctccatgataagcggctaactgaagatcgataggacaacattactttggctggagagagcgccggcgctatctacgtccatgcgcacctc

SEQ ID NO: 23577 - DNA, 500 bp, Emericella nidulans
tgaacctacttcaacgacagaattggaatgcccagtgtctttggtccttacacatactttcagcacgtccttcacgtggcggacgacggcctcgcgtagaccgatactccccgtccccggaccggtatggtttactcagatgtattggactatagacgacgctaaacggatgccagtagtgcgtctgcgggtaccagacttcgcattgagaatctccactacgatatcacagagaccgaccttgaagtacgttattccataaagttctgatatcttattctctaacaaccttcctttgataggagttattctcccgcattgggccaatctcaaatgtatcccttgtctatgatcgagctggacgctccgaaggcgtcgcctacgttacgtacagccgttacaacgatgcgaaaaccgcgatagctgaattcgacggcgccaacgccaaggggcaaccgatccgcatttctatcacttcctccggcccgcgacgagaccgg

SEQ ID NO: 23578 - DNA, 500 bp, Emericella nidulans
tttgtttggctcaaacctgctgttttctgtcatcaattcactagttcatgaatcaaccatgagaaatcaagacatgaatggctccgccaacggcgaggctcacctccgtagccctacgtccatggtcccagagcccatagcgatcgtggggatggggatgaggctaccagggaagattcactcggcggaagccctgtgggagctgctgatcagcaagcgagaaacaagcgggcctgttcctagcagcaggtacaatgccggagggttctactcggcgtccaagaggcccggcagcgttgcagtccagcgcggtcattttctggacgagtcagacgcgctggatcgcctggacacctctttctttagcatgggaaaggctgaggtggaaaagctggatccccagcagcgcatgctgctcgaggtagtatgggagtgcatggaaaatggaggccagcgcgactgggaagactctaatacgggggtctttgtcggtacctggg

SEQ ID NO: 23579 - DNA, 597 bp, Emericella nidulans
ggcctagagcagtacctcatcgtcggtaggacgctaagggaagtggtcagatcctacgccgagctggtcggcttccctctggccgtccctcgctgggcctacggttacatctccggtggttaccggtacagcgcgatggacgaacctccagcccaccaggccctgatggagttcgcagacaagctcaaggagcacgatatcccctgctccgcacatcagatgagttcaggctactcgattgctgagcacgagccgaaagtccgcaccgtatttacctggaacaggtaccgattcccagatccagagagatggattgcagagtaccactcgcgcggtatccgtctcctcactaacatcaagccgttcacgctcgcctcgcacccggacttccagaaactcattgacggaaacgggttcttcaaggatccagaaacgggagagcctggttacatgcgcctgtggagtgccggaggtggaacaggaggcgatggatgccacgtcgattttacctccgctgtcgccttcaaatggtggtataacggtgtccagtttctgaaacggtctggcattgacggcatgtggaacgataacaacgag

SEQ ID NO: 23580 - DNA, 850 bp, Emericella nidulans
cctcagccacgagcagcaacaggacctcaagtcccagaatatgagatccaaattgctatctctgcacctaatccactacctcatcaataaccacgtcattatcttcaccacaccccttctcacactaaaaaacagctcaggtaatttggaagcgatgaccttccttcaagcgattagacctcatctctgtttaagtctcagtcgaaacggcgccagctcagtaccgaaagtcttcgaggtctgctgcgaaatattttggctcatgttaaaacacatgagagtcatgatgaaggttcgtggtttctgaaattgactttggtatgtctaaccagtagcagaaagagttagaggtcttcatgaaggaaatatatctagccatactcgagaagcgaaatgcaccggcctttcaaaagcaatatttcatggagatattagagcgactggcagacgagcctcgtgcattagtcgagatgtatctcaactacgactgtgatcgcactgccctggagaatattttccaaaagtttgttctccatttcagtctgagaagacgaagaatctgacaaatttcgcagtatcattgaacagttatcacgatacgctagtatcccgacagtcgtgaaccctctccaacaacaacaataccacgaattgcatgtgaaggcttccagtgttgggaacgaatggcaccagcgtggcacccttcccccaaatctgacgagcgccagtataggaaacaaccagcaaccacctacgcatagtgtgccctcagaatacatcttaaaacatcaagctgtcgagtgccttgttgcgattctggaatccttggacaactgggcctcacaacgta

SEQ ID NO: 23581 - DNA, 500 bp, Emericella nidulans
ccagtaacgacaacctcccgcttccaccatactggctcaagtggcttctttctatttggttgatccctctaataggactgtgattcaacattcttctgattgcggcccttgaaacagccagctttgacgtctagaggcgataagcgccagaaaaaatgacacaaacttcagctgcacccacaacgaccccctcattctacgagatactcaacctcccattcccaagcaccggcctctcaaaacagcagctgaaaattgcgtatcacaaagcgctgctgaaacaccacccggacaaagccgtcgctgttgcaaaagaaaacctcccctcatccaatcacggccccgcgcaaccaccttcaaaccaaaagattacaatcgacgccattacaaccgcatataagaccctctctgatcctgtccagcgtgccgaatacgatcgcgtactccgactagatagaaaccgggtgaatggggcgggagataagaacgggaacggtacg

SEQ ID NO: 23582 - DNA, 850 bp, Emericella nidulans
aacggaatgaagcttggtgtggagaacggcattatcaaccggacacgaatagaggaatcgctacggagagtgttggccatgaaggggagatgcacttcctgggaacaggctcttaaccctggggggctgccttcgctcactcaaatgcagccatcgcatacgagtctctcaacaagagcttacagcaattccatctcagtcgtgcgcgataacagaaacctgttaccgctgaccaatgtcttatcttccaacgaggagctgcttcttctgacaccgttagtaaatcctttgcctgcctccgccgtatctcgctcagtgactgagcatctggagctgtcggcggatgcggtagcctgggataggacggcttccgtactcagtggcgagagcgtctttaaggaattggggagatcgctttcgcgtcaccgaaacggtcgtgttctgcatacgtcctacacctcgaatggcgtccgtccgatccacgagagtttaattgaccgtgccagtgccgtgattgtcatcaccgcagatgctgtcaggaacatttaccagcaaggttttacaaaacatgtgtctatgatttgtaagtcgcagttgactccatcaggcgaaccactcgataagccattagttgttgttgccgttagttcaccttatgatttcgccatggatgcaagcattgggacttacctttgcacatacgatttcacggacacggccctggaaaccttggtcaaggttctttatggagagctgacgcctacggggtcattgccgggttctttcaatcgcagtcagaagctccaccaggcaagacaacattggcttgtggaaaactggaacgaggaga

SEQ ID NO: 23583 - DNA, 665 bp, Emericella nidulans
ttccctccactggacaccatgcccctcaaactccgcccttgactgcacgacactcacagtgccacttgaatacgctgacccgcacaacggtcagctcgcaacgatccccctcgcccggtacgctgctagagtgcccgccactcagcgaaaaggcacccttctcacgaaccccggcggtcccgggtctccggagtcgatttcctctcgaacggggccgggtctgggatttcaaatattacgggtggatactacgatatcgtgtcctgggatcctgcggcgtcggcgccgcgaagcctctacttgcctgctgggaaacggcgggcaggcacgcagacgcgtcggccagtgtcactgcagcagcggaaatcgagtacagtcttttcacgaacaagagctatactgcgccgggtggggaatacgagacggcaattcgggagtatgatgcgtcgctagcaaagatcgcagccgattgcgcgaagtacgattcctctgctctgtatacttcaagcgcggcgtacgtagtgcgcgatatggtcgccataattgatgcattagacgggacgaacgcttcagtgaactactggggattttcttacgggaccatctacggcgctgagtttatacagacctttccccagcgtgtaggacggttcgtcttcgacggg

SEQ ID NO: 23584 - DNA, 500 bp, Emericella nidulans
ctaagggcggccagccgggatttaaagcccaggagcatgcctccctcgcagaaaaaagaaatcttgccctcccactctctcgctctcctccaatctgcggtcttccatcggttttgcttttatcatcatcgccacatcatggacaatctcacgtttctcctcgccgcggccaccggcaataccaccgccatcgagcaaggctacctcagcaacaaatccatcctgacagccaccaatcctgacggcagaactgctctccacctcgccgcccttcatggccacatcgccgtgatccaacagctcatcacctacggtgcaaccctctccgcaaaggactcaaacggccaaacatgcctgcatctcgcagcacaagggtctgcgcccgccgctgatatcgtcgggctcctcctccaaaacgacagtggctcagcatggtccattcgcgacaaaaacggcaagactgccgttttctacgcctaccacaacgccaatgacagggt

SEQ ID NO: 23585 - DNA, 460 bp, Emericella nidulans
taaagtgactggaggctgttccgggcattcagtgtaagtggatcttctgaagtgctagttgaagacgaagaactagttataggtggcttcgtcggtggtccatcctgcagtggccagtcacgtcgcgcgtctgcaaagggagatgaattagaagggcatccttaccgtgcagtcgcaatcatcggggcccaaggtcagcccaaggcccaaggttgccccaaggtccagctctccagctcccaaggacgccccaacgccgacggttgccccaaggtccaagtcgccaatgcccacatttgccccgacaccgacagaagcatcaagacccaaaggagttacgaggctctcagaagtctcggaggtcagagaagcctccgagcctgtctcagcggcggtggttgcccccggggcagcaacgctcgaggcgccataatcaagctgcgcccaaacagaaccggcg

SEQ ID NO: 23586 - DNA, 850 bp, Emericella nidulans
tagggccttctctggcatcttcattcgggccaagttccgatgccttcacacacaggacttcgcaacttgcagctgaccctcgaggtgcgcaccgcctcaggggcacgagtcgataaatgtgtattcccagcctcatcatcgaccgccagtaccgcatggagaacgaccattactgagaaaggcaagccatggaaccaaacgattcgcctcaatatccccacagatcaaattcctggttcccatatgattatgagtattgcggatgcccctgaattcccatttgcgctggcatggatgcccctgtgggacaaccaggcttttatacgagatggaccccattctctactgctacatgcatacgacaagcacacatcaaacgttgagaatggcaaaggcgcttatttgtcccttccttggagctcactgggcaaaaacgagtctacaaaggatgaggcgctcacggggcctctggctacccttcgcattgacactcatttgtgcagcactgagtactcgcaagatcaagtgcttttgagcttacttaactggaaagaacggtcagtggatgagattatggatactttgaaaagaattcgttttgtgcccgaaatcgagatcgtcaaacaattaagctctgtcttcgatgcgttgttttcaatccttgtggagcacgccgggaacgaagactatgaggatcttatttttaataacctggttacggtccttggaattgtgcacgacagacgattcaaccttggcccagtggttgaccactacacggagaaccagttcaatttccccttcgcaacaccatgccttattcgaagctacctccgtcttttacaggcaa

SEQ ID NO: 23587 - DNA, 500 bp, Emericella nidulans
ctaattaggaaagcaaagagctttctcggccgtggctcaagtgttgtcgcgtctcgacgcgtgttgcaacaatcggtttcctgtactcaccttatttcatccacttcatttgacagtatccataactttgaaaaccagaaagcatgtcctcgcgagaccagaaagtcccagaaatccccactgagccgccagacgagacggatctgtacctgatcttgggcgtcaaagaagatgccaccccggagcagatcaagtcagcttacaggaagctggctctaagacatcaccctggtaagtcatgtcgtgcgttctgagtttaatatgaagctttttatgtttgacagctaactagactaaagataaggctccagcagatgctagggaggaggccaaccaacagttccagaagatcgccttcgcctacgcgatattgtctgatccgcgtaaacgacagcggttcgattcgacaggtagcactgctgaagcggtcgaattggatg

SEQ ID NO: 23588 - DNA, 473 bp, Emericella nidulans
aacatgagcaagtcgcggccgcataatacgactcactatagggatcgtgcgaagtattggtcgctggagcaacggcatcccgacagaaaacagtctttataatgcttatctcgatattatcgctaaaagcgaacactttgtctacctggagcaacaattcttcatcagctccacgggcgacgaggtcgaggcagtctggaaccgggtggcagaagcattcgttgagcgcattttgcgcgccgcgcgcgaaaggaagcggtacaaggttattgttgtcttgcctgcattgcctgcattcccaggagacatccacgcccagttcgcaggggagctgccacgggcgctcatgaagctgcagtttgattccatcaaccgaagcggcctcagtctcttggaaagagtcaaaaaggcaggggtgaatcctgatgattatatccgggtcttcaatttgaggagctatgatcgcctgcggc

SEQ ID NO: 23589 - DNA, 595 bp, Emericella nidulans
aaaatcctgcccaagaaaggcgagcgtaacatccttgttacgagcgctttaccctatgtcaataacgtacctcacttgggaaatattgttggttctgtgctaagagccgatgtttttgccaggtgagtcatcctctctcatttaggattatggcgagcaacttcaagctaattcaagatctttaggtatcacaaggcctgtggacatcctacgctgtatatctgcggaaccgacgagtatggcaccgccacggagacgaaggctttggaggagaaagtgacgccggaggagctgtgcgcgaagtacaacaaaatccatcaagaagtgtacgaatggtttgaaatcgggttcgaccacttcggacgcactccgacgcaaaaacacactgagatctctcaggccatttttaagcggctctatgacaatgggtaccttgcggaaaaaaccgctgaacagccgtactgcgagacccatgggtctttcttggccgatcgctacgtcgagggagaatgtccacgatgccattacgatgatgctcggggagaccaatgcgataagtgtggccacctcctcgatccgttcgacctcatcaacc

SEQ ID NO: 23590 - DNA, 535 bp, Emericella nidulans
agcttatgtggagatggcatccgactttcgagacgcttaccgtaaacagatcccagtgactcttcaagagagagcaaagcgtgaaggcgggtatactatctatctatctggtggtgggtttcgcggttggggatacctcctgctctacgtagaccaacaagatgagaatcactatccaaaatctcagatcaatggctatgccgttgtagagatagattcgagagcacggatctggaaaaggttgctcgcaaagcacattctatctttcgtgtttctgacaggcgacgagagaacaggtcccagcagtcgcgtttctagtgaaagcactgacggaagctatccctcacggtatcagagaagctcgcttctgccagggaggcgtacgcgaagggatacttttccgagaattgttgccagcgtacgtgctcaggatccactcgaagttgcaactttacgattcgccgacgaatcagtcaccgatctacaggctctggtttacaattgtatgcctaggtcggcggggaacgactggata

SEQ ID NO: 23591 - DNA, 831 bp, Emericella nidulans
gaccgtcaaggtattcaagaagcccgtcgtgggtgttttgagtactggcgacgagctcgtagacacgacgatccccggtctcttcagggagggcagattcgagactcaaatcggccctcgatcctatcttgcctgaaatcatgggggattcccgccgttgatctaggtattgcccgcgatacgcctgcgggcgagctggaacaaagcctacgggatgctcttcgtggagtcggaaagtccaacaccagcgtcgatgtaatcatcactacaggcggtgtttctatgggggagctcgatctgctaaagcccaccattgaacgctctctcggcgggactatccacttcggtcgtgtctccatgaaaccaggaaagccgaccacttttgccaccgttccgttcaagccaacgtcctctgcagcaggccaacaagaacgcagctctcgactgatcttctctctccctggcaacccagcctcagcactggtcactttgaatctctttgtcctcccctcattacacaagctcatcggcctcggccagaagcaggctgcattaggcatcgcgccggcgcttggactaccccttgtagcagtaacattgtcacatgctttcccgcttgaccctaaacgcacggagtaccatcgggctattgttacagcgtctcccaaagatggacggctctatgccacaagtacaggggcagagggcgtaggacagcgtagttcccgggtcggtagtctagccagtgctaattctctcctggtgcttcagcctgggaagggctcgattgcgcaagggagtctggtcgaggcactgatgatggggcctatt

SEQ ID NO: 23592 - DNA, 500 bp, Emericella nidulans
aggcagatacagtaagatgagaaagagaaagctgttggtagggatgtacttcatgaataataaacagagcaattcatccaggtgtaataaaatctacttacagagtaatatggtccttccctgtacgtacctaaggtttacctgccactgccctttttgaggcctttattgattgacttcttcaccatcgcaggagctttcccagtcattgtctgttctcatctaggacaacgcgtcttatcatcatattggtagaattagttaaatgtgtggtgagaattatatcagactagtttaccaactactatattctcctgatctaaacccagtcaagggttttcacagagatgaaggcttctgctagatgtaaatggccaacctatccgcatgagcccaaacgcggcttcggcgctgccttgaatgatatgttgatactgttggtaaccaaaagcacagtacaggagaagcttcagcatgcaaacataactaaagaaacactc

SEQ ID NO: 23593 - DNA, 850 bp, Emericella nidulans
tctcttcaggcagccaaatgcaccgccttggggaactcctcgcagtcagcgtagcgggtctactcgtgaacctcgtcggaattatggcctttgatcacgggcatgcgcatggacatgaccatgggcacgggcacgggcactcgcactcgcactcccacggaaacgagaacatgcacgggatctttcttcacattctagcagatacgctcgggtcggtagctgtggtgatctcaactatccttgttcattactctggctgggcaggatacgaccctatcgcgtcttgcatgattgcgattctgatttttgcttcgaccgtccccctggtcagtagcacagcgaaaagcctgttgctcactctgccagctgatgtggagtacaatgtccgtgaaaccctcgccggcgttagtactcttcggggtgttgtcggctacaccgttcccaagttttggttggatgatacggagaagtcctctggacatagtcatggtcatgaccatggccatagccacagtcacagtcacttaagtcacagccatggctgtgaccatgaccacggccacaataattccatccatagccatgaccatcatagtcatggacgtgaccacggccacgcacatgaaaacgacactccaccagtcctaggcgtaatccacgtcacagcctcccgcgctgcggacttagaagacgtccgaaaaagaaccgtcgacttcctcagagaaaagggaatagatatacttgttcaagttgaccgagaaggcgaagggcgctgctggtgcggtggaggtggaagtggaagtggtagtggtagtggaagaattggtggcgggaacaacctcaaggcttc

SEQ ID NO: 23594 - DNA, 850 bp, Emericella nidulans
tcgatccccagcgcttcaagttggtattggtggatgaggcgcatcatattgttgccccaacttaccgcacggttttgggatactttggactcaaagaaaaatcgcctgattctccgattctagttggcgtttctgcgacgttttcgcgatttgacgggctcaagctgggtgctgccattgatcagattgtgtaccataaagactatacggacatgatcaatgatgcatggcttgccaacgccgtgtttactaccgtccaatcccatgcaaatctgtcacgcgtcaggaaggacaaatttggagattttgctcttggctcactatccaaagctgtcaatacccatcaaactaatgacatcactgtccgcgcatggctggccaatgcagcggagaggaagtctacactggtattttgcgttgacgtcgagcatactaaggcgttgaccgagacgtttcggcaatatggcattgatgctcggtacattacgggtactaccccaaagacaacgagagatgaacagttagacaagttcagagccagggaatttcctgttctgcttaattgcgggctgtttacggaaggaactgatatgcccaacattgactgtgtcctacttgctcgacctactcgatctcgcaaccttctaatccagatgataggacgcggcttgcgcttataccccggcaagaaagactgccatatcattgatatggtagccaccctaaatactggcgtcatctctactcccacgctctttgggctacatccagacgaggtccttgaaaaagtaacagccaaagatttgaaggagaggaaggctacggggcaaaatgttagagatccagagga

SEQ ID NO: 23595 - DNA, 850 bp, Emericella nidulans
tgaaagtatccaggtccacgagaaacgtcaacaagattctaagccgattttctatgctggacgagacggctgcgagaccaatgccgcaaatctggactgtctgtcatcaagcccaagcttctgttagaaggaccctacggacacgctgcgccactgcacacattcgacaccgtagtcatggtcgtgggtggaacgggtattgctgcggccgtgccgtatatcattgaccatatttcgcgctctggcggtgcagcaaagacgcgcacaacccggcttcggcttatctggtcggccaagacgaacgagatgtttgagcgggtcttttgtgacgagttggctggaaccctcgggcatgaggatatcatgaccagtttctactgcactagctccaagactttcgttctcatcctcgccctcatcttcggctgcggtgctggaactgtcattggcaacgaaggagaaggaggcgggcgtctctgtgctccctacgggtgaaaagtccccgtcgagcagcaacctttccggttccagcaatgacaatgctatcctcgatgctcgagccccatcgagggaccctcctctccccgaggcggcggatggagaagccagcgccaacacctccaagctcgcaactgcgagaaacccggttgagtttctctcgggtcggcccaacgtccgcgctatcgtgacgtccgaggcacagaaggcgaaagccaactcttcgcgtctggcggtcttgacctgtggaccggcacaaatggcggatgagtgccggcagacggtgtatgaggtcatgagaaggaagaatgggttaagggacattgagtattttgaggaggcatttgggtgg

SEQ ID NO: 23596 - DNA, 808 bp, Emericella nidulans
cccgttagatgcccccgcgtcaccgaaacctaaaaatgccggagaagaagatgaggagatggggggtacagggaacgagaccaagaaggagaccgagggcggcgaggaattagcagatgttgccgcacaatcaggcgctgaaggcggctctgaagagcagactgcgcaggctaaatcgtcgctcgaggcttcggcacgctcccacctggtctctcaaacacacgcaatcatcctccctagctattcgacatggttcgatatgcacacaatccatcccattgagaagaaagcacttgccgagttcttcaacggcaggaaccgcagcaagacgcctgctgtctataaagattacagagatttcatgatcaacacctaccggctaaacccgattgagtaccttactgtcacagcatgccgccgtaaccttgcaggcgacgtttgtgctattatgcgagtgcattctttccttgagcagtggggcctgatcaattaccaggtgagtgatttgttatctcatggctagtggctattactgatgtgctattcaggtggatccccaaacgcgaccttcgaacatcggtcccccgttcacaggccatttccgcgtgattgccgatacaccacgaggcctccagcccttccagcgtgggccgcaatctattttgtcaagccgggctagccatatagcagccccatgagcggccggcgtctgctacccccacaaataaggctgatctgaacctagagattcgccgcaatatttatgatgacaaagtaaaggaggtaacgcctgctgtcgaggccaaag

SEQ ID NO: 23597 - DNA, 500 bp, Emericella nidulans
ttgctttgctgcttaatgttgctctcatcatcaaaatacagaagaaaacaaaccgaactaacacttagctcttgctaccttttacagttggcttactcataggtcctcgtggaaacactttgaagaagatggagaccgagtccggtgcaaaaatcgctatccgtggcaaaggctccgtcaaggaaggaaaaggccgatctgacgctgctcacgctagcaaccaggaagaagaccttcattgtttgattatggcagacaccgaagagaaggttaacaaagcaaagaagctggtgcacaatgttatcgaaacggtaagcatcctcatgctatgctggatgatatatctaaccataagcaggctgcctctatccctgaaggacaaaacgagctcaagaggaaccaacttcgcgagctggctgcgcttaacggtacacttcgtgacgatgagaaccaggcttgccagaactgtgagcacaaccttcattcagtctaaatatgta

SEQ ID NO: 23598 - DNA, 850 bp, Emericella nidulans
ctcctccagcgggggcgaaagcggatcctcagtgatggagaagctgctcttcctactgttcataccgatagtgccagcgacagtgccacgtcgtcgtagagagtcgcgagatgccagccgagaaaggttcggcgtgcgagtacgtttcctccacgtccgccatagccgtccaagcgtcggattcaatgccagcttttcaacatcgagctcttccactaccagccggttcatgctccccctctctttaccgacgccatcctcattttcatcacattcaaccacgagcttaggtgagagtcgagaccttgctgtttcgcctgcaattacaagcgcctgttcaccaatgtgctcgatgatggaggtcagaaagatggcggcagcaggagtgatgttgccgatatgattcgtgaatcgtcgaggcgcaccttcctcatcgacaagaccttcctgggcgatatactcctcttcgtcgtcttcctccaagtcgccaaggcgtgtgtacaccatacaacgcaggcgcgtcaacttccaggtgcgaatgaggtcgaattcaccctctgggctttggccgccacggaactcagactgttcgtcctcctcatctccaagatactcgctcaactcctcgtcggctacggacacaaccaggttcgctagtcggggtttcagtacatcagcaacagcaggtcgaatcgcggccaactgtgtcgactttgcagctgctagaatgttgagaaccaggtggtcaaggaacccattgagagcggataacgcctcaggagtaacgagggcgccagaatcatcattttcgtcagctacaaaatccgcagcgttgaactcctgatctgac

SEQ ID NO: 23599 - DNA, 579 bp, Emericella nidulans
cgagccccaggctaacgacatcctccataatgtctgtgagaaccgcctgtatttgcatcgaggggatcagccttcttctgttggttctattagacggctgcatcgttgcctccccaatcgaacgcagctttgctcaactgtcactacgtgcgacgactccagctatccagaaaaccccacagtctgtcaaacgaagccttggcttccagtcatcaaatgttagcaacgaggtgactccgattatggtggtgcaacaatgtctcgggacgcttgcctacctgtcccaatacaatcctcatatatcctggttcttcttgactgagcacgacccagcttctgcactaaagttgaaggcataccgcaaaggcaagagtaaggaaaacaaagccaacaagtttgcactcaacgctttgtttcgctgcttgaccgcaaactcatactggagagtcccacctgcatggaacaactctcgagcttactggcaagcattactcagcctcttactttactccttcgtcgcgaaaaggaaaagcaggcggaggaagagaagggcaaggagcctgaacaaggtgagggtga

SEQ ID NO: 23600 - DNA, 500 bp, Emericella nidulans
tgttgcaaattctaacacagagtacagttgtgtggattgagtatataggtcgtatcctgtccagtttagaaagcccgaattggtcgatgggcccgtacttccaacaaacctttttgctcttattggcccagcactattcgcagcctcaatctacatgatgctgggacgcattgtgatattagtagatgccgaacacctttgcatcattagaagaaagtggcttacaaagtcctttgggtgtggtgatgtgttgtctttcacagttcaggctgctggtgagcaaaacgcctctagtggtgaaagatgagagatacctgacatcagacagataggtggcggtgtgacaaccagcggtactttcgcagcaatccacaacagtgagaaaattgtgattgctggtcttgtcatacagatccttttcttcgggttatttattgtcacctgtacagtcttctacaggcgtctgactaagaatcccacagagcaagcaatgtctaaag

SEQ ID NO: 23601 - DNA, 500 bp, Emericella nidulans
cttgctacccagtggttggaagctccctcaatcctaaccaggccatggaagccccttcaagtctgctggatcccaggccattctgggattgctgggaacgagctggcagacaagcttgcgaacgttgggtcctctatatacagccctaacatccccccatcccctgcatacctacaacgggagacaaaacagtggcttcgtacagggacatatacagcatatgctagtaaggcaccccaagcctacaagaccctggatatcagattccatacaaaggaaagccgcacccgcgagcacaagcttccccgttgggtacttggccgactcgtcgccgcccgtacaggccacggagactttacggcataccaccaacgcttcaaccactcagactacctggagagctgctcttgtggtaggaccaagaccccagtgcacttcttcttctgcccatacaccagaaagcgctggaaagatagatggagatgtataagggacggccc

SEQ ID NO: 23602 - DNA, 546 bp, Emericella nidulans
gatacagacatggtgcgaatcttcatcaccggctcaagcgatggtatagggcaggcagctgccaaggtcctttccgagcagggccactcagtcgtccttcatgcgcgcaacgccgaccgcgccgcctcagcccaagaggccgttccaggcgccgaggccgtcctggtgggcgatttgagctccattgctgaaacaaaagccctagcagaggaagcaaacaagttgccaccgttcgatacggtcatccacaacgcggggatcggatacggggcgacggccagccaggagatcaccgcagataagatctcggctgtctttgctgtcaacacgcttgcaccatatatcctgacctgcttaatgcataaaccaaaagcaaggcttctttatatgagctcggatagtcattacggcggtgacgagagtctacggaacatcacgcagtcccattcgtacgggaataccaaactgcacgatgtaatgctagcaaatgcattctctcgacgatggggcaacgcgatccaagtagttagcatgcatcctggctgg

SEQ ID NO: 23603 - DNA, 794 bp, Emericella nidulans
gaagggacaattccccgaattctggtctatctcaatcaagccccacggagcaggaactcgcatcctgagcctcgatggaggaggagtccgcggaattgtcgagctgacaatcctccagcaaatcgagaaggcccttgggcagggactctatattcaagatttcttcgatctaatcgtcggaacaagcacaggcggaataattgcgctgggcttgggagcccacggcctgtccgtgcaagacagcatctacaactttcggcggctatgcaagaaagccttcacgaggcgtaaaggagctgggatcccagtgttagagcggattataactgcctcaaaccacagtaaattcgaaacaaaacctctggaagatgctctaagaagcatctatggcgatacaaaactcttcggtggctcgcgtggcaacatggaggagccgttatgcttgcgaagactcacgaaagtggctgtcaccactacgaccacagcggcctctgtggttgtgcttgccaactacaacaggcatggctcgacagaaaatcagtcatataggttctatcgctctgagaagcccgagagcgagatgaaggtctgggaatccgctcgagcgacgtccgccgccccgaggatattcaagccatttttccataatgcttccggtcaagagtaccaggacggcgcaatctaccataataatcccatcgatgtggcttatagggaacagaagttgatctggccagatatggctgacagccatcctgacattgtcctctctattggcaccggttacaacccga

SEQ ID NO: 23604 - DNA, 850 bp, Emericella nidulans
tataaaccggcatctctgatctcgcagctcggacccctcatcgccagagtatggaaagtatctctcagcaaaagaggttcatgacctgttcgccccggccgaggagaccgtcgaacgagtacgcgcatggctggaatcagagggcatttccgacactcgtatctcgcagtctgcgaacaaacagtggttgcgattcgatgcaaccgcgcaggaactagagcggcttttgcagactgaatattatctgtactcacacgcagaaacccgtcggtctcacatcgcttgccgggagtatgtcctagtgttgtctaccaagcctgtcccctgcttactctaacagataccacgtcccggaagctctccagaaacatatcgactatattacgccaggcgttaaattcctggagatcgccggacctttacccattttacccacggagcgaagcttgactaggcgtgataccgcagatgcttcgtcccccataattgatgggacgaatctcacactatcgcaagtaacgaatgatgcgcttggtttttgcgaccaaatcataacgccagcctgcatccgtggtatgccgtggtatgccctgtcttcttgtagcaagtcccagctaacaggacagctctgtacaacatttccgagggcaccagcgcaattcctggcaacgagctcgggatttatgcgtttggtgacatgtatagccaaggtgacctcgacctgttattttcagcatttgccaggtacgtctctagtcctacagtcacacagcagcactgattttggaagccacatcccaaacggcactcagccgattgtgcatagtatcaatggaggcacggctcccac

SEQ ID NO: 23605 - DNA, 785 bp, Emericella nidulans
cgtggacattgacaagaccaccattatcaagcctgaccataagcaccaccaccgccgcggcgacaacttccccgaagtgcctcataagcccaccgtgatcggcggcgcttctggtgatgacatcggcaacgtcgcagacattccaacagtaaacgagttcgcgtcgtctgtaacagagtcgtacgtcgacaaccactcggtcgacgtcgacaagaacaccattgtcaagccgcactgggcgtcgccagcactccgtcatcgacgggcccagtggcgacgatgtcggcaacgccgccttcctcgccgacgtgaacaagatctcctcttccttcacaggaaagtataaggacgaccactccgttgacgtcgacaagacgacgattgtcaagccaggcagccaccacggctaccagggccaggagaaaggtgaggagaaagggcacgagaaagggcacgagaaaggcgacgagtatgaccaggaaaaaggccaggagaaaggcgacgagtatgaccaggagaaaggccaggagaaaggcgacgagtatgatcaggagaaaggccagaagaaaggcgacgagtatggacaggagaaaggcgaggggactggccaggagtatggcagaggcttccaccacccgcccaacaagcgcgaggcccgcggacacccctccactgccattggaggccccagcggcaatgacatcggtaacgtcgtcgacatccccactgtgaacagtttcacgaccaagttcaacggtcattacaccgacgaccactctgtcgac

SEQ ID NO: 23606 - DNA, 850 bp, Emericella nidulans
agattctattcccgccaacgattttgattccccgaagcagaagaacaccttgagaaccaacgcaagcaaagcatctggaatggtgaacgctccggctggccacgcagctgctccttcagcccttggacatgccgttgagaaagctaaacgcgctgttgagcctcttgatattgagccttatgatctcagctcttctcaggaacttgatcggctacaggctaccatggctccttggtttgagggcagagagactgaaatgaacttccagaggcgtgaagagtacaccatcttgatccgccgaatcacccatggaaatgcgccacagagatggcctacggcatacttgggtttcgtcaagatgacgctcccttttgtctttattacggccaattccgttcggacttctctgcaaaccgctgggcttcgggcagttcagtccctcgcccgggtcaacaaagaacgactcgacagctctattcacatcgtcttgcagaacgtcttgaaactctgcgcaaacgcgaagggcattacttcccaaaacagcaacttgaccatcgtcgctatactcgagaatgtgacctgcaatcaacgcgtattaaaccagattacgggcgccgcaaaggataagaatcagaacatgcggatcttctccgcgggttggcttgaaatcatcattgatggccaaaatcgccacaagactcacgccgaaggcgtgaacagcatcgccgcgtgcatccaggagggcgttgaggatgcgaaagaagacattcggagggcttaccgtcataccttcttccggttttccagcgtctggccggcgcgagctaaaaagtgagtcgttcgctcaaac

SEQ ID NO: 23607 - DNA, 767 bp, Emericella nidulans
aaaaaagaagaaataactctgcagacaatcaaaaatgcgattcccaaacactgcttcaaccgctctctcctcatttcctctgcatacgtcgtccgcgatctcctctacgcctccgtcctcttctactttgccctgcacattgacaccctcttttcctcgcaactcctccgcatcctcgcctggaccgcctacggtttcatgcaaggctgcgtcggcaccggaatctggatcctcgcacacgaatgcggccatggagctttctccccataccaaacgtggaacgatgtcgtcggatggacattgcactccctcctgatggtcccgtatttcagctggaagatcacgcacgctcgacaccaccggtacacaaacaacacagagcgagatacagcatttgtcccctggacagagaaggaatacgacactcgcccgcgctacttccctgcctggtttgagatgtttgaggacacgcccgtctacaaccttattagcctactggcgcatcagatcgcaggatggcagatgtatctctgtttttacgttagcgccggcgcaaagagtaagcctgtaccgcagggaaaacagagcgggtggtttggaggccagcagagcgccagccactttgatccgggcagttcgctgtggacggaaaaccagcggcatctgattgcgatttcggacctggggttgctgcttgttacgacggcaaattggtaccttgcgcagcaagtgggcgtgctccgcatggtgctgatctaagtagtgcc

SEQ ID NO: 23608 - DNA, 850 bp, Emericella nidulans
atggatgaacggtctatgtggtatcttggcggatgagatgggtcttgggaagacggtacaggccatatccttgattgccttcttcaaagaacataatgtctctggaccgttccttatatcggctccgctgagtacggtaagcaattgggtggatgagttcgctaggtggacacctggaatcaaaacagtgctgtaccacggcaccagagacgaacgggcacagctcaggaagaagttcatgaacctcagagaccagaaaagtccggatttccccgtcgtttgtacgtcgtacgagatctgcatgaatgaccgcaagttcctcgcccaatatcagtggcgatatatcattgtggttagtctgcattatgtttctagatttggcttgctaacggttgcacaggacgaaggacaccgcttgaagaatatgaattgccggctcatcaaggaactgctgtcctacaattcggccaacaggctcctcatcaccgggactcctctgcagaacaacattaccgaactatggtcactcctgcatttcctgcttcctgaaatcttcaacgatctcaacagcttccagaattggttcgatttctcgtccgtattggacaacaatggtcagacagatatgatcgagcgtcggaagcggactctagtctcgactatgcactcgattttaaagccatttttactccggcgtgttaagacagatgtcgagtctgctctaccgaagaaacgagagtacatcctctatgcaccgttgactctcgagcagaaggacttataccgagagatcctcaacggcacgggtcgtcagtaccttgaggagaaggcaacagagcgtttgatggcg

SEQ ID NO: 23609 - DNA, 850 bp, Emericella nidulans
gagaacactttaccgcaatcggctcccctaaccaaggatctgggtcgtaatccagctgccgcggccatttctcgtcaagagcaataccacacccgagatctggagagcgtgcagagacgtcaggtgccgatgcgggggctgactccggaggaattggaaaaactgcagaacccacgcgtaaagcgcctggtcaacgtgacccagctatgtaagcctttgcgaaatgctttttctgtagggaccaactaacagctacagatttcctggactattatttcgacctgttgagctacgttcacaaccggcaaacccgctattcccagttttgcgccgcaaatcctgagcctcccgcgacaccgatcgaagagtatgagcctgctttatccaaatatttgggtcgggaacgggcccacctccgcaagcgtcgtaccagacttaggcagggcgatttccagattttgactcaggttggtcagggtgggtacggacaggtgtacttggcatcaaagaaggacaccaaagaagtatgcgctttgaaggtcatgagcaaaaaacttctatttaaactggatgagattcggcatatccttaccgagcgcgacatcttgacagcagcgaagagcgaatggctagtgaagcttctttatgcattccaggatgaaacacagatttattttgcaatggagttcgtgccaggaggcgatttccgcaccctgctcaacaacacgggcgtgctgcacaaccggcacgctcgcttctatattgccgagatgttttgctgcatcgatgccttgcatgctctgggctatatccatcgtgatttgaaaccggaagactgccttaataaaca

SEQ ID NO: 23610 - DNA, 850 bp, Emericella nidulans
atgtttctagtcatgctggatgaaattgaccatcttctcacatcggatgctggcatcctccagtctttatttgagtggtcactacaaggggaatcgaagttgttgttgattggaatcgctaacgcacttgatctaaccgatcgatccctgcctcaactgaaggcaaagaacttgaagccccttctgctcccatttctgccatacaatgccagccagattgcaggcgtggttatcgaacgccttcgctcattgctcccagaaggccaggtggaggatccgaatttcattccttttgtccaacctgcagcaatccagttatgtgcaaaaaaggtgcgttcgcaaaccggagatctacgaaaggctttcgagctcatcaaacgagcaatcgacgtgattgagcaggaaacgatacagaaacatgacatgcagaatctaaacagcccttccaaaactattttggtcgaaaataacaatctttcatcgtcacctaagcattcattggcgaaggggacttcggcacttccttacacgattatgacagcaccccgagctagcattgcacatgtcgcaaaaatcacatcatcagtttttggacagggaacaactcagaggctacagtgcctcaaccttcaacaaaaagcggcaatttgtgcgctggtcgcactggaccgaaaacgacgcgaaaacgacattccgcaaactccatccaagtccaagaacttggctccaacagttaaacaaatatttgatgcatattgtaccctttgcaggacggacaatattctgcacccattgactgcaactgagtttaaagatgttcttggtagcttggagactttaggccttgtcg

SEQ ID NO: 23611 - DNA, 458 bp, Emericella nidulans
gtatgttggatctctagtgtatgatctaaagcaattgacactctccgtcagacaacaatcccatgcttcgggatggtatcactggtgattggtatgtcgtgttctcatccggaattcgtctgctaggcagggagctttactaactcctaatccaggattggcaccttcctcggtcataaaggagcggtctggcaagctcgcctctcaaccgacgcgaacatagccgcaactgcagcagcagacttttctgcgtgagtcgcactatgtggctatatccatattgcaatcgcctaacttctcccgctcaactgcagtaaagtctgggacactcacacgggccaatgccttcacaccctccaacattcccacatagtccgagcggtcgcattcccccttcaaccttctcctcaagttctcgcaaccggcggttacgagaagaaactccgaatcttcgacct

SEQ ID NO: 23612 - DNA, 574 bp, Emericella nidulans
  unsure (1)..(574): unsure at all n locations
aagttttcaaccttctctggagtctttgtgccgaccagcctgaatgtactgagtattctcatgtttcttcgctttgggttcattctcggacaggcaggtctattgggaatgctaggtagcctgttgccctataccttctagatcaggactattgctgattatattattcaggactacttgcgatatcgtacacaatcaacctagtcaccacaatgtctttgtcggctattgcaacaaatggcacggtcaaaggaggaggagcatactatctgatctcgcgctcgttaggaccagagtttggtggctctatcggcatagtattctatctgggctcagttctgaatacaggaatgaatgctgtgggactaatcgactgctttaaacaaaactttggggctgagactggcacctggtacaacttcctccgggaggggttttggtggcagtatttatggngaaccattattttgcttggttgcaccgggatttgcttagccggtagtgctctctttgctcgagcaagcaatgtttgcttgtcattcttctaatcgcgacactcagtataccattatct

SEQ ID NO: 23613 - DNA, 500 bp, Emericella nidulans
ggctctgcagggaggagaggtataaataagagccagtgcgcgctcaatatgggggcacacgcgcggattgactaggccctgaggcagcaatggccggaactctcctctcatggactcccctggctctagctctgatggctagagctctcagtcaattgcctttgaccgactgtcctggatacagggtgataaacgtcgaagaacgacctcgcggactgacagcggatctgacactcgctggtacgccgtgcaacgtgtatggagttgatatcgagaacctgaggctcgaaaccgactatgatacgagtgagtcgactacctgtttgagttctgacgctgacggtggatagatcaaagacttcatgtcaaaatctacgatgcggatgagaacgtctaccaagtgcccgactctgtcttccctaggcccgttgtcaatgaccaagcctgtgctgatgaaaacacccggagctgaggttttcgtacgcagaagatcctttctc

SEQ ID NO: 23614 - DNA, 595 bp, Emericella nidulans
gctgcgattctggatctcgagatccagttgtatgagcaggcgcccgagctgctagaaataggggccagtattgcgctcagtccgaatgtgcgaataaccctaactgatatttccatgtctgccgaactgaccaggctatatcgaatagggcatgcgtactctagagaaactaggcgtccacgatgccctctcagacgattttgtcttcaaaggaccaagtggaattctccaaatcgttcggtgcgccttcaaccctacatattgcctcggtctcagccttcagccaaagaagagggcgaaggaagaggcgtggaaccaatagccagtcccaagccactggaaaatgaaccaggtcgtctcagtcgacacccaccgcaacgttcctaacgacccgcttccatcgaggccacctgcacgccgcactgctggagcatgtgccccgacagtatatccacctaagcaagaagctcttacatgcagatgcagatgggaacggcgtggtattgcactttgaagatggaactactgtgcacggagacatcctcgttggcgctgatggcttaaatcggtttgttgcctgtttcttaataggtct

SEQ ID NO: 23615 - DNA, 500 bp, Emericella nidulans
ccgcgctgttgaagtcgcgcctggcgcctgcgcctgaaatgaagtatgaggagcccaaatacgaggagccactataccaggagccagtcaagccagaacaaccctcagagcccgtagagcacccgaaactggatccggcggctggaattgaggtgaaaaccaaatttcctgtggcgcgcatcaagcgcattatgcaggcggatgaggatgtaggcaaggttgcgcaagtgacacctattgctgtctgtacgtatcagcccgttcaaccctgtaatctgggagatcatgctaacatgttgaatacagccaaagcacttgaacttttcatgatttcactggttacgaaagccgctaaagaagccaaagatcggaactcgaaacgtgtaaccgcgtcgcatcttaagcaagccgttgcgaaggatgaagtattagatttcctggcagatattattgctaaggttccagatcaaccgacggggcgcaagcatgaagatgacggc

SEQ ID NO: 23616 - DNA, 608 bp, Emericella nidulans
ttaagcaaaagcctctctacctccgaccaacattcccaacacctgcggataatcgttcgcgacggcgcctccaccgtcttcgtaagaaggaatacttcctccgtcaccagaaaccgaaaccgctctctgcgcgcgagaaacgggagttcggggtgtacagactgccgaaggaggagtgcaagtatgagatcttccaagggttgaatcgaatgtgggtgcagtatatgttggaggtactggatctgggccccgggggtggtgggtggagggtacagcagcagcagcagcagcagaagcaggaaaagggagaaaagcagcaggagaatcaacagaaaaatcgaaagctggtgtcggcgcttgcgcacgggagcaaattggtcagcgcggatttccacggtgcagaagtggaggtggttaggagtcggtgttcggggagggttgggttgaaagggattgtggttagggatacaaaatttacgtttgtgatcgttacgcagaaggatgaggttaagagtgagtacctcgccgtcatttacaggtggtctaaatttgaaactaacaagctgcaactagatatacctaaggaacagactgtttttcgtttttgt

SEQ ID NO: 23617 - DNA, 850 bp, Emericella nidulans
gcactgaaattgctcgtcagccaccaccccatcctccgagcgaactttacaacacttgaaaataatgacttgggactcacatacaatgatacgatcgacgccttcgcccatcgaagaatcgagattccgacgatctcaacgcaagcagagcagggatacctgaccgtgggctgggaagcggacgggaagagagaggatggactcttcgccgccacggtatttgtgcaaaaagaccgtgaccacggcacgtgcctcgcccgctatcttcggctcgactttcaccgggccatcatcgatgtctcgtcttgggatatccttcagcgcgatttggaccatgcagtactcggaaagccgcttgctcgcgggtatccagagacttcgtttgactcctgggcttccactcacaacctaagcgactttacattcagacgctcgacgccggtcgaaagcacaaacgatgagcggaacacaaatgaaagacaacacaatagacaccaaaatgatggcaaaatcgagttggctgatgtggttatcctggaaacagatgcagctggtctggcgaagctggaggatgaaagcatccactctgtgcttcgcactcagccagaggattttatcgttgccgcactacatatcgcacttaaaggagtaaccaggtcggaggagacgttgagctttggtataatctcaaacggcaggcacagtggcggtcctaagctgtcagctacagtagggtgcttcgacaatatcatccgccggtccgtggaaagagcagaagaggacggtggacttggattcctacggaaagtcaaggatacacggatgggcttctttaatgtctctcgcatat

SEQ ID NO: 23618 - DNA, 500 bp, Emericella nidulans
acgccggcggagactacatcatgaacccaagcaccagctcagacgtcactaagttttcacaatgcacaatcggcaacgtctgctccgcgcttggccgcaacacggtcaattcggaatgtctttcagacaacaagggcattgttaccatcaccggtgcgcaatgcggcaacggcattgttgaagaaggcgaagactgcgactgcggcggctcggaaggctgcggcgacaacaagtgctgcgacgcaagcacctgcaaattcaccgaaggttccgtctgcgacgacgcaaacgacggctgctgcacctcgtgccaattctcctctgcaaacaccgtctgccgcgccagcactggcgtatgcgatattgaggaaaaatgcaccggcaactcttcaacttgcccaacagatacttacaaagccgacggcgactcttgcggcaacggactccaatgcgctagtggccaatgtaccagccgcgacgagcaatgtcgaaccatgctc

SEQ ID NO: 23619 - DNA, 850 bp, Emericella nidulans
tacatgatcggcctggctatgcgtacagcaatcgatctcgggctacaccgcaaagccaacgaactaaacctcgacccaatcacagcacaaatgcggcgacgtctgttttggacagtatactacctagaacgagttgtatcagtgtctcttggacggccattcagtattgcagacaggcatatcgacctccctctcccggtcgacgtcgatgacgacgtccgtgatccagcactgcttccgccggaatcccccccagttacttcgcccgagggtaataccaatggtaacagcacgagcagccgtatcacatcactcaccttctccatatacctgatcacactccgccgcatcgactcgcgcattcaacataagatctaccgcgctgacaggccgcttcatttactccgctccaaaatggaccgcctttttctcgagctggaagaatggaaagtatcggcccttcaacgattcacggggtcagaccttgactaccccatgctccactacaaccgtgccctacggctcctcatccaacctttcctcccttcacttcctctcaccgatccctactatcacatatgcctgcgcgcagcaggcgatatctgccagacacacaaacggcttcaccaaactttggagtatggccactccttcctcgctgttcaaacagtcttcatttccgggataacccttctctacgcgctctggacacatagcgaccaggtctggtccgtccggatgagcaatgacatccgcgcttgctccaccgttctcttcgtcatgggcgagcgcgccgtttgggtgaagaaataccgcgacgcctttgaacttctcgtcaacgccgccatgg

SEQ ID NO: 23620 - DNA, 803 bp, Emericella nidulans
gctggccggttacagtctcacctggcacgaagaattcaaccagccgtccagcggtgcagtcgaacagcccagtgctgcaaaatggctctatgctacagggcagagctacccggccagctgggaagatcatggactccatatcgagtcatatacagcggatactgagaatatccatcttacaaagcaggggacgctatccatcaccccgcggaagaaaagcaataggctctggacaagcgcgcgtatcgagacagtccgcaaagacttcaaagccgagcgcggcgggaaactattcatcgacgcgcggatcaagacggggtgtgccgctgctggtgtctcggtttcgacactagaaaaggcatcgcctgcggatgcagtcaccttccgcttctgggctctcggcacagagatccgcgggaatgatcgggatacgtgcctggactggccggctgtgtcggagtgggatatcgctgagattgtccaaggcgaggagaaagtccatcaggcactgcattgcggaaccgcacccggcgggccctgtaatgagtttgcgggcttgacgagcagtgctttatggagagactgtaactggcactaccttggcttcgaggtcgaccgcacgcagttcagcagcgacggggcggagatgtgggaagacaatacactgaactggtatctggacggggtgaagacgttttcgctaagcgggcgggatgtcggcgaccgcgatgtctgggagaagatcgcgtaccaggggcatttcctgctgctagatgttgctgttggtcgggatgtgactgagg

SEQ ID NO: 23621 - DNA, 850 bp, Emericella nidulans
tttagatatgcttttttcgagatgtacacacgcagttaacagaactggcagtctgtaatgctattcctaagtgaccgcgacacaatcgaaaatatcagggatcgtttgtcagctcagggcaagcgcgtcattctcctagctcagaactcaattccgagcgcctggactaatcaggctttggatgagagagtcgttcttcaggcgaccacggacagtcttacctttgtcgggcttgtcgctctcgtcgaccctccggtacggttttgattaaaacctagtcaatcagtaactgctaatcctttacagcgagacaaaatcactaccgtgattgacacactacgcaaggcgaaaattcgcattatgatggtatactggtgatagcaaataggctgtagatactggctaatcctcttaggtcaccggagactacagctcactgctcaggcaatcgcagtgcagtgcggtatcatcagaacaccccccgagttgatccatgacatcaaattgctggatcactataactcggccgctgtacgcacatttgacgccattgtggtgagcgggcctgggttggctgttctcctaaacgaggactgggataagctgtgcacttatgacgaaattgtctccgcccgaacgagccctgaacagaagctttgcattgtaaaagagttccaggctagaaacaacaatgttgcaatgacgggggatggcgtcaatgatgccccttctctggaagcagccgacgtgggagttgctcttgggagtgggtctgattttgccattgaggccgccgatattggtcttttcgactccttcgctgccattggcgaaggtgtaaaatatggaa

SEQ ID NO: 23622 - DNA, 850 bp, Emericella nidulans
tgtcttgcttctgcttggcctcaacacagggggtaaccagttaccatggacccaccctctgattctcactacgcttccactttcagcagtcgtactcggggcattcgtctatatcgaagcgaacattgcgtcggagccagtcattcccgttcgtttgcttctcaacaggaccgtattatcggggtgcctgaccaactggtttactacgatgaatgtgtatgcgctgcttttctacctaccgatactattccaggttcaaggcctttcagccaccgcttcaggagcgagattgattccccaagctatcggtacctcctttgggtccttggggtccggtgccctgatgcgttacagtggccgctataagatgtatagtcacatcactatgctgcttctagtggtctcgtcggctttgatctgtaccttgaaacctgataccccgacggccctccctctgctttacttcttactggggggagtagcttacggcagcatgctcactatcactctggtcgccctcatttctgccgtcgaccatgagcaccacgctgttatcacgtcggcctcttatgccttccgcagtactggcagttcgatcggtatcaccatcggctcctctgtttttcagaatattcttaggagtggtctctggtcgcgctttggagatcgtgaaaacgcacgggaggtgatctcgcgcctccttgacagcctccaggagatccaaaaagtgccggcggactggttacctggcgtcatggatgcctacatggtttctctgagggctactttcattacgctgcttgggcttgctgttctgggagcattggtcagttttggaatgcgagagcat

SEQ ID NO: 23623 - DNA, 850 bp, Emericella nidulans
ccgcgccacggacccctcccggcgcacgcacataatggcaatactaaacctaaccccggactctttctctgacgggggcaaacacctagcggagcctgaagcaataacctccacagtccgctcctttatccaatctggcgccacaattatcgatattggcggcgagagcacacggccgggttcaacacccgtcggggtagacgaagaactccgccgcattattccagccatccggcatatccgcacgtccatacctgaagcaaagaatatagccattagcgtcgacacataccgcgcccgcgtcgcagccgaagccctcgccgccggagcagacatcatcaatgacgtctccgctggtctcctagaccccgaaatgcttcccactgttgcacagtccggcaaatccattatcctaatgcacatgcgaggctccccttctacaatgacaaaactaacctcgtacgccaacggcgtaatatccgatgtgggcacggaacttcttgcgcgtgtggcagccgctgaagcaacgggtatcaggcggtggcggatcatactcgatcccgggctagggttcgcgaagaaccaggctgaggatctgactatcctgaaggattttgcggcgctccggaaaacacaggggctggaatactttccttggttgatggggccgagtcgcaagaggttcattgggaggctgacgggagtggagaaggcgagtgagcgcggttggggcacagcggcgacagttacggccagtgtggctgggggtgcggacattgtaagggtccatgacgttaaagaaatgtggcaggtcacgagggttgcggatgcaatatataggggagttcag

SEQ ID NO: 23624 - DNA, 500 bp, Emericella nidulans
agcgcgcccagggagttttgggcccatgaggggcccctggtttgaccgggcagaaaacggtccctcatggagacggcaccattatctcgtagcgcatccaaaaaatatctgccggaaccgcacaatcgcgcacataaagctaagtgtaccactgggcacacaagcaggtcagcaattggctctagccggcttgggagagcgggaatcagggcggattcaggtctataacctgacattcgagactgacctgggctgggacacgatggaaccgatcgcatacctggcatctctatcgacgcttatgggaggttatctttggttcctctaccacaaccgcgaaatttcgtatcgttcagcgctggattttacgatcaatgcgcgtcagaaaaagctgtatcagctaaaaggggtggatctacaactctgggagaatctgatttatgaggggaatgcgctgcggcgggaaatcaagaccatttccgcagactatgacacagaat

SEQ ID NO: 23625 - DNA, 500 bp, Emericella nidulans
gcctcgcgtgacaatgtcctcaccgtctttgcccagttggctgcagttcgcatgaatgcccagcgtgcgatgatctccttgtttgacagaaagcagcagtatgtcattgcagaggccacaccgagatgttgtctgcgcggcgagagtggccgcgatcaggctgatggcttatggctgggtgtgggccagtttccgcggcacgatccccatgtgctaccacgcgatgaagtcgtttattgacgatgagagtgatttttttgtcgttaatgatctcaccaaggacgaacggttctgcgaccactcgtgcgtaacgggtcatccgcacaataggttctatgtttccgtgcccatccagtcgccggacgactatatcatcggagctgtggcggttctggacaataagccgcgtgatggtatttctggtgagcaggagcgtttcctctcggagctcgcggctacagtgatggatcatctactttcacaacgcgcaatgcgggaag

SEQ ID NO: 23626 - DNA, 850 bp, Emericella nidulans
tcaatgacacgagaacgaaactgatacaactaggtaccttgggaactgccatcgcggctggtatcctcgatccaaaagacaagagtggcatcaacatcaagcgcttaatagctacagtgggcacagagccctccaaacagcgtgtcagagatgcgctgtccacgcacgagtcgcgattgacagtccttacgcatgggggcaatgttcgcgccatccaagaagcagacgtcgtcttacttgctgtgaagcccttcaagcgagcagaggtcttctgtgctccagggttcaaggaggccatccgcaacaagctcgttctcagcattatggcagggattacgacaaaggagttcgctcgtcttgcgattggtgacggcgttgttccaggcattctgcaagttgtccgtgcgatgcccaacatggctgccaaaatccgtgaggccatgacgctctacacccccagccccggcacgagcccagagaatctaagtatcgcgtcctggatcttcggccaggttggcgaatctcatcagatccccgaggcttccttcgacatctgcgccgttctagtgggatgtgcgggctctttgctgcttcttgcagtcgatggtctcctagatgccgctgttgcagaaggtgtcaggagatccgaggtgcagaacctggtcgttaacagcgctatcggtatgctgaagcttgttcctgctggagatcaccccagcgtcttgagagagaaaattgcttctcccggtggatgctcgatccaggctctgttggaattggagaggctgggggcacgctcggcctttacgagggctattatggcggccgcggagaagtccaaggccatgtc

SEQ ID NO: 23627 - DNA, 850 bp, Emericella nidulans
aagtacggcgcggagagggtgatgtatcatcgtgcagatctgcatgaggctttgagagagcgggcaacatcgcatgcattccctggcaaagcggccacagtccgtacttcaagcaaggttgtcaactgtaattgtgaagaaggaactgtagcgctagccagcggagaggtcatctctgcggatctgatcgttggcgcagatggcatcaaaagcgttgttcgcgaatctgtccttggaaagaaagtcattgcgcggcctaccggactctctgcgtacagaatgatgatctcagcagaatccctgcaacgggaggccgactttgctaaagtcattgatccacggaggggatgcacaacaatggtgatcggccgggacaggcgcttgatcatgggtcctgcaaggtgcggcacgatctatggcattgttgctcttgtgccagatgagaatatgaatgaagatccaacaagcacgagctggacaacaaagggagatcacgataagatgatgcagtccttcgcagattttccagactgggcacaaaagcctctcctccttgcaaaatcatccagcctagggctctggcagctccgagacctggatcctttgcatacgtggtatcgtggcagagcgatcttgatcggcgacgcagcccatgcgatgttacctactcaaggccaaggagccagtcaagcgattgaggatgctgaagcgcttggagcgttctttgaggagtttgagaaatcagcctcagccaacgctatggatgctatagccagggtgaacgaagctatattcagatgcaggtatgatcggacgacgacaattcagttgtatagccgccacgctgcta

SEQ ID NO: 23628 - DNA, 721 bp, Emericella nidulans
atggctacaaaagcagcttacaaaagggtgagttgaggaggaatttctttccagcttgattaacactaaccttagatagctcactcgcgagtatcaaaacatccagaaaaatcccccacccttcattatcgctcacccgtcagagtccaacatacttgagtaagtcaaacccacaggcgaagagaagcgaactaacggactatgatattaggtggcattatatcctcactgggccccctgggaccccatacgagaatggacaatactggggcacattgatgttcccccccgaatatccatttgcccctcctgctatccgcatgcacactccaagcggtcgattccagccgtcctcccgactctgtctaagcatcagcgattttcacccaaagtcattcaatccggcgtgggaagtttctacaatcctcatcggcctactttcctttatgactagcgaggaaatgactactgggagcgtgagcgcaacggaagcggaaaggcgtgttctcgctgcgcgctctagatggtggaactctacgggcggaggcacccacatcagcgcgactcccggggtgacgcccacctcgagaggtatcaacaatgtcaaagccggtgacggaggcttaaagtttcgcactgaatggccagaattggaccaagagaactggaagtggctgagagagaaccgtattgacactgcaaccgggcaattaagacccga

SEQ ID NO: 23629 - DNA, 772 bp, Emericella nidulans
tgcacagcactccagtccacctccctcaagacctccgtccacgacccttcgtccccagcctaccacatctcgcaagcaaactactggcgcgttgacaacacccaattctatccctcctgcattgttcagccacgctcagcgtccgacctttccacagccctctccgtactagtctcaaccaacgacaatacgccgcaatgccggtttgccatccgcgccggcgggcatagcacgctcgtcggtgggacgaatgtcgagtatggggtcaccatcgatctctcggtgctgaataggacggtctacgatgaagagaagcgcattgcgtcgattgagccgggagccaggtggaaggacgtttatggggctcttgcgaagtacggggtcggtgttgccggtggacggggagggacggtaggcgtaggcgggtttctggtgggtggagggaattcgcatcatagcgcactgtttggattcgcttgtgattctgtggtcaatttcgaggtaggcatttccatcatcctcaaactctcgaggcttcacacggatccagagctacactgaccacggccaatgcggacggatgtagatcgtcctccccaacggcaccctcaccaccgcaaacagcacccataacccgcgcctttttagagctctcaaaggcggctccggcaatttcggaatagtaacgcgcttcgacatggagacgttcccgcagccgcgcaactccatatggggtgggatcgtcacatacgagcacgacgagaccaacgtc

SEQ ID NO: 23630 - DNA, 850 bp, Emericella nidulans
gctattggcatccagctcccttgacagcaccatcaaagtctggaaccccgcaacgggcgagctgcagcagagccttgaaggccgatccggttgggttaaatcggtggccttttcaccagatggcaagaaattagcatctggctctgagaaaaacaccgtcaaactctggaaccctgccacgggcgagctgctgcagactcttgaaggtcattctcagtcagtgcggtcagtggccttctcaccagatggcaagcaactagcatccagctctagtgacaccaccatcaagctctggaactccaccacgggcgagctgcagcagacctttaaaggccatgatctttggattcgggcagtagcattctcaccagatggcaagcatctagtatccggctctgacgataacaccataaagctctgggaccttgctacgagcgagctgcagcaaagccttgaggaccattctcgcagtgttcatgcagtagccttctcaccagatgacaagcaactggcatccagctcacttgacagcaccatcaagctgtgggactccgccacgggcgagctgcagcggactcttgaaggccattcccaaggagttcggtcagtgaccttctcaccggatggcaagttactagcatccaactcttatgacggcaccatcaaactctggaaccccttaacgggcgagctgcagcagactcttacgggccgatctgattgggttgactcggtggcatttccccagatggaaagcaactagcatctggctattatgacagcaccatcaagctctgggattccgccacaggcgagctgttgcagacccttgaaggccattctgaccgta

SEQ ID NO: 23631 - DNA, 424 bp, Emericella nidulans
ggcagataatttaggtatattatgaactaggaatacccaggaagagagcttataataactggtaatttccttttagcaaattactgctctagggacagagacaggcctctctttcttaatagagaaaatagaaatataatacttctctagaaagcagcagcagtatctccccatagttactctacctagtataggggagattataccatccctatatatatagtagttaggagttcttctagatacaaagcttacttttaaagcctatattaatttggtctttagctgcaggaaacaacttgcccagcacctaaaaagacttaataatacctagcatagctgcccagtagcctctatataggcagtagttatatagtatattcttccaacagctctgtacagggcagaagtcttctatacaggc

SEQ ID NO: 23632 - DNA, 510 bp, Emericella nidulans
tccgcggcgcaaatctgggcggttggcttgtccaggaagcctctatcgacacagcattctggaacacctatgccccagacgcaccagacgaatggacactctgtacaacactgggcttgaaatgcgcatccgtcctggagcaccgctacgccacattcatcacaacatccacaatcgacacccttgcttctgtcggtgtgaatctcctgcggatccccaccacgtatgctgcatggataaacctccccgggtccggtctatatagcggaaaccaaaaggcctacctccgaaagataacggagtacgcaatcacgaattataatatgcatatcgttatcgacgtgcactcgcttccaggtggtctaaatgggctcgacattggcgagaagaagggaaattggggttggttctataatgccaccgcatggaaccactctcttgaagtcgttgatgccgtggtggaattcatctttacttcgagttcgccgaggtcctttacgctagagccta

SEQ ID NO: 23633 - DNA, 520 bp, Emericella nidulans
aacaagatgatgacgccgactcccgcgggattcctcagggccaagtaacagaagtctttggaccgcctggtgttgggaagacgtctcttgcgtatgtcctccaggagttcccgtatgcaagcctaacttatttgaaggctcaacgtcgcctcgaacgctctccttgctggcggaaaggtggtttggattggtatgctatctggctcttccttaaaacgcagactgatgccattcagatactggctctccactgccccggttacgtcttcgcgatgttctacagaagtccattgaggtttcaaaatcacctcaaacagcggagcaacttgtgcaaaacctgactcatattcgagcccagtctctgcctcacatactcgcactcctactacatcccccgtcaacatttccaccccaggactgcagattactagtcgtcgactctgcctcagggccctatgcgtcatacttcccaaatcccacggaactcaaggcacgccttggcagcaaaaaatatgataag

SEQ ID NO: 23634 - DNA, 511 bp, Emericella nidulans
tctctagtatgctccctctgctcctcgtatatattgcagagtatactatcaatcaaggtgtatcaccgactctactctttccgctcaaggagacgcccttcacacatttccgagcattctaccccgcatacaatgcgatataccaggttggcgtcttcatctctcgctcttctaccccgttcttccgtattcacgatctctaccttccgtcaatcctacaaatcatcaatttaatagtgttgactctacactcgctgttcaatttcatcccgaatgtctaccttatcttcatcgtgatcttctgggaaggtctcctaggaggcctagtttatgtcaatacctttgcagagattggagatcgtgtgccacgagaggaccgcgagttcttgcttagcgccacgacggtcagcgattcgggcggtatttgtattgctggatttctgggaaaggttttgaagtatggctttgcgaatggcaagtttcgcatggacgggacttttgtcgaagaccg

SEQ ID NO: 23635 - DNA, 385 bp, Emericella nidulans
ggtaagactacagcggctagcaatgcgcaagcatcacttggcttgatcgtctccgttctgttctgcttgggtcccgcccctgcttcatgggtcatcatcggcgagacatcttccgttcgtctcaggccattgactaccggtattggacgaggcgcctattatgtggtcaatattccttgcattttcctttccagctacatgcttaacactgataagtgggacctcggcggcaagagcggctacgtctgggctggtaccgctttcatctgcaccgcaatggcttgggtctgggttccagagatgaaggacaggtcctaccgtgagattgacatcttgttcaggcgtcgtgtcccggctcgcaaatggaagcagacggttgtcgata

SEQ ID NO: 23636 - DNA, 500 bp, Emericella nidulans
gaggaatcaagggcgtggtgattatggtacttcgttgtacctctatacttacttcctttgctaacagcttcagggcgcacactgggacacagccggtgacgcgatcgaggtctccatgaaccctaacccgggcaaatcgcccgttgcatacgtgcacccttccaagtacgtcgactataatttgactccggatctctcgatgggccagcgctgcatttccatgctccagtcggccggcttcagcgtttcgggcaatgacaagttcgactggatccacgacgtctatctcatcctcatccacatgtttcccggtacgtcgccgccaacaacaatcatctccatgaacgcacggtacgatccgcactaccacgtcaagatcggaagtacactacggccgttgcgcgcagagaactatctgctgatcggcaccggcggcgccgttcacaacctctaccgcaacaaatggggcccgatgctgcggttccgggataacttcgcaa

SEQ ID NO: 23637 - DNA, 850 bp, Emericella nidulans
ccagggcaagtatgaggaggcagaggccatgcaccgtcgagacctagtagggtcagaaaaggtccttggccctgagcatcctaatactctggtcagcgtcagcgagcttggctctgttcttgctcggcagggcaagtatgaggaggcagaggccatgcatcgacaggcactccaaggttataagaaggtccttggccctgagcatcccgatactctgaccagcatcagcaatcttggctctgttcttgccgaccagggcaagcatgaggaggcagaggccatgcatcgacaggcactcagaggccgtgagaaggtccttggctctgggcatcctgatactctgaccagtgtcagccagcttggctctgttcttgcctaccagggcaagtatgaggaggcagaggtcatgcatcgacaggcactcagaggccgtgagaaggtccttggtcctgagcatcctaatactctggtcagtgtcagccagcttggctctgttcttgccggccagggcaagtatgaggaggcagaggccatgcatcgacaggcactccaaggttataagaaggtccttggtcctgagcatccgaatactctaataagtatgcaaaacctcgccattgctgtaaagggactaggaaacatatcagatgccttaagccttacaaggaactgtgcagacctgcgcaacaaagcattaggctcgaaccacccgcacgccatagtctcttctgataccctcgcaggctgggagctaatagccaaccatctttccatacatcagagtccaagaggttcggatgacattccttctgctcaatccttggtgcacccttttgctggcgataatatc

SEQ ID NO: 23638 - DNA, 724 bp, Emericella nidulans
cggcgtgataggaggcgctcccgttcgccgtatggaagggatagacggtaccgcagtccaagccctcgtggtcgtgcgacgtatgatagtgatgtggacatacctgttcccaggcgagctcctagagacgtgccagacgtgcagatactggttcttgaggagttggaccggtaagcactatcattacgcgtcttaggcgctgtcactaattcagtcatccaggaacttcatctaccacgtagagagcagttttcgaaaccgagggctccgggtcgatgttttagcgctaggagcacggatccccctagacgctgctgtcaagcgtcaggcctctgagggcgtcctcgccgtggtgagactctcacgaccaagttatcttcagagaaaaataccattacagatattcgaccgaagtgccggtgttgataatgtccggtccatcggtgggttctcctcctatcgtccattgacatttgctgacgtgctgcttagaatatccggaccttgaaccccatatggcggcggagattgtcgttcaggcgcaaaccctacagcgaactgcaccaaatgtacctctcccctctcctgcttatggagttccacagctcccctccgcaccgctacatcctgctggtcctgcacttccaactcagccaaatcttgcaaatgccatttcacatcttgatggggctggcttgcaatctctgttggctgccctacagca

SEQ ID NO: 23639 - DNA, 850 bp, Emericella nidulans
acctacaggccaaaatcccacaggatacagccagtctctggagagacgtgcagccatctacgcgatcgcggtcaagcatgacctgatcataatcgaagatgacccttattacttcctccgtctgggtccctacaacgaagcaagtacagacgccgaagaacccacaaagatatctcctgatgcattctatagcactggagacccatcctacctctctctggatacatctggccgcgtcgtgcgcctggattcgacgtctaagattctcgccccagggctgcgcgcgggctgggtgactgcatcatcgcaaatcatcgacaagtttctcgcctaccaggaagttagtaccatagcagtgagtggctcgtcacaactaatgctatggagcctccttgatcaggggtggggccacaccggcttctcgtcctggttgctgcatctctcaggggagtaccgacagcgtcgtaatatccttttacgcgcatgccaacagcaccttccaagagatatagcagagtgggtgccgccgcggtacggcatgtttctttggattaaagtgaactggagacgacaccctgtaataggcaaattcgaaacaaaggcgacgccagaggaggtggattcccgccttcaagggctggaggcccagattgtttctgatgcgcttagtccaggcgttttgatcaccaagggctcacttttttcttggaataagaaacccaacggcgagctgcacttccggatgacctttgcgggggccgaaaaggccaatttggaaaaaggcgtgaggctttttgggggagactctgagaggtgtattttagacatgcttagattagggctgtaggat

SEQ ID NO: 23640 - DNA, 500 bp, Emericella nidulans
atagtcaggcgtggtttgttaattaaaaaaggtgtgaataagcttatccaccaaatagttataagcgcaataacacccatacaggtcacggatacgctacagataccgagccaaaagagtccataaacgcagccattgctagtaacgctccttcacatctcaatccgtcacccaaagactactcccggttcatctttcaagatcgttgccgctcaacgatttatgccggcgacggtgggtacggttgcgtctcgtttcagagggaaaagtatattcccgaagggccaccaaatgacggtgatgacggcagtggtggcagtgaatatatccaagccgttgaagggctcaccagtctacacaagcttgctcgcagtggggtaatcagagcaaccagaggcaagaatggtcaaggaaaaagtaaaggtggtaaacgtggtgaagacgttcttatccaggttccagtggggaccgtggtgcgcgaagtggatcggtacgacccg

SEQ ID NO: 23641 - DNA, 547 bp, Emericella nidulans
cagtccactgctggtcaggactagttcatgcccccgcgccgacgacctcctccagcgggggctcgaacagaccttccaccgctgaaaatcatccgcaagatcatcctcctccaggccgcctactatgtcaccgctacggccctgatcttgttcactacgctggtctacggcaccgctttctcgctagaccttgttttcagttggaatgcgttgagaggggacacaacgctagggtggatgctaggccttgtgtggatgttgaatagttttctatggtgagcccctcccctttcattgaatgcaattccattcgctaataagtcgttttgtagtgtgatatttctccttctcctcgtctctcggtcaaaactcattcccgactttgctctcactatccatttcatacactttatcacgacgacgttctacactcattctcttccgtcgaatctgctttggtgggctttgcaatgcgccagcgccgcgtttatggtttttctgggcatgtgggcttgtcagtggcgggaactgcaaccgattagctttg

SEQ ID NO: 23642 - DNA, 850 bp, Emericella nidulans
aaagatacgtttgaacggggaatggagttccatgctcgtgtcacgcttcttggagaaggctgtcacggtagcttgaccaagcaagttaccaagaggtacgatctcagacgggacagccagccgcaaacatatggaatcggtattaaggaggtgtgggaaattcagccggagaagttcaagtcgggcgagattacacattccatgggatacccgctgccaaaggatactacgggcggtgcttggatgtatcactttggtgaaaacatggtcagcattggtttagtagtcggtcttgattatccgaacccgtggttgtcgccctatggagagttccagaagctcaagcatcatcctctgtatcgcgaggtcttggagggtggaaagtgcatttcctacggtgctcgagcattgaacgaaggtggttaccagtcaatccctaagtgtgcgttccccggaggtgccttgattggtgatagcgcaggtttcctcaatgtccccaagatcaagggcacgcatacggcgatgaggtcggcgatcttggcagcagagtctacgttcgccgccctgagaaatgacgcgggtggcactgtgttcctattcgactacgaggactcactccgtaagtcttcgatttggaaggagctgtacgaggtccgaaacatgcgaccgtctttcagcacacccctcggtatctacggaggtattttgtattccggccttgaggcttacattttccgcggccacaccccgtggacgctcaaacaccacggcacagatgcggcagccactaagctggcatctgaatgcgagaagatcgagtatcctaagcccgatggcaagatctctttta

SEQ ID NO: 23643 - DNA, 850 bp, Emericella nidulans
cgccacttcatgaagaatggtgttttgaatcaaaaagttgataatgagttgaagatcatgaaagatctaaagcatgtaagtgattgagataatacagtgcaaaaggacttgactaatattacccgacagccaaacattgtccagtacattgatcaccatgagcatgaccgctggatctatatcatcatggagtacgtcccttgcggcgaattatcaacgtatttacagaacatggtcaacattcctgaggatatggtgaaaacaattgcacgtcaaatactccacgcgctgaaatatcttcataagcgaaaaatcacacatcgtgacatcaaaccggacaatatcctgatcgcatcccatgagccactgaaagtgaagctctcggattttggcctgtccaaagttgtccaagaggagacgtttctcaaaactttttgcgggactctcctctactgcgctccagaggtctaccctgagtacgatatgtatcgacgtggggaggtgaggaagcgacgcagggtcggtgatccgtaagttactccatggtgtgttattggatactgtactaagtattaggctcccgaaaacctccccatatgatcaatccgtggatatgtactccttgggtgctgttctttaccacctcctagctggcattcctccatacaccggccgaggcgatgacagaggagcacagatgttacgaacaattatgacaacagaaccagactatcagatactccgcgaagctggcgtctccgaggagggcattgacttggtatctaagctgttgaaccgtgaccctcagcttcgtcccaaggagctggagtgcctcaaacacccttggcta

SEQ ID NO: 23644 - DNA, 850 bp, Emericella nidulans
ctgcctttcacgccaagacggggatcgaactccctgctgcgttcttcagcgccaaccctacagtgggcgccgcccaggaagctctggatgatgacgcagaggaggagagtgcccctgcccagacatcgacgaacccagcgaaagagaccacgatcgactccagccgccagcacaaactggatgccgccgtctcgcgtgcagtcctgatccagggtcagtctcgctcccgcgaagcccctctcttcctgacgacggatggttctgggaccgttgagtcctacatccacctgaaagccctccccaagggccggcggatttacgccctcgagtcccccttcctcgagcagccggagctcttcgacctctccattgaggagatggccaccattttcctgcgcacaatccggcgcatccagcctcatggaccctacctcatcggcggttggtccgcgggctctatgtatgcctacgaggttgcccaccgtctgacacgcgagggtgaaaccatccaggcccttatcatcctcgacatgcgcgcaccctcgctcattccgacctctatcgtaacgaccgattttgtcgacaagctcggtacctttgagggcattaaccgcgcacgcgacctccctgaagacctctcagtcaaggagcgtgcccatctcatggcaacttgccgggccctctcccgctacgatgcaccggcgttcccatcggaccgccagccaaagcaagtcgccgttgtctgggccttactgggtctcgataatcggccggatgccccaattgcctccatgggtcgacctggcttggatatcggcaagagtatgtacgagatgacctggatgagttg

SEQ ID NO: 23645 - DNA, 500 bp, Emericella nidulans
cagaagatggcgtcgatgctgtcttctcatcctgtaggtacgactgtcttggggggaagctggtcttcgtcgatcttgctggatcggagtactaccacgataaatcgatgtcgacaccagccagccctgttgtgcgggccaaacaaacaccccaagaacagcgcgaggggagacagattaacacagacctcctcgcgctcaaggaagtgatcagagcgagggccctgggccaggcgcgcatcccctaccgttcttccccgttgacaatggttctcagaggacactttgagtctagctcgagctccggctcgaataccaacgaaggcagcagcagtcgaaacaatggcaacagtgaagggtacacggcgatgattctaaccgtttcccccgcggcgacgcagttcgctgcgacgatgaatacgctcaagtatgggaacttggttggagttggggtccaggcggccgcggagagtacagggaagagatagtccagcaatagg

SEQ ID NO: 23646 - DNA, 850 bp, Emericella nidulans
cagcaagaccgaatcgagatggtgatggttcaggttcgtccccgagctcggtatctgactcgccatgctccgcctctccgtgtccttggtcattttgcagaagttcctcctcaagctcattctcgtattccatctcgtgagaaatctgaggagttgaactctcatcttctccatccttatggcagtccaatagttcttccttgatcgactgggcaaggaaattttcagcctccttgaccataagctggacatcttgctccgcttgctgtactgcttcatcgagctctggacccctaaggggggagacatcgtcttcttctgaaagcatcccttcatcttcctcttcaacggactccgtagaatggtccgactcggctgagcggtcttcctctaactgctcggtttctcgagcaagtgggcttccatcaggggttagcgcgggattacgctcatcacctgaacgctcatcaacctcattgagcttattagcctgacctccccccgtaacctcaaagttctgtcctcgtagcggcgactcatcatacatcgagaccgtctcatcatcggtctccgtatctgtctgcaaccgagtctccttggccaacggtgttggcacgtgcgtcatcgagtttttaaacggtgttataaccttcctagcaggactcaatagaaggctggacttgaacggggtcgcattctgctgttgtatgggttgttgggatgagaaagaggccccaaaaatgccttttttagcggacatcttcagaggcgagttttgcccgggagtaaaatttggttgtggaattgcgccgccatcacgatcgaacagggttcctcgcgcgggcgttgc

SEQ ID NO: 23647 - DNA, 850 bp, Emericella nidulans
ccattgccgttgtccgggtttcggggccggcctgtgtctcggtaggcgcactgcatttcccttcggaagaatcaaaaggagtatatgctaatatctgtcatattgctctagatctaccaagcgttatgtcccaaagcaccacttccgcgtcctcgggtagcagccgttcgcaccatctacgacccggcctcagacgaaccttgtggccaagcagatattctagatgctggagccctagtactatatatgcctggccctaagacagctactggggaggatgtactggagtttcatcttcatggaggaccggcaatcgtaaaatcagtcctgtcggccatatcgaaaactagcggaaaggagcattcggttcgttacgcagagccaggagagttcacccggcgggcatttatgaacgacaggcttgaactcccgcaaatcgaagcactgggtgacactctggcggcagatacggaacagcagcggcgcctggctgtacgtggcgcaagtgacgcgttatcaaaacgatacgaaaaatggcgtcaacaattactttacgcacgcggggagctcgaagcattgattgatttctccgaggaccagtattttgatgagtcatcggacgatttggttctatctgtcaagacgcaagtgcgggctctcagccggcagatcgcactgcacattcagaatgcattaaagggcgagctgatgcttagcgggaaaaagggtgctctgctgggagcggctaaagccgctaagagctcgaatttgaaccggattgttggcaaggaggctgttgtcctgagtacagagcacggagctcacagcgacattgttgatgatgccttca

SEQ ID NO: 23648 - DNA, 500 bp, Emericella nidulans
  unsure (1)..(500): unsure at all n locations
ggggcgaatctcgtcgccgtatttggtaaaccaaacctaccagaccctcagaatacagtccaggtatccaaattcctgggctccatgtggtattgaatctaacatgcaaaacgtggncatggtggcggaacatccggcatatctctctccacagccctttccctcgcgcgccacaccgtctcccccacgatctacttgatcggacagagcagacaagccgctgagagcgcggttcgctcgatcagagcgctgaatccgtccgctgaggcgatcttcctgctatcagacatttcgctgatgaagaacgtggatcagatctgtaagcagatagaatctaggggaagatatgtcaacatcgtcttcatgacgcccggttacttgaccctcaggggcagagatgagacgactgaagggctggatcggaaatttgcgcttcattactatgcgcgcatgcgcttcgtcaaccggttactcccgcttcttgaatctgctgcggacaa

SEQ ID NO: 23649 - DNA, 850 bp, Emericella nidulans
tcccggatggcactcagaccctagctgagaagacaatactttcttttgcacgacttcatctttcctcacagtgccgggtaccctgtgtccgcgagcagagatctcgtgaaatggaaacttgccagtcatgtcgttacccgagtttcccaagtaccggagattgcgaacagtacctcacagacgcaacaagatggtctatgggcttcaacattagatatcgcaaggggaagttctatcttctgacctcatatgtctcgatgtatcccgatttcgggttcaaagggctgcttttctcgaccgaggaaatttactcggacgaagcgtgaagtgagccgcggaggtttgagatcggggacattgaccctgatatcttctgggatgagaatataaccgcctatatctcatacgcgggcatctctcagacaacgcttgatcttgagacggagcaaattggaccggcataggatacggaaccgaacgggtgttggtctcccggaggggccgcatatctataagaaggacaactggtattatctccgcattggcgaaggaggtaccgaacttggtcaccggcaagtcattgctcggtcacactctgtaactgggccgaatgaaggatatgccggaaatcccattttgacgaatttcaatacgacggagtacttccagactgtcggccatgcagaccttttccaggacggcaatggcaattggtggggagtagtgttggcaacacgctctggtccggcttggagagtataccctatggggcgagagactgttttgttccccgcaacttggaaaaggggtgagtggcctgtccttgagcctgtacgagggcgaatgaccg

SEQ ID NO: 23650 - DNA, 500 bp, Emericella nidulans
gaaaggtctacctagacctgggcccaattcgccatcctcatcttatcgagctcttattcacttttcgaaaaaaggataaataccaacttgtgtttccctgggctgatggaaatttgaaggactactgggaaagaagcccagtccctgagtttaccagggacctcctcctgtggtcgctggagcagatggccggaatggcaagtggattggcctgcttccacgaattcacaaatccggcacacggacatactcggtttggacgtcatggagatatcaaagcacaaaatattttatggtttcacgctgaaaatgtgctcaagatcgccgacttaggggtagccaatgtgcgtggcagggactcccggtctaacatcccccccagcactgtggctgactcgccaacctactcgccgccagatatccaacggcaacaacacatctctcgcaagtgggatatctggagtcttggatgtttatacctggagtacatcacctacctc

SEQ ID NO: 23651 - DNA, 586 bp, Emericella nidulans
aggctgtcagcaacagaaccgtcttcgatgccgtcgtggctcccgtcctcccgcgcgtctgggccggcgaaacgaccaacttccttgcatacggacactcgggcagcggaaagtcacacacgatgatcgggtatgactttcaaaacgaggagcagttcgggctatgtcttggggcggggagggaggtgtttcagtacttgtcatctttgtccaaagacggggaccagctcggtgtcggaataagcatgtacgagcttcgcgggaacacagcattcgaccttcttaatcgtaccggccagtcacaagacaaggtgccctgccatatacgcgaaggcgctgacgggaaaacgcacattcgcggggaaacagacacgttcgccgacggacgcgtgcgtgtccgtcccatcacgcagagcccgtgctggacattcgacgagctgcgaacgacggtactctccggactagaactgcgtacaacagggacttcaacgattcatgaccagagttcgcgaacgcacgcggtgctggagctggagataatcaccagggctctactcaacgcccgggaagcggtgattgaacggca

SEQ ID NO: 23652 - DNA, 673 bp, Emericella nidulans
aggagacctgcgcttcgcaccgccgcaaccaagagccccttcccagcacccaatcaacgcgtcgagctttggtgctccatgtccacaggtctacaactatgacaatgagtctatctggaatgttcttccttatcgaattcggaatgtcgaggatatgagcgaggaatgtctttttgtcaacatctggacgccggcggaacaccaaacaaagaaaagcggggctgggagaaaggggaaggcggttatgctctttattcatggaggtggattcggtgagggggccgggtctgtgggtttctatgatggggtggatttagcaagcagcggagacgttgttgttgtcacgttcaagtgagctcgtcaaaaatctccttccgatgctcgtgatcggtttggttgtggtgctaatggatcagctaccggctcaatgtcttcggatatccaaatgcacctgggttagatccggcagagcaaaacctagggctgttagatcaggtacgtgtcagccattacctagttccgattatcagacagggatgcattctcacaagaccagagactagcagttcaatgggtacaccaaaatatcgccaattttggcggtgatccggacagaatcctccttttcggccagtctgccggtggtgcttcggttgatgcttatgcttacgct

SEQ ID NO: 23653 - DNA, 658 bp, Emericella nidulans
acgcgccctcggacgcagtcgcagcctcgtcaacggcgtcgaacagagcactgcaggcaagaaagtcgccgccaccacctccaccgcaacgcaggcgccgatcacgatctcgctccttattgcacgtccaacataaaaaggaccgtacgcccaatcctagcccgggcggtttgcgagagacgcttcgaccacaggccagatcagacgacgaagatgagcagcgtcgccgtcagcacaaaagccacattatcaacaagcacccgcataagcacaatgaaggagagcgcaggagatggagaagtgagattacagagaaagagcggaagagatacgagggcgtatgggctgcaaacaaaggcctgctcatacatcccagccaagtactagacgaaaatctcgagccagataagataccacctgaatgtatcctccggccgcgctggacatggtcgtcaaccttgtggttcgagatatctggtcaaggagtcgtctaccgaatcacgtcctcgagcagatctggaacctcgtggatgggcagaagatcggtctgctcactcgagccgagtttgtcgtggggatgtggctgattgaccagcaactgagaggacacaagcttccggccgtagtttctgaaagcgtgtgggccagcgttacgcgt

SEQ ID NO: 23654 - DNA, 500 bp, Emericella nidulans
catttcagggctccggtttcactcaacaagcacccagtcggcccgcgttcggccagccatcctttggtcagccgtctctaggacagccttctggtttcggccaaccgtctttcggacagccttctggcttcgggcaaccaagcgctctaggtgcatcgtctgggtttggtaagccggcatttggtcagcccagccaacccagctttggcaagccgagcctgggccaatccggtttcggtcagccatcgacgttgggaggctctggatttggccaagcctctgatactgcatcaccgttctcccagatctcggctacacctgccagcggcttcggcaatgcctccccatttgcacaagcaggttctggcttcgccaattcatcaactgccccagcgacgacaggtggctttggcgtgccttcacagccaaataatcccttcagtcagccctcggcaccatttggccaacctgtccaaccgacaaatccctccccgttcggt

SEQ ID NO: 23655 - DNA, 702 bp, Emericella nidulans
ggaaagagcttgcaactggctgctgatctggggttggattttatcttttgctgaaagattcccagtccctccgggcagtggtcacacagaccaacggtccaggtgaatatgttttggtagactctcgctttttgatgaccatgtgtacgggatctaatgctctgcagctccctattgatcaccataaccccgctatcggaaccttacgaaatcgctactgggtgaacgatgcgtactatgtgcctggagggccagtggttttgtatgatgtgggtgaggctgatggagagccgagtgttgctcatctcagatcgaattcttcgttcttaccacctatactccaagagttcggcgcgataggaattgtctgggagcatcggtcagtcgtctccactaaagttgaaacgaggatagagattgacagaaacaggtattatggagattcgttaccatatcctgtcaataacaacaccctgccagagcatttgatatatctcactacgagacaggcactcgcagatatccctgccttcgcggagaatttcacccgtccaggtctccaggaatacgacttgaccccggcctcaactccttgggttatgataggaggctcgtatccgggcgcacgcgctgcatttgctcgcaatgaatatccagatacgatatttgcttcgttcgctgcctcggcgccggttcaggcgc

SEQ ID NO: 23656 - DNA, 850 bp, Emericella nidulans
atggctggtttgccgctagagactgccccaaggatattgggtgtgcgacttcacggcgagttgtcgcgctgggcatcgccgaaagacatatcaacgaacttgcagggataatttcagtaaagggaagcacaggatcgatcattgagtattttggtctcggagcgcagacaatttcagcgactgggatggctacagtgtgcaatatgggggctgaatccggagctacgacttccatatttccctacacggcctccatggcagagtacttgcgagccaaccggcgtcctgacatggctgctgcggtagagacaattgcatatgagctccggtccgatgagggcgccgaatacgaccagattattgatattgatctctcatcactggagccgcatatcgatggccccttcacgcctgatctgtcaacgcccatctcaaaatttgggtcagcagttatagacaatgagtggccgtcgacactgaccgccggccttattggatcctgcacgaactcttcttttcatgacctcagccgcgcagcgagtctcgcccaataagctttggatgctggcatgaagccaacaacgcagttactgctgtcccctggcagtttgcagaccctaaacacattggaggaggcgggaataatgcaggtgtttgagaaagcaggtgctatcatgttacccaatgcttgcgggccgtgctgtggctcgtgggatcgtaccgatatacagaaagtgagcctcacgtagagtctcaaagtgtattctggcactgacaagcgcagggaacaaagaactctatcatcacctcatatagccgtaatttctcaggcctccactattggcagccc

SEQ ID NO: 23657 - DNA, 768 bp, Emericella nidulans
ccttcctcacctggtcgcacctacaacattgccggcatgactaaaggcgcgggcatgatccacccgaacatggcaacacttctcggcgtcatcgccacagacgcaacaatcgtcccttcagccctacaatcgctgctcaagacctctgtcgcacgctcttttaacgccatctccgtcgacggcgatacaagcaccaacgacacggttgcgatcctggccaacggagctgcagacggcgcaccgatcaatagcacacagaatgacgattacgtggtcatgcagaatattcttacctcgttccttcaatcgctgtcgcagctcgttgtgcgagacggagagggcgcaaccaagttcgttaccgtccggatccaaaactcccctgactacccctatgcgcagctcattgcgtcgactatcgcaaggtctccgcttgttaagacggcgctgtacgaccgtgatgcaaactgggggcgtattctctgtgccatcggttacacgcagggtgttgcgccgggaactgttgtgcctgagcggacgagcgttaccttcaagcctgctgatgggagccccgtgctcaaactccatgtgaacggagagccccagcaggtctatgaggagcgtgctagtgctattcttccagacggagatgtgcagatcatcgtcccccttggtgctggtaacaagggtgaattaaaatgttaggaaggtgtgtcctggttcatcgacttcacccatagttacgtcactatcaatggtggcggcagcact

SEQ ID NO: 23658 - DNA, 850 bp, Emericella nidulans
tcctgcagccagctggtgggccttcgtcatgtcatgcaccattgtaagctcttatactacccacaatcggcagatcatttccctaacgctgcgatagatcatggagtcgtactgtgttttcttgatgggacagttcatagccacacaaaaattcgccgatgactttggtgtctatagcgaaagggaccaagcttatattatagaagcttcatggcagtcagcattccagtgtagcggaccgatcggtgccttcattggcgtctttcttgcaggtcccattaccagttggattggttatcgatgggcaaccattggcgctctcatgttcttgaatgcattcatcttcatcttctatttcgggaacagcaatgggatgtttttcgcgtcccagatcctggaaggtatcccgtggggcatttttatcgccaatgcaccagcctactgttctgagattgtgccaatgagattgagagctccagcgacgcaaatgttgcaaatgttttgggccattgggtcgatcattgtcggcgggatcacttatcactaccaatccaagcaggactccagcgcgtacaggttcgtcagctcctgtaaacaccaatgaggaacactatgttaacaatcattccagaatgcccattgcactccagtggatgtttcctactcctctcgcgatcctactctttattgcgccggaatctccatggtggctcgtccgaaagggccgtctggccgaggcagagaagtctgttaggcgccttggacgggcgagtgcgaatgagaatcctgctgacgcagtcgcgatgatgcgtcgcacaatcgagctagagaaatcggagaagaagcctag

SEQ ID NO: 23659 - DNA, 711 bp, Emericella nidulans
acctccgaacactgtctccaaggatgctgcgtccgtcactacagctgtccatgtgatttcgacggagcgcgcggccctcgcgcatctcgagcgtctttaccagacggaccagctcgctcaggaacatctttctcgcgcggtagaccagatcgcagggactattcgaaatggaggaaaactggtctgttgcggagtgggcaagagtgggaagatcgcacagaaacttgaggcgacaatgaatagtttggggatatacagtacctttctgcatccgacagaggcgttgcatggagacttggggatgatccggccggtaagacaccatcttaagatgtttgagttgacaagggctaactgagcgtatacagaacgatactctgctcttaatctccttctctggacggacacctgaactcctccttctactcccccatatccccccaactgttaccatagtcgccctcacatcccacctccacccgtcaacatgtcctctcatgtctttccagcctatggaaaaggaatccttctacctgcgcccatccatgaagacgaagagacgtccataggcgtctgcgcaccgacatcctctacaaccgttgccttatccctaggtgacgctctagctatagctacagcccgcaaacttcatactactcccggacgtggcccagcagaggtttttaaaagcttccacccgggcggcgcaat

SEQ ID NO: 23660 - DNA, 850 bp, Emericella nidulans
atgacacctggcaacactcgcctccgaacttcagcggatccaggatcagggtgacaaggtcgcttttcggagcgccaccatcatacagaaggatttctgcaccgactacaaagtgaatgtggaggacaggtactcgttcgctgcacagggaccccggcgcaaagctattggcagggcccgcaactatctgctctactctgctcttaaacccgatcactcttgggtgtactggcgggatgttgatattgttgacagcccggataccattctggaagactttatcgcccacgacaaggatattctcgttccgagtatgtgttatgccatctttactagattaattagaaatcactaaccatctataagacatttggttccaccgctacaaggatggcgttgatatcgagggtcgctgtatgtggttatcccgacctgagttgacttttactgacccgatattacagttgactacaactcctggattgaatccgataaagggaggagactccgcgctactctggaccctgacactatcctggcggaaggctataaggaatacgacaccggccgcgagtatcttgtcggaatgggcgactggagaaatgacaaggataaggaggttgagcttgacggtattggtggtgttaacattgtcgttaaagccgacgtccatcgctcgggtacgtctgacttgtcatttacaattgcggtgacactaaccttgctttcagggatcaacttcccagcatatgctttcgaaaatcaggccgaaactgaagggtttgcgagaatggccaaacgtgctggataccaggtcattggcttgccaaactacgttgtctggcatatc

SEQ ID NO: 23661 - DNA, 500 bp, Emericella nidulans
ggaagcaccaggatactcatcgacactggagaggtaagaccttaacccaaatcacccttgagtgttcttcgatgttcatgtgtttatgggtgatgtgatactactttcggttttctgagaataaaccatctgcgtaaaaaccacttcttgaggatcaatattgaactatttcacagggagctccgcaatgggcagtcagtgtgacccgttatctcgaagaccacgacatctccatctcccacgtccttctcacgcattggcacaaggaccataccggcggagtagccgaccttcttgcgcatgaccccagcataatagtgtacaagcatgcgcccgacccgggccagcaggccattgcgaatggccagactttcaaaacacaaggtgccactctaagagcggtcctgacgcctgggcatgctgtcgaccacatgtgcttcttgctggaggaagagaacgcactgttcaccggcgacaatgtgctaggccatggctacagt

SEQ ID NO: 23662 - DNA, 686 bp, Emericella nidulans
ttcctgatatcctgtctgagaggtaaccaattccaaataatttgcacagggtctaaggccagaacatctccatcgagaggcacaatcgtcgtcgatcaaagtgagcctgggtgcccaaaatcgtaaaaaactatgcaagaggtggatgaataattccacaacagatgtctcccagaagcttcttatctttcctggagcctacgaggagcaagtctacattcctccgcttcagtctaatctgaccatccaggtgtatacgtgagattcaccttcgtacgaaggaaatgctgccacaatcacctacagtcttgcgcttattaatacaaccgatgacgaccatacagcgactctgcggcaatggaacacaaataccaagatatacaacctcaacattgtcaatacaattggacatattccgcaaaacggctagaacctggtcctttctgcatataagacgaaccggggcttctatggccgtcaattcatcggataccaggacaccgtcctagcagaaacaggtgagtatcggctgcgtctagtagcatctcccttttatctggtctgactgttccgtaagtcaccagctatacgccaaaagtcttattgttgcggcagctgattccatttctcgacaaacagcgttgccatggcttgcaatcccgcacttcccgcctcattacagtccc

SEQ ID NO: 23663 - DNA, 850 bp, Emericella nidulans
cagagcctgatcaaccctttgattttcaccgcttcctcgagcaattacggcatcgcaccgctgaccctgtcgccaaattcttacgttcgttccttcacgaattcggcaagcgacaatggatggtccatgaacaggtcaaaatcattagcgactttctagcttttataactaataagatggcggcatgcgaagtatggcgagacgtgtctgacagcgaatttgacaacgccaaggaaggtatggagaaactcgtgatgaatagactttacacgcaaacattttcaccgacaataccaagtcctccatcaatcccgcgaagtgcgagcagaagcaagcggcgtgagatggagagattgcatggtccctggaggaagggccaacatcaggaagacgtcgagcgggacgaggtgttggcgcagaagatgcgaatttacagctgggtaagagaagagcatcttgatatcgcgccagtgagctcctcaggtcgtcgatttctcaatcttgctcagcaaggtgggagtcttttgcatttctaattgaagtctttctaatggcttatagaacttctgaaaatcaacggctaccgggcaccccgcgataaagtaatatgtattcttaactgctgcaaggttatctttggtaagttctttccactaaggcgaaaaaaaaaaaatgcgtgactgagacatccataaggtctattgcggaatgcaaagaaatcggacacttcagcagattcttttataccgctattaatttatgtggtacttcaagccaatccggagcaccctggtgtctaacatacagtatatccttcggttcccgaatcaggaaagcttgttgtgaaacg

SEQ ID NO: 23664 - DNA, 850 bp, Emericella nidulans
ataccgaatccgggtacaaggaccgcaccgaggagtttgcgaattactccgtccccgtcttcttcgccgaatacggttgcaacgaagttactccgcgcaagttcactgagatcgaggcgctcttcggtgacaagatgaatggtgtttggtctggtggtatcgtctatatgtacttccaggaggctaatgactacggtgcgttccactccactatatccaatcctctgaaaataaaggaatatgctaacgagcgagcgtgaaaaggcctcgtctctgtcgttgacagcaccagcgtctccacaatggctgactacaagtactactccagccagatcaacgctgtctccccctccggtaccaacaaggcctcctacacccccaccaacacggcactccaatcctgccccgccgtgacatccggctcctggctggcaaaggcgacgcccttacccccgactccgaacactgatctctgctcctgcatggataagacaaacgcccgggctgtgatgtcctcggcactatgacgactacggtgaccttttaacaacaagtgcgggctaactgaaagcgcagctgtaatggcaaattggacgaccgggtcctacggtgcctatggaatgtgccagtcgaagcagcagctcaactgggctctgaataagtattactcggagcagggcagtgtggcttcggcttgcgactttgacggctcggccacaacgactgcgactacggctgctacgggaagttgttcgtcaatgatgagccaggctgggacggacggcacgggcaccgttactgctacggctacggggagtggctcttcggcgacagagacagaatcctccgg

SEQ ID NO: 23665 - DNA, 658 bp, Emericella nidulans
agcccgggtgatggcataacagctttgctcctcatgatttttgcgcatggaaagcaatgcttgccctttgctgatagttcgctaggttcctgcgttaacaggtagggttgctctgcacattctcttctgcactattctaacgcagcctcttgacagtgcagtctatttcgctgcctcggagcatcatcttgcagcagaaacgggacctgtccgcctcgcaagtgtgcaagcacgattagctcaatgcttctatcttttgggccaatctcggatcaaccactgctggagcctattcggaaccacagcacggcttgccattgcaatcggcttacaccggggacgacggcgagatgtcaaagataattttgttgagcatgagtgctccaaacgagtgttttggtgcatgtacagcctggataactatcttagcgccgctctgggccgtcctcggatttttcacgatgacgagatagatcaagagcttcctgctattgctaatgattcccaaataacaccgagtggcgttgttccagctagttcgaatacccagagtatcatgctagctcccgtctaccatgctaaactgtctaagattatcagtggtatacttcgtgatctatacagcatacgacgcatgactcttcagtctcaatcagca

SEQ ID NO: 23666 - DNA, 532 bp, Emericella nidulans
ccacgttcgacggatccgcatcgtggtggacacagggactcggtcacggaaatcccggccttgctctatctgctgcgtatgccgcaggacgttacgggcatgtaaatgttccccgggaacattcatgagccggctttggcgttggcggaatcgctcttgaagactgtggataaccctcgcctacagaaggtcttctatacagacaatggcagcacaggtatggaggtagctctcaagatgggcctccgcgctgcgtgcgaccggtatggctgggatgcaagcaaagaacagatcaacattctcggcctcaaagggagctaccatggcgacacgaccggggttatggactgctcaaagccgtctacctacaatcaaagagttgagtggtccaaaagccggggtcaactggattggattccctctggtaaagatttcccaagggggttggcaaggctagggtcccgcaacacttgcagaccgttgttgccgggaaccagcacttttcatcatggatgccacatttgatgtaaaa

SEQ ID NO: 23667 - DNA, 850 bp, Emericella nidulans
ctaggttgtggaacgattactgatgatatgtagtattcggcttcgcaaccagcaaggcgttgattgacaaaagggatacaaatgcagggcttcgggatcagcgtctcgctttggagtgtatgtaccttggtgttcactttaccatcagaaggctgaaatatcgagcgatcagggattcgtgataacattaagtcattcggcggtgaccctaacagaggtatattcaaccacccgtttcctgcattcaggctgacagactatcttccagtgactgtgatcggacaaagcgtgggagctagtgatattggcctgcagctaacggcctttggcggggaccaagatgttccatttcaacaagcaatgtaagtgagtcgcgaccagaagctattcagtgctgacccacggccctagaatgatgtccggcggtccagggctgaatttcaacagcaagccaggtctggttgcgaacaatactgcagcaatcgctcagcaattaggatgccagcgtaaggacgactcgcagacattggagtgtcttcgagatgttccctttgagcaactgaccaacttatcggttgctgcatctcgcgcagcgcgtccacctttcggcgaagggtatttttatccaacgatcgatggtgactttattcaagataggccatcgcagttgctgcgcgcagggaaattcgccaaggggatatccttagtagcttcctgggtcacaaacgatggcgcctggtacgcgctgccgaccacggcgacagatgatgaggttcttgggagtttcggactatggctgcacaatctctcagagcccacaaaagagaggctccttcagctgtatcccttg

SEQ ID NO: 23668 - DNA, 850 bp, Emericella nidulans
ctaattgtggtctatagctactttttccacccactggctcgagttccaggaccttggactggagcggttttcccggtaaggctaacctagaagttgtttggttctaccagatctgagatttaacttcttatacccatagttctggtcgataagcaccttgtaccgccggagattgaacccagatcttgcagaactacataaaatctacggtcagagccactctcccagctctcaagcttcggcggcccgctgatggtccagaggaatccaggccctgttgtccgagttggccccaaccaactgtcattcgcaactatcgaagctcaaaagatgatctacaatgccaaaccaaccaataatggctccgatgagcattttggacgagacgggaccctacaggatgtgctactctcaatgatactaggagcacctaatataggttctctatcgaaccgagctgagcataagaagatgagaaagcgtttactgcctggatttacatcaaacacgatcttcgaacaggagcccctgctgcgcctgcacgtagaccaactcctgcatagacttgcgcaagatgcaggtttgatcaatttgactagccatttttcgagattcctatgggaccttattggtgacttctcatttggagagcctcttgttccagagaagcacggtgagccctttttgttcattttatgcttgtatttattgaatactctgctaagtagagcttcgcacagacaagttgaagtcaatggttgaaatataccaaggatgctttcccctactcgaagctatcaatcatgtcgttccagaaatcaatgccgtgatcaggctggcttttcggcta

SEQ ID NO: 23669 - DNA, 639 bp, Emericella nidulans
gtgaacctaggcttgagtcggcacaggcccgatttctcatagtgctgtatctgttgagctcttcgcgtgcgaacaaagcttggtttacactgggtaccacaattcaactaatgatggcacttgggctacacagcaggcgctcgagaaaggatgatgagaaggatctagtacaaagagaatgccggcgtcggatcctttggtgttcatacaccctcgacaaatacatcagtgtcattttaggaagaccacgtttgtggcatgacgaggatctggatgaggagctccccgcaagagttaatgacaccgatctcttgcctacaccaatcccttctcctaagcgggactgtgtgatggatgctccagtgttccatgctctgctagctcgaacgctatctcaagccgccaaggaaccttatgtggtagcgggcatatcccacagagatcaattgaatacaattggagccttgtgcaagagcgtcgccgagtggcatgctagactgccacctcttttgagcgggagtatccatcccagcagtctcgttccgatattccagcgccagcttacagttttgcagctggcacgttaccacctcctcatgtttattacccgacccctactactgcgaaactacgggagaa

SEQ ID NO: 23670 - DNA, 850 bp, Emericella nidulans
caattgaagatcggatggaatatcttattgagaaatacagccgtggcttcaaggagcatgtcccagttccgagggacgataacggcgagcatatcgttgtaactggtgccaccggatctctgggtgcgcatattgttgcccagctgatccgcgccgagcgcgtacgcaaagtatactgtctcgttcgcgcttcatcgcttctgtcagctctacaacgagtgcggcagagcttgcatgctcgctttttgttgtctagcctcacaccagacgaagaacgcaaaatcgttgcgttgcccgctgacctatcgaacagtgtgaggttaggcttgcctgaagacgtctacgaagagatcatcagctcggtcacggccgtcatgcactgcgcctggtctgtcaacttcaactggacactagagagctttgaacagccttgcatcgcagccacgcgcaatctggtagacctctgccttgacacccaaggtcctactccagcaaatttctccttttgctcgtcggtcagtacggttgctcgcacgccagggaactgggtgccagaagcacttccagagtcactcagttatgcgcaatcaatggggtacgcgcagtcgaagctggtaaccgagcatgtagtcaaccgtgcatgccgtcaaactggcctagcagcccgggtccttcgagttggacaaatcgtggctgatacggagcacggtatctggaacgccaccgaagctatccccatgatcttccagacagccgagacagtcaaggcccttcctctgctcgacgacattctgtcctggactccggttgataccatggcatcgagcattattgaggcgacgctatcctc

SEQ ID NO: 23671 - DNA, 850 bp, Emericella nidulans
caacgggacttcgaaaacagcgatcgatcgtgtggcgcagttacgccttccgaagccgggtaatacacagaagtctccggagttggctgatcagattgaagacttcgttgagaaggtgaagaatgggattctggcgtcatttgatcttcgagttgcccagtacgaggaagatattaaggagaaggactctcagcgcagcttgccgggctggaatttctgcaccttttttatactgaaggagggtcttgctaggggctttgagaatgtcggactgtttgaggatgcactggttgggtatgatgagctggctgttggactcgatgctgcaatccaagaacagctcgccggctccagtgagcagcatggcagtgcctttctaacatacagcaaggactggcgggaacgggcgaaggctgccttggatgcccaagcgaatgtgcaaagccctgacgacggtgatgaggtggctccgatttccgacattgacccggcggacttcccacttgatcccaataggaagccatatagagaggagattctttccagcaatatctcgatcttcgatttccgcacctacgttttctctcgacaattgaccctccttctcagggcgtcaagagcgccatcaatcgtcagtgacgatgcggataccaatcagaaatcaggaacaggaaaaaagaaacccgaagacctgatgcttctggctgaagtctgcgagcgagcgaccgaatttatcagccttgctgcacggacactccgatctgatctagaaggtggccttgcggaggtggagcacgccgcaaagtcggaggtcataaacaatttggtttcgtcatgggcctatgctgct

SEQ ID NO: 23672 - DNA, 850 bp, Emericella nidulans
gatgttttggcgcagcgcaagaccgacggtactatcaaaggctctatcatggtggacggaagacctctccctgtttccttccagcgatctgctggatactgtgagcaattggacatacacgaggaatatgctactgtccgagaagcattggagttttctgccttgcttcgtcaacctaggaccacccccagaagaggaaaagttgaaatacgttgacaccatcatcaatctccttgagcttcaggatctggcagataccttgattgggggggttggaaacggcatcagcgtcgagcagagaaagcgtgtcacaattggtgttgaacttgttgcgaaacccagcatcttgatcttcttagatgaacctacctctgggcttgacgggcagtcggcctataatacagtccgattcctgagaaaacttgcagatattgggcaagctatcctggttactatccatcaaccgtccgcccagctcttcgccgagttcgacactctccttctactggcgaggggtggtaagaccgtgtactttggagacattggcgagaacggacgcacaatcaagcagtactttggcaaatatggcgcacagtgtcctgtcgaggccaacccggccgagttcatgattgacgttgtcactggcgctatcccagaggtgaaggacaacgactggcaccagatctggcttgaatcaccggagaatgctaaaatgatcaaggatctggaggatatgatcgccgacgcagcctctaagccccccgggacacatgatgacggattcgagttctcgatgcctctatgggagcagatcaaaatcgtcacccaccgcatgaacgtctccttatat

SEQ ID NO: 23673 - DNA, 500 bp, Emericella nidulans
cccgagtgcgtccggcaggaacagcttccaagaccagaatctgaatattgcaatcggcccgtcaccgtctacacaaatatggcctggcatcactaacgctggaaaccggttgcctacggtgatccataaattggttccagcggagggttcagttaccggaggaacagaggtaacgctattaggcagtggcttctatcctggcatggaggtagtgtttggtgatactctcgcaactacgactacattctggggcgacaaatgcctcaactgccttaccccacctgcccttcaacctggccaggtggtcgttctgttcaaacatgaacatccaagctttaatcagctacaatctcaatctcaaccattgcttcccaagcaacagcaatatttccgttatgtggacgaccgtgaattacagatgtaccgactggcgctggggatactcggtcacaagttagggaaccaagcagatgctttccaaaccgctcaacagatcatgg

SEQ ID NO: 23674 - DNA, 658 bp, Emericella nidulans
ttgtctccaacgattcgccagcgaagaatgaaggccaaagctagccgcagccccaggattcgtacagtgcagtaatttgatacagtcaacttcagacaccgcttatccgtttaaggggtacccaggagcgcccgctccccctgctgtatcaacagaaaacaggccaggttcgcctttgctaaccaatttcatcattagcaacctggccagatgcacgacttagacgatatagaagaaggcttcaaggcgtaccgaccggacggctttcaccccgtataaataggcgacgaattcaaagacagatacaaagtccttaacaaaatcggatacggtgtctattcaacagtctggctggtcagagacctgaagccgtcgctgtaagaggttcagcggagagaaagaatcactgagctaacacaagcagacccggcgccgagcacgagttccacgccctcaaagtgctcagtgcagactgctatgatggaacgcaagagcccatctttgagcgtgagattttgcgccatcttcggaaaggagaccgtgagcagctaggttactaccatgtctgccatctgctggacgactttgagcattccgggcccaacggcacgcacgtctgtctcgtctttgagattatgggcgagatattgacgagctt

SEQ ID NO: 23675 - DNA, 500 bp, Emericella nidulans
gtatcgatgagcctgccgaccgacaattcagccccactggcggaataaatcagtctaacgcccatttcaagctcagtggagcgcagtacggtcccaatagtgacattgctaggcggatacgcgagcagcaactactggcaggcgttcctgacaccacttctatccttccgaacgaagagcctaaaccttaccggtgtccagtcatcggatgtgagaaggcgtacaagaatcagaatggattgaaatatcataaagctgtaagttgtctccaacagattctggtactgcaatatcactaactacttatttagcatggccacaacaaccagcagttacatgacaatgcagatggcacattctcgatcgtcaatcccgaaacatccgctccttacccaggaactctcggcatggaaaaagagaaaccataccgctgcgaagtctgtggcaaacgctacaagaacttgaacggcctcaaatatcacaagtcgcactcgcctcct

SEQ ID NO: 23676 - DNA, 850 bp, Emericella nidulans
gaaatggcccctcatcgaatccgtggtgctctcgtcatgttctggcagctctgggtcgtcgcaggtaagacctccctgcggcaggtttgtagattgttctgaccttgcaggcattttccttggtctcatcgccaacgttgccgtcaaagacactggccggatcgcctggcgactccagctcggttcggcattcatcccatcttttattctcggtgccggtatctacttctgccccgagtcgcctcgttggttgatgaagcacggccgctacgccgagggcttccggtcaatgtgccgcctgcgagcccatcccattatcggcgccagagattactactactcgtacgtgatctaccaggaggagatcaaggaggcccgcggcgctggctacttccgccgtatgtgggattgcttctcgatcccgcgaatccgacgcgccaactacggtgcttccaccgtcatgatcgcccagcagatgtgcggaattaacatcgtttctttctattcgtctaccgtcttcagtgaagctggcgcatccgacactgcggctctctgggcctcttgggggtttggcttaatgaacttcctgtctgcctttcctgctgtatggacaatcgacacttttggtcgccgcagcttgctactcttcaccttccctcaaatggcctggaccctgcttgcttgtggattctctttctacattgaccaagagtcaaaggcccaccttgcattaattgctctttttatcttcttgttcgccgcgttctacagtccctgagaaggcccagtcccgtttacctactcggcggagatcttccctctctcccatcgtggtaagcatcagtcctgc

SEQ ID NO: 23677 - DNA, 637 bp, Emericella nidulans
agtctacctcgtaatggacttcctcgaacacgatctcaagaccctcctcgacgacatgcgagaaccatttctcccgtccgaaaccaaaacccttctcctccagttcatctctggtctcgactttcttcactcgcaatggataatgcaccgtgatctcaagacatccaacctccttttgaataaccgcggcgagctcaagatcgctgattttggaatggcacgctactacggagaccctccgccaaaactaacgcaactcgttgtgacgctttggtaccgctccccggagcttctgttgggtgcggagagttacggtcctgaggttgatatgtggagtgtggggtgtatattcggggagcttcttacgaaagagccgcttctgcaggggaagaatgaggtcgatcaggtgtccaaggtgtgtaccgtgctttttttttttttctccttcaaaatttagggacagttgccgcacttcaataggacgattagtttaccggcgacagcggaccttagatcggccatgaactcgatcaagagtggctgtttctgcaggaagtcccaattcatcggacctggaggtccggcgggaaacctcatccggacatctagagggactggacgagatatgcttagttga

SEQ ID NO: 23678 - DNA, 768 bp, Emericella nidulans
agaatagtgagggtaaaattgatgagagatttcgagaacagtatgagcgactactcgatattcgaaaccagctggatcggctctctgtcacacaagcgtggtctctccgcgaaacagatctgttcgtttaccaacgtaaacttgaccgaattgatgaagcaagggtaaatggcaactttgtcgacgctgagggaaagccagcagatcttcatgcacagcgggtaggcgtcatatatcatgtttatgtggttaccggagctgactagggaaattgcctttagactctcctctacttgattcggagaagctatgcgtacatttagcgcacgcttaatgtcctcagagcctgactcagaagcactatgacccgtatgcagtcagctccaaacactgcggtgctgtctgctagaggacaaagaaaccggtggtgtatccaactcgcgcgaactctatccatatagtatgagggtaagcacgctcaactttctcgtcacatccaaccacccactaacacgaataagctcaattcaattgacaacatgcgcgttgacggtaaatcctacatagtcgatgacatccccgagggacaaggtggagtgaacgccttgcttgccgaatgctacgacctagtttgggaattgcgggccgcggtggcggacgacaaggagtaatcgacatacctacgcatcggctcactattctaatgctttctctattcctgctgtgtcttctgtttctcttcttccatgtatgaacgatttggaattg

SEQ ID NO: 23679 - DNA, 500 bp, Emericella nidulans
ccagaaacttcggtagctatcataggcgcactgcaaatacccaggtgccagtagcctagaccagctgtggacgcttatttcaacgggacaagtaatgttcagtgaagctcctcctggcagattcaaagagacagtggctggcaacttcatttctgattttgatcagtttgattacgggctatttgacatctctccacgtgaagcaacgtatatggatccgcagcaacgcattgctctacaagttgcttaccgggcggttgagtcgagtgggtatttcgcgtgccctaatcgagagctcgatgttggctgttatgtcggggttggaagctctgattacgaacataatgtgaattcaaacacgcccaccgcatactctttcacagggacttcacgggcattcatcagtggacggataagccacttcttcaagtggtcagggccttcactaaccctcgacacagcctgttcttcgtccgcgacagcactccatcaagcttgta

SEQ ID NO: 23680 - DNA, 530 bp, Emericella nidulans
ttattgttcgaggattccctgggaatgcggcccgcacagaacgtgggatacagtacctaggaaagcgtcttgcaaaatacatccttttaatgacctatcctgatcaaccttatttaccacgcaaaaaatcgaagtctaggaccttctctggtcctgttaacccctgcagaacatcggagttaagcgatggcgaacctgagtgtcttgatttcgacgaagttgaatcgcacattgaggggtaccacgcatatcaaataacaagcatcagcttcatcggacactctctcgggggacttgtgcaaacatatgctattgcctacattcaaaaacactctccaggatttttcgacaatatcaaacctattaacttcattgcgttagcgacaccgttcctagggttaagcaatgaaaacccggtgtatgttcggttcgctttagatttcggcctggttggccgcaccggacaagatctaggactaagctggatcacgccaaagggtcgaagtggatggaaggccataattggtggg

SEQ ID NO: 23681 - DNA, 419 bp, Emericella nidulans
tataaaaccatccaatgtccttgtgaactctcgaggcaacatcaagctgtgcgactttggagtcgcaactgaaacagtcaactctattgcggacacgtttgttggcacttcaacttacatggcccccgaacgtattcaaggcggtgcctatactgttcgctcggatgtttggagtgtaggtttgacagtcatggaattggctgtcggcaggtttcctttcgatacgacagattccgctgctggagaccgagccagcgcgggacccatgggtattctggatcttctccagcagattgtccacgaacccgctcccaaactgccaaggagtgacgccttcccgccggttctgcatgagtttgtcgcaaaatgtctactcaaaaaatctgaggaacgaccgacgccccttgagctatatgtgc

SEQ ID NO: 23682 - DNA, 517 bp, Emericella nidulans
tgacctggtcgattggtctaagtacgcgtacactcaatatgccacctcaagtccgtacctatgcaacgccgtcatggtatttgatgcgctagagagattcggaagccgggcgcaacgagtgttatattatccaaaggactgggatgttatcgctgatagcgacaatgatcgggaccgtcaattgctccggctggcgaaggtcaagtacaaggccatgctggtgccaattgagctggaaatgatcaaacctgacgcaggtgtgttagcatcttctctggtccttcgaattgctcatgatcaatttgctaaaagctgctattctattctctgaataggacctggcgaggaatgggaaaagagcatatcaaaattgctcgcgtttgctgagactgagttcaatcgagttattcacctcgactccgacgtcctcctactgcagagcatggatgaactgttcttccttcctcacacacctgtcgcaatgccccgcgcatactggcttctccccgaacaaaaa

SEQ ID NO: 23683 - DNA, 850 bp, Emericella nidulans
atcgctttaacatttgccatcgggacctgaaaccggaaaatatcttgctagatggtgagcacaacattaagcttgctgatttcggcatggctgctcttcaacctgcaggccattggctcaatacttcctgtggaagcccgcattatgcggctccggaaatcatctacggccgcaagtatcggggcgacaaggcagacctctggagctgtgggattatcctattcgcattgctcactggtttccttccatttgacggagaggatctacacgccactctacaacttgttcgaaaaggtgactatatgattccaccccatgtcagcgctgaggcagcagacctcattcagcgtatattacaaaagaaaccggacgatcgtatcagcatgaaggacatctggaaacacccgcttctcaaaaagtacgaaaaatttcaccaggctatatgcaaccattatttgggccctccacctcctctgtcaccccaggattgtggtccgcctgtggtaagacaggatatagatgtcgacctgctgaggaatctccaaacactttggcatgatgtaaaacccgaacgtctcattgaaaagctaataagtctggagtaagtgtccgtcctaatgtttttcgaatgcttttctgacaaacttcagaccaacgcaagagcggctgttctaccatgctttagtcaagttcaggaacgagcaactcgagaactacgaaggccagcctctcaggtattcaacgagtgactaccaccatatctcaagaggtcaggctcggctatctaagcacttgcggagccgatcacaaaacggatcacaaaggcgttctcgagccccgtcagtcaaag

SEQ ID NO: 23684 - DNA, 850 bp, Emericella nidulans
tcgtttattgagtctcttgaacacaaactccatgaagcggagcggaatgtgccggaccctgcgtctcgacggaggtatagcgctgttaccgtccaaaccgttgacactgcggaaggggatccgcgcattggctgcccagaacattgcggatgttgacaggaaagctgagttagacatgaggctgcttgctcttcgctgtctagatcaggtcattgtcaacggtagcagccgtggtcagattcgcctcactactagactcgtgctcgatttcattttgcgaaaaggacaatcgaataacacatacttgtcgctggatactgatgaaaacaattgggctacgtcattgattgaagtcgtagccaaatggtgtccagttcaggctcgtttcattatctcaagtgctgctatggaagttctgttcgagatcccaccgaaggaagacacacttgacgaagcattcacagtcatatatatcattgactaccttttgaaatcctcagtgaatatgatcggacttagcgtgatcgatgttctgctgggattgatgcgctatatggcaatgttagtatcaccagcatcggctaaagggactgatgaacagcctgactccagcgagaagccaggctacgacgacggcacgaacctatctcagaagaagaaggacctgcttgtactcctccaaaagtgcatcggtgatcttactacgcatatctactacggggatcaagttgttgatatgctcagggcaatcttaactcgaatcaaaccgccgcatggtcaagatcaagtttcagcagtaatacctgaacagctagacgggcatttatcggaagcaaacccaacatctttt

SEQ ID NO: 23685 - DNA, 585 bp, Emericella nidulans
ttaaagctcgtagccctcctcttgtttcctctcccaactgttatcctgtcatctcctacccatcagctggtacaatctccttgcacagaaacatgtcctactacggcgaagcccgcgactactacggcgaacgcccaccggcgccctatgagcgacccccctatgaccgccctccctacgatggagcaccacccgcagaacgccctcactacgagcggcccccatacgagcgccctccgtatgaggaacaccgctcctatgaatcccggcccccctacgagcggcctccctacgaggaatcccgctcctatgactcccgtccgccatactccggccctccaccctctgcccgacccccttcataccccccgccccctctcccaataggctggatccaagaatgggagcctagggctcgccgagccttctatgttgagaccgcgacgggtcgctcagagtgggcgcttcctgatgacgttagctacagcgaggcgtcccgttctggccccggggagtactacgcccctccacctcctgctccagcatacccgcctcaggattatggcgcgccggcctacccgcctc

SEQ ID NO: 23686 - DNA, 850 bp, Emericella nidulans
tcaacatctggacaatttcagtgtctgtagcttgccgccagtcttcgaattatccctacgcaccatcgctgagcaggcattcgcccttcgcaacaaaatcgagagcgacttatttccttacggtcgatggactgaagcgctcgtgcagcgaacatccgagctcagtacgacttggccggtctatcgtaccctgacgaccaatatcgaacgctggtgtcgctccaagaacgcggtcgccaattctccatcacaaccattcgctcacgactcgaacaacaatcctgcaagagggatgaacaggccctcgaattacagcccttcccaaaattcgctatctatgtccttaactgagaatagaggttttgaacgcgactctcagttaccaccatttgccagacgaaataccatcgacgtcgtggagcctaattacagttcctctatcatgggaattgccattcccgttgatggacaatatatgactcccaaagacacaactatggaaagctccgatgcaccttttccacctcagtccatcaataactcgcaatcacataatcctaaaatgtcgtcctctgcaatggacatcttagacccagcgaacgagctagacgcaatgctcgatggcccctctcatccacaccctccaacaccagactcatcgatgtccaacccgccagtttcgggaacttccaccacaaacgcagccgcacctgcaaacgagcaaaccacagcattagcagataaaagcaactctgcatctacatccgataatcaaatacaaggtgataccagcgcggccagtcttgacgctatcttcaaagaccttgcttacctcgacacaaccgagtgg

SEQ ID NO: 23687 - DNA, 333 bp, Emericella nidulans
aaccaggccgggttctcgcagaaccgccagactcccgcgccacaacccatgcccgcagagctgccgttgatacaagaacccagtgtaaatacggccgcgccaacgccagctccccgtgtctcaagtccgagcgttggtccggcctcgcaacaaagccctgccacgcaacccttgccccccgtgccacaacatcaggcaacggcctcgaggccaggcccacagtatcagtaccagcagccgccctttcagggtcagccaattcagtcccggccgccccaatacggttctccggctccgtattaccgttccactcctgcgaagccgccagtacct

SEQ ID NO: 23688 - DNA, 850 bp, Emericella nidulans
gttaggactttggtaggttgctcaaacttggacttgtgaactgttgctgaatgttcagatgcgagcaactggtgatcgactcgaggagaggtttgctatcccggtagctcgtgagctggctgctggattacgtgctatacacgatgcgggcatcatccatagagatattaaaggtgtaaacgctatgttacatgatttggtgtaaactcttgctaactcagatactagctgccaatgtccttattcatgaggaaggaagactacaaatatgtgactttggtgttgctggtgttctccagtcacaaatggataaacgatcgacctggatcggtacaccccactggatgcctccagaaatgttcactgccaagcaggatcatcagtacagtagcgaggtacgtacattgatactcgtcatatattgtcactgacaacctcaggttgacgtttgggcatacggttgtacactgtttgaacttgctacaggaaacccgccaaacgcaaatcttcgagagagaatgcagattggcagacagttgaacagaaaaacaccacaactagcagatggcggtgaataccctgagggtttgagagatctagtagcatatgctttgaactcagatccggttacccgaccatcaatggcggatattttattacacccctatattgcgaattccgaggaagagtacccaacatcatccctgagcgagctcgtccgcatatactaccaatggtcccagcgcgggggccaacgcatttctctatttcatcctggcggagctgcagcagcggaagtgccagatgttgaatcagatattgatgaggattggaatttcagcacgacgga

SEQ ID NO: 23689 - DNA, 500 bp, Emericella nidulans
gcatggacgacccagtctctatcatgctgccgctctacgaaggccgcacctgtattcctccaggctataactacacagacacctgcacgcagggcgggtacccaacctacgtggtcaacgccacgaccgtagcccagatccagatggccgtcaacttcgcgcgtaatccgaacttgcggctggtggtcgagaacactgggcacgatttcaacggcaaggccgccgggaagggtgccctatccatctggactactggctgaaagacaaagccttctatccagagtatcatgctgacaacggctacgtcggccctgcaatcaagttcggtgctggcgccaggtctgggaggcgacgagttcgccaacgagacggagtcgtactgtcattggtggcgaggctgtgactgttggtctggggttggctatactgcttctggtggccattcgcccttgagcagtctgtacggcatggctgctgaccaggttttgtctatggaggta

SEQ ID NO: 23690 - DNA, 828 bp, Emericella nidulans
aagatgaacatcctccactcgacattatccacctggcgtgaccgcctcgcccccgtctcacgaacgtccaccttccgcactaccggccagatcacacctgaagaattcgtccttgccggcgactatcttgtttacaagtttccatcctggtcgtggggcgacgcctcatcaccctcaaagcgagtctcgtaccttcccccgggtaagcagttcctggtgacgcgcggggtaccttgccaccgccgactgaacgagaatttcgccggtgatgcacatctcgacgatgagatagtcagggactttttatctgggggtgcgggggattcagatggaggcgatgataatgatggatggttgaggacgggtggaggtggaaagcgccatgagagtacgattcgcgatgtgaggaccgttgatgaatcaggaaaggaggaggcagaagtggaagaagaagaggatattccggatatggaggatgatgatgacgaggaagctatcatccgtgaacctgcagggacaacgagcactactcagtacgaatttcgttatcgttttgtggtgctggcacactgacaaaatgtaggcctacccgaacctacaacctatacatcacctactcaaacttctatcggacccctcgtctctacctatccggctacctgtcaccgtctgagccgctgccgcccaagctgatgatggaggatatcgttggcgactacaaagataagaccgtgacgctggaggacttcccttggttcgatgggagtctacaaatggcaagcgtgcacccgtgccgccacgcctcagtcatgaagacgctcctcgacc

SEQ ID NO: 23691 - DNA, 850 bp, Emericella nidulans
gcagatgtttgaggacccagagtacgattggtgtctgtttacagcgccacaggaagcgaacaacggcaaggtccatcatataccgcgcggaaaagtcctcggcggatccagtgcaatcaattacttgatgtatgtacggggatcgctgcaggactacgatgactgggccgcgcttgtcggtgatgaggggtggtcagctgcaaacatgaaggcgtatatgcgcaaacatcaggctcgtaatacctttgcaaatccatcctatgagatatccctaacactccccttcttagaccctagaaccggtcaatccagagtccaaggcggcagcatctcccatcgcccctgagcaccacggtacgaccggccccattcgaacgagcttcaatgagtcaaacctgcccatcgaaaccgactttgtcaaggcttgcgccgagacggcgaacttgccaaacatgcctattgacgcttggagcggagaaccatatcggttctaccataccctgggcgctgtcgcccgtacgggtccgaaccgctggaaacgaagctactcctggatcgagtattacgaagcgaacaggttgcggccaaatctcaaacttttctgtgaagcgcgtgttaacaaagacattctcaacggtactagggctaccggcgtcagtataacattccgaggacaggagtacaccgtctatgcaagatgcgaggtcatcgtttttggcgggaccatccagtcccctcagattctggagctatccggcattggcgacccagaaggtctggctgcctccggcgtccagagtatgcttgagaaccctgctgatcggtgctaacgtacaggaccacagtgtca

SEQ ID NO: 23692 - DNA, 850 bp, Emericella nidulans
cccgcccaagcatcaagacatcgacgttaagcatatagtcacactagtccagcgtttgcattcttcagaagaacagctgcagacacggtggatcaatgccgtactgggtcgaatgttccttgcgttgtaccgaacgcccgaggtggaggagtttgtccggaccaaaattgtcaaaaagatatcgcgtgttaacaaaccgaatttcattagcaagatagggcttcgaagcatcgatatgggaaatggtgcccccttcatcataaacccaagactaaaagatcttactgttgatggcaattgctgtgttgaaacggacgttcagtacacgggcagcttccgggtggagattaccgcaactgtacgcatcgacttgggacagcggttcaaagcgagggaggttgacatcgttctagccgtggtgcttaaaaagctggagggtcatatgttgatacgactcaagcctccaccgagcaaccgagcgtggatctcttttgagtcaatgcccaatatggacatggatattgaacctattgtcagctcgaaacaaataacctacggtatcatattgcggactatcgagagcaaaatccgagaaatggtagcagagagcattgtcctgcctttctgggatgatgttcctttcctggataccatggcgcagcgattccgtggtggtatctggcagcgcgattcttccgagcccggttcaacagttgaaatacctgatgagtctgggtcccggccgcaagttccagagagcagtggcacggtcaaagcatcgaagccggcagatgatccctatagtgagtcgtattatgcggccgcgaattctcagttggagttcaaaacc

SEQ ID NO: 23693 - DNA, 749 bp, Emericella nidulans
gcttgggaacgggagcaggaggaggtggccccggaacacagggccctggacaaagcactgcgactgtcccagttgtctcaccttcgcctagtgccccaggaggtggtactggaggcagtgaagttcccggccaaagcaccccgaccgtcccaatcgttacgccctcacccagcgttcctgggggcggagctggaggtggacctggccctcagggtcctggccaaagcactgcgactgtcccagttgtctcaccttcgcctagtgccccaggaggtggtgctggaggcagtgaagttcccggccaaagcaccccgaccgtcccaatcgttacgccctcacccagcattcctgggggtggtgctggaggtggacctggccaaagcacagcaactgttccagttgtctcaccttcgcccagtgtcccaggaggtggtgctggatgcagcgaagacccgagccaaagcaccgtaacgatcccagttgtttcgccctcgccatcgcccagcgtccctggaggaggagcaggaggaggccctagtcaaagcactgagaccgttccagttacctcgccctcgcctagtgtccctggaggtggtgctgggagtggtgaaggtcctggcacttcaccctcaccaagtgccccaggaggcggcgctggaggaggtggtgaaggaggtggtcagagcactgggactgtcccagttgctacgccctcgcccagtgctcccggatctcagggtcccggtgga

SEQ ID NO: 23694 - DNA, 850 bp, Emericella nidulans
caggtaccaaggatggctacaaatgtaccctcattttgacggaaggggagtctgcaaagggtctggctatggcaggccgtgctgtggtcggtgcagatctttttggtgtctatccgctccgtggaaagatgcttaatgtgcgagatgcctccttcgatcaaatctccaagaacgaagaaattcaaagcattaagaacttcatgggtttacagcacaagaaagaatacacagatactaaagggcttcgctacggtcatttgatgatcatgactgatcaggatcatgatggtagccacatcaagggcttgctcatcaactttcttgaagctcaatttccgagtttgctgaagattcctgagtttttgatcgagttcattacgcccatcgtcaaagtctggaaaggcgacatcaaagacccgacgaagcaacactcattcttcactatccaggagtacaatgcttggaaggaaaagcatggtcacgagcgcggatgggagcacaagtactacaagggtctgggtaccagcagtaccgaggaggcccaagagtacttacgtgatctcgaccgacacctgaaggagttccatgtcatgcaagacaaatagcatgaactgattgagcttgccttttctaagaagaaagtcgaggaacgcaaagaatggctccgccaatacaatcccgacacgttcatggaccactccgtggccaaaatcagttacactgattttatcaataatgagctgatccagttcagtatggctgataacttgcgatcgattccatcgatggttgatggcatgaaatctggttaactaaaagttatgtacactttctatttagctttacttca

SEQ ID NO: 23695 - DNA, 850 bp, Emericella nidulans
gttctggaacgtctagcgtccaacaaccaagccctacaaaggcatgcaatgacgtgcctcaatgtccttacacaagcctgcggttacccagatactagcaccatgattgtcgagaacgtcgactatctcgtcaactccgtggctatcaaactgaacactttcgatgtatcgccatatcctccacaagtcttgctaatgatggtaaaattatgcggagcgcgacttgttccttaccttgatgaccttgtggactcgatctttgggatcttagacctttaccacggatacccaaagcttgttgaactgatgtttaaagcactatctgcaattgttgaagaaagcacgaagactccctcaatcctagcgattgagaatggtaccgggaatgcaccagatcatctgaaacgaaaatatcaagaactaaacattcatactcttgcggaagatttcgctcgccgaaaagccaaacgcactgaagatgccgggttggcaggagataatggacttctaaatcatccaatccggccttgggctgaagaacgcgaagataaagccccaaaggacatccctgacagcgactctctgtcggatatcctgggcaaagatgaaacggaggagccattaccaccacctcgtgaaccagaagatgcagaaaaacccctaagcaaaacgcactcgcttctcctccatatagtcaaatccctgcccttgcatttgtcctcaccatcaccatatctccgtcgatccttgctctccatcctcatcgacgttctccccgtcctcgcagcagacgaaaacagtttcctcccgctcatcaacgacctctggcccgctgtcatatcgaaaatca

SEQ ID NO: 23696 - DNA, 500 bp, Emericella nidulans
atgtctattccaaacatgcagtcatcgaacccgcagcctgcgagaatggttcgtaaatatgctgtggggctacgggcggcgcccacgcgcatttgccaggatcgcattacaggagttggacgccgcttctatgaagctcgttggaccgcggaaaaatattttcaagggaacagagcttgatctcatggagggtccacattatatgaacagaagggatggtactacctcttgacagccgaggacggcacagcctacgactaagcgtgtacattggcgcggtcaagggatatctagggtgggatatctggggtccctacgagacgcatccagagttgcatatcttaacggccaaggatgcgccatttgctgctatacagcgcgcgggacacggtgatcttgttcagactcctgaggagagaacctaccttgctcatttgatgggtaggccggtgggacaaaaaagaatgtgtgtccttgggcgagagacaagtattcaggag

SEQ ID NO: 23697 - DNA, 850 bp, Emericella nidulans
caggtttatgaatacttcatctctcatcatttggccaaggctttcaagtctttgtttggcagcgttacctgtcttcccggatggtaagtctattatcccactgttatacacacatcactaacgacacagtttctgtatgtaccgtcttcgcacagcagaccgcggtcgtcctttaattatatcggagaagcttcttgaggagtattcggataataatgtcgatacgctacacaagaagaacttgctggcccttggtgaagatcgatatctcaccactctcatgaccaagcattttcccaccatgtcttacaagttcatccccgatgctttcgctagcacggcggctcctgagacatggtcagtccttctgtcgcagcgacgtcggtggatcaactctacaatccacaacctggttgagttggcggccttgaaagacctttgcggattctgttgtttcagtatgcgttttgtggtaatggttgaccttctgggtacaatcatccttccagcgacctgcgtctaccttggatatctgatctaccgcgttgcgagcgacacggggcccttcccaatgatctccattgtcatgctggctggtatctacggtcttcaggcgattattttcataatcaaacgccagtggcagcacattggatggatgattatctatctctgtgcataccccatctacagtttcatccttccgttgtattccttctggaagcaggacgacttcagttggggtaatactcgtgtagtcattgaggagaagggttcgaagcgcattgtcgcggtggaggacgagcaattcgatccccgcagtatcccccttcagcgctgggacgactat

SEQ ID NO: 23698 - DNA, 850 bp, Emericella nidulans
caaggtgcaaacctgaacacacaagactataatggaaatggcgttttacactacacagtccgaccatatactttcagctttgaccactttcaaaccttgctttccctcggcgcagaccctgggttggccaattacaaaggcgatacaattttgcaccatctggccgctaaccttgccacgttctcagatgggaaggcagtccttgcaatccttgatcttcttaatcggggcatgtcaccaacattacgaaaccacaaaggacggaccccgctgcatttgctgtgtggccaggtatcgcagcactattttatgccctcgacggtctcgcagtcctcggccattgacgtactgctcgacgccggtctagagctggggatcaatagtgtggacaatgatggtgccgcccctatccattttgcagccactgtctcagaggcactggtggctaatctgatatcgaggggggctgtccctacgtccacaacgaaagaggggctaaacctgctacatatagcgtcgatagcgcggcagggcaatacagttgggctcttactggagcattatacgtggactggccagatagccctcgtcaacgcccgctgcaagattggacgggctccgttgcatgatgcgtgtcgctccggtcgcttggagactgtcgcaatgctgctgcaagccggagcggatgtcaatgcggaggacgcgaacgagaaacgggttctggatgcgtgcgcggagtttacagctgaagaaaagctctgggaactgacggaagacagcatgaatttgttccacactttacagaccggcggtgtcttacgcgaactggagaccagaccgcatcagccga

SEQ ID NO: 23699 - DNA, 850 bp, Emericella nidulans
ccaggaaggagggcaaatccgtcgtctcccgggcgcgccagagcaaacagcgcgagaagttggcgactcatcggacccttttgcggcagctggtgagatgggcgcaggcgcagcggaaacgctgacgagctacaacatgaacgcaaacctggcgcccgtcctggctgtttatcgagaggagggtgatttcacggatcgctatggaagatcgtacagcaataatgcgacagtggtgtcgggctgtgcggcgcagttcgtcgagaatcagcagggagcgaatgtccttgcgacagcgaagcatttccccggcttgggggcagccgcgacagaggagaacacggatgaacgaccagtgacgatcgatatatcgcttgacgaaatccgtacagttgatgaggtaccgtatcatgatgtgatacaggccggggtagccatgatcatgccgtcgtgggcgatctacccggcgctcgacgccgagcggccggctgggatgagctcgcgctggattcaggaggaattgcgcgggcgactggggtatgatggggtgattattactgatgcaattgaggcagggtcgttgggggcatttggcgacgacaacaacagggcgctgttggcgaagaaggctggagtggacctgcttcttgcgtcggggaggaatgtcacccagggggagagcattgttgctgccttggacgctgcgctggagagcggagagttgtcgcaggatgaattggatgcgtcaagtaagagggtgcaggaggtgcgagcgaggctggcatagatctaagccctagcgtctatcgtgctggcgcaactggtctacctagtacaaactcgtactatcata

SEQ ID NO: 23700 - DNA, 850 bp, Emericella nidulans
tcaagcatggagcgtttttggatatcacacacctggccaaagttatgagaaattggctaggcgacatcacctttcaggaggcgtataaccgaacccggagaattctcaacatttgcgtatctagcgctggggtgtacgagctaccaaagcttctaaactacattacagcccccagcgtattgatttggtctgctgtgtacgtgaactgcggagttgtttgagagccatactaacattcgcctagggccgtttcatgttcggtgccggtagtattttcgccctttaccttgatggccaaagacccgctgacaggggaacctgttccgtggaatgaccttcacaagcaatatatagacggctccgttgacggagatctgcctatgaatcgcttgtcagaaatgttcaacgtcaaccactttattgtatcacaagtcaacccgcacattgtaccatttcttcccaaagccgatgagccgaagagtgtggcggtcccgacgtcaagattctctcgacttttccatactgtttcacatcttgcaaaggaggagattatgcatcggatggcagtattgacggagcttggcgtttttccgaattccttcaccaagtcaatttcgattatgaatcagaagtactctgaagacatcaacatctatctgagattcattatgcgcactttcctcgattattgaagaaccccaccactgattttatgctaaaggcgtgcctctgtggagagcgcgcgacatggccaaagcttgcacgcatccggaatcattgcgcaatcgagttagcattggactctgctattcagaaaatgcgtgctagggtcgctttgagccatagccag

SEQ ID NO: 23701 - DNA, 850 bp, Emericella nidulans
gtatgctgccatcagcaagcttcctcccatacttcagattcaagttcagagagtccagtttgaccctgtcaagaagcggtctttcaagtcgacccatcatttagatctgaaggagattatttaccttgaccgatatatggatactcagcagcccgaaattgtgaaccgccggaaacaggcttgggagtggaaggataccctgagaaaactcgaagcccgccgagcagaactcctacgccaaagtgtatgcgtcaacaaatccgcagtgttgtcgttctcacgagctaacttggtttataggaatccgatggtctcgacactgcaacattattgaaaagcgccaaggacatcttaactgaactcagcgccatgaagcaggaccccgacgcctctcaggatgcaattgatgttgaccctcaactcatcccagagctcagtcgactcgagcagaaggcacaagatgaaatgaagcgtaggtcaaccgccaagtattattacgaacagtatggctaacccacaaaaaggcctggaacaagaaatcaaaaatatccaggcaatgatctccaaccagttcgtcgactacaaacatctgccctatcgtctttatgctgtctttgtccaccatgggtcggtcgaattcggacactactacatctatatctgtgactttgagcgaaatatttggcgcaaatacaacgacacctacgtaactgaagtcagcgacctggatgagatattcaaaagccaggatcgccacaaccctcctacgccatatttcctggtctacgttcatgacggattgaaagaacgccttgtcagtccggtagccagagagatcgtggagacgaca

SEQ ID NO: 23702 - DNA, 850 bp, Emericella nidulans
cacgaaatgagccaaacgtacgtccgcttccaaagacttatcagattagctaacagatgtataatgacaacagcctacttacgtaaaagggtcttctgagcgcctcaagattgagtcggccctctccaagctccgctcacagctgcccgtccagagctccatctactacaatggcaaagtccaggctgcctggagatcatgggatcagccactgcccgccgaacacggtacgacgttcacaaactaccccgtagcctcaaaagattaggtctcagctgcgattgagtcggcactgaaagcgaagaaggactgggagaacaccccctttattgaccgcgctgccatcttccttaaggctgccgagctggtgacgggcaagtacagatacgagctcatcgcggccacgatgctcggccaggggaagaatatctggcaggcagagatcgacgccgcagctgagctggcggatttctttcgtctcaactgtaactttgcggcggagctgcttgagagacagccgactagggggacagttgggatgtggaggtaacttgcccccgttcttccagcttatatgcaataagtgaagatgaaggatgctaatgttagacagccgcatggaatatcgccccctcgaaggcttcgtctacgccgtctcccccttcaatctcacagccctgggtggctcccttctgtccggcccggccctcatgggcaacgtggtgctctggaagccctcgcctcccaacgtctacaccagcacactaatctacaagatccttctcgaagccggtctttcagcagacgtggtccagttcgtccccggcgcgcggaagaaacaccgcatcgt

SEQ ID NO: 23703 - DNA, 499 bp, Emericella nidulans
  unsure (1)..(499): unsure at all n locations
tgggccaacactctgcccgagcggcaaggtctctatgacccggaatatgagaaggacgcttgcggtgtaggctttgctgcgtaagttgatttcctacctgcaaccggtctgagaaagcaggtcctaatctgtgcttttctgcagaaatattaaaggcaaggctagccataagatcgttagcgatggtgagtccctaagagcagaaatgcgggagattatctgctgacatggcgtcctttacagcccggaatctgctctgtaacatgacgcaccgaggtgcggttggttcggatgcgcgagacggtgatggtgccggtgtaatgaccagtatccctcacaagttcttcattaaaaactttgcgcgcgaagtgggtgtggatcttccccccttggccagtatgctgtcggtaacttttctcaaacccgacgaggaggctttgaaggagccatcaagcagtttgaggagacnccacgtcgcttggactgcgcgtacttgggt

SEQ ID NO: 23704 - DNA, 500 bp, Emericella nidulans
acaacacatcgacatcagcagacggggtcggggcagcgtcctcatccggtacgggcggtgacgcacaggtgggaggtcgctcaaatacggatgccacgccttcgagagggtttcagcgaacctccacgttgttgcctttctttggcggcacgtcaagttccggatcgaatcgccatatcacttcatcaaatgatggggtttttgcgaatttggcagccaagccagagaggggggaaaagagtgaggatttgcctccggtatgtgttttataatcgaggtcactatacggtttaactaacctttactgtagtcatatgaagaggctgctgccgatgcgactccaccatactgggagaccactattgtggcacctggtatttcgtcggatgaggtctacgttgatgggctgccggtcggctcgatcttctctttcatttggaatgccatgatttctatgtcgttccaactagttggcttcctcctcacatatttgctccaca

SEQ ID NO: 23705 - DNA, 710 bp, Emericella nidulans
ttacgggctcaccgaccgatgacaactctcagaagaagggactcgtccctcgtatgaaaaatggcagcatccggttctttcgccacacgaagacggcaatctgccacagctgggtcaacgtgctcctggtctttgtgccggtcggcattgccgctgaggctgctggactcaatccatcggtgattttcgccatgaatgcggtggctattattcctctggctggacttctgagtcacgctactgagtgtgtcgccagccgaatgggcgacgctattggagccttgctcaatgtcacctttggcaacgcagtcgaactgatcatcttcattattgccctcgttaagaatgaaattcgcatcgttcaggcatctttgctaggctctatcctggctaatcttctattgattcttggaatggcatttctccttggaggtctccgtttccaggaacaaatctacaacagcactgtgacccagatgagcgcttgtctgctcagtttggccgtcaccagtttgctgctaccgactgcttttcatgcctcatttaaagactcggatgttgctatggacaagaccctcaaagtttcccgaggtaccagtgtcgtcctgctcctcgtttacgtcctctacatcgtcttccagctgaaatcgcatgcttatctttacgccagtattcctcagcagatcattgatgaagaatctcacccaggt

SEQ ID NO: 23706 - DNA, 834 bp, Emericella nidulans
tggtcagaattcaggattgaccaatcagaggctagaagtagctatcccaacatataggacaccaagcttggacaagagccaggaagagcctatacccaagcctttgaaaacaacttcataactgtcattatctccattgtcaaaccctatcctgacagaaccctctaagatatgtagaccaagccaaaattaaaagccaatacaggcggcaattaagtccaagcagacagaggctatatataggcagaagccatgagcctagagatacagagaagagagggaagtactaaaagatccttctctgcgcctagctgttgaacagcagtaaattaataaagtgactaatctagctatagccctggagcttcatcttgctgattataatactttcaaagccaaggttaataagatctatgggcagatcctattccaaagacctaccaggaggcaataaatgaccctatatacagagccaagtagaaggaagcaattaagcttaagctgaataacctgatctaattcagcacctggagatatatcagaagacctaaagattaactagtagtattaataaaataggtttttgatatcaaatatagagctgatggccgagttgaccggtttaaggcaaggctagttgccggaggcttttcccaatacaaaggattggactttgaggatatatttgctccagttatccggctagagagccttaggatcctatttgccttagcaacagtccatggcctcaaagctcacctccttgacgctataaatacctatgttggatcgaaaattgataagcagatctttatagagatcccggagggagtt

SEQ ID NO: 23707 - DNA, 596 bp, Emericella nidulans
ggtctgaatattaccgaagcttggaacgaccttcaagtcctcactgcaggctaccgcccgtataactcccgccagaacgacaaaattcatgattggttgctgcaccgcatcaacgagatcctgggcgcagcgccacccgcgactactgacgaaaagaaacctgacgttttcgtcttcgacgacacgcgctcaaacctgacattcgcccgcgacaatcttgctgtatactttgaagggaccaatatacttgtgtatatccgcggcgaagatgacgaccaggaacaatggtgggagttgccggagggaagtccgaagggcaaaggaggtgtactggtgaacgcccactacgacagtgtctggacgggttacggtgctacagatgatggggttggttggttgtgactttgtctgcagctggtcaaatacttcacgactccgaaaaatgcgccccgaaagggactggtgggtgttgtttaacaatggcgaggaagaatttctgaacggcgcccgggtatatagccaggcatccgtatcgagggttccggatacattccttaattggagggcgtcggccctggcagacgcgcggggctttc

SEQ ID NO: 23708 - DNA, 500 bp, Emericella nidulans
cttctagaggtccacgggcctagctagagcttattatgtttgaatcagtctctcggcctgcgacgcttcacaaacaccaggaacaatctgacaaatctccctactcacgatctccttcgcgcgtctcccgaagtcaaaccgaactctttcgtcgacgcccagatgcgaatatctcaacaactccggagaacgagagatacttcggtaatatcccaccagcggcagatgaaaagaatctgagaaactttctcaagcatgccgggtttagcgtgtatggtgcactcgaatagccgtctgttggcacactgactctatctagtgccaacatccgcatcgcaatggacccgtttaccggcaataacccaggatactgcttcgtggagttcgagacaagaaaggatgctgaccgcgcagtggagctgctgacaggacgggagtttaggggccgttacctcagggttgaacatgttgcgagcaaacaacgccgcatgaagccgaaa

SEQ ID NO: 23709 - DNA, 850 bp, Emericella nidulans
aagctagtttccgaggtcggagttggtattgtcgcctctggtgtggctaaggccaaggcggaccacattctcatctctggtcacgacggtggtaccggtgcttctcgctggactggtatcaagtatgccggtcttccttgggagttgggtctcgcagagactcaccagaccctcgtgctcaacgatctccgtggccgtgttattgttcagactgatggtcagatccgcactggacgcgatgtcgctgttgcttgtcttctcggtgctgaagaatttggcttcgccacgactcctttgatcgccatggggtgcattatgatgagtaaggatccctgtccggtatacgtatcattgcagccgctaatttggtgtatagggaaatgtcacctaaatacctgccctgttggttcccccagcagttcacccttgttgtattatctacatttattaattaattctttaggtcggtatagctacccaggatcctgagcttcgcaaaaagtttgagggccagccggagcacgtgatcaacttcttctactacatcgccaatgagctgcgggctatcatggcaaagctgggaattcgtaccatcaatgagatggtcggtcgtgctgagcttcttaaggtccgcgacgacctgaccaatcccaagcaggagaacgccacatgatataagcggctccaaagaatatgctctgtatgatatacagcggccacctacaatgtgcgaaagcaagatcaccgacttcacactagtcttgacaacaagatcattgtagcgttcgagttagccgtgcttaagggtcctcacctgaggtcaagcttctgatccatcaacgcccaggaa

SEQ ID NO: 23710 - DNA, 500 bp, Emericella nidulans
cagagcagctgtttgccagctccgtgcgggagatggagatagagagtgttagaatgttgctcgaggccggtatgagccccaatggctatattgacactgttgacgaggggtcactcactcccttgcaatatgctacgcttgctcttggttcgggggatcccaaagccttgcagctccttgaacttcttctgtcccatggtgcagatctcgacaaatctagcaacgatatttcgccccttggatatgcacttcagatccatagcctggaagccattgatgaattactctcccatggagcatatgccacaccgtcatgcctagcatttgctgcttatagtctcaaagattcagagctcttcaagcaattactgggtccagatacagatgtcaacgcacggagcgggctgcagggccccagtccattgagccaggctgtaaagggcgggaacatcgaaatcatcaaagtcttgcttgatagaggagccgatttgaatgcacta

SEQ ID NO: 23711 - DNA, 641 bp, Emericella nidulans
tgttcgaacgcctcgtgaagaatggattaaaatatgttccccttcaacgccagcgcagaatggtgccggagattcgccagttgttgacacccatatatgggacactacaagatcacgaaagtgtctacgaacgcgaagaagcgccggggatgggaagtatccggtcctatttttttttctcgtgattggtcagagagctttgacgacatgtcgtcaaaatacaacgagaaaaaagcagagatggtcgtcgaattcttcatctaccttgttctgaacaatgttcctgtagatcatatcacggtactcacgttctacaatggccaagaaaagaagattctcaagttgatgaggaaccatacccacctccaaggacactacgtcaaagtggtcactgttaattcgtaccagggagaagaaaatgaagttgtgattctatctcttgtcagaaatggccgacagggaactgggttcctctcgattggcgaccggatctgcgttgcgctctctcgggcatgaagaggcctttacatgtttggcaaccgtaacccccttaccagcgataagctatgggccaagtgctctatgtactagaaaatcaaaaacaagaacttcgtataggcaatcaactaccattgacttgc

SEQ ID NO: 23712 - DNA, 850 bp, Emericella nidulans
caactggaaagatattcgatgcgacagaaccggatactatatcatatttgagaactctcggcgcggtgaagaggaaactgaacgctgttacaagttctgccatatgaaacttttattcacgtatatcatgaatatggaaagccaaccgtacggcaatccgcattacgagcgcagccccagtcccgagcgcatgaagcaagaacaacggcaaaaagcggaaactgaacgattgaagaaagaggcagagttggacattgaagaagaaaagaaacagcgagccctggatttggatccctgcactgaagttttggcgatcgtaataaaggatctaagggacaaactgctcgaagacgttaagtcacgcattgctgcccccgctctgtatgattatctcgacccagaacggcatgcatcaaggaggaaacaactggggatacctgatcctgaaggcattaaacgtcctatgttccgccttgattttgacagccgtgatagtacacccgacccacatgcaaaattcttgaataaacggcacccttcaggcgtatctggtctgaatatactctctgcccttccaaggattaggaaagctcatcgcctcgaccgtacggacgtcgctttcttagacgagaggcgcaagcaaccgctacggagaagaaatgtccgaccactttaccatcgattacagcagctacatgatgcagaagactctgatgaagagcagcatactccactttcccgagacaccgatgatcaggacagtcgtcctcccagtcgaattggctcagaaaccgaatctgaggatgcggatgaagatgcagccgaagcattggataattcaacagaaagg

SEQ ID NO: 23713 - DNA, 516 bp, Emericella nidulans
tttctaaatgctgtccgtcgagatgacgatactaaatttgtctggtccatgtctgctcttgtacttcgtctagcgcaaggactcggcttgcatcgggatggcaacaacttcgacctgaagccattcgaagccgagatgcgccgcaggctatggtggcatgtcattctacttgaccttcgatcatctgaggatcatgggacggacgttcaaattcatgaccagatgtttgacactagactccccttgaatatcaacgacgcagacctttctcccgacgcgaaagagccgcccaaaccaagagttgggtttaccgacatgactttcttcctcatccggtgcgatatctgctacgcccttcggcgagtggcatatacatgccctaataccagtggtgcaatttccggacccactccagataactgcccaaatgtaatacaaactgtgaatatgcacattgaagagcaatacctgaagcactgcgacatgtcagatccaatccagtggattagtgcgagt

SEQ ID NO: 23714 - DNA, 850 bp, Emericella nidulans
ttcaagctaaccgaaaaaacgccagtcgttgcccatcctcgacggtgacaacggcttcgggttcgttgttgccactcgcggcatggccgaagcgatcaagcgggctgagatatatggcattggaatggtcagtgtcaatcactctaaccactttggtatggcggcaacctacgtgctccaggcattgcaggccaacatgatctcccttgtcttcaccagctcggcgaagcagatgcctccatttggaggaaaagagaccccccttggcatcgcgccattcgcggcgggggccccttccaacagggaagttccgtatatcctcgatatagccccttctgtagttgccaaggggaaaatccgccgggctgcgggcgcggcgagtccatcccgcttggctgggccctagacgcaaatgggaacccgactacagacgccaatgtcgcctcaacggaagtatggctctgatcggcggaccaaagggttaggctctggaattgctatcttgatggatatcatgtccagtgttttgacagtcgcggggttcggcgggcaggttggcgatcggtacaaggatgcgaagccgcaggatgccggccattgcttcattgcgatcaagccagatgtgtgcttcagtgtcgacgacttaaaggcacgcatggacacattagtgcagagggtgcatggggttatcccggcgccggggttctccgaagtcctattccctggcgagccagagcagcggctgtgcctgcagcgccgaagagagggcatcccgtacgcggacgcagagaggaagatgtttactgagtctgccaagcaatatggtgttcctgagctgcttctttctgag

SEQ ID NO: 23715 - DNA, 500 bp, Emericella nidulans
cggctcctccaagcgtaggttggtcccggcgccgtctctgataaacgatggacgtacgacgagatccaagccctaccctttctggacgccttcgtcaaggaagcacaacgcatgcatagtccatctttccagcctgctcgaaacgtcaagaaggacatcatccttccgggcggatgggctctgccgcagggttcaattctcatcccgagtattcctcacctccaccaccacacggcatactgggagaatccggaccgcttcgaccccgaccggtggcggacggagaaagtcaagaatcggcaccgaagcgtgtatgtgccatttgcagctggtccgcgcagctgtatcggattcaacgtggcgttgcaggaagtaaagatatccttggctgagcttgtctaccgctacgagtttgtgaacgccaccaacgaggggatagagtatgatccggactttatcgtgattcgcccggtgaatttctacgttcgggccattcggcg

SEQ ID NO: 23716 - DNA, 500 bp, Emericella nidulans
ctggagcctcggcagcaaaagcattcttgaagtactggatgtctgcaaaccgcaaaggtcagtgagtttctagtatgagctcaggcagtattaatcttcttagcaggtgcaaacagaagcagaaaccgtcacttggtgatcccctttgggagaaattcccgctttgtgggccgccaggatgagatccataagttggaaagtttaatcttcatgcctgatggaccgagaaagcttgccattactggtttaggaggagttggcaagactcaagtagcccttgagctagcgtaccgtatgcgggacagagaggctgactgttcaattttttgggtcccatgcaccagttatgaggttgctgaacaggcccttttgtccattgctcaaagagtagagatccaagacacgcagccagaaaagttgaaagaacgcctcaagacttacttcggccaagaagacaagaattggcttctgatattcgacaatgcagatgatatggatat

SEQ ID NO: 23717 - DNA, 500 bp, Emericella nidulans
agtagcgtggtgcatgatccgcagaagctcgccagagagaacagaatgggttgtttgaacagaaagtcttgctttagatggacttgaaagatacccccctactttgtagcaacaaatcaccacactttcaaccatggatgacgagtccacggaaatatttactctcacggactcgttttctacaaagccctgagcttgtctcagggcgaacgcccacgaagaacctcagcaccacccgccctcatttcctcaaacttcgccgagatctccgccgactgctcctcgaccatggtatgccgtctcttcacctctgcctcaaaaattgcagccgtcttccgccgtgcatgccgcaattccttcatctttgtcatcagcttactgaactcctcaataagtaagtcaccgcagccttcccaatcgtccatcgagagtttgctgaagtattccccgcgctcctgttccgtaaggcggagaagaaatgctatcttgtcttcgtcttt

SEQ ID NO: 23718 - DNA, 509 bp, Emericella nidulans
gcagggctagcggacagttactatctcgccgcgttgccatttctcgaagcatctctgaaaaggatggacctcaaatccttgcagtgcctagtcttgatcgctcagtattcattactgactcccacgagaaccgccgcgtattgggtcgttggaacagctgtaaagctatgccaagacctggggctcacagaggaagcgacaataacccggtcgcgcactgggaagcagttggatcctttagaagtggacatgcggcggaggttattttggattgtgacttcgatggagttcggtctctcacatagtttgggacggccaagctgttattctgtcagtcatgaccatatccacgtcaagttttttgcacaagtggacgataagtacattacccgagaaggcatacatcccgatgccaaaccagtcctgcctaagtgtattgcaatacacttcttcaagatgcgccttttgcaactcgagattcgacggaccctttacttgaacaaacggga

SEQ ID NO: 23719 - DNA, 716 bp, Emericella nidulans
gtcctatgcagtgttatgaaatggtgctggagtagactccccggaggtgttgttacctgggaggcgtatgagctatttaaggttggcgaacaaggtacaatctaaaacctcgggttgcgcagcacaagtgtaccgtagcacgggctaatttgcacacagactctcagtttgctcgcgacgccttctccacctttatacccattagcgtggactcagacgctcggaccaaaatcatcttcgactttttcgatcttttgacagctatcgctgcacatgggaagtctaacggtctgggagggcggaaactttcccgatacgctggatggtgggcatttgaacaaaatgataccggcaatggctttgaagcagcctacaagaactggacgaggtgcgttagtatcctatactagttttcggtcatttgctgattatctaaagtgctgccgatgcaacgagtcacctattcttcgcttatctacgttcactttctcccgacactcctcgcggcatgagcggcatatctacgctgcccatcgccctgcagtccctcgtccaagccacggaatatccacctgaaacgccgacattacttcaagtttcgactaccaaggtggtcatgatcgtcgatacagtctcccccactccctttgccctactacgccgggcaaagaatttcgagtacagagatagtgataagcatttgcaagaattcgcag

SEQ ID NO: 23720 - DNA, 850 bp, Emericella nidulans
aaatctatggtgaaaagaaagagcatgtgaacattgtcttcattggacacgtcgatgccggaaagtccactctcggtggatctattctctacgttaccggcatggtggatgagcgtacacttgacaaatacaggagggatgcgaaggaagctggtcgtgaaacatggtatctttcttgggctctggatctgaccaacgaggagcgtgctaaaggaaagactgttgaggtgggccgtgctcacttcaaggttgacattcaaacacccgatggtgtcgttgaacgacgcttttctatcctcgacgcccctggtcacaagtcttacgtgcaccacatgatcggtggagcttcgcaagctgatgttggtgtccttgttatctccgcgcgcaagggcgagtatgaaactggtttcgaaaaaggcggacagactcgtgagcacgctttgctagcaagaaacaccggtgtacgaaagcttatcgtcgctgtcaacaagatggatgatccgactgtcgagtggagtgaggatcgtttcaaggagtgcacagtcaaggtttccaaattcttggaagctcttggttacaagaaggatgatttgactttcatgcccatctcagcgcagcagacactgtgtgttaaggatcgtgttcccaaggacgtttgcccctggtacaacggtcccttccccacttagaatctctcacagatataaatatgccagagtgtcacttaaatgcacctttcatgatgcggatcggcgccaaatccgttaccttggcactattgattaagaagaatgaagccggtgtcatcaagagacgctagtgcatacatgcaccgtcaagtagatgttaa

SEQ ID NO: 23721 - DNA, 500 bp, Emericella nidulans
acttatcaagcttgactcctttactggtcgtcctgtactgcttaagcacaaaagcgttctcattctttcacccgtcagccttttgcattgctcaaatagctgcagataccccagtcatcatcttccgaatcagcattgttgccatcgtcctgtatttcatggtcggcttgaccatttcagcgtccgcccttttcgcatacgggcttattctttttgcaggaaccatggtaagtgcataatctgcacgcacaaccatactatatcaatgctgcgttcactcattgtcttagtgcatgacagccatgttccgcgcgattggtgctgcttttgactctttcgatgcagcttcgtaagtctcgggattttctatctctgctctggtcatgtacaccgggtatatgattcagaagccggaaatgcacccatgattcgtctggattttctggattgatccactagcgtacgccttcgaaagcctcatgggaacggaatttcatggg

SEQ ID NO: 23722 - DNA, 500 bp, Emericella nidulans
agggttcgccttcagcgagaaactctggctggaattcagcgtttccggagttagtgatattcaatggagcgaggacgccttcgactctcttgtccttccaggcaaccaaaagtccatcgtcaaagccctggttgagtctcacaccttttgcgccgcccagaatatcgatgacgtgattcaaggcaaagggcgaggtctcgtcgccgtcctccacggacccccaggcacaggaaaaacccttacagcagaaggcattgccgagctcctcaagcggcccctatacatggtgagcgcaggtgagctaggcaccgactcaagaacactagaaggggagttgaacaagattctggatatcgctcattcatggggtgccgtgctcctcctcgatgaagcagatatcttcttagagaaacgcacaatccaggatatccaccgcaacgcccttgtcagcatcttcctccgtctccttgaatattttcagggaatcctctttctgacaa

SEQ ID NO: 23723 - DNA, 560 bp, Emericella nidulans
atgatttttgcccctctggcccgttcccgtgcctttgcaaccttcctcgttgctatttgcggcatcccttgggccgtcagctgctgggcccccttcgcattcatgggcgtcgaaattaatcgcctcgcaatgaacccctcccaagcttctcgcctctccggcgtaacaatgatcacctcctcctccatccgctcaggcgcgtacggcgacctcaacagctcggatgcctcggaaatggatgttctccggcttaaccatcacgaccaagacgatgactccgacgccgaagacggcatctccaacatcccctccacgggcgagcttgccggcatttaccttggcgtgctcaatgtctacacaactctcccccagtttgtcggaaccttcatcagttggattgtctttagcatcctcgaaccagggagcacaaagcgcgacgactcggcgagcgactcaacgtggatggacctcgacaagagcacaccgaacgccatttcgatttgtcttttcatcggcgctttgtgtgcccttattgctatggaggctacgaggcgaatgcg

SEQ ID NO: 23724 - DNA, 850 bp, Emericella nidulans
tttagctcctctggcggaaacgccggtctggctgccgttatcgcggcgcgtgatctcggctgccgttgtacagttgtcgtgccgtactcgacgaaacctatgatgatcacaaagctgcgggaggccggtgccactgatgtgatccaacatggggacagttggtttgaggccgatacgtatcttcgggagacatttattgagaatcaggaccaaggagcgatgccgcgacaaagaggaatatctacgttccaccgtttgatcatccgcagatctggaagggtgtcgggactatgattgatgagatcgcacagcaaatgccgcctagggatgtttcgaaaggttcttttcccgcagatgctgtgatttgtagcgttggtggaggtggcctctttaatggtgtggttgaggggctgggtcgacatctggcaactaaaaatggcgatgctcctgggggcaaggtccgcgttttagccgtcgaaactgaaggaactgattccctcgctttgtcccttcgaaaaggtacattgcagccgctcccggctattacgtccctcgctacatcgctaggagcacttcaagtggcgccgcagactctgaagaacgcgcagtgcccgcccgccagagtagatgtcgtcagcgttgtcggctctgatgcggaagctgcccaaggcgtgattcggctcgcggatgaacaccggttgcaagttgaattggcttgtggtatcagtgtagaggttggtggctcggtgaagctgagggattacatgcctgatctgacgccggacagccggatagttattgttatttgtggaggaagcaatgtcactgcggagatggtggtggagtatag

SEQ ID NO: 23725 - DNA, 712 bp, Emericella nidulans
cccgagtcttctaccgaagtatgctatcaagggcagcgtcatcgtcgaaattcgtagatgctcgcagcgtggaggatatccaggcgacgcttgctttctctgagaagaacaatctgcatttggtgatcaagaacactggtcatgactacacaggccgcagctctggtgcaggctctttaggcttatggtactttgcttttccatactattgcagctttgtgagatagtgtactgaacatctcaggacgcaccatattcaaccgccactcaagctggggcaggacttcgtcccagaagcttgcactgaagccgtgggagacgctatcacctttggcgctgggcagcagttctcggggatctacgaattcgcccatcaacataactatcgcgtagtgggaggcgcttcaaacaccgttggtgcagccggcggctggatcactggcggcgggcacagtatgctttcaaatgagctcggtaaggccccattgcctggccctgaatactcctggttctgaagcagcggactgactgccaaaggactgggcgtggataacgctctacagctgagggccgttcttcccaatggtacttatgtcacggccaatcggtgtctaaaccaggacatcttttacgccctccgaggcggcggaggcggcacatttggagtggttacggaaatgagcatgctcgtccaccccgaaaagcctacaat

SEQ ID NO: 23726 - DNA, 500 bp, Emericella nidulans
gccgaaaatgactgaatttcaaatcccactcgagtacctcacctcgatcaaggacaaagtcgtcctcataactggtgcgtatatacctctgcaccctagctattttatctatacatatacactgctagcatcaatataacattacccattcacaggaagctcctctggcatcggcaaagcaaccgcccacctctgcctgcaccatggcgcaaaagtcatagccggcgatctctaccccctaccagcggtctttctacaaagcctagaccagcgagacgaacaatcctgtacgggagccgcatcaacctcaccaccacatcaggtggatgtgtcagaaaatctcatgtttgtccaaacggacgtctcagattggacgagtatccgcaatctcttcatccgcggggtggaacgattcggcgtcatagaccacgttttcgcgaatgcggggaatggaccgctgagtaacttcttagaggagacttttgaagataaggaccggg

SEQ ID NO: 23727 - DNA, 663 bp, Emericella nidulans
atgataaacgatcagattgcatatggggtgcctagacaggtcgatctgagcgacgaagttgtcgtgattaccggcggggcaagcggggtcgggagattgattgcgcaaatctatggtttgcgtggcgtgagcgttgcagtgttggatattgcggagcagaaggatgtgaaaggctgggaagacgtcggaggggttgagtattataagtgtgatattacggtgaggggtgaagttgaggaagtggcgcggagaatcaaagaagatgtatgtttctcttccgacttgcttgattttgactacgccccgtagtacgacctagtggttgctgttgtagtactttttatttgcttcgctaactataagatgtctagttgggcacgccaacggtgcttgtgaactgtgcagcgacccgaattaacggccagccgctcctgtcactctctgctgaagcattccaaaagaccatacagacgaatcttctagcggtcttccacacctgccaagtgttcctcccacatatgctgtcccgcgagaacggaggcaccatcgtgaacgtgagctcggtccttggacagctgtgcgccgctggtctcgcagactactcagcaagcaaggctggcctcagcgccctgcatcgcgccttggaggctgaactccgggtat

SEQ ID NO: 23728 - DNA, 500 bp, Emericella nidulans
ttgatttgaataatcaaattttgtcgcttcagcttcgcattgtatgtcttggcaatctccctccgccatgtctggaggtggagggttcgtcggtcctggcggtgatgcaaacggcggacctcaggggacggagtacacattacaaggtgggtttcctgcgcaaatggcattggtcgctggcctctgtaatataactaattgacatactaaatcactctgcttcttaggtgtaatgcgcttcctccagacggaatggcaccgacacgagcgagaccgcaacgcctgggagatcgagcgcgcggaaatgaagtctcggataggcaaacttgagggcgacgtccgaacaagcaagcgcttgcatgagtccttgggaaagcatgtccggctgcttgaagctgcgttgaagaaagaacgcgagaaggtcagaaaacttactaataatgagcctgtggaggatctccgggatcccaaggagattgcgcgggaaagcatcaatgctc

SEQ ID NO: 23729 - DNA, 850 bp, Emericella nidulans
attcaaaccgcgattgcagagttgacagagctgatggaccgcaagccacggtataacaagtggcttgtgattcttctctacggactgggttctgcagctgtaggcccgttttcctttcaagctcgccccatcgacatgcccatcatcttcatccttggctccatagtgggattcatgcagcacgttctcgcccccaaatcagtgctctactccaatgtctttgaagtcaccgctgccgtgctgacatcttttctcgcccgtgctttcggctccattcgcagtaccattggcggcgaagagcaaaatctcttctgtttttccgcgctcgcccagtcttctattgctcttatcctccctggatttatcgtcctttgcgctagtctcgaactacagtcccaccagatgattgctggttcaatccgcatgatttatgcaattatttattcgctcttcctaggatatggtgtaactgttggaacaacaatctacggtctcatggacggcaacgagtcttctgaaaaggaatgcatcaacctcgatgtttataactcggtctacatccagaaattttgcttcgtgcccctcttcgtcatctttgtcgccatcatcaaccaagcgaaatggaaacagctgccggtcatgatccttatcgccatatgtggatacatcacaaactacttctccacgaccaagcacgggtccaactccgaagtcgcgaatacagtcggcgctttcacaatcggtcttctcggcaatctctattcgagacttaggcgtggccacgcagcagctgcgatcttacccgcgatcttcgttctcgttccctctggtctcgcatcgagtggagtct

SEQ ID NO: 23730 - DNA, 730 bp, Emericella nidulans
gaggaataccagctactagggttgggtgtccgcaccgtttcgtttttgaagatccaggtgtacgttgttggactgtacgtggctaagtcggacatttcggaactacagcagcgccttgtccatatggctgctcaccctccgagcgatcaggaggttatcacaaatcaggtaggcgccacttccgctacatcattagtgtctaccgagcgccagcggttgaaggatctcttgcttgacggcgagaaaggtgaagatgcctggaacgcgatactgaaggaggacggtctccggacggccatccggattgttcctacacggaacacagactttgcgcatttgcgcgacagctgggtgcgcggtatcacaacgcgcgcgcaaaaggccaatgccagggcgaaagccgctgctacggaagctggtgcgggcgctgttaatcctgatgaattccaggacgatgtctttggctccgcggtgaatgacttcaaaacgctgtttggtggcggtcagcgcaacgacgtacctaagggccagacgctactactgctgcgcaacagcccgcggggagctggatgcgctattccagcccgatgcgtcgaagccgtttcgatttatgggccgcgtctctgacgagcggatcagtaggttggtatggttgatatacctcggtggaaagaatgtgtccagtgaggaggcgcgacggaatattgttgatggcattatgggcatagtt

SEQ ID NO: 23731 - DNA, 555 bp, Emericella nidulans
  unsure (1)..(555): unsure at all n locations
tgggaaggcgactcgcgtttgctagatataccccgcgtgtacgtatgaatgttttacggcgaggacatatatgctgttatcggttttatgagaagaccggtcgtgaagtcttatttccatttgggtatggttcctgaacataccatggatgagttattgctgattgagacgtagccatggtttatcctataccacttttgcggtatccccagaagccttggtctcaccaggaacattcacaccagagaacccttcgaatgcaacggtaaagatcaagaacattggcggggctgctggtgcgcaagtgctgcagctatatgtggcagcacccaatagcccgacaccgcgcccgcagaaggaactgcagggattcgagaaggtgttcctgcgtccgggagaagaaaaaacagtgataattaggcttgacaagtatgcaaccagtttttggattgagatcagnggatggnnanagaacgaacgttggcgatacccaggtactgattgggacctcgagcgaggatattgttgcccgtggacagtttgaagtcaaccaga

SEQ ID NO: 23732 - DNA, 406 bp, Emericella nidulans
ttcgacatcctcagaattgctctcaactacggggctagtgtccataccgtttcaaatgaaggctggacacccctccatcaggcggtttacgtcggcacaggcgcgccagaccatgaattcccccaaatagcagaatatatccaccttctagtcagccgtggtgcggacattaatgcccgtctgcaatcccccgcaagcaacagcgaaacctcactccaccttgccatcaccgccattgttactcggcccgatttagtacagctgctaatccaatgcggcgccgatatcaacgcacctacggcagacgggaagacgcctcttcatctcgcggccgaacgagggcgcgaatcaattttccgaattctgtacgacgcaggggccgacatgtcccttgaggtcccggata

SEQ ID NO: 23733 - DNA, 500 bp, Emericella nidulans
agatgccacagttcctttacttccatctcttcccgcaccacttcaccttaaacccgatgcgacctatattctcgctggggggctgggtgctcttgggcttaccattgcagagaatatgtgtagccacggtgccggccacttggtgttcctcagccgctccggggcatcgagccaaagacagcaagaggcgcttgagagcttccgtgctcgcggatgcaaggtcgacgtggtgaagtgtgacgtgacggaccaagaacaggtgcaagctctggctacccagattcgggagcaatcgtggaatgttcgcggcatcatccaactggcaatggttctccgggtatgtaattggacttcattcaccgtgaccggctaacccactgaccttattgcttgcaggactcgatcttcgaaaatatgaccttcgataagtgggaaacagctgtcaaccctaagatcaaaggaacgtggaacctgcacgccgagcttcccaaggatgttga

SEQ ID NO: 23734 - DNA, 540 bp, Emericella nidulans
attatactgggatcaactaccctcttggcaacgtgataatcaatatattctttcaggttataggactgtctctaattcttttcgcgagtcgttcgcgagtcttggttatctccataatgagaccgtcaacatctactcccatcttatccctgcgattctcctttcatttttcagcatcccgctccatacgtcactcaaggccaggtacacaaacgtatcaacagcagatactgtagttttgagctgcttcgtcttgggagctgtgttgtgcctggtcatatcagcaacatttcctactgttcagaatcattccccgcacgttgcacgcattgcaaaccaaatggattatattggcattgtattcctgatcgttggaagttttgttccgagtatcttctatgggttttactgccaacctgttttacaaacggtctatctaaccatggtatgtcctgattattctttatatattaactgctgaataagaggacttacgcgtatttgcaaaaaaactcccctccgctcacatagcgccgctgc

SEQ ID NO: 23735 - DNA, 500 bp, Emericella nidulans
gaagcgcgagcgatatttggcagagtaattgccgaagctggtgtagtgagtcaggtggaagtatcggtcatggtcggtaggattgaggctagagtcgtgaaaaccgtaggccgtccgccgccttcttccccacctctcccaccctcccccctatcctacttctccccctcctccatccccctccctctcccctttacttccactcaccctccccccttaacttcacccccctctgttacctcccttcaccaccactactcccccccccccactcctcccttcctccccactccccatatatccacctctcctacttccctctccttcccacttctcccctctcttccacccatccacaccctccactctctactcttccactcatctcctctctttcccccttccatcatctctcctcactcccatcctccctttccctttcctctctctccttcctcattacctccccctcccccctcctctctctccccatcctcctc

SEQ ID NO: 23736 - DNA, 668 bp, Emericella nidulans
gttgtcgcggtctatattgccggtgaagctgtcggtgccctgctgcaaaccgccgtcgccgacaaacttggtcgtcttcgctttatggagttgatgtgtataatcgtgacgataggcaccacaatccagacagcatcaatcaatatcgggatgtttctagccgggcgtgcgttagccggtgtagctgttgggtatgtcgagccgagagatggataatgcggcagagacatactgatacaggcattcatagaggcatggtcggtaccgttcccatctatctcagcgagatctcagaccctcggtatcgcggtctgatcggagggatctcaggttgcggtattgcctttggcacaatggcctcaaattgggtcgggtatgcttgcagctgggccccatatggcgccgtacaatggcgcttcctctcgccatccagataccgtggggtgtcatcatgttctgcggtttagtaaccttcatgccgaactcgccgcgtcatctggttcgagcgggcaaggtggaggcagcacgcaacgaattcagccgaatccgccgggacctcaattcgcttgagctgcggcaggagtttgcgcagatgctggctcagatcgaatatgagaaggagagagagatcacctcgtacaaagagatcttcaagctattcagacatc

SEQ ID NO: 23737 - DNA, 500 bp, Emericella nidulans
ggaattctccatagcgtgctcagcccttgctgcgtcttgactcctcgcgccctgctctctatatcaactgactggacctcactctcgaacaatactcaacaatactctgctccgttcactactagcaggtcctgtctctcatttatcggatctcgttttcttcactgtacagtttcatagaatccagacagtgcactgtcaatagagctgtcacttcctctcacttcctcactataagccgaccgccaatcacaccccactctcgctcctcctgccgcgaccaaaacaaatccagagtcaccattccttcagcccacgtccatcagtgtctctctcttcgtatcacagtttatcaacatggctgcactcactatgtctcctgcctctgtacgacaacctttcgctcctctggatgcccctcgaatgcggtccatcctccgctccaaaatgaacgtcctcaacaagcaaaatggtatgggccagatcaacgtaaacaaacc

SEQ ID NO: 23738 - DNA, 850 bp, Emericella nidulans
accgcttgagacgaaggacgggcgccagaatctgttcgataacgtgctcaacagcaacctgccggagcatgagaagagcgaggcgcgactcgcgcaggacatgcaggtcttcgtctctgcgggcgcggagaccacggcaaaggcgatgagctacattatgttctacctgcataacgagccagctctgttgcagaggttgaaggatgagctggcgccgctgggcaatgacccgagtctggtccagctggagcagctgccctacctggtgagtaggcgacagctctctctctctcgctctcttttttttttccccgcaacatactgacattcaattcagaccagcgtcatgcttgaagggctccggtaaagtccacacctgcgtcttctcataagtgtgctaataaacttgtttagcctctcgtatggtgtcacagctcgcctccctcgcatcgccccgtacaacgctcttaagtacaaggactggacaattccccccggtgtatgaccgacccctctccccttcggactgtttgctgatggtcgaccatagacccctatcagcatgagctgtctcctcatgcaccacgatgaatccatcttcccggactcttatcgcttcaacccagaccgctggatggacccgaccgagcgaaaacacttggaaaagtacatggttgccttttcaaggggatctaggatgtgtatcgggatgcagtacgttccaccccctttattctctatctggtctaatgggtccagcctcgctcgctcggagatcctgcttgtgatctcgagtcttctccgccgactgaactttgagctttacgagaccaccgtcgaagatgtgcgt

SEQ ID NO: 23739 - DNA, 850 bp, Emericella nidulans
tgagacctacgatcgattcggctcggctgcctttgatcagaatggcggctttgacccgagcgccggcgcaggaggcaatccgttcgctggcggcggaggcttccacgggtttggtggaggatttggtggaggattcccgggcggctttgcagcagatatcaacatcgaagatcttttcggcgctttcgcgggtggtgctcgtcgttcaggtcggggtagacggggtccgttccaagagattctagttggcgaagatatcgaagttcaaaccaatatctcgttcatggaagctgccaaaggtacttcgcaagacatcgttatcactccattgaaggagtgcggtacttgcaaaggtgacgggttgaaagagggtgcaaaacggacccaatgtcgtcaatgcaatggtactggaacccgagtccacttgatgcagggaggcttccaggtagctgctacatgtgatgcttgtggaggagctggtcttattgttccccggggttcgcactgcggcacctgcaagggagatggagtggtccgcgagcggaagacagttcgggttgatattcccggtggtgtagaagatggcatgcgtctgaggatatccggtgagggtgatgctcctcctacgggcacagcagctgcacctggcactcggacgcagcgtggtgacctctatgtgtccattcgagtgtcgcctgacgagcggttcagtcgctccggatccgacatcctcgatagggcatccattccactcaatacagcgcttcttggtggtgaagttctggttcctacattggacggccaggtaaaagtcacggttgcgaccggacctggaaccggtgacaggatc

SEQ ID NO: 23740 - DNA, 500 bp, Emericella nidulans
tgtgctggacgacttcttcctcatctccggcgagataccaaggcggacaccatacgaggcgggcctaaagcatggaatgcggttcgacaaagaggataatgaatggacatcggacgaggccatagctgatgagcgattcatcatgtgcaatgtcaaaggtctgcgattgttcatttgacaaagtttcacatgcaatgctaatcatagcagacaagggaatcgtcatgctgactggctgcagccacgctggagtcgtcaactgcactcaacatgcacttgaacttgcggggggttccatccctctgcatgctgtgattgggggctttcatctggctacgagcgacgcaaatcagattgaaaggagcattaaagacctactgaaatttgaccctgcagtgcttctgccaggtcactgcacgggctggagggccaaattcgctattgagaagcgggagcccgggctgctcgttccatgctccgtaggttataacatcacattt

SEQ ID NO: 23741 - DNA, 850 bp, Emericella nidulans
tatactctaaatactattactaagaaggactactatctattgcccctgatctatgagatactaaactaaattagacaagctagatagtttactaagctggatatatctgctgccttctataagatctgtatagccaaaggccaggaatagatgactaccttccatacaagatacaggctctttgaatagctagtcaccccttttgggttggccaatatactaagtaccttccaaaaatatattaactggaccctctaggaatatctagataaattctgctcagcctatattaataatgtgcttgtctatactaatagggacctctgccagcactagaagtatgtataaatagtcttgaagaaactggaagaagcaggcctatatttagatattaagaagtacaaatttgagtacaaggagacaaagtacttggactttataatacaggcagggaagggaattaaaatagacctagagaaggtaaaagcaataaaggaataggaaacccctactattataaaaggtgtccaaggattcctgggctttgctaacttctactaaaggtttatccctaacttctcagggatcatatgcctactaaacaacttgacaaagaaaggaatacccttcttatagactaaggagtgccaggatagctttgatctgcttaaggaaaagtttattactagacctgtcctagcaaccttcaacctttcctactatatagtagtagagactgactcctcaggttataatacaggaggagttcttgcttaatataataaaaaagggaaattgcacctatatacctacttctctaaaaggaattctccagctgaatataactact

SEQ ID NO: 23742 - DNA, 850 bp, Emericella nidulans
agctccaaattcagcatcgacgaccgcctggcgtacctcgtcaaaaccatctccgaagagcaagagcagcagcgcatctccgcgggctcatatctcgactgcctcagaggatcaaatctcaagcgaacacttactgtcatgttcctctacagcaccgcgaaccttggcggcgccgctttcctgtcacagtccatctacttccttctcacactcgggctgccatcagtgcacatatttgacatctccatcggcgggttcgctctagccatcatagtcatcctactaacaggctttatcggcaagttccttagctggcgaaggatgcttctcatgggctgcctcatcaacctggctttcctcggcgtcatcggctgcctctactacgcctgtggcatgggtccatcctgggccattgcggttctcatgtatgtccacccttccttgcaactctacggctactaacagagcgataacaggaacattcttatctccatccaaacaagtctaatgcaggccgacggctggcccatcgccgccgagatctactcgaacagactacgtgtcaagtcgctatcaatcggcgtcttggcccaaaccctctcgacctgggtcatgacattcacagtgccttatatgtacaacgttgactctggggacttgggcgcccgcacggcgttcccctttgcaggtatcacagtgcttcttgttataggcgcatacttccttgatcctgatacgacgggcctgtcgacggaggagattgatcggctgtacgaggataaggtcagcccgagaaggttcagttcttttgtcacgcatgatgtgccgcgtgtggctgagtagtgcgttg

SEQ ID NO: 23743 - DNA, 816 bp, Emericella nidulans
  unsure (1)..(816): unsure at all n locations
aacggccacaccacctccaacagctcctcttccgtaccccccagcggcgtttgggcgcctgcaataacattctttaacccaaacaccgacgacctggatctcccctcccagtccgcctactatgcctatctttctaccaccgggctctccggactagtagtcctcggcacaaacgccgaaacattcctcctcacacgtgaagagcgcaagactcttctgacgacggcgcgcgaggctgtcggggagacgttccccattatggcgggagtctcgggccacagcacgaaacaagtcctggaatttatcgcggacgcgaaagatgccggtgcaaactatgccctgtgtttaccgccaggatattttgggaagcagacgacgatggatgtggtgagggggttcttcgacgagatcgcgagggaaagtgaactgccgattgtgatctataacttccctactgtctgcaatggcgtcgatctcgattctgctactatagcatctctagctaggaattggcctggtaagatcgtgggtgtgaagttgacatgcggatctgtggcaaagatccacttcgccttctgctgaattaccncgncgggagctttgcgactttttgcggacanaagtgattttctgattggagggttagcggctggtgcggtgggcacgattgccgggttcgcgaacgtgtttcccaagacgattgtgaggatttatgatctgtacatggagggtaagcttggagaggcaatggaattgcacaagagggcggcgttggcggagcagccgtgtaaggcgggcattgcgtccgtcaaatat

SEQ ID NO: 23744 - DNA, 500 bp, Emericella nidulans
gatggccagcgaatgcccccgccccggcgacccccgttgaggattacgtcttccctgaatatcgcctgaagcgtgtgatggatgacccggaaaagacgccgctattgcttatagcttgcggttcattctcacctattacgttcctgcacctgcgcatgttcgaaatggccgccgattacgtcaaactgagcacagatttcgaaataattggaggttatctttcgcccgtctcggacgcctaccgcaaggcaggtcttgcgagtgccaatcacaggtagttactttaacacacttcttccatagttactatccaggactgatctggcggctttagaattgcaatgtgccaacgagccgtggaccaaacgtcagactggatgatggtggatacatgggagccgatgcacaaggagtaccagccaactgccatcgtactggatcattttgactacgagataacactgtccgcaaaggtatcgataccggaaaaggcactcgaa

SEQ ID NO: 23745 - DNA, 850 bp, Emericella nidulans
agtggcttttaaagcacaatgtccaacctgacgagcggaattattctgaccagacgccactattctgcgcggcaagtagtggctacgccgggattgtgaaggagctgttagacttcgatcgcgagcaatccgaggaatttatggcgaagccaccgcagaccgaaggcgacatggcgtatcacaatgggtacgtcgactggatacgcactaatatagagggcattaacttgattgacgttgatgcggaggattctcgtgaaaggacacccttgatcatggccgtgcagaggggatatctgaagactgtcgaagagctcatggaaagggaggatctgaacataaaccgtcgcaatgccgaagaatatgatatgagtcctttggcgactgcagcctcgaaaggctatgaagaaatattccgccttatcctttctcacccctcggttgaaaagagtaccagagatagtagtggccatgggattcttaagcacgctgccgcgggcggaaatatcaacatcgtgcgagaagtactcaaatggccaaatgtagatgtcaatttgcgtggcgccgacgactctacccctctcatgtgggctgccttgtatggccacgagtcgattgttagaatactgatcgatgaaggtgcggcagtggatcttttcacgagccagctacacctgcaattgatgcgactgctagggtccgatcccactgatgtggcccccagcattgagcttctgaatgccatgacgggaagtacacagcgtgtgctggttggctcatcagcgcttgatgccgcagtacatggtgagccatgagggcaccgtagaggtgttgatggaacaccctgatg

SEQ ID NO: 23746 - DNA, 694 bp, Emericella nidulans
cgccctgtgtcagtgcagctacccagagtgcgcaacaggccctctctctgaacttcccatatgcgatgccagcctgtcccctctcgaacgagcaaaatcccttgtctctgccctgacactagaagagaaaatcaacaacacgggccacgaagcagctggaagctcccgcttaggtctccctgcgtacaactggtggaacgaagccctgcacggagtcgctgaaaaacacggcgtgagtttcgaagagtctggtgattttagctacgcgacatccttcccagcacccattgtgctcggtgccgcgttcaacgatgcgctcatcaggagagtcgctgagataatctctactgaggcgcgggcgttttcgaactccgaccacgcagggatcgattactggacgccgaatgtaaatccatttaaagatccaagatggggtcgcgggcaggaaacacccggtgaagacccgctgcactgctcgcgctatgtcaaagagtttgtgggcggcttgcagggcgacgatcccgagaagccgaaggtcgttgctacgtgcaagcatctcgcggcatatgatctggaagaatggggcggagtcagccggttcgagttcgacgcaaaggtgtccgctgtcgatcttctcgagtactatcttccgcctttcaagacctgcgccgttgacgcaagcgtcggcgcgttc

SEQ ID NO: 23747 - DNA, 500 bp, Emericella nidulans
ctggacaaccatcacacactgagacagccgccccgatgtcacctcgttcttcccaagtacaggctctggcccgagtgctgtagatacatcaagcagctaccagcagacctccccaccaaggaatccctatgcgccgccttcatatctagaagagttttcccgccgcgtttcgcatgttaacaatagtacgccctccgcctatactccacctcccgagacaccgccatttgttcctcctcgaagatcgcagacacaatctccgacccagcaacagtcaggccctagactatccgtaccgtctgtcgatccactcaaacggcctgcatctgttcacgcgcccagttcgccaacgaagacctcccatacttacgcgccaatgcaaccctccagtcatattcgcaccatctcgcagtcacttgaattcattcctccaagcgacggacaagagcttgaccctcttcaaagatggaaaggagcgccgattttcaaattcggttttg

SEQ ID NO: 23748 - DNA, 850 bp, Emericella nidulans
tttatcgaccttgtcttaatcaagccgcaggttcgtctccagtaacatctgtttctaaaactctgactgacttgagctgaaggtgtaccgccatctcctcttcaatcgcctcgaaagcgatgaacataagttcgatgtacgatccttccagacattaagaatagaataactgtgttgacggaactgcaaacatagcgctcaatcatccgacttggagtccttctactcctctttgatgtttatctcacctgggcacggatcgaaaagtccccgctgattgagacgacattcctctctcgcgctccgattatcatccaatacctcttttttcttacattgaacgccttagcaactcttgcccaccacctcacagttcgcctcctcgcctcattcattactttctcatcacaatctacacctacaaaacaacccactgctaccgccaatgccgctgccactgaatctcaagctccggttccctcaaatcccaccacgccaattcttccctccttccctcagcaattggtgcaagcacaacaagcgtccgctctgagcccgccgaagagcacaccgcacagctccgtgcaggaacttccaggtcttgagaatcaacgacctcgccagccatcaccttccagtccccgcgactcattctgcgacttgcggccgccgttgcgtcgtgcatccacaggccctatgcaatctttccaacaattatctcccccatctcaggctagtccaacagcaataagcacagcgctctttgtaagcagttgtgcgaaacttttcccgatactcctggttatatgggggccagatggccgcatttccagctcaaactctactccca

SEQ ID NO: 23749 - DNA, 850 bp, Emericella nidulans
cagcgccttcacgacgacgggcgagctcagaagttttattccaggccggatctcgcattactttggttggacaggcccatcgctgaccttcgataccgcttgctcttcgtctactgtagcccttcataatgcctgcagagacttgctttctggggaagtcccggcagcgctatgtggtggtgtcaatatcttgacaagcctgcaatggacgcagaacttggccgctggcagcttcatcagcccgacgggccagtgtaagccgtttgactctggtgcagatggatattgtcgaggcgacggaattgcctacgtctttctgaagaagctctcaaacgccgtggccgatggcaatactgtcctggggacgatttgctctacaggcgtcaaccagaacctcaacactacgccgctctttgttcctaatgtaccgtccctatcgacgctcttcaatgaagtgattcgcaaggcacgtatcgcccgacgcgacatctcgttggtcgaatgccacggcactggcacacctgtgggggatcctgctgaatggcaaagcatccggaatgccgtggctggtcctcgacgtgatacggttctgcccattgggtcagtaaaggggcatgttggccatactgaaggcgcatccggcctggtctccctgatcaaggtgctgatgatgatgcgaggcaacttcatccctccgcaagccagtttcaacaccatgagccccggtatccacgcacagccctcggacaacatggaggtagtcacagccttgcggtcgtggcccggagcccagaaggtggctttgataaataactacggtgcttgtggatcaaattcaagcgcgatcgtc

SEQ ID NO: 23750 - DNA, 500 bp, Emericella nidulans
tgcctcttacaaggatcttggttctgctagtgtcccctgatatagcgtaatatcgcaagaagcaaacccaggaggcacggcaccagaatatcgcttcctgcacttcacccatcgcagtgggccgtttgcagacgtctgacaagcacctcaaacgcaccccgctctctctggcaatggcgtccatcccgacacccccccattgcactgcagacttctgcctgatccccgtacgtcttcgctagcacatgcatcaatcatgcaacaatataccccctgcgctgcggttcgctcgtttgccttgttcttctctatctgacgtttctgtcctatcatcgttccttgccacgaccatgtgaggccgcagctcagccgactaatatcacgattcgcacagattggcacctcctcgccatcagtttccgcgcaaattgcagatgtccaacgtctgatcgagaaatcggggctgaaatacgtcatgcactcagccggaaccactctcg

SEQ ID NO: 23751 - DNA, 848 bp, Emericella nidulans
ggtctttcggctcctaatgcacccactgtacttccgttccacaccttcacctgcccactttctgcgaaacagattcgacagatttcccaacgaaatgggcttcgcatctcctgtgcggctttgcgatctccctggctcccgtccacagtttaccccccgccgccaccgccaaatccgtaccttaaggtgggatatgtgtcatctgacttcaacaaccatccccttgcccatctaatgcaatctgtttttggattgcacaatcctaccaaagtcaaggcgtactgctatgctacaacggccagcgataagtcaatacaccggcaacaaattgagaaagaggcccccgtattctatgatgctagcggatggccagttgagcgactcgtcaagcagatagtcgatgatggtattcatatcttgatcaacctcaatggctacacgagaggcgcgcgtaatgaagtctttgctgcgaggccggccccgatccatatgtctttcatgggattcgcaggtacactgggtgcggagtggtgtgactatattcttgcggacgagctgtcgattcctccggagacgctctcacctggaacccgcaagacgaggatcgaggaccgacatctggaagaaaaccacggtgaggaggccgaaaactggatttacggcgagaagatagtcttcacccgagatacatttttctgctgtgaccatcgacaaagcgcccctgatgcgagagactcgtacatcacatgggagcaggagcaatccagacgctggcggatgcgcaaagagctgtttcctaccttagcgatgcaccataattctgggcacttcaatcagctttataaggt

SEQ ID NO: 23752 - DNA, 844 bp, Emericella nidulans
ccgatctatttcccatcggaggagtcaagatttgaagagggtgtgcctttattggatggctctgcggaggccccggtcgaggcagcgccagtcgaggcaacgcagtagagcaggcggtgctcaaccgggtcaactcgaccgtgtttttgaaggagatgaggatgaggatgatggatttttcagctcggctcagcagccagccacagaaaacgaaccccaagagcccgtccatatacagcgaaaaagcacctcgcaagtgctagattcccttaacacgaaccgggatggggttcatagtccgctttctcctactgccgaggagttcaacgatatcatagcggcagcggcctcaaagtcgcccgagaacgtccaggagcctgcttcggaggaagacctacgtgcgcggtggcaggctgaactttctgatgatgatttggaagttgctcctgtggaggaagatctcgccgctaagtggcaggcggaactggatgacgatgatctactcttagaagacgaacccagcgatctcgctcaaaataccgctgctgaggtggtcaacgggcacggcgtggaacccaacctccaggctctcggcagtccattcggaacgccacaaaaccccagcaaacccaaaccagcgcagagtgtatatactcctcaccagccctctacagcggatcttgtccagagcgttccaattccaggggcaacgcctctatccagtagtgctccttacagcacgagctatttccagccgcggcccgagcctccagctcctgcagttagggctgaaacgttcgcagagcgacctaaagaaggttacaagtctccttatgatcttccg

SEQ ID NO: 23753 - DNA, 850 bp, Emericella nidulans
gcaactttgtggccggttcaccacgtgcgaggaatactcactgccatttgtgctggagcaagagtcgaaacggtcgaatgtgtcttatatagccggggccactgccagctggattgatgactttttctactggctaaacccgcaacaagattgctgctatgaagatggcaagctgtgcttcgaaggtagaacacccggttggaacatcagcctgactggtatgccagaaggcgccgaattcatccactatcttgagaaatggatcaagtcgcccacggatgcgtcatgccctctcggtgggaaggcgccatatagcaatgccctcgtttttgacccaaaacgcatcacgaccaacgcaagccacttcagaacttcccatactcccctgaggacccaggacgatttcatcaaatcttatatctctgctagacgcattgctgatggcttatcagcagagcacgggattgatgtgtttccttactccaagacgtacattttcttcgaccagtatgtgtctatagtacaggtcgcaggtactctgcttggatctgccgtggcaattatctttgctattacctctattctgctcggctctgttgccacaggagccgtcgtgacagcgacggtcattatgatcgtgatcgatataattggttccatggccatatccggcgtctcaattgacgccggctttctcgtaaccctcgtattttggggggcattggccgcgaattttgcgccccatattggcgagttttatggtccattgcgcatattaaggggaccgcgccttaaaatccccggaagggtgccagactttgacagggttttgatgtaggggttcctttta

SEQ ID NO: 23754 - DNA, 593 bp, Emericella nidulans
gtacttatcatgttgtatgctaatgtgtatcacagattcatcgaatctcagatgcgcctcgaggcagatgcccgtgaagtcctcccatatgtgagtctatgccgtgcaatccactctctgcaatcaaattgcgcgcaactaactatatagtcatttgattcgtgtacacaacatctaggaccgctacggcagacactatatgcttgtttgacctgcaatcctccccccccgactcctgattcaccctacactgctgccggcgtctgctattcctgctcaatatcctgccatggcgaacatacccttgtcgaacttttcaacaaaagaaactttgtgtgcgactgcggaaccactcgtatcacttcctccaccccgtgcactctgcgtagcgatcccaatactggcacaaagggggttcggtcggagaagccacaccctggcaatcgatacaataggaacttccagaacaagttttgcggctgtggtgaagactacaacgcacatgaagagaagggtacaatgtttcagtgccttgggttggggacgacagagactggtggttgtggtgaagactggtggcaccctgagtgtct

SEQ ID NO: 23755 - DNA, 521 bp, Emericella nidulans
atatcatatccgttgtatgtatccccagtctctaattccggaaaataggatcgctggtggagagacagtagccaccttccttgccgcaacaacattttatctccttcgcgacgacgccgtgtaccagaaattgaaagcagagatccgcggccagttcaacacctacgaggagattacctgcgccacggcgcagaatctgccttacctgcaagctgtcatcagcgagggacttcgtatctaccctccaggctcccaaggcttccctcggatatctcccggggcctcgatcgatgggatctggatccccgccggtgtaggggggttttcccagacaaacagggcacatggcgctgataatctatatgcgctacaggccgaggtctacacaagtgcgtggacagtgacccacgatgaagctaacttccatgacccccacaccttcaaacccgagcgggggatcgacccagactgtgccgatatcaaggaggccagtcagccgttttcccttggccctcgagcct

SEQ ID NO: 23756 - DNA, 592 bp, Emericella nidulans
cggtgggcccaactttgggaaccggcctcttcgtcggaaccggccaggcgctcgcggccggcggccctgcctcgctcattatcacctatgtattcatatccgcaatgacatactgtgtgacgactgccgttgctgaaatttcaactcactcaattactcggaatggcgcgatgctcgctcataattaccattatacctcgaatcatgtggggttcgcgatagcctatcttagatggattggtctcagcttgcttgttccttttgaagtcaccgtgggatggtccaccttgggctatgggaaccgagcgcgagcctcgcattgcgctgggcggcttgatgtccgtcatattcttcttcaatatgctgccgaacagttctcagaaggcgcaaacgttcttacggggaataaatcctgccacatcggcttgcacatctcttttacctgtatccggccagcaccggcccgtgggaggtttgagattggctaccccgtcattgtgagtctatttcgggaccggggcttctgcttttgtctgatcctgagacgattttggttttgcgggtaccggcaggtgcaaacatgatgggccga

SEQ ID NO: 23757 - DNA, 838 bp, Emericella nidulans
accaacccccgcttcgaccccaacttcaccccctatgtgatcaactccatggggcccaagacccccgagcgtgctcgcgtgatcttgggatctctgattcggcacattcacgacttcgctcgtgaggtcgaacttactcccgccgagtggatgctcggtgttgagttcatcaactccatcggcaagatcagcactcccattcgcaacgaatgccaccgtatttgcgacgtgatcggtctcgaatcgtaagtcgcatttcctgactcgtccaattttgtaacgtatactgacaataaaaactagtctcgttgacgaaatcgcgaaccgcatcgtcaccgaacagggtctctcgcccacctccaacgttatcctcggccccttctggtctcccaacgcccccttccgcgaactcggtgactccattattcaggaccccaacccgaacggcaaggttacattcatgcatggtgtactgagggatatggaaacgggcgcccccatcgcaggcgccgtcctcgatatctggcaagcatctgccaacggccagtacgactttcaggaccccaaccagagtgagaacaatctgcgcggcaaattccgttccaacgagaagggcgaattttactggtactgctaccacccgacaccttattctctgcccaccgatggacccgccggtgtgctcctgaacctcatggaccgttcgcctatgcgtcccgctcacatccacctcatgatcactcaccccgactacgccaccgtcatcaaccagatttacccctccgacgaccctcacctagacatcgactctgttttcgctgtgaaggacgacttggtg

SEQ ID NO: 23758 - DNA, 836 bp, Emericella nidulans
caatccgcaatgcgttccctcatagccgttgtcggcgccacgggcacgggaaaatcaaaggcaaatgacccctcggttgcccttggctttttgacacaagcgggaaacagacgctgacagacacagatagcttgcagttgatattgcttctcggtttaatggcgaagtcattaatggcgacgcgatgcagatgtatcgcggcctcccaatcataacgaatcagatccccgtcgaagaacgccacggagtaccgcatcatttgataagctgtatagacttggaagagaacccatggcgaatatcgatgtttcgaagggaatgtctacgcctgatcaatgatatccatgcacgaggaaaactagccgtcttggttggcggcacccattattacacacaatcagtgttgtttcaagatcaactagtgtcgaaagagttggaatcatcagacgaagagtctgattcatgtccggcaggagatgttgactcagcggtcaagtggcctatcctcaatgcagagccggagttggtattacagaagttacgtgaggtggacccaataatggcagatcattggcatccgaaagacacgcgcaagattcgtcgctcattagaaatattttttcagacggggaaaccggcgtcacaggtgtatgctgagcagcggcagtcgaaacaagccaacgcaaacaatgataatggatcagattgggggcaactgcgctttgacactgcgatattctgggtgcattctgaaaaggctattttggaagagaggttgttcaagcgtgtggatgttatggttgaacaaggattgttgtccgaagcaagccgcatgt

SEQ ID NO: 23759 - DNA, 850 bp, Emericella nidulans
aaccaaccattttaacggttgatactgcgtgctcttcgtctgtcgtcgcgcttcgtttgggctgccagagcatccgcacaggagatgctgatatggtgcgcattcctcaacgtgtacagcgagattacttctattaccctgcttacatgcaaaaataacactccaggtgttagtcggtggcgccgatgcgaatttgtaccgcaggtgatgaccagttagggtttgctcggttttctcagctcggacggccgctgcaaaggcctctgaggagcaaacagacggatacgccaggggtgaaggaactgggtttgtccttcttaggccccttgatgcagcactctccgatggaaatgcattacgcgccgttatccggaccccggcatcaccgctttcctcagcagaggagcaagagcgattgattcgaagtgtctatgaccaagtctgtctcgatctcgttgagacgccttttgggaagcgcatggaatcaggtacacgaaaggcgatttgaccggcgcttcgtcactggctcgcgcctttagccacaggcggctgccgcaagatttgctctatattggaagcgtcaaaacgaacatagtgcaccttcgggtgcggtggtgtttcccagatatcaagacagttctggccctggagaacggtattattccaccaaatatataacttaaacagctatgtccagacgcacctcttggcagatggcgcctaaaagtgctggctgaaccggactcctagccagagggtgaaagcgcatagcaaatatcaacccctttgggtatggcggcacaaacccgcactgtattatgaagactctagaagagtacacgggtcgcaa

SEQ ID NO: 23760 - DNA, 677 bp, Emericella nidulans
tttgcgagctggggatggcacaccgagtaagacataaccaaacccttggaccctcaacaactctgacgtctagctaataattgcacgcaaatggcttcagcgagtcttacgagaaatacccccctgcgtatacagggttcaagatagccaaaagtcctcctaccggcggtgacactctctttgtctcctcttacggtctctacgaacatctctcggagccgtggcagaagttcgcagacgggcttaccgcgacccattcagcaaaagagtttctccgcttcatggaaaagggcatgacccttgatggagaactccagagaggtcacccggaaaatgttggccttgagttccgggcctcgcagtatgcctccccgctcgctcgtatgctagcctcaaatgtgctaaaatgccacttattagtcctgtcgtccgcacaaaccccgttacaggttggaagggtctcttcggagtgggctttggcctcctggatggtcactttgacaatatgaccgaacatgaaagcaacctgttgaaagagtattgtatgtctgattagtttatactaactgttcattcaacccggctgatatgagaacagtcctccgcatgatcaccgatagctctgacctccaaactcgtaagcgttggaacgacaacggtgtcgcaatctgggataa

SEQ ID NO: 23761 - DNA, 850 bp, Emericella nidulans
caacaagcgtttttctttgagtctgataatgacgttgtcaagtacattctgttggtctgcatccttttatccccagcctattgacaattaccgccgaaaagcgaccaccggactggctatcgatttccccacgatcaatgtcctcggcttcgtctgctatgccgtctatacagggacattcttgtactctcctgtaattcgtcatcagtacgccgctcgacatcctttggcgccggaaccaactgtgcggtttaatgattttgcctttgccctgcatgccgtcgtcctgagcgggttggtctactcacagttctggcccagtatctggggcttcagagtatcccgctttcagagggtcagtaagcccatcgcagggctgttttggggcgcttttgtcgccgttgctatggttatatgcgttatcttagtcaagagtccagacgatggctacgaaccgttaagctgggcttggatcgacgtcgtaagtacagcccataggaacctaaacatgagcatacttttgaacaggtctgacacagccgcagatttacactctttcgtatgtgaagcttgtaatcacggttgtcaagtacgtgccgcaagcgtgggtcaatcataagcgaaaatccacacgtggctggaatattgtccagattttgctcgatttcactgggggcgtgtttcgctagctcagctaattctcgactctgcttttcaggatgactggagtggtgtcaccggtaatcctatcaagttcctcctgtcgaatgtcagcatctttttcgatctgcttttcatggtgcaacattatattctctaccgagatgctgaaaacaaggacaagaacaat

SEQ ID NO: 23762 - DNA, 742 bp, Emericella nidulans
acagctccagcgtcaacaaagaatgccacccgggatggcctctcaagacttgatggcttattggggtttgttaccatattcgttctcaacaacagtgccgctttccataacacctcataggctacaagtttgaaaccatatctgttctcgacaagacatgggatgaagcaagcagggaagagattgaaggccgggagaatcttgtggtgaataataatgcgcaatactgctcagttgtgcgcactggtatcggacggacgaaacttgtcctcgggggagaagtcgatgccagtaagttatatctccatttctcaaatggctaaagagagaagtctctgaccgcaatccggcagtctgggacagtaaaccagagcgcaaggaagacccaatcaactgggtggagctcaagacctctgccgagatcagaaaggattgggacatggtcaaattcgagcggaactcctgaaattctgggcgcagtccttcctcctcggtgtccccaaaatagtcgtgggattccgtgaccaggtgggattctacgacgcttggaagaactcgagacagccaacatcccaaacagagtgaggaaatcaggtcgtggaacatgggacgggaatatctgtatcaacttcgcggctacttttctggagtgtatgttgttccgtctccgcacgttttgtctgaagtatatactcattcatcttatatattagggcttaaatcggtaatcaaagagggagga

SEQ ID NO: 23763 - DNA, 672 bp, Emericella nidulans
tcaagcgactcttcgtctatcagcgtcactgtcagagtgaggccgtttacaattcgcgaggcagcccagctcaccaaatgtgaagatggtccgctgtttcttggagacggttccctcgctggtgcaccagctccaaagctgaaccaaaagggtctcaggtcaatcatcaaagtcattgacgacaggtgtttgttagtataaggtcttggttacctatcagctcgcgtgctaaccactgttataaaagagtattcgatcccccagaagacaatcccgtccaaaagttctccagaagtgttgttcccaacggaaaacgtgtgaaagaccagacatttgcgtttgatagaattttcgatcagaatgccacccaaggcgaagtatacgaagcgactacacgaagcctgctcgatagcgtccttgatggatacaatgccaccgtattcgcttatggtgcgaccggatgtggaaagacacatactatcactggcactccgcagcagcccggtattattttcctcaccatgcaggagttattcgaacgtatagaagagaggaaaagcgagaagcatacggaattgtccctttcgttcttagagatctacaatgaaacgattcgagatggtttcggtttgtcttgtccctctcagccttccagccatcctttctacggtg

SEQ ID NO: 23764 - DNA, 850 bp, Emericella nidulans
cagagactccccgctatctcgtctcaaaatctcgtctcgaagaagggcggaatgtcctcgctcgcctccgcggattggatgctttgtcccccaaaatcgaagaggagttcagcctcataactacccaagcgcgcttcagagctgacactctttcatccatctccaactggacagcttttaaagaaacgcaatcaaatcccaactatcgtcagcgcttctggctcttgatggccatgcagacgatctcccaatggacgggcggcaatggcataacctactacgtttcgaccatcttcgagtccgctggcgtcacagggaacgctacatccctcgtctcctcgggtgcctacggagtcgtcaagctcgtcttcaccatggcctttacatgggggttgatcgactttctaggccgtcgttattgtgtgctcctcggcttaacactccaactagccgcgcatgtctatctagcctgctacatgggcgttctccgcccaagcgatgatacggagctggtaaacaaacccgcttccaacacagccatcgcagccgttttcatctacgccatcggctggtccattggcctctgcacagttccatacctctacggaacggaaatattccctacgcgcatccggaatgtcagctatgccgtaagcatgtcgcttcactggttcttccagtttgctgtcgtgcgcgtgacgcccaacatgtttgtctcgttgcatgattggggcgcgtacatgttctgggctatcatatgttttgtgggtttagttgtcctcggcatatggatgcctgagactaagggagtggatattgaactgatgggagagctttttgaggggccttg

SEQ ID NO: 23765 - DNA, 500 bp, Emericella nidulans
gctcatgggcagggcgaaacacatgttgggaatgaagcctgagtactctgaaatggaccttcccttgaccgaagcaggggcacgagctgcgcgagccgatagcacggtttctgaagatggccccccgcatgcgaagaaatcgagcaagccatcattcaagtttgggtttggccgtaggacagtcgactcgtctaccctcggtcctcgtataatccagttaaacaacccaccagccaacgcagtgcacaagtttgtcgataaccacgtgtccacggcaaagtacaacatcgtcacattccttccgaaattcttatacgagcagttctccaagtacgccaacttgttctttttgtttaccgcggtgctgcagcagattccaaatgtttccccgacgaatcgatatacgacgattggcccgttagtgattgtattgttggtgtctgccatcaaggaattggttgaggattataaacgaaggtcatcggacaagtccttgaact

SEQ ID NO: 23766 - DNA, 850 bp, Emericella nidulans
cagtcttcccattgacggcacatcgatgtcgatgagtgaacccacacctacggagccaaatgattcattttaccaagacatggagcccttgcatcatattgatgaaggcagacatggtctcgatcctcttccaccagccaccactcctgaaagatttcagaaaatgaagctaatcatgaccttgtttttggataaaacaactaaagatttctcaacacacccggcattaattcagctgtcaggcgaggacttggaagttccacttgacgagtatcgaaataatgctttacattgggcggctatgcttgctcgtatgccacttgtgtatgcgcttgtcaaaaaaggcgtaaacattgcccggctaaatggggcgggtgaaactgcattacagaaagctgtcggcacacggaacaatcttgactacaggagcttcccgcgattgctacaagtcttggctccgactattgacatggttgaccgaagtgggcgaacaatattgcatcatattgcagttatggcggctactggacatggtggtcatgtgtctgcaaaacactaccttgaggcgctgctcgaattcatagttcgccatggcggtacctcattgaaccaacagtcaaatggcactgcaagccaaccgggaatgccgctttctaatgaggtcattaccttaggtcggttcatctcagaaattgtcaatctccgagatgatcaaggagatacagcacttaatctagcgggacgtgcacgctctgttctggtcccacaactgttgaaggtgggtgcggatcctcacattcctaatcactccggtcttcgaccagcggactatggtgttggcgtggacatg

SEQ ID NO: 23767 - DNA, 669 bp, Emericella nidulans
tttggaccaagagcatcccgaagccctggaaagtatgactggtctggcggcaacgtaccatgatcaagccagatgggcggaagctgagcagctggattcgtttgtacttgaagcgagaaggaaaatgctgggctccagtgatcgcctcacgctgaccacgatggctaatcttgcaacgacatatgtgtctcaggaccgaatgcaggaggctgagtcccttagacgggaggtctatgagacctcgaaatcagagtttggcgaagaggatgaggacacaattatcgcgatgaccaacttagggacactctacatcgatctggggaaagtggaggaggcagctggcttgatacagcgtgccctagcttggagaacgaaaagccaaggtcctgagcataaggacaccttagtctgctccagcactcttgctaaggtctacaaagcgcaaggcaaattggaagaagccgaagaactggcccttcagtgcttgacggtatccgaagctgtcttaggcccacagcatccagagacgtggatcagaaaaacgatagtagctgatatctacttggaacgaggaaagctagacatggctgaagagcaatttgtgcagatgatcgaaaagatggagcaggaaaaggcccctcgctacgatatcttagagaaaatattacg

SEQ ID NO: 23768 - DNA, 850 bp, Emericella nidulans
tgatattcggacgccgaaaacacttcttcaaacgatgaactacctaacgcggcacgtcatcggcggaccagaacctctgggcatcattcataagtttgtttgggacagaacccgatcaatacgcaatgacttttcagttcaacaacttacccaggaagaagacgtgaaaattgcagtgacgtgccttgaaagaatagcccgattccatatcgtgtctcttcatttgctttcaagccctgcgaatgaagagccttttgaccggcatcaggaacgcgagcaactgaacaataccatgctctcgttgatgtattactacgatgacaacagaggtcgaatatcatttcccaacgaggacgagttccgcgcctactatatcattttctcgatccacgaccaacgtcctgatttggaagctcgtgtccagaaatggcctcctgagttacgaaacgcgccgcgcgtccgggtggctttggagctgttcgctgctgctggaaacacttgggaatatcagggcacgctcgatgctaaacggcctaatgcgattgctcagggtttttacacgcgtttctttaacctagtgaactcgcctggcgtatcctatctgatggcctgtgtggccgaaatctatttcaaccatatgcgccagaccgctattcgttcaatctggaagggttactgccgctacccatcctctcagcagcataagaacgaagaatggacgattgacgagctgacaagtgttttgtgctttgatgacaatgatcagaccatccagttctgcgcggaacaagatctacaattcgctgaaaatgccaacggtgacttgtatctcaactggggaagccgtcct

SEQ ID NO: 23769 - DNA, 850 bp, Emericella nidulans
gcatcaaagtccgtgggttggatgttcctaaacctgtacagaaatggtctcagtgcggcctagggatacagacgctggacgtcattgacaagcttggctttgccagtttaacttctattcaagcccaagcgatcccagccattatgtccggtcgtgatgtgattggtgtggccaagacaggatccgggaaaacaatggcgttcttgatacccatgtttcggcatatcaaagaccagcggccgctggaaaatatggaaggcccgataggtttaattatgacgcctacccgagagttggcgacacagattcataaggactgcaaaccattcttgaaagctttgaatctacgagctgtttgtgcttacggaggtgctcccatcaaggatcaaatcgccgaattgaaacgcggagcggaaatcattgtatgcacaccgggacggatgattgatcttttggcagcgaacgctgggcgagttacgaacctgcgccgggtcacttacgttgttttggatgaggctgaccgtatgttcgacatgggatttgagcctcaggtcatgaaaattctgagcaatgtgcgtccagaccgacagactgtgctgttctccgctaccttcccgcgaaacatggaagcgttggctcgcaagactctaaccaagcccatcgaaatcgtcgtgggcggtaggagtgtcgttgcgcctgagattacgcagattgtcgaagtttgtaacgaagagaagaaattcgtccgcctactagaattactaggtaacctgtattctacggacgagaatgaagacgcgcggtcgttgattttcgtcgatcgccaggaagcggccgacactcttctccg

SEQ ID NO: 23770 - DNA, 646 bp, Emericella nidulans
cctctgccagtgattacctcaacacagtcgttttcgccgtcggacttctagcagggcttcgctctaaaaagcttagtggtcaatgggttggcgttatggtcactgccagtcacaatcctgctgaggacaatggtgtcaagctcgttgatcccatggtgagctctcggaccttagaacaagttacacaattggccagctaactcattttcctagggtgaaatgctagaggtgcgtttaatggtgtctcatacctctcgagacaatctctgacagtttcacaggccgagtgggaaactcatgcgacaaagcttgccaatgttcccatggagtccattgctgatgtatacgaagagctcatcaaggaaatcgatgtcagcatggaaaacccagcgcgcgttgtctttgcccgggatactcgcgcctctggctctcgcctcgtgggagtcctcaatgctgctctcaccgccacggacgtcgaattccttgacttgaaatatatgaccacaccccagcttcactatgttgttcgatgcaaaaacactttaggaacgcagtacgagtacggcgagcccaccgaacaagggtactatgagaaacttgccgcttctttcaagaaagtcatgcggggcgtcaaggttaacggttc

SEQ ID NO: 23771 - DNA, 500 bp, Emericella nidulans
tactatatgccatgtccgccgtgcctctgggtaagtcaacgaacgctagaagctctatcctctggtactcacagtatgaatagcatgggaccaagcttctgcttcttctataccctcactaccaggcttccaagagcaatttgactttgattcgggtaacagcgcccttgcgaatcggaactttgtatctattgtctgggtcggcgcaggggtcggtggaggagcctcctttttcctcaatgatattctcggccgccgttggagctttcgactgtacgctgccatctggattcttggtcaggtagttgcaaccagttcgcccactctgagtgggctttatgtttcacgcatcatctcagggttgggcataggagccctgactgtcatcgggccaatgtcaattgctgagatcgcccaagcgagatacgtggcacgcttactgcatggttcaatgtggcgatgaatatgggaggcacagctggggctttttgtgtgtatgg

SEQ ID NO: 23772 - DNA, 850 bp, Emericella nidulans
gaatacgtctatatgggaagccgatccgcgtcaataaggcttctgctgataaacaaaagtcggtggaaattggggcagagctttttgttggcaaccttgatcccatggttcggagcaagttctatatgatacattcagccggtttaggaacctagtcaatctgccaaaggtacttgccactctttactcctaagtggtcctcagatattaatattgctcccaggtcgcgagagatgacagcaatctatcaaaaggatatggctttgtgtcatttgccgacttcgagtcttcagatgctgccatacgccacatgaacggccagtatctcatgaacaaacaggtttctgtacagtatgcctataaaaaggacggaaagggtgagaggcatggtgaccaagcagaacggatgttagctgcgcaggctcgtaaacacaacgtgcaagtgccgactcaagctcttccaccgcaattcacagctccagccgctcctgctatgcccgccgatatgtcacggccaatgagcacaggtccagccgatcaagggatgggaagagttccaatgctgccaccgcaacttgttggcttctcaccgaatgtagctactcagcagtcactagcgagacctggccttccttccgttacagcagccaccccccctccgggtctcccagcacggcctccaccttcgcaagccgggtacggagggcctcaagtgttcctacccccaggcctcaacaactctggccagcagccacaatataccccccaggccgcgccgcctccaggatttgcgcccccaggatttggaacaccttcaggaagctatggtccgccaccacccatgcctcct

SEQ ID NO: 23773 - DNA, 549 bp, Emericella nidulans
atgttcccgctgcggacggctgggctcccattatcgccgcggctgactctggatacgtcaggactctccaagttttgctcgaaaatcatgcagaccccaacttatgtggccctggtggacaggacactgcgctctggtgggctgccatgcgctctcggagtgtagaagctgttcgcacgcttctggaatatggtgcagaccccaaccatgagcttctcaagcccccattggtggttgagctatgcagttcgtcggaactcagtacagaatataaggtcgctctcctggatgctcttattaatagcaaatctccattgggtgtcgataaagtagactcgcacggatcgacaggcttagtctgggcctccagcagcgggcacattcctgtagtggattggttgctagcgcacaacgccaatgtgagcctcctcaacgacgagcagcgcggcgcgatgcactacgctgttgtgaacgggcataaggaagttgttcgcagattgctcgagcggaagccccctctggacgttttggctgacaccggcgagaccc

SEQ ID NO: 23774 - DNA, 500 bp, Emericella nidulans
aacctggagtgcatccaagcaattctctgcagtgcaacctactctctccgttcttcgaaaggcacatcccattggtaatctccaagctgtaattgatattgcttattgactgactctatgtaggaaactagcagggcaggcccttcgccaatgcatcaaccttggctaccatcgcaaccacagacgtctcgggttgaatgtcagcccagctcaggttgaaatgcaaaaacgaactttctggagcgcttacactatggagtgtgcggctgcagtcatgcttggacgtcccctgagtctgaactataacgagattgatgcagaagtaggccctgtctttgattccacagtcgtacaatatgcaccgaactaataccaccttacagtttccattggatgtcgaatatgatgcagatgggtcacgaaaccccagacctaccggtctcctaacctacgctaatcctggattttccatccgtgctcttcagggtcgtattcagacg

SEQ ID NO: 23775 - DNA, 850 bp, Emericella nidulans
ccaggctattctggtcccggtctaccgtacgtggggattttcagggtcgatggtcgcaggcctggtcctcgaagtgctgggctatgtggcccgcatcctcttccacgatgatcccttcaatttcgacttcttcctcatgtattttcccttcctttcgaaagatatatataaagaagaaaagacagagggtcaagctaacactgagcttacaggaacctcatctgcctcagtatcggaccggtcttcttctgcgccgccctgtactttcttctcggccgcatcgtgatcgtctatcgcggagagaacatctcgcgcctgcgacccagaacctatgccatcgtcttcatctcttgcgatatagttgctcttgtgttgcagagcatcggcggtgccatgacctccacagcggacgatgccgacgggagggagacgggcgtcaatatcatgatcgccggcctggcgttccaggtggctgccttgacgctgttcattgcccttgcagtcgaatttgcgtggcggcagcgccgtcgttctgagggacaagtccccatcggcgaggacgatgtgaaagatcagtatgctgagatccgccgcgataagtggtggaaggtcttcctggccggtacgctcctggcactccttcacgatcctcttcggtagtagagagttcaactgacacgagcaggacttatcgtcgcggcaatcactatctatacacggtcaatattccgagtcatcgaactcaacggcgggtatgatagcgagctggccaacgacgaggtcacattcatgatcctggagggagcgatggtctctattgcgtgcatctgcctgaccgtcttgcatcccg

SEQ ID NO: 23776 - DNA, 850 bp, Emericella nidulans
aacagctgctgactagccctacttttctctgcagataacatctccgattggctttcataccgactgtccatctcccagattctccagttcgcctcgctctaccagatccccgttgtcggccctgatgtctgcggcttcggtggaaacgtaactgagaccctctgtgccaggtacgatcgccctaactcgacagcatcttacgtgcctgctaacatagtctctactagatgggctaccctcggctccttctacactttcttccgcaaccacgccgagatctttgccaatccccaagagttctaccggtggccgatcgtcgccgaagcggcccgcaacggcattgccattcgataccagctgcgtaagtctgcgttcaccattagatcccaacataattaacattgagtccgccaatctagtcgactacatttacacagccatctacaagcagacccaaactggcacaccatcccttaaaccgctcttcttcaactaccccttcgaccaaaacacttacggcatcgatctccagttcttctatggccccggcatccttgtctctccggtcacggaggaaaacagcaccagtgtttcctactaccttcccgacgacatcttctatgaatggggaactggcaagcccgtccgcggacacggcgagtacgtctccgccgaagtcggcgtcacccatatcacggtgcactataagggcggtctcgtctatccacagcggatcgagagcgcgaacaccacaactgcgctgcgccagaagggattcaatatcgtcattgcaccgggcttggatggctctgctcatggagagctttaccttgacgatggcctgtcgcag

SEQ ID NO: 23777 - DNA, 569 bp, Emericella nidulans
accttgagtggctctgttccgacagctctctcatctccatcaaaaagccagcagcctcccgtcgaacttcttctgtcacctggcgttgctcctgtagctcagcttgcaacttctggtgtctgatctcgaggtcagcaaattgagcctgcagctcggcgtcctcgccttcgtgcctcgatgtccctgaaagctgggcttgaagatccctttccatgacctcatgttctgcccgaaccttctcaagctcaagctgcaaagaattgtttaggtcttctgctttgtgtattttattctcaagctcggatttgatttcatcccactcttgtcgctcggcattgcttatctgtgtaactcattagcaaatcaaatagcatgccaccacttgaaggctcacctgtgacttatcctgatcttcctggtattttgcgagttcctcctcttttgctctgagcaactcctccaacttgcccacttcctgccggtcatgctgatacttgtcgatttcttcgtcctttgttttgagtaactcttccagcttgctgaccttctcctgcagcgttgacacttgt

SEQ ID NO: 23778 - DNA, 500 bp, Emericella nidulans
atctgattgttcttccccgtcctgggcagataacaactggccaggcaatccccagcccttccgaagccgctttcgtgagaactttcggccagctcttgccagcggcgtcctatctgtacactcagaacggcagaatcgcctattacagtcagtcaccagaaacgaacgaccctacagcaacaattcgccgggtcttatttattcacggagtccagacacctgccattggactgcagccattatcaaaggagctcttttcgcgctttccttccgcacaaggtgttcttgttgatctgtggggccacgggctgacagatacaccctttgcaccccatgagccggccctttttcaccagctcatcgaggacttgatgacacatctggggtggcgcgatgctcacatgatcgggtactcctttggtgggtcgacaacggccacgttcgctgccgcgcggcctgatcgtgtctcgtctatggtgcttgtcgcacctgcaggtctc

SEQ ID NO: 23779 - DNA, 850 bp, Emericella nidulans
gtcgaaaaagcatgcaaggaagcatttgttgacgaatttgttcagcgccttccttcagtatatatcccgtccacatcgctatatcacgcgcatactgatcataacagagatactccacgctcatcggggaaaatggcttaacgctaagtggcggccaacgccaacggctaacaatagcgcgcggcatcgtttctaaccctccgatcttgatactggacgaagcaacgagctctattgatgtgagaggagaaaggatcgtgcaggcggccctaaaccgtgtctcaaaggaccgcacgacaatcatgatcgcccatcgactgtcgactgtgaggaacgccgatcggatcattgtgcttagggatggggagaatgttgaggagggaagccatgaagagttactaaagagagaaggagtttacagtggccttgtcaaggcgcagctattagggacattttacggcgcggatggctttgaggacagtgagcacaatgagtgggcggcaagtgaggaaaagaacgaaggggagctcaactccataccagaggaagctccggcgaagaagatgggcggtttcatgagcttgagtgccattctctacgaacaacgggcctactggatgctatacatcgttatcctcgcggcggcggccggctctggatgtaagtcggccctattcgtgagacgcaagctaacatcacacagccggcttcgctctccaaagctacctctttgcgaaactgatcgaggtcttcaatttcaccggtcagaggctgatcgatgccgccaacttctgggcattgatgttcttcgtcctagccctagctgtgggagcctgttactttaactagg

SEQ ID NO: 23780 - DNA, 354 bp, Emericella nidulans
aatcaaagacgcggtgacagttggcgcaaccctctgggccacctactctgctttcaacttctcctacgcgatgatctacattcccggcacgggcatcctggccgcctacacggacgccgagaccggcgcgctcagtcccgagttcaaccaagctatcgcaatctacctgtgggcatggttcattgtgaacacgctctacgtggttgcggcggttcggagctcgtgggtgattttcatcgacctcgctattctgagcctgggcttcctgttgttagctgtggcgtatatgaccggcgaccaggcggttatgacggccggttactctgttacgatggttacggctgcgctctcctg

SEQ ID NO: 23781 - DNA, 850 bp, Emericella nidulans
cccaatacacttcgagggagacttcatggccgccaatctcaagcagaactccgcaaccaccagcataggctatccctacatcaagaagaggtcttgataggatggatagaatcacttgacattcgtggagcagctcccaggccctcgcgcgtacgtgagatggcacaacttatcctggatgaatcctcaacctcatctcgaccgatcggaaagaactgggtaacagagtttacaaaaaggcgccctgaaatcaaaaccaggtttgcttggaaaatcaatcatcagagagcactttgtaaagatcctaagataattcgcccatttttcaataagatacagaggattaaagttgagtatgggatatcagatgatgatatctacaactttgatgaaactggctttgctatgggcctaattgcaacaacaaaagtggtatcttgagcagaaatgccaggcaaaccatggcttatacagccgggggatcgcgagtgggttaccaccattgaatgcatcaattcaactggatggtcagttccatcaaccattatctttaagggaaagcgctatagagagggatggtttgaggaactctctattccacatgcctggaggattgaggttagtaataatggatggactacagatataattgggcttcgctggcttcaaaaatgctttattccagctatacagaggcggcgaaggggggagtatatactccttattctggacagccatagaagccacttgaccccggcctttgacactacatgcaaggataataacattatccccgtctgcatgcctcctcatttatctcacctcctgcaacccctggatgtgggctgtt

SEQ ID NO: 23782 - DNA, 500 bp, Emericella nidulans
tgagcgtttcattgagggtgaaggcctgtgttatatatacgctgacggctctcactgccccaaaatcattgatggcatgccagttaacgccaactggggggtcacgaaagctggcaagcctcgaaaaagattagcgcaacgctgtcttacatgccgagaaaagaagataaagtgtcatccaaacctgccgaagtgcgaccaatgccagaagtctgggagggaatgcagatttgagagtgcgtaagtatatggacaacagagtgccacgaacctgaattgctgatgacgttcagaccgcgtgacaccgcgcagcatcgaaggcgtcgcaattcacgaggaaatatgatataagacataatactgcaacggaggactctaacaatgcaggtacctccagttcactatattctgttgcgagggcttcagagagctctacctccctccctggaacaaactcacagtctcccctatctgatgactccatgcttacgccttctgct

SEQ ID NO: 23783 - DNA, 850 bp, Emericella nidulans
cgcgcaggaatgctcgcagttgcaatgattccgtggatcgtggcgatgagtacaagggcaaatttcatcagcatgttgactggtatcggccatgagagattgaatgtgctgcatcgctgggctggctatatttgcctgttcttgagtctggtccacacagttcctttctacatcacaccaatctgggagcatggcatgctggagatataccagttatacctcacgcctcacatatacgtttatggcactggcttggcggcacttgtgcctctggttttcctgtgtatccattcgctaccgattttgaggaactgtatgtacgagttgttcctgaagcttcacctacccgtatctatgatcttcgttgctatgcttttctggcacaccaagaactacctgtcctcgtgggcctatctgtggtctacggtcgccatattggtcctttcttacgttgtgagattgggctacctcaactggactaacccattgcgattgtcattcatgatcggtgaagattccgcaatcaccgtcctaccccagaacgcggttaaagttactgtcccgacccaaatgaggtggaagcctggccaatatgtgtacttgcgcatgccaggagttgcgttcttccagaatcatcctttcaccattgcctcgctatgcagcaacgattttccgtccgagtacggtgaggaataccgtgacttagccctcgtattccgaccattccgtggatttacgcgcaatgtccttcgcaaatccgtcgaatacggacccttcaaaacatggaccgccttcctcgagggaccctacggaggtatgcggcggcagatggcagcttttgacgatgtta

SEQ ID NO: 23784 - DNA, 340 bp, Emericella nidulans
aggttaactggggcattcgttttgtcactcaagatcaagcggaagatttcatgcggtccctgtgcgaggagctacaccgaagactcgtcgagaatctaatgaagggccagcagctcacactcaaggtcatgcgaagggctctcgatgccccgttggaagccgtcaaacatctgggtcatgggaaatgcgatgttttcaacaagagcgtcattcttgggatagccacgaacgcagcagatgttcttggaaaagaggccattgctatgcttcgaagcctcgctatctcccctggtgatttaagggggttgggcgttcaaatgaccaagctcgagccgctaaa

SEQ ID NO: 23785 - DNA, 367 bp, Emericella nidulans
aatccgaagccagagtctcgagcgcggaggaccttgactttccatcaggcctcgatcccaagaccaccatctggcgtgttctaggcggctacggagttaccggagagtgctgggaactaccgatcgacgagattctagtcgacagcatatggcagcccagcctaagaatcgcagctgcgtactccaccccctctttcctcgtcttcttagcaggagactctgcccacctttctcctccccacggtggttacgggttgaacagcggaatcgtcgacgccgtcagtcttgcatggcgacttgctgccgtaataaaggggtacggcgggagctatttacttagttcatatagtcttgaaaggaggcccat

SEQ ID NO: 23786 - DNA, 850 bp, Emericella nidulans
ctaggccattcgaacgaatgattgcgctatcgctgtagccggcggagtgaatataatgacagatccccgatggtcccaaaacctggctggggcatcgtttctgtcgccaaccggggcatctaaggcattcgatgcagatgccaatggatactgtcgtggtgaaggtgctgggctgcttgtgctgcggcccctggaagcagctcttcgcgatggcgatcccattcacgccgtgattactggaacatccgtcaatcagggagcaaactgctcgccgataactgtcccggattcaaactcgcaaagaagcttatatttgaaagccttgtcgctttctggacttactccagacgttgttggctatgttgaagcacatggcactggtctgtaacccactacctgttatcattaaccatctgtagatatcgttaacatattgacaggcacccaagtcggagacccaattgagtttgaaagtatccggaaaacattctccgggcctaatagggccacaaagctttatgttgggtcgatcaaggacaatattgggcatactgagacgtcttctggtgttgcgggcatgctgaagacgatcctgatgatacagaagcgcagaatccccaaacaagctaactttcgtcgcctgaatcccagaattacattaaacgagaggaatcatatagaaatccctactcaatcaattgactgggaagctgaaaaacgcgtggctatggtgactaattatggggcggccggtagcaatgctgctatcgttctacgagaacctgcgtcaacacctgctacctcaaacagtgcccatcgggagaccctgccctcgcatgttcctttttac

SEQ ID NO: 23787 - DNA, 607 bp, Emericella nidulans
atatacgatgtagtctgtgttggaggtggtcctgccggtctggcactgctggctgctctccgtatgtcattgctcgatcatctagtatttttactatagaatgggctcacgatatactgataagacggacaggcgcatccccagcaacgtcgaagttaaaggtcgccctcgtggaatcgcaggacctagacaaagcccgctcgtggaagctcgatccgcaccagttttccaaccgcgtcagcagcctcacgccctcgtccgtgtcatttctgcagaagatcggtgcttgggatcacttggatgtctcacggacgcagccctaccaggctatggaagtgtgggatggagagaccgggtccaagatttcgttcgactggtccatggaaacctcgccgtttgaggacctccgcaccgtcgcgacgatgacggagaacgctaacctcgtgcacgcgctgctctcgcggatcgctgcgtctggggatgaaaatctttccatgttctctcgatcaacagtcttctcgatgaaaacggcgcggcgaatgggcccaatgcgcggatctctcggcgtgcccggttttttcatcgcaccggctggtctgagagctcg

SEQ ID NO: 23788 - DNA, 850 bp, Emericella nidulans
cactggcgacgcggaccacacgaacgtccacgccgctgccttcggatctgaaaatgccctgcttacgtgggaagagatttccagccccatctgcgacgagttcgtcgccatgggatgccgcggtacgttcgcgggcacttacttccagcatgttgacaagactggtgcgactgtggggtctgccatcaagtcttctgatgtctatgttgccggtgatatggtcaatattggcagcaagatctgctggccgtatgtgaacatggagtgggatctggatgggactgtgaatgagtgggatacctctagcaccacgaccacggaaaagatctcttttgcttgtatctctctgtccgggtctggctccagctcttctggctcttcggcatccgcaagtacctctgcgcctggctccgcgacctcctctgccatcacgactgcgtccgcaactgcttcctccacaggctctgtctccctgtccacctccgtgagcgcggaaacgcaggccgtctcccagaccaactctgaggttgctacccagcccgcctctaaaacccccgagaccaccgagaccaccgctgtgcccacttccattgacgccgtcagcgctactgagcttcctgtctccaccgcaaccggcgagagcgcaaccgtcacggctcgacccaacaggaagaaaggcaagtgcagggctcactaccgtcactaggctccaatctcaccggagggtccccagatggaatttctggtataagtcagcatggccggaatctgctgtacgtctctgattcggcttctgttccatagctagtatgtgtgtagacactttttctgtggatacccaaatgtatgt

SEQ ID NO: 23789 - DNA, 711 bp, Emericella nidulans
cttctggacaaccggggctactccggacccctcgtacgcggccttaatcccgcgatgcttttcgagaaggcagtccgcgacagaatcacagagtcttactactggaaagagcaatgtttcgggttgaacgctgcaactctctgtgaccgcgcagttgagttgacttttattggcggaacttatggtgtctccgagaaggcttcgccattcctttgcctcgccttcaagcttcttcaaatcaaccctgatcgagacattatcatggagtacctgaacttcagcgaccctgaaaatgagacggacggtgcagatgaggatacaactgcggaggaccgtgcgcagcgcagcgtggtcaaacatcgcggagactttaaatacctccgcgcccttgcggccttctacgtacggttaacctgggaaccagtcgagatctacaaaacgctggaaccacttcttcttgactaccggaagttgaagcggagagtacgtgactcatttgttctgacgtacatggatcagttcgtcgatgatctgttgacgaaggatcgtatgtgtggtaccagtctatggaaattgccatcccggcagcaattggaagatctcgatctgctggaagtccggataagcccactccaggatgaactggatgagatggacagaagcgatgatgagaatgggcacgcgagtgacgctcgctcccatgggggccga

SEQ ID NO: 23790 - DNA, 850 bp, Emericella nidulans
atcttgaaggacgcaagcaagatggaagacgcgaacccgcttgacagccaatatgctggtcttggaatgcaagaaatgacaccatgtaagtcggtgctggtcaagtgcatgcggatgaaattgacaaagcacagtggaccacgcctcggaggaattcagagagcttgagaaatacctctcaggaacccgtggatcaactcacggtgtaaaatacaaggtcagttttgtgacctcgtgtcgctcagaagtcataataacattcgtctaggtgattgatatcttccgtatagagcgacagggagagcacgatcgattcaaatcatcttcatatgccggcctcaaaaacagcaaccgccggctcctctggcatggttcccgcagcaccaactacggtggcatccttagccaaggcctccgcatcgcaccccccgaagccccagtcagcggctatatgttcggaaagggcgtatactttgccgacatgtccagtaaatccgccaactactgctggtctcataacagtgaccacaaggctctcctcctgcttggtgatgttgaactcggcgatcccatctatgagctttacgactccgactataacgctggagagaacgcgaagaaagagggtaaaatcgcgactctgggaaaaggccggagtattcccgctggctggaaagatgccggctgcatccatccgcatttgaagggcattcaggtccccgacgcagattccggcactacagaccataaaacggaccaggggtacttgttgtataacgagtacattgtctatgatgtggcacagattcggctgagatacttattcttcgtggatatgcggtaatctact

SEQ ID NO: 23791 - DNA, 850 bp, Emericella nidulans
gtggaggttgttgatattgggtgtggattcggcgggttgctcgttgggcttgcgcccgttttgccggatacacttatggttggtatgaatatatcctcagggcgacaacaggaaggtggcggcccgaagctaacgagtctaaaaggaatggaaattcgtgtccaagtaacgggattatttgacaaaccggattaaagcccttcgccaccaacaggcgctcaaacttcaactccaactatcttacgctgcataatcatcagccgttttcctctaccaatccccgtttccggtccccgagacccccaccgccaacgatccctcagtcgatgactccgagatctttccgtcgaccctaatcccaggcggataccaaaacatcacagcgattcgcgccaacacgatgaaattcctcccaaatttcttcgcgcgcggtcaactatccaagatcttcatctgttttccagatcctcatttcaaggcgcggaagcataaggcgaggattgtcagcgagacgctaaatgcggagtatgcgtatgcgcttcgaccgggaggcttgctgtatacgatcacggatgtggaggagtaccattactggattctaaggcactttgggtacgatgttgaggctgagcaggctcaaaagcagggtgaaggtcaggaggaggtgcaagaatcagtggggaagagagaggggtcagcggaattgtttgagcgagtgagcgaggaggacattgaaaaagacgagtgtgttcgggttatgaaagaggccacagaagagggaaagaaggttgcgaggaatgggggaaataagtacgtggctgtttttaggaggaagagtaacccggaatgg

SEQ ID NO: 23792 - DNA, 500 bp, Emericella nidulans
gcaacctccaggacgacaaaagcaggccatcttcttgcacatgtgctccgtcgaaaaccggtggtttttgttctgttggcgataaccctaatcgctctgtacccagcaggctcgccatttctccttcccgcgagcacgccgctgagcccgtccactagtgagcttcttccacgaccaacactagcagcaagcctctcagcaagtgatctcctctcgcgccgtgtatcgagtgatagaacgtccattcccaaactcatccaccagacatggttccccgcgggaagcaacatgtcggcctcagcgcaggcttgggtgcagactatgagagagcagaattccgactgggagtatgtcctctgggatgatgtgaccaatgagttgctggtcgagcagtactttccgtggtttctggagacgtatcgctctctgccgaaggagattaaccgcgcagatatggcgaggaatttctatatgtatttgtttggagggtacgtattggc

SEQ ID NO: 23793 - DNA, 850 bp, Emericella nidulans
accgtgcagaagacgccgcaaagattcttaccagataccacggggagaacgaccccgatcaccctctcgtgcatctccagctcaaagagatgcagcagagcatcgccaccgatgcatcagacaagaaatggtgggactaccgcgagctctacaccggccactctgcacgtcgcaggctcatctgcgtgctcggcatggcctgttttggccagatctccggcaacagcgtcaccagctactacctcccggtcatgctggagaacgccggtattgtcagcgagagcaggaaactcctcttcaacggcatctatcccccactctcgctcatcggggctgtcgtcggcgcccgcatgacagacaccatcggccgacgcccgctactcatctactccctcctcttctgctctgtcgccttcgccatcatcaccggaacctcgaagctggcaaccgacgatcccaccaacaccgccgctgccaacaccacaatcgccttcatctacctttttggcatcgtcttctcctttggctggaccccgcttcagtcaatgtacatcgccgagaccctcacaacaacgacccgcgccagggcaccgcagtggggaatctggcctcgtccatcgcgagcacgatcatccagtacagctctggcccggctttcaaggatattcagtactacttttacctcgtctttgtgttctgggacctgattgagatcgtcattatgtacttctactttcctgagaccaaagaccgcacgctcgaggagctggaagaagtcttttcggccccgaatccggtcaagaggagtcttgtcaagagagatgcggcgacggtgttgaatacgatgcag

SEQ ID NO: 23794 - DNA, 850 bp, Emericella nidulans
ttgttcttggtggccctgctatgctcattggtctgggtggcggtgcggcttctagtatcacctctggtgaaggctctgttgacctcgactttgccagcgtgcaaagaggcaatgccgaagtgcaacgcagagcacaggaagtaatcaacgcatgcacagcaatgggcgacaacaaccccatcaagttcattcacgacgtcggtgctggtggtctctccaacgccctgcccgaattgatccacgactccggattgggcgctaagttcgagctccgtgaaatcgacagcgccgaccgaagcatgagccccatgcagatctggtgctgtgaggcacaggaacgatatgtcatggctgttggcgaggagggtatgaacaagttcacggctatttgccatcgtgagcgttgcggtttctctgtcgttggtcgtggagagggtggttcagaggaggagaagagattgatccttctcgaccgagagtcgaaggagcacccaaccgtcatcgacctacccctgtcagtgcttttcggaaagcccccaagaatgacccgcacggtggactctcggaagttgaagctgcctgcagtagatacgagtcttaccacatacctcccctcgctggcgcctaaccgcgcggagcttattggcgaagctgccaacagggttctgtcgcttcctgccgttggctccaaatctttcctcatcaccatcggtgaccgtacagttggtggtctcactgcacgcgaccagatggtcgggcgatggcaaactcccgtatctgacgttgctgtcacgcgacacgtcttgttcagggtgcgaagactggtgaggctatggccatgggtgagaac

SEQ ID NO: 23795 - DNA, 850 bp, Emericella nidulans
ggattcattgatttcatgtctctgaccatccgcagattaagaagaaccaaaaggcaagaaaccgctggttgcgcacgaaagtcctggtcattgatgaggtttctatggtagacggggatttgttcgataagctcgaagagattgctcggctaataagaaacaatggccggccgtttggtggtattcagctcgtcgttacgggagacttctttcaattaccgccagttccagagggtcataatcgagaagccaagttttcatttgctgcagcgagctggaatacctcaatacaacacactatccttttgacacacgttttccgtcagcgtgatcccgagtttgccgacatgctgaatgagatgcgacttgggaaacttagtcctcggacgatacaggcttttaaggagctttctcgtccattggactttcacgacgctcttgaggctactgaactgtacgggccctctaatatccgcctttctagactaacatttcgtacagatttcccacgcgcgccgaagtagacaatgccaattctgcaaggatggcacgtctttcgggtgaaacgatgacttttaatgcggtcgattcggggactattcaagacattcaatttcgtgaaaagttactctcaaactgcatggcacctcaaacgatccacctgaagaagggttcgcaagtcatgctcatcaaaaatatggaggatactctcgtgaacggctcaatcggcagagttgttgcgtttatggatgaagcgacatttgacttttacgttgaaaatgagaacgacttcgcgagcggaaaattcgacgagggagacgaagatagggctgcacgcgctcgtaagaag

SEQ ID NO: 23796 - DNA, 850 bp, Emericella nidulans
  unsure (1)..(850): unsure at all n locations
ctaatgttcccagtactccttccaaaatgcattctctggtgaagttatctacgaatcatggacactatcattttacaacgttttcttcacagtccttcctccattcgccatgggtatttgcgatcaattcatctctgctcgtctcctagaccggtatccccagctatatcagcttgggcagaagggactgttcttcaagcgccacagcttctggtcgtggatcgccaatggattttaccattctctgctactgtatatcgtctctcaactgattttcctctatgatctcccacaagccgacggcaaggttgccggccattgggtctggggctcggcgctgtacaccgccgttctggccaccgttcttggaaaggcggcactgatcaccaatatctggacgaaatacacgttcatcgctattcctggctcgatgattatttggctcgcgtttcttccggcctatggatatgcagcaccggctattgggttctcggaagaatactacggcactatcccccggctttttacctccccgatcttctatntgatggccattgttcttccttgcatctgtcttttccgcgattacgcctggaagtacgccaagcgcatgtactaccctcagcattaccaccacgtccaagagatccagaaatacaacgtccaggattaccggccccgcatggaacagttccaaaaggcaatccggaaggtgcgccaggtgcagcgcatgcgcaagcaacgaggttacgcgttcagtcaggccgacgagggcggacagatgcgtgttgtcaatgcttatgataccacgaggggaagagggcgatacggagaaatgaccagctcgcga

SEQ ID NO: 23797 - DNA, 850 bp, Emericella nidulans
tgatccggtacccgtcagtcgtatacaacaactacgggctgcagtggtttataccgtacttcttagcgatcttcttcgttgccatccccgcgcttatcctcgagatcagcattggtcaggcctaccgcggcggaacagtgatcgcattcaacaatatcaatcgccgtcttaaaggtgtgggcattggacctattctggtgagcttcatcgtcacgcagtatttcacggtgaatctggcctggattatgaattacttccggaatagttttcggtctccacttccttgggagggccgaatcgaggagttttacatgggcgatgtaatccacaatgttgatcctgtgggcggggagttgagtacggacggcaaacacgttctttcgtacacggagtaccccggcgtccggcttttgggggaaacagttggctggagtgccttcatctggtttctcatctggggtgtccatttttcgagccgtgggcctaaccggccgagtcgtctactggacaatgggcctccccatcgtcacgacaatcatcttcgttggccgctctctatcccttgaaaacgcgtctgagggcgtcaagttactctgggcaacctggcgcggcggacaactcgcctcgggaaccgtctggcaaacagccgtgggccaggttttcttctcgacgggtatcggattcggctatttcacctcttatgcgtcctacaacgcgaaacacagcaacgcggttatggacgcactgcttatatgtgggagtaacgtgctctttgagaattttgccgcatttgcggttttcggtgtggttggatacctacaccgctggccggaggatggtgtgcgactcg

SEQ ID NO: 23798 - DNA, 500 bp, Emericella nidulans
ccatactcaggatgacagagatgtatgactcgacgccacctaggaattactttgttacggccatgcagtatcagcctgctatccagggatcgctctccatctcgagcatcgaagctctaatgctcctcgccatgtacaatctgcagtcatccgctagctcgagcgtgtggtacatgatgggtctggcgacacgaatatgcgtcgatttcggactgcacagggaggtccagtatcggcggctcagtccgtacgaggcacagcgacgccggaggctcttctggagtgtatacctgaatgagcgctccgtcgcgtggtcgttaggtcgaccgttcagcattggcgatgaggagatcgacgcagagcccccggctgatattgacgattcgctaccagaaagtgcagacgaagattcattccgaacacccaaagaccggggcgagctgtggacgggcccgaatatccggtgtttcattgcgtgcatcaagccaaaaaggatatca

SEQ ID NO: 23799 - DNA, 850 bp, Emericella nidulans
ccccactggtcttttcggtatgatgatggccgagactcgcggtgtaaccaacgcacctggtgctgcgcagatgttcggtaacgctggtcgtgaatacatggagaagtaagcagcttctagcccatagtttctgacagagaaactgactggttaggtacggcgccaaagccgagcactttgcggagattgcccgcatcaaccacgagcactcgaagcgcaacccatactcccagttccaggacgaatacacgcttgagcaggttatgaaggctccgatgatccatgagcctcttaccaagctgcagtgctgccccacctctgacggagcccgctgccgccatcatcgtctcgcaggctttcctggatgcccgccctcacctcaaggaccaggctatcctgattgccggtcagcagctcgccactgacaacaccacgttgtacaacagaagctcgatcgaccttatgggattcggcatgtcccgcgccgcctgccgtgctgccgtcgccgaggccggtgtcaacatcaagaacatcaaggtgtgcgagctgcatgactgtttctctgccaacgagatgatcacaatcgacgcgctcgagctctcggaaccagggaaggctcacgagatggtcgccaagggtgacatcacatacggcggcaagatggttatcaacccatccggcggtctcatctccaaaggccacccgctcggcgccaccggtctggcacagtgtacagaactggtctggcacttgcgtggctgggccaacaaccgcttggtcgagggaaccgacgccgccctgcagcacaatctgggactgggcggtgccgtcgttgtcacggtgtacaagc

SEQ ID NO: 23800 - DNA, 500 bp, Emericella nidulans
gacagctactgcttgatgtcgccagggagtacaaggaccgtagctggtggatgtctatacgcgtgtggtaagtcactcactcggccaattctgtttcctctcagggccctcgcttcaagaatgatagtagcctgacaaacaattgacaaaggccgtcctcctctgcaaaaagaatataaacctcatctccggtcgtgtcctcctgcaaatcctcccttcgtatgcctacgacagggataaagtcctttcccatgcacgactatacgcgaaagaattcgaatcagtggagattaccaaggacagattctgcattaagattccgtcaaccggccccgcgctcagtgtctgttctacactcgaggcggaggggattcgcactctgggcacggcggtattctcgcttccgcaagcgattgcggccagtcaggccggatgtctctatattagcccttatttcaatggtaagtgtctagagaaagcgtggaagctcaatggaagtg

SEQ ID NO: 23801 - DNA, 850 bp, Emericella nidulans
gtgaacctggacaatgtccgaacagccttcttcctacatgtatactatgaaaaccaacaaccagggggaagcgaatcggtactctacctcagagaggctattactatggcgcaaatgatgtacctacatagagaagcatcgtaccctagccttgcggctgaggagcagaagatccgccgtcgagtgttatggttgctatttgtgacggaacggtaagtggcatgcatatctttgcttgccagcttgattctgatgcaagtataatagtggtgtttgcatcctccacaagcttccagtcattctaaaaacggacacagctatgccggaaactgatgcggacgacgaggttctacctgcattcctgaaactcctgacattgttcagactattcgaacaaagccgaatgttcgacattgtcgaagactaccacctagggctcgagcctcctgttagctccagcgccgctacagctgccacctttgatgagatgttccaggataaatccccggacggctttggcaccctggatagggtatccgacgttcagagagccgatatctgcgtgacgagacactggatgcgcattctcgcatggaaagccctgtcccactcgtctaccggccgccaaccctcatcagactgttttctctcgccggtatttccgttgatcgtgggaaaagatctggtgagtgtagtctaccggctgcctcgagtggcgctccaggcgcatggccttggcatggtaagcgctatgagtcgatataaagaatggatggagtgcctagctgacaacgtgaatagcagctgaagctgtacgaaattgcgacctccctcgcagacgctgtcacca

SEQ ID NO: 23802 - DNA, 850 bp, Emericella nidulans
aggaggctacacgaaaatcggtatcagaagcagctgcaccacgcagccctacggtatgtcctttgcatagcatgtgaagcaaagctaacagatcaagccgcagcaccacaagaaagacagcaagagcagccaaagatccagtaagcatctacattgaccttgtctcaagcatctctgacagcatatagaaccagacccggccaaggttaggacgtggattgatcggtccaaggcattcacggtggaagctcagttcatcggcttgcaggatggcaaaatccatttgcacaagacaaacggaattaagatcgcggtgccaatccctaaaatgtcgtttgaggacttggaatacgttgagaaggttaccggaatctcccttgacgaagataagccgttgtccgacattcgtcgccgttctcaacgtatcgaatccgacaaggcggacaaggctcggtcctcgagcgaaggaaagtctggcgctactttccagcagtccgactacgactggttcgactttttcctcaaagccggtgttggtcctcatcaatgtgagcggtatgcgcagaatttcgccaaagactcgatggatgaaagtatccttcctgacataacccccgagaatctgcgcacactgggcttgaaagaaggtgatatcctgcgggtcatgcgctatctggataacatgttagggcggacaggcaacaagtcgaagctgcgaaatgtgagctttggtggtgaagaggtcatgggtgatggtgaggaatctggtggtctctttgctgggcctggcggggcattgcgcaacaacacccgaaagagccgtccagcaccagctgtccaaaccaacgac

SEQ ID NO: 23803 - DNA, 850 bp, Emericella nidulans
gtcaaatcactgaagctagagagatggcattgcaaaacctcgacgttgaggtttcagcagtggccgcccaggatccaacagtcaatgtcgacgcctacgtccacgaacgccgtcagcaactcctcactgacttcacccgtgaagaaagcgaagcccgcttcaaaataggcgacaatttctggtgtaatgacccccatattgctcccctatctggcgccctggcgacctggggcctaacaataaacgacctgacggcagcctcattccacgacacatcaacagtactaaacgacaagaatgagtctagcgtcatccaaacgcaactccgctccctcggtcggcggtcgggaaatctcctgctgtgtgtgtttcaaatgtacctaacaggccattccaagggcgcggcgggggcgtggatgctcaacggcgcgctgcagatgcttgaatctggcctggtccaagggaacagaaatgccgacaatattgcgtatatccaacgacctattcgcgttggcgatatgcaggccgtttgtttgacttcgttcgggtttgggaagaaggggcgcaggctatcgtggttcacccgcggtatctgttcgctactttggctgaagaagacttccaggcttacacggatcggtgttatgtccgtcagaagaagccgatatgtattcctatgaggggatgaacgggaactcggctaaagctgcgctaccctgggaattaacaaacgagacggcgacatatcttgacccgacggctcgctttcctaatacttaagtttgttgatattgcttaagagacgacgcgataactcgagttatggtattagagctcagacggataccgt

SEQ ID NO: 23804 - DNA, 850 bp, Emericella nidulans
cccctccaccggcctctgccgctgccggcgacaagcctgtgcaaaaaggattcgacgacgatgcgtgggaagtcaagactcccaagcaaccggcagcgccagcgacagctgtcagctcaccaccaccggcagcggcacccgccacgaccagccctccggctcagccgtcaattactggagccatggccgatttatccctccttcaggcgcccctgcaaccaacacttgcgcagcccacgtctacccctgctcctgctcaatcaccccccgctactcaacctattcaagcccagccaacggcgattccagcgccccagccgcagcagccaggagcctcacccaacttttttgcacaggtggcacaggttgggcaacagcaacctatgcaaactggctttcagcagtcccgacagcgcccacaggcacctcaggtcatggggcaaaattctcttatcccgcctccgcctcagcgacctctctctgcgcctcagaacatgcctcagcaacagccttttggcctacctcagctgcagccacagctgacgggtctacctcagcaaggcccccagatcgcagccccagggcagagtctggccgaaataaaccaacagcgcttccagccttccttccagccacaacaaactggattcatggctccgaaccaattccagatctggctaatgccgcaacctaccggtttgcagccccaatcgcagtttgggattcagcagcaacagactggattcggcctcgcaccgcagccgacaggcttcggaggctttggtgcccctccccagcagcccatgccgactggcatcaactctgttcttcctcccccgttgcagcctca

SEQ ID NO: 23805 - DNA, 850 bp, Emericella nidulans
gacccgaatatgcgcgatatcaatggcgtcacgcctcttgcactcgccgttcaacgagatttgttggacatattgatcactctcaccaatgcaggcgcatcggtgaatatgcccgacaacggcggccggtccccccttcactgggccatctatcataacttgcctgacgtcgtcagatttctgctagatcataaggatattgacgtcaatatgcccgccgcgcgctggtcacactacacgccgcttatgctagcttccgcctatgggtttgacgactatgtgtctatgttgctaaccaaacccaaaattgacgtgaactacgccagcccagagggtgcgacagccctgatcctcgccgcgcgacatggaggaacaggagccgccaggctccttcttgcgaatcaggagataaagataaactacgccgacagcagcggctcgactgcgctaactgtagcggcggaaaatggttactatgatctggtcgaagcccttcttgacgcaggagccgacacagaggtgctgcaagaaggaagcaacggcacggcgatcatgcgggccattgatgatgggcgtacatccatcgtacagctactggtagacagaggcgcaaacgtccatcacaaggacgtgtttgaccgcggcctcttacattcagcggctgtaaaccggcgagctgacatattgcggatcttgcttaagcatgatccgaccctcgacgtgaatatgcaagatgtacacggcaaaacgacattacacgacatcgcgcgcatgggggatcttgaaacggtcgatgtgctccttgaggctggtggtgatccgaccattaaagatatccacgggcgcacgc

SEQ ID NO: 23806 - DNA, 750 bp, Emericella nidulans
atttgaggaagcttatgctaggtccaaacgcatcctaaacattacagtagcaatatcaggccggagtggaacaccaaatttactcaattacttgactgcaccgaatgtggtacgtttagtcgatcaggaccatacaagatgctgtactgacaccgaaaccacagctgatttggtccgctgcagtcgcctccaatgccaccaacaactctctctatcctcctgttacgatcttctgcaaagatgagacaggctcaatcgtcccctggccacacagccaagatgcggttttcagaccctggcgtcacacccactacgaagaaggggaatccccgctctaccgaatcgctgagcttttcaatgtaaaccacttcataatctcgcaaacacgtccgtacataatcccttttttccgctcagagctcaacttcctcgatcgcagacccacgacaagccgctggaatataacccgttctttaactcgtctcgttgccctcgagatcaggcaccgctccgccagctcaactatatcggcgcgctgccagtacccttagcaagacttctcatcgaagagacaatccctggttcccacctaaccctcattccagatctcggactccgcgattttccaaactctttcaaaacccagaccataccagtttagcacactggatactgaaaggcgaacgtggcgtctggcctgccatctccgcattgaaggtccgatgcgctattgagatcgagcttgacaag

SEQ ID NO: 23807 - DNA, 850 bp, Emericella nidulans
aacgtgactactggaaaagccttcaggtcggtgactttgtccgattgtacaatggcgaccccattcctgcggacattgtggtgctgtcaacgtccgacccggatggtgcgtgctacgtggaaaccaagagtcttgatggcgaaacgaatctcaaagtccgacaagcactccattgcggtcgaaaagtccgccatgcgcgcgactgcgagcggtcagagttcatcattgagagcgaagctcctcatcccaatttgtacgcatacaacggtgccgtgcgctgggatcaacgggaccctgattatcccgatgcgcctcgaaaggagatggtggagccgatcacaatcaacaatctgctcctacgtggctgctctctccgtaatactgagtggattttgggtgttgttatctttaccggcgttgagacaaagatcatgctcaactctggtgaaacgcctagcaaacgttctcagctcgccaaggatctcaactggaacgttatttacaacttcattctcttattcttcatgtgccttatttccggtatcgtcaatggtgtggcatgggcttcggatgaagggtctcttaactattttgaaaccccctatggcagcacccctgcagtgaccggtattattactttctgggtcgctctgatcttgttccaaaacttggtaccaatctcgcttaacatctcgctagaaatcgttagctcagcccaggccattttcatccacagtgatgtttttatgtactaacccaagcttggtatcaaatccaccacgaagtcttggttcatatccgatggagtaaagcagatatagtcaatattttcaggcaagactggtcattt

SEQ ID NO: 23808 - DNA, 500 bp, Emericella nidulans
tccaaccagccattttgccaacctctcgttgacaaccaacatctcaccgccgtcgatgcaaaattacacttccgggggttcggcgcacatggcgattccaacgccatcatcagcatacaccccacccatgaatggcgccgtgggcaacccagggtttccctataactcccagcatacggctcggcacagttttccagctgccaacccgaatgatatgaaccctccttgcaatactctctatgtgggtaatctcccaccagatactcaggaagaggagttgaaggcgttgttctcaaaacagcgcggctataagcgcctttgcttccgaaacaagcagaacggccccatgtgcttcgtggagtttgaggatgtgcgcacagcaggcaaaactcttaacgagctatacggctacaaactctccaacagtatcaaaaccggcattcgtttaagtttctcgaagaacccgcttggagtgcgttcaggacagcagggctccatta

SEQ ID NO: 23809 - DNA, 677 bp, Emericella nidulans
aaccggtgccaaatgcctcccggcaagccaaatcccccattgcaacggcctagtcctccatgactgccacgccgagatcctcgccatgcgcgccttcaactactggcttctctccgaatgccgcgccgtccttattagtgagcagcatcaatccttcatagacggggagggagagcttaacccacccgcgccgtcaccttatatcaggcgctggcgacgccaatctcagaaaatcactggtccagagtcaaacgctttatttccaccctttgagatctgcccagacgtagacatctacatgtactgcacctgcgcaccctgtggtgacgcaagcatggagctcgtcatggaagcacaagacgatccgaccccgtgggctctcccaaatacaacctcaacttcagacacagacccagaattaccaagaacagacgcccatatcctctccggccgcggccacttctccaaactcggcattgtacgccgtaagcccgcgcgcgcagacgcggagtctacgaaaagcaagtcatgctcggacaagatagccctgcggcaagtaacgtcgttactgagctacgagagtagcctgcttgttgctgtaacggagaatgcgtatgtcaagggtctagttatgcctgaggaggagatcagcaagtcgggttgcgagaggtgttttg

SEQ ID NO: 23810 - DNA, 758 bp, Emericella nidulans
ccccccaccagagtgctcatggcttcgcccgggcatgaccttctccgggttccaaagagccgctagcagcgccagcgtcatccttcctcagcaagggcccagttcatcctccaacgacccaatgatagtcaatggcagtgatcaaaaccgcatcactatacagacaacaaacggaagaagatattttgccagtcaagtctacaatttacggaccggcaaggaagagaactggccggttaaagtgaccatccacgatgtcaacactcacgacatgaccctgtcggggactatggaagcgtacaatatccccgacaaaacttcaccatcgcaaaacgcggttatcattacttttcttgagggagagattattgacttcaactcacacacccttgagacgaagaattttaaagcagatgccgagatcgacagcacgtactggcgagaattgcagccgttcaaggatctaaccgatgatgagatgacccgaaatctagtgtccaggaaatggattacggaggagctgtgcaagggctggattctgatgcgttggaaaggtactattacccctactttcctgtcctaaccctctatttacggtcttgttagctaatagaaattccagaacgatgtttcattacccctacagatgcacgccaaggcctcacaatatcaggcttctattacatttctttgcaccgcgagaccggcaatattgaaggactatattacgaccccggcagctcaccgtatcagcaatt

SEQ ID NO: 23811 - DNA, 682 bp, Emericella nidulans
tctgccgcactgcggaaagagtttcgctcagaagacccatctggatatacacatgagagcccatactggggataagccgtttgtaggttatgagtaagacaaatccgcagagggcatgtggctaatgataacaggtctgcaaagaacctacttgcggccagcgattctcgcagctgggtaaccttaaggtaagctacagtagtatgcgcaaaacgaacgagtgtgggactaactgaataaactgaaaatagacccatcagagacgccacaccggagagaaacctttcacctgcgacgtatgtcaaaaacgctttgcccagcgaggcaacgtccgcgcccacaaaatcacccacctaaaaacaaagccattcacgtgccttctcgagggctgcggcaaacagttcacgcagcttggaaacctcaaggttagctcacagtctaactttgtgtgacttggtcagctaactgatctaatttatgcgtttagtcgcatcaaaacaaattccatacacagacgctccaggccctaaccaagaagttctccgctatgattgatggcgaacacatgagccctcaagaccggaaactgtgggaatattttgcaggactatacaagaatagtaacaagggcatcaaggggcgtgggaaggaccgcagaatctctccgtcctccaagacgaac

SEQ ID NO: 23812 - DNA, 837 bp, Emericella nidulans
tttgcaaataagattatcgcaactgacagttgtgcaggaggcgattaccaggttctacttgacaaacggccggttcggactccctcaaaaagtgtcctgtcaataccgtctacaaagcaacaccttgcgcaagccattgcgttagaatgggacgtcatgaatgcagcgcagcaagccttgaagaatcacacgattcccctgacctctctcactgcacgtgccgcggatattgcgcaggaggatgctgctggtgctggtgctggtgctggtgtggagagagttatacgaactcaaatagtaaagactgcgatgcgttatcttgagacggatacattactttgctgggtacctgagcaagatgacgctgtcaaggacgaggaaacacaacaacaggaaacgctccgggaagctcagatgagggttgcaaaggatgtcattgcctttttaagcaccaaggtatggccaggcatcgacatagtgccggttctggatgggaacagtatcttccgggcatcccagtcccaggcgacaaaagacatcatcagacagtgggttgaagggctggaggcctatgaccttgcaggccttgaaaggggtattcttgcatctaaaagtctcctggttgccgttagactggtaacggaatggagtgagaacttttgccagctgcaacagctaagccggaagagatttggaatcgaggaggcggccgaggcttccagcctcgaagtcagatggcaaacggatatgtggggcgaggtcgaggatacccatgatgtcgataaggaggatttaaagagacagcttggaagcgttattgttttggtggcgggagtt

SEQ ID NO: 23813 - DNA, 500 bp, Emericella nidulans
ctgcgtaaagttgaggcatgtcttgcagaaggcgtcgatatcgaaaagcacgatgaccacggtgatacaccactgggggtagctgctaggttgggacatgggccgattgtccagtgtttgttggaagcgagggcgcaagtcaatgcaaggtctgcaggaggcaaaacggctttgatgcttgcctcgtatgcaggcttcgagggtgttgtgcaactgcttcttcaccataacgcagattgtcaagaatactccaatgaaggactgacttgtctccactacgcaacctttcggcacgccagcgcaggactcatccggctcctgactcaacacttcaagcctgttgacatcccaacgagaagtcccaccgaggaaactccactagtgagcttgctcaagaactatgttcccagcaccgcatgggaagataaggtccgcgctctaatatccgcgggcgcagacgtgaacgcaactgacaagtttggaaacaaaccgatcgacta

SEQ ID NO: 23814 - DNA, 786 bp, Emericella nidulans
gcaccttcgtactgacaattgcgttcagagaaagcccagcagggcatttttggtatcccactcaaggttagcatcaagtatgccaacgtcgctatctctctcacaaacgacaatggcgagagttttatctatggctacgtgcctatagtggttgcaaagtgtggagtgttcttgaaggagaaagggacggaattcccattttctggtgtcgctcggtcggcgctgacctttatgctctattagcgaccgatgtcgagggaatttttcgtctaaacgggtctgcgaagcggcttaaggatctacaggagatttttgactccccggagcgatatggccaaggcctggaatggactggatatcctgcgcatgatggctgtcaatgttcttcgacgataccttaacccagttgcccgaaccaatcgtccgttagagttcttcgaggcgattcacagaggccttggcgcaattcaaattgcaggcccaggagaaaggacctttcctgactcggaggccctctagctgccaaagccgctgggcttcccacatcttaccaggagcttccgccttaaaaagagttccggtctcaatctcatctcctgctgcttgcctaacttgtcaaccggtacctttgtatgtcttcatttttacgctttctctcatcatcacattcgctcgatcatatacatccctcagttttctccttcaacaccctcccttgtttcttctccaccggtacacctctatcctgtttacccccctcttcaaccacttctctctctccgttcc

SEQ ID NO: 23815 - DNA, 850 bp, Emericella nidulans
gtgaagtgcctcgtgtgggaggtaagtcgcagtcaaacgaatttgcgaaatttggcaatggaactgactaacaattatattgtagggttccgtccttgattccgaggagggtatccgtttccgtggtctcaccgtgagtaacaccatttctccgttaatcaaagcctttctaactatttcatagattcccgagtgccagaagcttcttcccaaggcccccggtggtgaggagcctctccctgaaggtaagaatgctgcaaaatccaatcaggtggccatatctgacgaatggcaggtctcttctggttgcttctgaccggcgaggttccctctgagcagcaggttcgtgacctgtctgctgagtgggccgcccgctccgacctccccaagttcattgaggagcttatcgaccgctgcccgagcactctccaccccatggctcagttctctctcgccgtcactgctcttgagcacgagtctgctttcgccaaggcctacgccaagggtatcaacaagaaggagtactggcactacaccttcgaggactctatggaccttattgccaagctgcccaccatcgccgccaagatctaccgcaatgttttcaaggacggcaaggttgctcctatccagaaggacaaggactactcctacaacttggccaaccagctcggctttgccgacaacaaggacttcgttgagctgatgcgcctgtacctcaccatccactccgatcacgagggggaaaatgttagcgctaacactacccaccttggtggcagggctctgagcacccacatactttccctggcggatgctctaatcgtggtggccggtactctccatggat

SEQ ID NO: 23816 - DNA, 500 bp, Emericella nidulans
aagtaagagcatttactgaaacgtactttgctggagaagattttgcacataaggccacggacggtctcgacctcgacacgctcaagacaacttttctgcaatgacgatcatttgctccaagtaatgtgtgtaagatcctacgatcattatacgacttcgacaatctgcctacctttggcaccagaaggtcaaggagtttgttacatcaattggattccgacaaagtactgcagatcttggaatttcttatttatgaccgaggagtcattatagctctttatgtggacgttatcctgatatttcgcaaagatattgaggacattactccaccaaagatcggctgaagagctttcacccaatgaaggatctaggactggcacagaagatattagggatccggattacccaagcagagagctctatccgacttgatcaggggctttatgcacgttccatattggaaaagtatggaatggctgaatcagcatccaagatatccc

SEQ ID NO: 23817 - DNA, 557 bp, Emericella nidulans
acagagtgtgctcagcgcccttgggctgctttgggtgaatctgatcatggacacctttgctgcgctttcatttgcaactgacgcgccaacagacaagagtcctcatccgcaagcccgtgcccaagagcgcctcgctcttcacggtgaccatgtggaagatgatcctcggtcaggccatttatcagcttggcatcacattcatgctctatttcgccggtgacagtatcctgtcagactacctgtcttccaacccagacatccgccaccgccagctcgatactatcgtcttcaacacctttgtctggatgcagatattcaatgaattcaacaaccgccgacttgataataaactcaacattttcgaaggcatgcatcgcaactattggttcattggcatcaactgcataatggtcgccggccaagtcatgattatctacgttggcggcgaggccttcaacgtccgcgagataaccagcgtgcagtggggcgtttgtatcgcttgcgcatttggttgcatcccctgggctgttgtactccgctgcatccccgacaaacct

SEQ ID NO: 23818 - DNA, 500 bp, Emericella nidulans
tcgtttgttaggacgctgctcgacattgtttggaacgtgggatacccgcagctcttgtgggctgcttttgccattggcatatccgttggatggtgagagttgtccaaatatctgccgtcagttgactaaccctaacaggaacatcgttgtccagctgacagcttcgagaacattcactgctcctccgtacaactggtcggcgggaagcctaggtctgctctcgctctctggattcatcggctccgtgctggctttctacctcggtggccgtctgattgatatcatctcgactcgatatacaaagcgccgaggccagcgtttgcctgaataccgtctacccgccatcgtgatccctggtgttataggaccaggcggactcctgatcttcggactatgtattgcacatcaggtccactggatcggagccgctgttggatatgctatgcaggcttttggcgtcgcggcgatttccaatgtcgctgttacctattgtctggatt

SEQ ID NO: 23819 - DNA, 639 bp, Emericella nidulans
atccccgccgcggaatggaagaccgccgtcgaaactccctctcttaccaaatccggcgcattgaccccagatgagattgccacgtaccttgcctctgcccccggtcgctctattcttgtcgacaacaccagcgatcccgccctggcatccaactatccggtatttctgcgcaagggtatcagtgtcgtcacgccaaacaagaagggattctcctcggacttgagcttgtggaaagagatcttcgctgcggctgctgaagggaaggcgcttgtttaccatgagagtacagttggtgccggtctgccggttatttcgacgttgaaggatctcgtcaacaccggtgacgaagtcacgcgcattgagggagttttctcaggaacgctctcgttcttgttcaacactttcgcgccggcgtccggatcttcgagcgcgaagtggagtgaagtcgttagccaggcgaaggaattaggatacacagagcctgatcctcgcgatgacttgaacggcatggacgtcgcccgcaaactgactattcttgcacgtattgctgggctggatgtgcagtctccggactcgttccccattgagtcgctgattcccgccgaactgacgagcctgccgtcgtctgcggacggaatt

SEQ ID NO: 23820 - DNA, 500 bp, Emericella nidulans
cccttcccttttacaactcctttctagcccctgcaacagctcgagagatgggcgcccagttctcccagttctttcccccccacccaaccttcaccagcgagaacctctcggaacagcaaggcaaagtgttcctcatcactggcggcacgtctggaattgggttggaactcgccaagattctctattgccacggcggcaaggtctacattaccgcccgcagcgaagagaaagcagaaaaggcgatccaagaaatccaagcctctgcacctaatcatcatggtgagctggactttatcatcctcgagcttgatgatctaaggagcatcaaggcttcggtagaagccttcaaagcacaagaatcgaaactggatatcctgtggaacaatgccggcgtctcccaaccgcccttgggtagcgtttccaaacaaggccatgagctccagctagccgtcaactgcttcggccccttcctcttcacgcagatgttactccctttactc

SEQ ID NO: 23821 - DNA, 368 bp, Emericella nidulans
acctcatccatctcctcgctagcgtgttcgctccttatctccccgccacctccagtccatcaacgaacagctaaacgcacaattcgcactcattccctcgcttgaggacatcaaggacggctggaaacctgtctcgctgaaacccggccacaagattggcaaggcccagtacctcttttcgcgtattgaccccaagaaagccgacatctggcgcgaccagttcggcggctcgcaggccgatagacagaagaaagaagaagaagccgccaaggcagctgcgaagaaggcggccaaggatgctgcaaaggccaagaagaaggaaaagaaggctaaggaggctgccgccgctgccgctgccaccggcgctg

SEQ ID NO: 23822 - DNA, 500 bp, Emericella nidulans
acgacggactcatctatacaacaaccgaccgcgaaccgctcaaaatagccctaacttccgtaaaaaacctccgtgcggccgtgcggtcctcaatgcaccagtctctcaccgaaaccattgcttcacacacatatgttggcctcgtcgacgtaaaccgccgcatcgcagccgtgcaagccggcgtcaaactctatcttatcgactacggcatgttctgcgccgagttcttctaccagcttggtctcactgatttcggcaacttcgggacgatccagctagaaccgccgcctaaattaatagatctgctacatatagcagcggagtccgagctgcagcaagctagcgaggattatgaagagaaaagggagatattttcggccgccccagagctcgtagcgaaaacgctcattgataggagggaaatgctctccgagtatttctctatccaaatctcagacgacggatacctgcttactatccccttattgctgaagggctat

SEQ ID NO: 23823 - DNA, 500 bp, Emericella nidulans
tactcctgccggttccatttcctccaacgacccaggtgaccaagatgagctgttgctgccgttgtatgacagtgcgtctgtctctgaggaatcaaacgaggaaccgaacgcgtcccccgaccttctcggtacctcgtcggcggactcgagtttctcaacaccacaaatttcggccgccgacgatagtttggtggatgaagagccctcaagacatgtcgactacctctctcatgaatggaaagaagaagatatctgggcttcatggcgttatgtagtcgctcacagagaggtctatgagaatagcgtcagattggagaatgcttcttggaggacatggaccaagctaagacacaatctgggaacaatctccccagattctctcaattggtaggttgtcgccgcgctatatccttcagcgactgctagactaacactctcataggctgaaggattgtgacgtgacatggttgtatggaccgcttaagacttctcgcgtacgg

SEQ ID NO: 23824 - DNA, 500 bp, Emericella nidulans
ccttctcttgcacacggcgacaatgtggttcgtactcgaccagccgtcggtagttcagtaccagggctcgaaccggcctatgatcggcgcttacaacgagccgtcgccgggtcttacctggctttcacggtggatagttagcttcagcaatcagttcggcaggtgtatggatacaccggcttctgcagcaaagctggacacgttcaggtcaaaccctgcctaccgcatcgatgactatatcgagccccacggaggatggaagacgttcaacgagttcttcgcgcggcaggtcaagcctagtcgacggcctattgagggcattgcggatagcatggtagtaacgagcaccgcggatttcaagttcgtagagatgcatcggatcacggccgagtcaacagcgacaatcaaaggatcttcgtggacaatcacacaaatgctcgggggctcaccttataaggagcggttttgcaacgggatatggcttcatggcccgctaaatg

SEQ ID NO: 23825 - DNA, 850 bp, Emericella nidulans
ggacgccgttacctacagtgagttccaaacccagtgatacagctgtaccgacatcatcgtacgacgccctgatgcgacttgcaaatctggacgaatgtatccaggatgctttgattacaagggaaaggcttgaatcacagattagctcaattctggaaaagaatcaagatgctgtgcgaacgacgagcaaagcgtcccgggcgaaggataaactcaacctcactaggaacgcagtttcaagtcagcgcaagcaattgcgcttggctaccaaacgcaaggaagaattgattgctagtatcaatgctagaaaagacgccatggagaatggcactcgcagttgggaaatagtgcgcagccatcttcctgacgcacgaacgaaacttggctccagcatgagattgctcgaccaaaatacagaagaaaccaagggccagatccgacgcatatctgaggatattctcgatatctatccgattgagccgatccgtgataaaccacttgctttcaccattgctggcatagctcttcccaactctaactttgtcgatgtcgatcgagacgcagtggcagcagcgctcgggtatactgcgcacctagtatatttactgtcattctacctttccatccccgtaccatatccaatcacgccgtacctctcaaactcgctgatccacgaccccgtgtctacttctctcccacagaggacataccccctccacccggttaatgtgcagtatcggttcgaatatggagtattcttactgaacaaagatatcgagttcctgctaaataaacagggtctgcgggtgctagatattcgacacacgctgccgaacctgaaatatcttct

SEQ ID NO: 23826 - DNA, 850 bp, Emericella nidulans
acctctgaaccccgaggatgttaacaagttcgtttcattgtttgagaagtctgacgttaccagaagcggaactatatctggtaagcatagatctggttccatgaatcctgctttacgttgacgtgtgaactctaccaccaggcgaaaccgcgaaacagatcttcgaacgcgcaagactcccgaatgagatcctgggccggatatggaatctggcggacaccaaacaacgcggagtactcgatacgacggagttcatcatcgccatgcacttgctaacttcgtttaaatctggtattatgagaggaattcctcaagtcctgccaccgggtttgtacgaagcagctgctcgacgaggtgctagccgcccttccttcagtggcccaaggcctggacttgatgttcctcctgtaccggcaatccccaaacaattcacaggacctcaacggacccaaagccccatcaataggcaacagtttgggacccctctttcaacacaatcgactggtggcgactggcttatttctccgcaggagaaactccagtttgacaactacttcaatactgtcgatacgacgaaatctggggttataagcggcgatcaagctgtagcgttctttacgaaggcgcagctacccgaggagaccttggcgcagatttgggatcttgcggatattgatgctgatggccagttaacgagggatgagtttgccgttgccatgtatttgattcgccagcaattcaccaacaagggccccctaccgcagactttaccacccgctttgatacccccaagtatgcgccgacccagttccacgcacgcagcgccggtccctgctccagttgcagcttc

SEQ ID NO: 23827 - DNA, 500 bp, Emericella nidulans
tcgttgacgtcggcggcggctacggacaggatctccaccacgtcaagaaggaactcgagtctctcccttatactgtgacgaaggggcaactcgtcgttgaagaccggccctccgctgttgacgaggttcctgccgatctacacgatgaggaatttacgtacgtcaaatacgacttctttactcctcagccgatccagggggctagagtgtatagtttcaagaccgtactgcataactgggcggacgagaaggcgttagtgattctgaagcatacggcggccagcttcacgccgggctactcaaagctgtggattttggatcgtgtagtgccggaaaccggtgctgataagattactgcttggcaagatatgatcatgatggcgactctgggggcgctggagaggacgaaggaccagtggacccagttgttggcgaaggcggggctgaagatcaccagcatccatacgatgcctgaccatttcgggctgatcgaggctgtt

SEQ ID NO: 23828 - DNA, 850 bp, Emericella nidulans
gtcaccgaatacgtccgtctcttcggccaacccaagatacctcagcacgccgtttgtgtcgactcccgacttagatcctagctcttcgcagtcagtgccaagctcgcgcctggccataacgccgtcaagtgccggctgtgaaggtgagaaggatggggacgtttttccaaccagttagttcttcggcgttgtcaggagctctgagtaaacacatctcttcggacacgcttgacgaggactttttcgctggcgctggacaatcagatcgacccttttgttagtactcacaaagaggatttcaagctatagaccagcccgatactcttggagcagcttctcacccattagcaaatatagctctcaggagagcttgatcctatcccgtgcagcttcgatcgtgtggaagcatcggtcatttgtctcgaccacgagtgtacctgagttggtcgatagccttgcaagtagcctgggcttttcctcttcggacccggggctttctggtgagcaggccgagcttgggcacgattcctttcgctcatccagccaccgtcagactaacagcctagcacgcgaaatcgagacgcaaatcatgtctcggccggatggcaacgtcagccacgagcccatcaagctgactggtatctatccccacgaccgcgcaaagtctacctccgaagtggaggctgctcccacagtgaacaacaccatgaggcctcagcttccttcgaaaagcgcgctgaggaagaaaggtcgcacgacatcctattctctctttccatcgccaactcttccgtcacctgcgacctcttaggtggcgtctctgttgggcgtcgcctgacccactggccgc

SEQ ID NO: 23829 - DNA, 814 bp, Emericella nidulans
  unsure (1)..(814): unsure at all n locations
gagccgaacctgatcattgtggagtacactggcgagattacgttccaagctgagtgcgagaaacgtatgcgggctatatacaagaagaacgcggtacatctctccctatcctcaacgccatgctccaggcttgattctgactgggcccgcagtgttattaccttatgcatttcgaccagaacatgatcattgatgctactcgcggatccactgctcgcttcgtganccatgnctgtgagcccaattgtcgaatggagaagtggactgtggcagaaaagcctcgtatggccctcttcgccggtgatcgaggaatcatgaccggggaagaattgacgtatgactacaacttcgagtgagtatattgataaggcgtggcccgcagaacaattacactaatttttgccccagcccatattctcaaaagaacgtccaacaatgtcggtgcggttcgtctaaatgccggggtatcttaggccctcggaagagagaaaaggaacaacgagcagagttgagagcagctaaactgaaggaaatcgcagacgcgaaaaaggcaaaagcagcaaaacggagaaaagagaacgctctgaagagatctcgtccgcgcaataacaggaagggaagagccctcgccccatcctccattaaatctggcgtcaaaaaggcggcgtcaaaagcgcgtggagctgtctcccgaaaaatgcctgctactacaacatcgtccaagaaaagcgcatctaaaaagtcctcgcgcgcctcgaaactaacgtcgacgaagtcaaagcgtaatatcagattgcctacaataaaagcgccg

SEQ ID NO: 23830 - DNA, 500 bp, Emericella nidulans
tcttaggtacgcctccgcgtttgcaggcaaagaattctgcctcaacgcctcgacagtgttaaactgtcaacaactagactcctgcgcccctcaggatgcagcggttcgagccgccatgacgaaccgtgaccccgatttccgccatcaactgggcaggttccgtctccaaggtcgatccccctccatcctcgcagctgcccctcccgacctcgtcctcaacgcccgcgacttcgcttcactcgccgtcaacacagtcgacggccgctccccctccgtctctaccgcaccgtctcacatcgcgtcccaagcgcgtctcaactgcctgtgatttctgccgcaaacggaagaagaaatgtgactttcgctatcctaattgctccgcctgtactcgagccggtgtgcgttgcaccatcgcgccgcccggcccgcaaatcacaaactccgttcctcgcgaccagctcgagcggcttcaggaccgtgtacaatggctagaagagatt

SEQ ID NO: 23831 - DNA, 500 bp, Emericella nidulans
cctcactcggtgcgtcggcaatagaggccgggcgttaccatggatctgtcaggaatgaacactaccacatacgattccagcaccaatactgcctttattcaacccggtgcgcgctggggttctgtgtatgaaacccttttgcgggataacgtcctggttcccggcggccggacagcatctgttggcgtgggaggttacctgaccggcggtgggaattcgttccatgccgcgcgtgttggtctagcatgtctaagcattaaaggatacgaaattgtcctagcagacggtgaggttgcaaaagtagaccaagattcccatccgaacctctttcgggctctaaagggaggctcaaacaactttggcatcgtgaccttgttcgacatggaagctttttcaacggaaggtacgatatggggcgggactgttttatatgatatttccaccaaggaccagtatattgccgcgggcacagcgtttactgacaacatacccaacgaccc

SEQ ID NO: 23832 - DNA, 850 bp, Emericella nidulans
tattttatgatcacttacttacatactcatagggacaaaatcatcaccggttctcgcgatcgaacaatccgagtctgggacgctcgctacccctgggcttgtcgtaagataatcggaccagcgcctgggggagtcctcaacaacggcccgttccatgatccagagcagcaagcactaggtagttcgccgttattgaccattcgtcctcctcccgcttctccagcagagatcgtgagtctgcatgagaaaccatcgaactatcacagcgcttccattctgtgcctccagtttgacgatgaaatcatggttactgggtcttcggaccatacttgcatcatttgggacattaagaatgactataaaccaatccgccgtcttgagggccacacagctggtgttttggatgtctgctttgaccatcgttatattgtctcttgctctaaggacaacacaatttgcgtctgggatcgacgctctggcgctcttgtgaaaaagctgtacggccatcgcgggcccgtcaacgccgttcagctacgtggcgatctcattgtttctgcaagtggagacggtgtcgccaagctgtggaacattacgtctggcctatgtgtcaaggagttctccagcagagacaggggtctcgcatgtgttgaattcagcaatgatgcacgcacggttcttaccggtggcaatgaccgagccatctatcagtttgacgcgaacactggccagctggttaaagagattgaagggcacacgggcttggtccgttccttgcatcttgacgatgtcaaccaacgaattgtcagcggaagctacgatacgagcgtcaaggtttttgacgctcaagcag

SEQ ID NO: 23833 - DNA, 500 bp, Emericella nidulans
aatgggcccaggggcacgcgattttaatacaacaccgctaatccttgccgcccagcaagagaacaaggaactcgtgaacctgctcctgagtcatggagccgacgttaatgactgggactacagcggcataacggcactccactacgccgtcatacgcggcgacggacgcatcgtccggattcttctcgataagggcgcaaagcagacgaacaactacgacatcggttgccccgtccatgtcgcggctgcaagcggggccctggagatacttcgactcctcgtggcgcacggagcggatgtcggcgccagcaagcgaggcctgtcggcgctcgacatcgcgcttcttaatggaaatatcgcggctgcgcggattctcgttgacgcgggggcgccgctgaacgatcccgtcgagggctggggcttgttcaacccaacgctgatggtcgccggcgggccgcatgcggcagatgctgctgagatagtacttgatcacagcattc

SEQ ID NO: 23834 - DNA, 716 bp, Emericella nidulans
cctagccaagaaactataacagcacctggagaggctgcttctgggccaacggagacatcaacggaagccgagaccacgagaagcgcagagacaaaggagttatctcgcgaagaccctgtggcgccacctgtcgagcaactgacgccgccaggagcagaccaaatcaccccgctggaaacctcagaacagaagccgcagcaagcacctcccaccattgagcaataccaaccggagaaattggcagggacccccacacatccagagcccggtccagcgaccccagcctttaatgttgcaccagaaggacaggcagaaagaccaccagtgctggtcccagttccggcagaggccacgacgtcagctgaagcaatcgcaaagccacagtcacccactgttgagggacactcgcctcaacactcgactgaacctgcggtggagaaaaaacaggaacagcaaacgagtactacaccaagtcctactgagcctgctacgacatctgcggcagaacaaccacaaccacaggctaccgcccaacatactcccaaggaactctcaaggccacaaactgaaacgtctcccgcctctaatgttgagcctggagaaggatcacaaggcgaagctactcaagcacaaatgaacggcgaacacgggacgtctggcgatggaccctcaccgaacggcgaacggcagactgagtgaagcactttggtacctgg

SEQ ID NO: 23835 - DNA, 500 bp, Emericella nidulans
gaggtacaccacagctatcacatcaccatcggcatttccctgcttatcgggtctgcggaggatgctgagacgagggctatggagttttatcgcgcaagtaataaaacgctttccatagctttgcacaacgaagatcttacggcgctccgcgcactgctcagcctggctctttataccctgttcgcgaccaccggtcccagcatctggcacgttctgggcaccgctctacgacttactaccagcttaggtttgcacaaagcacggcaccccaccaatttacacgatgacgaaatgactaagcgcgccttttggagtctttacaacctggatcgactgatcgcaagcacattaggcaggccactggggattgctgacgaggatatcacgttatccctaccacgagagttaaatgacgacggaaccgaaacgccaggagccagctccatgaccattccaatacaggtcattaagctgcgccgcatcttctcccgaatctatcg

SEQ ID NO: 23836 - DNA, 850 bp, Emericella nidulans
atccggactgcttgctcttcttcaatgatggctttacatgcggcctgtcaggcgctctatacaggggagtgctcatccgccgtcgttggcggctgtaatctcatcctctcaccgcgcatgacaacaactatgtccgaactcggtgtgatgtcgccaactggagactgtcggtcttttgatgcacgagctgatggctacgcgcgtggtgaagcagttaacgccatccacatcaagcgtctctcccacgcgctccgggacggcgatccgatccgatctgtcattcgctctgtctgcattaactcggatggaccgagatctcctgtgtttatacccagcccggagagccatgagcttctcatccgtcgttgtcaccagctggctggtatttcagacctctcgcaaacggccatgatcgagtgtcacgggactgggacgaaggtgggtgacgtccaggaaggaagggccgtcgcgaacgtgttcggtgatattgggggagttctaataggatcagtaagaggaatacgcgcttgaggctgcattctggctaaccactccaggtaaaacctaaccttgggcatagcgagggagcatcagccctaaccagcatcatcaaaatgacgttggccttggagaaccaaacgatccccccgaacatcaatttttcaacaccaaatccgaagagtaaactccctcttgctgatttaaaagtatctgctaatttaatatagttccatttggacctgcttgccttcgtgttcccgtggaatgtgagccgtggccgaaagacaaagcggagcgtgttggactcaacggattcggaatcgggggagctaatggacatgtgggtgta

SEQ ID NO: 23837 - DNA, 635 bp, Emericella nidulans
aaagctgaaatatgcgctgcaggagttctatagaggcgtggagcttctgaaatcctatgcctacctcaaccggactgcttttcggaagatcaacaagaagtacgataaggtggttggtacacgtccgtcgatgagatatatggcagagaaagtcaacaaagcctggtttgtgcaaagtgaggtgactgagagcttgctagccaccgcggaagatttatatgctcgctatttcgagggcgggaagcgtaagatcgccgcctcaaagcttcgtcatacggtcaggaaagccggtgattactcgccaaacacttttcgctgtggtctccttgggatggctggcatcctatttgccattcagagtctaatatacgcgagccaccacctagatgatgatgaactaagtcgtcagacgagcttattactccaggtaagtttgcgtacgcctgtttatgctatgatttcaatcgctcacagcggccagatctatggaggatatttcctaattgttttccatttcttgctattttgtgtagactgcatgatctggaatagaactaagataaactatgttttcgtctttgaatacgacactagatccgcactggattggcgccaattggccgaggtatgtttac

SEQ ID NO: 23838 - DNA, 850 bp, Emericella nidulans
atgaccaaattcgtgaactacgtgaagtgattgagttgccgctgaagaaccctgagctattccagcgagtgggtatcaagccacccaagggcgtgctgctttacggacctccaggtaccgtaaagacgctcttggcgcgtgccgtcgcaagttctatggagaccaacttcttgaagggtgagctgattaccagcgttaggtctagcgttccgctaacacggtttagttgtctcatccgctatcgttgacaaatacatcggtgagtctgcacggttaatcatagaaatgttcggttacgccaaagaacacgaaccttgtatcatcttcatggacgaaatcgatgctataggtggccgacgattttcggaaggtacctcggcggaccgagaaattcagcgaacgttgatggagctactcaaccagctggatggttttgactatcttgggaagacaaagattatcatggctacaaatcggccggacacacttgacccggctttgctgcgtgcgggtcgtctagaccggaagattgagattcctttgcccaacgaggtcggccgtcttgagatcctgaagattcattccagtactgtgcaaatggagggcgacattgattttgaaagtgttgtgaaaatgagcgatggactaaacggtgctgatctccgtaatgttgtgacagaagcgtatgtcatgcccttgtttttgtacttggtcattgctaacgttgaaaaggggtctatttgctatcaaggactatcgagatgcgatcaatcaggacgacttcaacagggccgtccgcaaggtagcagaagcgaagaaactggaaggcaagctcgaataccagaagttg

SEQ ID NO: 23839 - DNA, 500 bp, Emericella nidulans
tatccagccaaaggatcaatcaggagagggtatgtacgagctggaagcgtccgtcccctcgccggcagtcaatgtcctttgcgcgggcatgaacgccactgagctcgcaccgatcgtgtataatgagtggcccaaccacggcaacttcaacgcagtcagctggacgacaaatgtgcccgacgacgtccccaacattgagcactggcacaaccgtaccgtcgtcgacgatatcttcgagtttgggccagactatcccgaccagtacgcgcctgtcttcggcaagctgcccgaagagtttaataccattgtcaatgtcacctcgccgtacagtaacggggccatcttcctgctgggcgccagccctaatggcacgaaaccagagtacttcctttgcaggctgaaagcaaagcagtccacccgctgctcaacccgctacaaagccacagcgaccgggtcacacctttacaccgtttgtaacgagaaccagccgctgcaatacg

SEQ ID NO: 23840 - DNA, 850 bp, Emericella nidulans
caacatccgctgacatttcatgataaactagaaaaaagccctcgaaagcggcaacgtctgtgtgaacggtaagcccgccggcccgcacaccgttctcaaaaatggcgaggtcatctcgcacaccctccaccggcacgaaccccccgtaaccggaaatgagattggcatcatacatgaaaccgacgatttactggttatcgacaaaccagcgggcgttcccgtgcactcaacaggacggtaccactacaacagcgtgatggagatcttgcggatccagaacggaggcgcatatgtgccacgcccttgtaaccgcttggaccggctgacgagcggtgtcatgtttgtgggcaagacagcgcagggggcggatcggatgactgtgaaattaaaagaacgcaccgtgcagaaggagtatgttgcgcgcgtgaaggggcggttccccgatggtgttgttgttgtcgaccagccgattatgagtgtcagtccaaaggttggactgaaccgggtcagagcaacgggcaaagaagccaagacgaagttcaggcggttggcgtattatcccccgccgtctcctactacatctacttccgacgagggtgagaatgctagaccagcaacaccgcccccttcgtacgtcaacgaaagcgagggctacagtattgtccactgttttccgcttactggccgcacgcaccaaatccgcgtgcatctacagtttctgggacacccgatcagcaacgacccgatttacagcaatagacgcgtgttcgggcctgatctgggtaagaatgactcgtctgcggatctggacgaggaaattatcgatcggctgatggcgatggggcgtacg

SEQ ID NO: 23841 - DNA, 500 bp, Emericella nidulans
ggaggatctgggtgttggagagggatggtggtataaaggtctgctttcccctatgcagttatttgacgtcgagccattggcgctgacgtctttaataccagagttgggccttgttccgacattctcgacatggtcacaaatcacatttttacatatgtaccttttgatggttcggctgcgggcgttgccctcccgtgacagtttgcagacgtactcgcgccatttgatcgaccacttctcgcataatgctgagtatcgcatggatgttttacacggattgacaagccgtgccatcagaaacaagtttctgaaggatctcttcattcagtggcgtggtgttctcgctgcatacgatgagggtcttatcaagggcgatgccgtgctaggggctgccatatggagaaacttgtggaaggcgagctataatacccctgatggagaggaaattgattgggagaaagtagctcgcgtcgtagcctatatacggcgggtgctctcgg

SEQ ID NO: 23842 - DNA, 500 bp, Emericella nidulans
atgcaaacccttctgcccactggatctgtgcatacaccaaaacagctagtggtggatgacatgaaccgcaagatctacttctgcgaccgcgaaggaatgggcgtgcaccggtgcaactttgacggatcgggccacgaagtcctcatccagacggggagcctagattgcgctgagcatcgcagcgaccttacgcgctggtgtgttggtatcgccgtcgacacccctcacaggtacatctactggacccagaagggcccaagcaaggcaggccggggccggattttccgtgcgggccttgagatacctgccggtcagacagcggagaacagaacagatattgagttgctgttggacggtttaccagagccgatcgatttggacctggaggtgaaatcacaaaagttatactggacggaccggggtgagcaccccattggctgctcgcttaactgtgtggatctatcagggtcaactcagctcgaaaaactcaagtcgaataa

SEQ ID NO: 23843 - DNA, 806 bp, Emericella nidulans
tatgtttcacctgatggctcggacgatgctgccggtacgatcgatgcaccgctccagtccatccagctagctgtcgaccaagctactgcgggatctacgatttacttgcgcggcggaacatacaccccgacaagtaatatccagatcaccaaaagcggcacggcctcggcaccatacgttctccgcgcgtatgaaggagagtcggtaattatcgacggcgaagagctaccagggtgagtacagagacctagataatggagcgctgctgatcaattcaggacccccgccgacctagatgcgtcgctcgacaatgcggatcgaggtatcctccatatccaggatgcagaatactgggagttctacgacctcgaactgatcaacggaccgtatggtgtctatgcgcgcgatgcgtcgaacaatcactacgagcgcatcactacacggaacaactacgaaacaggtccgtacactcctgtttatagcctcacgtactgattggtacaggcttccagcttcagggcgagtcgtcaaacaacgtcgtcctgtatctcgactcatatgggaaccgtgacccgcgaaagaacggcgagagcgccgatggattcgcgtgcaaggaggggtcaggcgagggcaacatcctccgcggtgcacggctgtggaataacgtcgacgatggattggacctttggtatgccgtaaacccagtccatccccgtatctccgctaacacaagcagggaattcaaatctgccgtgacgattgaagacacaatcgcgtggggtaacggctttaaccggtaagccctg

SEQ ID NO: 23844 - DNA, 533 bp, Emericella nidulans
catttataacagctcgttattgtcggagaccagtcatctggaaaaagctctgtccttgagaacttaaccagattttctttcccttgtggtgcgggcctttgcacttgctacacagcgcagattacatgccacaatgaaccccagaagagtgtcttcatatccattattcctcgttccgatacagacaaagcgctcaagttgcgcctgcttaagtttcagcgccgccttacggagattgataacaatgagcttgctaagatttttgatgaggtactttatgtgcatagctgtctagaggcagcattaactgaccttcattttaggctcaccgtgtgatggacatccgtatgagcacagatggctcagatactggcgtcggcgcgtttagccgggacattcttaagatcgaaatcagcggacccgaggttagcttccacctgctttatcactaaattaataacatctatggtagcaaaaccatctaacagttattgacgtccctggcatattccgtgtccctacagatggcaagc

SEQ ID NO: 23845 - DNA, 500 bp, Emericella nidulans
ttgcgtgatctgcgccgccagttccatcattccctgcgtcatggcccaccaactgtgttactgggatcctcgctcacatgatataggcggactcggcttcccgtagctgtgactcgcccacctgtcgctcctcgttcggtctcttcctccgtcgccatcactgccgccattgcggccatgttttctgttcctcgcacactcctcatgtggtccctctcgaccaggaagcacgcttccacccggacggtgtcccttctcgagcctgcgacttatgctggagtgcgtaccagcgctgggaagaagcccgtgctgagcgtctaagtaagatccaacaatcgatcgactctcaggacgaggacgaccagagctccgatggccacagcccgaccagctctgtggaagcctcgctggccgagggacgcaagcaggagcctaccaacccaggccagaacagtgagattgctgccagcgtccctcgtggctggaactggagcaccttc

SEQ ID NO: 23846 - DNA, 850 bp, Emericella nidulans
ttcacctccaccagcttgcagccttgctcgccttcctcggcgtctacttccacattgacctcgacaatctccctcaaatgccctggatcaccgctattggcatcttctggctcttcgaccgcacagcccgcttcttccgcctcatctatcttaattattccctcaaacgcggctcaacctccttggtcgtccaagccctcccaggcgaggcctgcaaggtcaccttccacctccccaaacgcgtccacgttccagcgggctcccacgtctatgcctacatccccggcgtctccctctggatgtcgcacccattctccgtcgcctgggttgaccccagctcctgcgtcacaaaccatggttatatcgacaacgacagaccaccgaaatacagctctgatctcgaaaagcaactgcccaccccaccatcaacccactacaacgacctcccgaccaacgacagaattcaactaacctccgtctctctcatcgtcgccgcccgcaagggcatgacccgcaagctttacaacaaagccctctcctctccgaactccacgtatttaacaactggcttcattgagggcccctacgcctcccatccctccgaccccgcaacatatggcacagcagtcctcttttcagccggcgctgggataacccaccacatgctcactgtgcgcgatctgctcatccgcgcctcacaaggccgtgtccccacgcagaaaatctacctcatctggtctgtccgcagcacagagcatctgtcctgggtacgggagtggatggacagcatcttgcgtctgcccgggcgccgcgagattctgacgatccagctttttgtatcgaagccaaa

SEQ ID NO: 23847 - DNA, 756 bp, Emericella nidulans
ggagccggcgttctaggaagacggttcgccgtcgtcctgatcgtatgcgggcacaccgtgcacatccgggaccccttgactcaagccctcagcgacgcggcctcattcatcgacgcccatcttcacgaattcactgccatcacaccaacgccgcatcccgtccccggcacatacaaagcgttcgccgagatctcctctgcagttgcaggcgcctggcttgtcattgaggcggtgccggaaaagctgtcgctgaaaattgacacgtttgcggaggtcgatcgccatgcaccggctgattgcgttattgcgtcgaacagtagcagtttcaagtccagtttgatggtagagaaggtgggcgagcaacggaaggaacgggtgctaaatgtccatttcaccatgccgccgcaaattcggacagtcgagctaatgacgaacggtcaaacgaggcccgaactttttgagagcttgagtaagatgttgaagggatgcggaatgatccctgttacggccagaaaggaatcgactgggtaggtgtcggctatatcattcttctgggttggaccattgctaacgttcttcatctgcagcttcatcttcaaccgtctgtgggcggcaatcaagcgtgagattatgctcatcttagcagaagacgtgagcacgcccgaggaaatagacctcttgtggacgaacatgtttcagctgccaaccagctctccgccgtgccagttgatggacaagatcggcttagacacagtt

SEQ ID NO: 23848 - DNA, 850 bp, Emericella nidulans
ctaaacttctacctaccccggtcaacatttttgccagtatcttcacgaacaactcaaagaaatggcgcgatgttgcgaagcagttggagcttcctgttacgctattcctttggtggctgggtgtggagatttccttcttgccgaccatgaaaaatcaccatgtcgacggtaatagtcgcactcgagactgggagaacactctcaataagatcatcatctcagtcttcgtgtggacaatcctaaacctcattgagaagttcttgcttcagctcattgccatgagcttccaccggcgtacgtattcggaccgaatcgagatcaataagttccagattgggagtcttaccaaattgtacgccttctcccggaacaagatcgctgagacggacgaagcttttgaagagaaacaggacaaatcaggaagtggcgccaaaactcccttgcgctacgcgggcaaggccaggggtcttgctctcggcgccttgaacaaagttggggacgttgccggtgccgttgcggcagacttcactggccgaaaggctaatagcagcagccatccttctcaagtcgttattgctctgttgaggacaacagctggctgtcagaccctagcacgacggctttaccgtacctttgttcgtgaaggttttgacacggtgttccctggtgatttaaaagaggcctttgatgataatgaggaggcggaagccgcctttagcatgttcgacaaggatatgaacggcgacatttccatggaggagctggaggcagtctgtgtggagattggtcgggaacgcaaggccatcactgcatctcttaaggatcttgactcggtggtttctcggtagac

SEQ ID NO: 23849 - DNA, 500 bp, Emericella nidulans
ggcggtgttacagccgcacgtggagcctggtggcactaattaaaggttctttcatcacagtcttgcatgctagcatgaatcttctatcaaggccatcatccccgacgcagggttgtgcatactcggtattactagaacgcgagtgagactcttagcagctgcgtcgagctcaatctttcattctacgggtaagactgagtcccatcactacaaatacaactgcgtgcgtcacaccttatctattttacctctagattatcacatgctcgaacttcgaccgataactccaatgattcccaatgcacccgcatcaagcacgggccgtcgacagcagaatgccatcgcctgcgaggaatgccgtgctcgaaaactgcgctgtgatatgggagagccgcagtgtaccacctgttccaacctaaacattccatgcatcgtcaacaccgctcgtcgcccgcggggtccaagaaaaggacatgttaagatcctcaaagctcgcatct

SEQ ID NO: 23850 - DNA, 321 bp, Emericella nidulans
gaaggccggactggcaacttgaccgccagggcacaggatggtaatttggtgttcgtttacgcctaggagtaatgcttgttgcaaccttggatggacaagcgaatgcgacctggggacgagaacatggtgctcttagatgacagtaatagctattggtggcttgttcgaatagtaaaggatggtagtattggtgagtatgatcttaatgctggaagagactgtgctaactggcgtaggatacctgcccgctgaacatatcgaaacgcccacagagagactcgcccggttaaacaagcaccgaaatgtggatgtgggtagctc

SEQ ID NO: 23851 - DNA, 850 bp, Emericella nidulans
ggacaccactgatccaggcttcagagaatggtcatgaggctgtggcaagactcctgattgaccatggagctgatgttaatgccagtgagagagatggatggacaccactgattcacgcatcacataaaggccatgaggccgtggcaaggctcctgattgactatggagctgatctcaattccaaggatagatatggatggacaccacttatccaggcctcacagaatggccatgaggttgtggtaaggctcctgattgaccatggagctgatgtcaatgccagtaatagagatggatggacaccactccttcgggccacagagcattgccatgaggctgtggtaaggctcctgattgaccatggagctgatgtgaatgccagtagtatagatggatttacaccactccttcgggccacagagctttgccatgaggctgtggtaaggctcctgattgaccatggagctgatgttaatgccagtgagagagatggatggacaccactcattcacgcatcacataatggccatgaggccgtggcaaggctcctgattgaccatggagctgatgttaatgctactggtgaagatggacggacaccacttatttgcgcattaaagaatcgccatgaggctgtggtaaggctcctgattgactgtggagctgatgtcgaagccaagggtggatatggatggacaccacttattcacgcattacagaataaccatgaggctgtggaagagctgctgattgaccatggagctgatattgatgccagtgatgaatatgaacggacactgcttgttcctgcattacagaatggccatgaggctgtggcaaggctcctggt

SEQ ID NO: 23852 - DNA, 500 bp, Emericella nidulans
gctcatacgtataggaatgccacaggattcgcacaattgcatggaacccgactggtcagctagtcgccactggatctcaagaccgcacccttcgaatctggaatcctgagcgctcacaggcgcgatattctacggagctgcgcggtcacaccgcaggggtcgaaaaggtcctcttcaacccggcccgagactctgagcttgctagctgttctagtgatggcacggtgcgaatatgggatgtacgttcgaaaacatgcgtgagccgtttagaggtcgggagtgatgcgtttactttgtcgtggtccgccgacgggaaggtcctcatcgctggacgaaaggtaggatataatcaactcacgcgcgcgcaaccatacacctacttacgcgagctaggacgacaccctcattccaataaccgtcgaatctccctcatctccaaccgtaaccggccaggtaaccttcgtcgagcccggcttctacaaaacccttggaccacattc

SEQ ID NO: 23853 - DNA, 850 bp, Emericella nidulans
gatggtacgggctttcggaaccctccaccagtgcagccgccaagtgatgtagaagcctcgaagagacaacagcagccgagcgtcagcgtggagaaagctgcccacccgacttttgaaatctccgtcggtgatccgcacaaggttggcgatttgaccagtagtcacatcgtgtaccaggttaggaccaaggtaggctgttgtctccagttagggatctaggagacgcggcgctgactttgtcgcagacaacttcgaaagcttatcggcagcctgaatttaccgtgagccggcgataccgcgatttcctgtggctctataactccttgcacagtaacaatcccggcgtggttgtgcctcctccgcccgaaaagcaagcggtgggccgatttgataccaacttcgtggaatcgcgaagagcagccctggagcgcatgcttaataaaattgccgctcatcctatactccaacatgatggcgacctcaaaatcttccttgagagtgaggctttcaacgtggacatcaagaacaaggagaacagggagccagatctgggtcaaagcaagggtatgtttagctcgtttggaatcagcgtgggtggaggcggaaaattcatcgagcatgacgacgtgagcatcccagatcccgtattcgtgagattatgctaaccatgttaaagtggtttcacgaccgaaagatttacctggatgcgcttgagaatcaactgaagtcgttgatgaaggccatcgatacagttgtagctcagcgaaaaggactgaacaaaggctgctggcgagttctcgacctcaatacaatccttagctgccgttgagtgtctccctaaaacaggacc

SEQ ID NO: 23854 - DNA, 500 bp, Emericella nidulans
cccatgctaactcccagtagcctcgcattagcctggaagccctcgataaactcaatccggacgagaagaaagacgacaagaagaaaaaggacaagaaatccgggatgctcagcggcctcttcaagagaaaagataagaaatccaaatccggtgatgatgaagaaaacattgagaagcactcgggcgagctgtctcgatcatcgcctactccaaaaacatccatggagtccgtatcttcccccgaagcgcgtccaacaaagcaagccgggccgtcgcggcagaccagcaagcttcagaaacaacaacaagaggtggcccagccaaaggaatcactggaacaaaaagagacagccttgagagaacaccagagggatcaaacaatacgccaagtagtactggacgaagtcgaagagatttctggctctggctcgtctcgttccagaccctacgaggtagaacagagccagtcgacactgttcgcgtaccagttcttaagggag

SEQ ID NO: 23855 - DNA, 583 bp, Emericella nidulans
gaacacgaccgatctatcttgatgcgcaagctaccaccccgaccgacccccgcgttctcgacgctatgcttccgtacctcaccggtatctacggcaacccgcattcacggacgcacgcatacggatgggagtctgaaaaggccgtggagcaggcccgtggatatgttgcgaacttgattggggctgatgcgaaggaaatcatcttcacgagtggtgcgaccgagagcaacaacatgagtatcaagggtgtggcgcggttctttggccgatccggaaagaagaagcatatcatcaccagtcagactgagcacaaatgtgttcttgacagctgccgacaccttcaggatgagggcttcgatgtgacctaccttcctgttcaaagtaacggtctgattaagcttgaagatctggaggctgccatgcgtccggacactgctcttgtcagtatcatggctgtcaacaatgagattggccgtgttcaaccgctagaggagaatcgaaagctttgccgctccaggaagatcttctttcacaccgatgccgctcaggccgtgggcaagatccgatcgatgttacaagataa

SEQ ID NO: 23856 - DNA, 850 bp, Emericella nidulans
gccaagtagattgggttagtaaaaagccgttctattcgaacatatccaaaccaaagtctcatcaggataatgcacaggtctagctataagtggaggcgccgactgccatggccttggcatacctctgtaggcaatgggaggttcgaaggcaaaagcaaaaatggcatcagcaacaacaccacattcccgggttaacgaacagtaatactagtagcaaagacgagccaagcgtaatcgctttcgttgtcgatcataaagcccggcctgaaagtacagatgaagcaaacacggttgctacctggcttcgagaactaggtacgctggctaatcctatcttgtttcattctccctcccaactatactcctagagttttttcgctaaaggacttaaggaataacaacggagatcctccccctggactggacaggtatcgatcactccgccttcgaaacccaagcccggcgtctacggtttcaagcattggggaaagcatgtcgagaccgcggcattgatgcgctcctcttgggccaccaccaagacgacaacgtggaaacgacactctggcggctttcagctggcgctagaggcgcgggtctaaccggaatttcgccagttgcgaggatcccggagtgtcatgggctttatggagtggcggcaagtgggagtgccgtttttgctagggactattggcaagaccagaagcacgagatcgaacagacaagaaggggagaattgccagtatctacaggcggaattataatccaccgtcctctcctctccttcccaaaatcaagactcctgacaacatgccatgaaaatgggatcccatatgttacggatccaacaaac

SEQ ID NO: 23857 - DNA, 850 bp, Emericella nidulans
gggctgctgtcgatggtccagataacgcgatttcatatctacaagacaccgtaagttagcttcatgtcggagtggctagccataagaatcaagctcatgccggctaccaggtactatatcggcagtggcgtcctctcagttatgggggtctcgttctccatcatctccgtcgccagcggcgccttcaaccagatgtactcgaacgggttctgtcaactcgacgaggctggaaacagactcccttgccccgaagcgtacggcgccttgattggcacctcggcctgctgtgctttggtggagatcctcctcgctttcgtgcctcccaaagtgatacagaaaatcttcccgcccatcgtcactggtcccactgtaatgcttatcgggataagtctgattggaactgggttcaaagactgggctggcggctcggcgtgtatggatgacgggatgctgtgcccgtccgcaactgcaccgcgccctctcccgtgggggagtccagagttcatcggcctgggttttctagtctttgtatcgatcatcctctgcgaacgatttggagccccgattatgaagtcctgttctgttgtcatcaagctgctcctcggttgtatagtcgctgcagcctgcggctactttagccacgccgatattgacgctgggtggtccttcatttacctacccttccctttggggctactgagctgacattggcttttgctaggcccctgccgtctgattcatctggggcaagacattacctatctctgggtatggtcccaaggttctcccaatcatccccggtttcatcatctgcgcctgcgagtgcataagcgatgtaagccgctaatgt

SEQ ID NO: 23858 - DNA, 500 bp, Emericella nidulans
gatggatcatacagattcaagccagaagaggttttcagcatcgccagaaacagccgcggatggatggaaacggcgccgtgggccaacgagacggaggagtttgaggtctgcggtgcgaaagtgaggtatattcacctccacgcaagttatagctcggtcctgcaggacggaaagagagaacatcgcccgatcgtgttcttacatgggaatccgagctggagctacgcatggcgaaatgtacgtcttattctctttttcattttcttgatggttagatgttaattaggcctgacaggtcttcccctccctgctcaaccgcggccacgacgtctacacaatcgactggctgggccacggtcgaagtgacaagatcctccagcaagaggtcataacaccggagctgcatatccacacgctggtcaagttttttgaggtcacaggcttgcggaatgctattgttgcagcgcacgattggggcgggtacgcaaatctcctccttc

SEQ ID NO: 23859 - DNA, 850 bp, Emericella nidulans
acagcagcagcagcagcaacctcaacaacagcaaagtatcttcggaggtggctccctgcttggtggtggacagcaggggcagcagcaacaacaaccgcaactcggccagtcaacacaaccccaaggatcgagtctatggtctccagggcgcgcggtgacgggcgtacaccggacagtcccaatgcagatggctatcgtgaaagacaagtgggattataccaatcgtaactcccctttccggacatacctgtataatagtgttggcgagggtgatgcaccattctaccaacctggcccgcaggacgacgaaacaaagtgggaggacgccctccggcaacgaccaggtcccgactgcgtccccgtactagtgcgcggattctgggaacttggcaagcgcgcgcagcgccagaaggacttcttgacgatgattcagacgcgcttgcacgagatcaacaattgtctcacggagctgctctcgcgtcacgacttgaaaatatcagtcaaggtagccgactgtcgccggaaacatcatgttctcagcaagcgatgtctggctctcgctgctaagacccaggtcctccgaaacagaggatacgcgatggatgaggcggaagaggaattaaagaagaaacttgcgcagcttgagcgttctgtattcgacccaacgcttagcggtcgcagcgaagagatttgggctcgcatgctggctattcgagagcactcgactcgactgcaggcggaaatcgaacgggctgggtccggtgttgctgcgcaggcgaaagatgagttggatgaagctacgatgaagaaggctaagaaggtaaacgtcactttttcaatcatttgcttc

SEQ ID NO: 23860 - DNA, 850 bp, Emericella nidulans
tactttgaaagatggcttccaggccacctcaaacttggcccagtgaagcaagagacaaaggaatcaaagtatatccaggctgaggatgcagggttgctggcacactggtataatcagctagcaaatgtggtcaaagatacaccagcctggctggtatataactttgatgggtgtggcttccagcctggtgaaggtaaaccaaggaaagtaattggtttaaaaggtactcctgatcttgctgaatctgagaagggtaagaatatcacagctattaaatgcatatctgcagatagctgggtaatagacctattctttatcttcaaaggtggtggcatcttcatggaatcttggtttaacaagagtgaggctttaccactatatacagtaatagctactttacctaatagctgggttttagatgaactagccctttagtggcttcaatgttttattaaggcaacaaataagcatacaaagaggggggagaaatggatccttatatttaacggccatggctcacacctcactgttgaattcttgcaaagatgcgaagacaatggtattataccttttggattccttcctcctacaacttatctctgtcagctattggatgggaagctgttcctaagttataaacaacacttctaatatattaataatgatctatcttactgggccggtgagccagtagggaagtcagagttcctacaagtgatcagtccagtacgggagaaagcctttaaccaacaaactatccgtagagtattcaaagatcatggcatctggccagttaatagaagtaagattgttgacaatcttactatccaagcatgggaacaaatcccag

SEQ ID NO: 23861 - DNA, 776 bp, Emericella nidulans
actgtcgcacctgtcctacctcaaggcgccgggtacggcgttgtcgttggcattggcctcttcttcgcactgcttatggcatgtgtgtcatacctacaagtatgctataacaaaacacaagtaagggcgtttctgacatgaccagaaccgatacacgcagtattcaacgaaaactagcgaggagttcaatacggccagccgcagcgtcaagcctggcctaatcgctaatggagtggtgtccgcatggacatgggcagcgactctgttgcaaagtagcacagttgcttatgagtatggaatctctggtccgttctgggtaggtgatcgcttttcctgatgataatgtccatatactgacttgtagcagtgtgagtgcatactgctccagactactgataatttatactgaggatgtccagacgccgccggttcaactgtacagatcttcatgttctccgtcttagcttgcaaggtcaagcaaaacgccccgtactgccatacattccttgagattgtttatcatcgctacgggcaagcgacgcatcttgtgttcccattttttgcccttatgaccaatacctttcgttgcgagccatctgttgcttggaggcaatgccggtcgtcacaaccctgaccgggatgtaacggttacgcgggtgctcttttggatccccctgtgcgtttgtattttttgtcgttctatggcggcctgcggccgacttttctattgtgaatacactccccaccgtaattgtcatggccattatcctctactt

SEQ ID NO: 23862 - DNA, 500 bp, Emericella nidulans
gaagctgttctgccttaacggcttcggatacgcggtcgattcgctcattctgcttctgcagtcaatgatctcaacacaggcgacactcgagttccagcccagctttgataccggcttgacgatcgctgtctacgtcggaatgctggtcggcgctttgttctggggattctcagctgatgtgatcggccgtcggttcgcattcaacgtctcgctgtttatctcggctgtcttcacggtcgtcgctggcgcatccccgaactggatcgtgctcgggctgttcacatgcctcagtgcctttggcgccggtggaaatctggtgctggacacggcggtcttcctggaataccttccaagccaacattcgtggctcgtcactctgatggcggcgtggtggggtaaaacttacaacatccatctctgtcctacctccggttcgatgctgatgatctcatgtaggcgtcggtcagttgatcgcgggtctgtttgcatgggcattaatg

SEQ ID NO: 23863 - DNA, 625 bp, Emericella nidulans
tctaaacgaaatcctctcgttcattacaagggactttattgcgtcctggcaccgcagtatcagctcaaaccccgctttccccaacgaggtggacaaggtgatacggacagcggttggcaacctacgcagtcgacttctggcggaggatattgtgtctctagttgtctctcgcatatttcctattttgaccactcacctcaaggagttcgacattgcggacgatctgtgcggggaaggaacttgacccgcaatgttaccgaatccgaggagttggatcttgctatcgcaaagaaatatcgtgatggccaactacatccagccgcagtgctgtcgctttcggaccagaaggcagtggagcaggagtacttacgcaaagtaactgttggtttgctgcctcaattattccctgcgaatgtccttaatagtcgcatcgtctctgtgctcattagggaaattctctcatgtgcagttcttttccctctcgtctcagtggcctcggatccggacacttggaatcagctgattgaagcctatgggcgaaccacacttcaggatcgcaaaacggtacgaaagcttcgggccgccctggatgaacatgcttctccagctcccaaggcaaagcgcg

SEQ ID NO: 23864 - DNA, 850 bp, Emericella nidulans
attctatcgcctgccccagacgactcgagcaacaagccaggctgaatatgaacccgcttccggtactccgaacttcagcctcaaagagcagcctgcacggcgacgatgatggcggcgacaaccagaaattatggattaacatggtccccaaagaggtgtcagacagtgtcgatgataaagagaagaagcgacaggagatcatcttcgagatcatgtacacggagcgagactttgtgaaggacttagaatatctgcgtgatttctggatgaggccactacgttctgccagcaactcccccattcccgagcacagacgggagaagttcatacggactgtatttggcaactgcttagatgttctcaaagtcaatggcgcactctctgaggctctcaatgcaaggcaaaaggaaagtcatattgtgaagacggtcggtgacatcttcttgcaacatgtgccgcgtttcgatccgttcattaaatatggcgcaaatcagctctacggcagatacgaatttgagaaggagaagtcttcgaatccagctttcgcaaagtttgtggaagagactgaacggctgaaagagtcccggaaactggagctgaacggttacctgactaaaccaactacacgtctggctcggtatcctctactgctagaacaggtcggcaaaaacactgcggaggggagtgcggataaagaagatatcccgcatgcgatcaggattatcaaggatttcttgtcccgtgtcaatgccgagagtggaagggccgagaaccacttcaacctggtgtctctcaattcctcgttgaaatttgggtcaggtgactatgttgatttgaagctcacagaaga

SEQ ID NO: 23865 - DNA, 850 bp, Emericella nidulans
caatgaagataatggcgtttataagaactcagaccgtcttgaagatacagcacgtgagaaacgacacaaggactacgcacgcgcgcaccgcctcttcagcaaatttgacaacaattctgacgctcttaaatacctctccgcaatttgcgcgtacgggtatgcttcctcttcggacgccgacagcttctgcgacagaatgttcctgcgcgccaaggcactcaaggaggtacgcagcttagacgacagctcactgatattgtacgcaccaataacccgggcctcgttgaagcctaccaagcccgattaccagaaccaagcgacaaacaagttaaagcactcaaacagattgtcacagcgggcttcattgacaacgtcgccatccgtgcggatttggcccccgtcccaccggagatggcccgtacaccaaagcgcgcaattgatgtgccctacattacactcttccggtcccgtgatgcccccataagcacgtcagacatcaacgaaaaggctgtcttcgtgcacccaacttctgtcctagcaaagctctcacccaaggaaatgccgcagtatataatctactcgcacttacagcagtccgtgccctcggttgtggcgggcgacgtgccaaaaatcaggatgtacccgcttgtcacgccgagcgggttgcagctctcggcgctggcgcacggaacgccgctcattgagtacgggaagccgattgggaaaattgaatcgttcggtggcgtaccggagagacgagcttgcttcgtaattccgtcattggttggagaagtagggagcacgggctggccgttgccggccaagaaggtcatacagagaaaggacgtga

SEQ ID NO: 23866 - DNA, 386 bp, Emericella nidulans
ggtgtcggcgctacatgggggaagtatattcctatctcgactcgctgaatctctctgagcaggcggccgagcggcacaggttggtgtcggcggacttacgctaggaggggggatatcctaccattcgccccgttacgggtggacatgcgacactgtgtccgagtttgaaattgtgctaccaaatgggacaatcgttcatgccaccgaagaagaacatcctgacctgacgatggcgcttcgtggcggatcagcaaattttggaattgtaacggaagtcaaattacgggcgttcaagcagggctctgtatggggtggacatgtgtattatccacttgagaccatcaacgaccagctccgggcttttgagagtttcaatacagcaaggg

SEQ ID NO: 23867 - DNA, 850 bp, Emericella nidulans
gtgacattgaaacacacaccaaaactcggcctggattgcacttaaatacgaagcccgatgaagagttgatgaaaccaccagtgctaggcaaactgcaggatcctgctggtggatataaaaccaatccgccacctgtgggccgtccggtgcgagtatatgctgacggagtctttgatttgtttcacgtggggtgcgtatatagcctagcattttgacttgggataagtcggctccattggtacatgctaattcgttttcgacagtcatatgcgacagcttgagcaagccaagaaggctttccctgacgtttaccttatagttggggtgaccggagataaggagactcacgagcggaaaggtcttacagttctaagcggcgcagagcgagccgagagtgttcgtcactgcaaatgggttgacgaggttttcccaaactgcccgtggattgttactccagaattcatggaagagcataagattgactatgttgcgcacgacgacttgccgtacggggccgcggagggagacgatatatatgcccccatcaaggcccaaggaaagttcctggttactcaacggacggaaggtgtgagtactacgggtgttattacaaggtttgtttgtcttcgtccacccgtaatttccgtactgacgtttgtagaattgttcgcgactacgaccgttacatctctcgacaattcaaacgtggtgcatcgagacaggaactaaatgtttcatggctgaagaagaacgaattggagatcaagcggcacgtgtcggagctccgcgacagcatcatgaccaattggacgaacactggccaggaactgagtcgagagctgcgccaact

SEQ ID NO: 23868 - DNA, 500 bp, Emericella nidulans
cccaccattgtgctgtaaacggcgcaccaggttacggaatctgtgacatattcgaggctggatagaagcacgccaatcctgatctagctgcacaatggataatccaagaccacgagaggctggtcgcctctgtaaagacctatggtgaaggttccattcgtgagctcaacgctcttcagcgacgcaacctgggtggccgagtcattctcgtcaagtccttcgctcgtatcctcgagaccaacctgaagaagcagggtgttgttcctttgaccttcgctgacaaggccgactatgaccgcattgatgcttgcgatgtcgttgctaccgagggcctgtacgagacactgaagaacggcggcaagggtgaggtcaagcttcgtgttacaaagaagagtggcgaggagattgttattcctgtgaagcacaccttgagtgcggatcagtcttctttcattctgacgggcagtgcgttgaacgtgctttccaagaggtagtttatt

SEQ ID NO: 23869 - DNA, 850 bp, Emericella nidulans
ggactcagacttccaaagccgctggttcgattttggtggtgatacggtcattcgtgccgacaagtacgtcccgcctctattcacttggccatctagcttgatctgttggctcggaagagttcggtgctaagacaactacctagatacatccgtctcacatcagaccggccgtcgcaacaaggatggatcttttctcgcgttcctttgaccgcgactaactgggaggtgagcatgttctacaatcatgctacagtgaccgagactaaacatgggggtagatcgaatttgaattccagatccatggagagggaaacctgcacggcgatggcttcgccatgtggctcaccaagcagcgcgcgacacaagaccccgtctttggctcgacggataactttgagggtctgggaattttcttcgacacatacaagaacaaccgccctggcacatccttcccgtacgtcatggccatgatgggcgacggcaaaaccagctacgaccaagcacacgatggcaaggccaatgaattggctggatgttccgtatgtcacctacgtgctaaatcctattctcctactcttaaagctaacaattgcaggcccgcggtcttcgcaccacctccgtccccacaaaagcccgcctaacgtatttccaagacaagtcgctaaccctggacctgcaatacaaatccgaaggcacctggaccaactgcttcactctcacaagccccgagacgaacatcgccattccctccgtcgcgtaccttggtttttccgccgagaccggcgagctcagcgacaaccagcacatcatatccgtcaaggcccagaatctatacaatgtcgctgcatct

SEQ ID NO: 23870 - DNA, 850 bp, Emericella nidulans
gcccccatcaatcccaagtccaaccgtgagaagatgactcagatcgtcttcgagactttcaacgctcccgccttctacgtctctattcaggccgttctctccctgtatgcttccggtcgtaccaccggtatcgtccttgactctggtgatggtgttacccacgtcgtccccatctacgagggtttcgctcttccccacgccatctcccgtgtcgacatggctggtcgtgacctgacggactacctgatgaagatcttggccgagcgcggatacaccttctccactaccgctgagcgtgaaattgtccgtgacatcaaggagaagctctgctacgtcgcccttgacttcgagcaggagatccagaccgcttctcagagctccagcctcgagaagtcctacgaactgcctgatggtcaggttatcaccatcggcaacgagcgcttccgtgctcctgaggctctcttccagcccagcgttcttggtctggaaagcggtggtatccacgtcaccactttcaactctatcatgaagtgtgatgtcgacgtccgtaaggatctgtacggcaacatcgttatggtatgtatcactcttagcctcgctctactgcactgggcggcactaacgaatcgatagtctggtggtaccaccatgtaccctggtatctccgaccgtatgcagaaggaaatcaccgcccttgcgccctcatccatgaaggtcaagatcattgctcctcctgagcgcaaatactccgtctggatcggtggttccatcttggcttctctgtccaccttccaacagatgtggatctccaagcaggagtacgatgagagcggtccttcgatcgtccacc

SEQ ID NO: 23871 - DNA, 850 bp, Emericella nidulans
gcgcgttggatgcatctatacaccccttgacactcgactgcccgtggcccgattgagtatcatcgtcaatcgctccaaatcttccttggtcttgtatcacgcttcaactcatgacgttgctctggaacttggaaagttctccaaacttgcaaatgttgaggatatgtgtgaatcgggccaagcgcaagttccagcaattgcgcctcaatcaaatccggcatcttttctgttctacaccagcggcagtaccggcacacccaagggcattttgcttagccagcaaaactttgtgaatcatcttgctgcgaagaccgacaaactgaatctcggcagggaggttgttttgcaacagagctctttgggattcgacatgtccgtcgtgcagactttctgcgctttgggcaatggtggaactttggtcatcgcaccgaaggaagcgcggggagaccccattgcgctgtccacaattatggcaaaggaacgagtgacgctgacgattgccacgccctcggagtactccttgttgcttcggttcggcctagagcaactccagaggccctactcatggagacatgcctgcatgggcggcgaggtcgtctcgcggcagttggttcagcagttttgtcagctggaccatcctgatctccagctgaccaactgctatggtccgacggaaatcactgctgctgcgacgttccaagacatctctctccaaatgaaggaccagagtaccaccgatggatctctggttggaaaggccttgcccaactactcggtctatatcatggacgcttcttccggatctccagtgcccattggggtcaccggcgagatctgcatcggaggcctt

SEQ ID NO: 23872 - DNA, 850 bp, Emericella nidulans
aaccagactgcttatctcctcttcaccagcggttcaaccggtaagccgaaaggtgtgcaaatcagccatctcgcagcatcatgctccatatcctcccacgccactgcaattcctctccccggcgaatcaccaggcaacttccgctggttccagtttcgttcgccatccttcgacccttcactcatggagatttttgtcaccctaagcactggtggcacgctctgctctgctgatcgcagacttaccctcgccaatctcgaagccaccatcaatgagagcagagcgacagtcatgatggctacgccgagtcttgccacgcttctcagacctgaccggctggagacccttgaggcgctgtggtccatgggagaaaagctcaaccggacagttattgacaacttcgcgctggataatgttatgaatggagacgccgagaccagaagaccgaggaccttggtcaatgcatacggtccaacggaaggagcaatcaactgtacctacgtcgctcccttcaagcgtcacatgcgtggttctatcattggacggccgctaccaacctgtgcgatgtttattctatcccccgactcccaagtccctgtcttagtccctaccggtacagttggagaactggcaattggcggcccccaagtcagcaaaggctatctcaatctccccgaagtaacagctagagtcttcattcgcagcaaggaatttggacccctctaccgcactggcgacaaggcccgcatcgtctgggacgaaagcgggcaccaggtcattgagtacctaggccgaatcgcacggatcaggtcaagataaatggacgcagagttgagctgggtgaaattga

SEQ ID NO: 23873 - DNA, 500 bp, Emericella nidulans
agtccggacttctgccgggcttcaatagcgggttggtggctagcatgcagcagatgtacggcggcatccgccgcacgcgatgcacggaatgggcgtgggtgtaggcgtggcgtaggcccaaccaacgaccgcccgtttaagtgcgacaagtgcgggcagagtttcaaccggaatcacgacctgaagcgacacagccggatccatcttgctgtcaagccgtatccctgtcatagctgcgacaagcagttttcgcgaaaggatgcgttgaaggtacctttaattttcccttttcatttgtatcggttttgagagcgttgcctgaactaacgtgcttcagcgccatcaattggttaagggttgtaaggacgcgaacgagcaggagaaatcggtcaaggttgagagcggcgagcattaattttctctcctcacttgtacgcaacgtgattcggaactcgactccgtgcccgctcggaacacgacgcggctattcttcacgctca

SEQ ID NO: 23874 - DNA, 649 bp, Emericella nidulans
ccatgcaacaacatatcctcttctgggaccgcgaccgcgacggccagatctacccatatgatacgtaccggggcttccgggacttgggcttcaacatcctcttctccttcctcgccgatactgattatcaatctgaacttctcgtacccgacacggctcgcgcactcgtttctcccggatccccgtatcagagtttacgtggatagcatctacaaggcgaaacatggatccgactctggtagttttgatgcagaaggccgctttatcccgcagcatttagaggacatgtttgccaagtacgatggagatcaggacggagcgctgacgtttggggaattgtttaatatgatgcacgggaaccggtgtgcggcagatccgtttggggttagtcatcccttcttcgatcaaacttgggcataggcgatgctaacgtgctattgcagtggggcgccgctttcttcgaatgggtcacaacgtggctgcttatccagaaggacggaaaagtttacaaggacgatttactcggtgtatatgatgtaagctctatgcgtgctgtactaccctgacaatgtaagctaccccggtatccttatagggttcgctgttctggaagatcgccaaggcgagaaagtctccccagggctggtcc

SEQ ID NO: 23875 - DNA, 595 bp, Emericella nidulans
aagactcgaccatcccgcctctcttccgtgccaaactcgccgactacttccgatccggatatgacagaggccaccaggttcccgcggccgatgcgaaatggtcacaggaggcaatggacggaacattcgcgctgacgaacatgtgtccgcaggttggggagggattcaacagagactactgggcacattttgaggagttctgtcgagacttgacgaaacggtaccctagcgtacgaattattactgggccgctgtacctcccgcatcgagacgccgatgggaaatggagggtgaactatgaggttatcggcacgccgcccaatgtcgccgtgccgacgcacttctacaaggtcgtttatgctgaggaggggccggggttgccgagtgggaaggttgcctcgggcggttcgtgttgccgaatgcgcgaatctcgaatgataagagactggccgagtttgaggtgccgctcgagacggtggagagggcgagcgggttggagtttgcaagcaagctagagcatacgcgtagaaagaggctatgccaggaggtccggtgcgatatcgtggtgagggagtttaacaatgcgaagaagaag

SEQ ID NO: 23876 - DNA, 846 bp, Emericella nidulans
ggaggtttaccaacagcgacgacagcagcaacttgaagctgatgtcatgaagtctgccgtcaaccgctggcgacaagaaaacaaaatacagcaacagtttcagcccgatgtgtttgagaacggcaaacaactagggcccttgcttcgccaatggaatgcggaccttgtcgtgcggattgaagaggaattcaaggaaatagaaaaagccagaaccgcttctatgattacggatgaagttagggagcgcgttgactatggcccttatcttcgtatggtgaaaccggaggagctagcgtccttgacgatactcacgaccataaataacttgactcgcaacggactggacaaaggtatcaagctcgctccgcttgcggtagcaataggaaatgatgtttacgaggaagtggcattgcagagaatggtcgagcggaggaagaaagagatgaacagtgctcatcgagttaagctcatcaagcagattttcctcgggcgcaaggatcgggacaagctgaagggcatcaactggaaaaatgctcttaaatccatggagcaggaagagcctgatattgtttgggcaactgctataaaggcgaaggttggcgctgtattgatgagtctcctttacgatgttgccaaggtccctgttcctgttaacgaggccgcggcagccaaaaagatcaagagaagagacgaggtagtcatgcagcccgtcttccaacattcgtaccagatcacctggggacggcggactggttatattcatgtgaatccggagatgatcaaacttcttaccagggagccggccgaggatttgctgggtcgccagttgcctatgctttgcaaaca

SEQ ID NO: 23877 - DNA, 532 bp, Emericella nidulans
actatactctaaacaaagagacatatatacctcccaccatccttcctatccactcacaaccgctcaccaaacgctcgctcagcaactggagtatctctcaactcgaccaaaatgctacccctgctggccgccgccctccttacgataggagaagcgtctgcacgctacacagccaatcttcccgcaaagcttactccaggtcccgtaacggccgactacatcaccgccagcctcgaccaatccgatctggacagccccaaactcagtcacagcaacgcctctactttcgactggtggcacttcgatgccatcgccctcgagaacaccaacgcctcggtggccattaccttctcgaacggcggaccggccgggtttccactctcttaccctccgaccaacagctctctccccggtaatggtaccggtgcggcagaggcgcacttgcaggaagagcaggaggaccacgccatctgggcccatctttggatcacctttcctgatggaaggaagtttcaccactcgcagcgtgccg

SEQ ID NO: 23878 - DNA, 618 bp, Emericella nidulans
attcccggcttcgatcctctatggttattgaaccactttcagtatcttgaaagtaaacattatggcagcgtgcctcttatattctcccggtatggtggcccgggaagtcatcggtatcctatcggcttctctggcgacaccgtcgtaacctgggagtctctcgctttccagccagaattcaccgcgacggcttctaacattggttatgggtggtggagtcacgatatcggtggccacatccgtggtatccgagatgatgagcttcttatccggtggacccagctgggtgttttctctccggtcatgcgactgcactcgaccagttcgcgctggaactccaaggaaccatggctctacggggacgagtgtttcagagtcatggccaggtttttgagattcaggcatcgcctcgtgccgtacctttacacgcagaatgtgtcaggatctttcaatgacgagccattggtgcagcccatgtactggtcctggccaaacgaacccaatgcgtatgaagtgccgaaccaatacttcctcggttccgagttactagtcgcacctattgtacaaccgcgagataagcggaccaacctggcgtccgtcaaggcgtggctcccgctg

SEQ ID NO: 23879 - DNA, 751 bp, Emericella nidulans
tttgtcataattcgttctgcaattgcgtgaccgttcagcttccactttctcgcaagctcgcccagccctgaagctggacccgacccacccgatgagcttagcccaaccagagaagaacaatggggccgacaaggagcgcggcgctgaggctcctgtggatgagtttggtaggttctcgcgaagcaggaagatggtcatgacgattgttatatcttggaccggattgctgtccccgatggcgagcacttcggtgctctctgctattccgaacgtggcagcaacatacaaaactactggatccataatcgggctgagcaatgcgttgtatctggtgttcatggccttgagcccgtgcttctggggcccttggtgccagacgattggacggcggatggtatgtgccggcaccctcttgcagttcgagaagctcactgctcctgcagtcctgccttgccagtactttgatcttcctgggcgcctctatcggcactgctctgagcccgaacattgctgcatttatggtctttcgaatgcttaccgcatttgtgggtacagcgattctggtgataggtcctgcggtgattcgtgatctgtaccctcccctcgagcgagcaactggaatagcctggttctacacgggcactctggttggtcccactgttggacccctgcttgcgggtgcgatcgtcacttatacaacatgtgaggagcatttctggtttctaactggtacttgaggcaattccttttg

SEQ ID NO: 23880 - DNA, 500 bp, Emericella nidulans
aagcctgtctcgatcatgaatcacatccggccattgaaagaactgcccttgctaatgctaaagccggctgggcgcttttctacctggggatatacctacccttcaactacatcatcgtgcaggcggaatacgaagggatgtctgccgcgctggccgggtatctcatcccgatcctcaacggcgccagtctcttcagccgcataatacccggcaaagccgccgacaagctcggcaggctgaacacgatgattgccatgtgtgcttttgcagggattatcgtgctggcgctgtggctaccggggacggggaatgcgcctattatcgctttttcggcgctgtaatggttcgcctccggttgcgtttatctcccttatcccccactgacggcgcaaatcagtgatatcagggagattggagtgcggtcgggcactctctggttgattattgcgattgcggcgttggtggccagtccaattggaggcgcgcttcaggcccggaat

SEQ ID NO: 23881 - DNA, 850 bp, Emericella nidulans
ttcgtcaaggagaagttgtacattggcgaggctactgtggctaccatctgtggaatcatcttcggtccccatgctgcgaatctgttcaacccaattgaatggggaaatgttgacaaaatcacgcttgaatgctcccgcattgtgctcgttgtacaatgttttgcggtaggcgtcgagctgccaaaggcgtatatggaacggcattggaagtcagtcacgttactgcttctgccggtcatgacttggggctggttgatcaccagtctttttatatggtcgttgatcaagccgctcacctggcttgaggctttggtgtgcgccgcgtgcgttacagccaccgatcctgtccttgcctcttccgttgtcggtaagggtaaatttgccaagcgtgttcccaggcatttgcgagacctgctatccgccgagtcaggctgcaacgatggcatggcgtttcctttcatctacctgtcctactacattttgcattaccgcccggatgcgaacgctgtctcgcttcactggttttgtgtcaccattctgtacgagtgtgtgttcggagcgatcttcggttttacgatcggctatgcggctcgccacgcgatcagatttgccgaacgtaaacagctgattgaccgcgagagctttctcgtcttctactttgtgctcgcgctcttctgcgctggctctggaagtcttctcggcatggacgacttgctgattggctttgccgctggcgtgggattcagcaacgacggttggttcacggagaagacggaagagtcgcatgtattcactgacactcatctgttgctcagcttgccttatgtcgcgtacctaggcgaaagggtcc

SEQ ID NO: 23882 - DNA, 850 bp, Emericella nidulans
gcaccgaggggagatgcgacagaggcgattgtgcttgtcgcagcttggaagactatcgacgggcagttgaatctcaatggcgtcagccttgcgttgactcttgctagatactttaagcgtgagtaccccaagcgaggtaattctaacctcactgacgtatgctgcaggatggtctctctggtccaaggatatcattttcgtattccccccggatagcaaatctggaacacaggcatgggtcgatgcataccacgatatgcaaccgcctaccgtccagcctttgcctctaaagagtggcgccttacaaggtggcctggcaatcgagtaccccttcgaccaccgcttcgagaacctacacattatatacgacggtgtgaacggccaacttcccaatctggatctctttaacacggccgtctcgatcgctggcgggcaaatgggcattgggacccgtctgcaagagatgtgggaccataacggcagctacgaaaagcgactgcaaactatgttgaggggaatggttaagcagggcctgggatacgctgcaggtgcgcatagcagctttatgccttaccatatcgatgcaatcacgctccagactcagggtaatggctggcaggatgagatggcgctcggtcggaccgtggaaagtctctgtcgcagtctcaataacctgctggaacatctgcaccagagtttcttcttttatctgcttatgcaaactcatcgatttgtcagtatcggcacttatctcccgagtgcgatgctcattgctgggaactttactatcatggccattgcgttgtggctgcggactggatattacaaggactcaactcaagccgccact

SEQ ID NO: 23883 - DNA, 500 bp, Emericella nidulans
gacatgcaaccctatcaatcgtctttcgccctccacaggtagcacaacaccacccagtctgaattccctaaagccaatctaccaaaaatgatccccatcttccaggtccagggaaaatcaaagtccagacctgctcccctcttcctcatacacgccatatcaggtttggccttgccctacaactcattcggcacccttgacttccgcggacgagccatctacgcgatcggatctcccctcaacgggccccgccggtaccggctgccatcatcaattgacgatgtcgctcgccaatacattcgcttcgtgctcagcaagcaggccacgggtccctatctactcggcggctgttcatttggcggcttggtggcactgaaaatggccgagatgctcagcgcacagggggagactatcctccagatcatttgaattgatacgcaaaatcccattgcccgtccggcctggggttgtgagggccaggagggactggcggtgctcac

SEQ ID NO: 23884 - DNA, 850 bp, Emericella nidulans
gtaccatggccaagatatcaagatatttatagtcttattagcagatatacagaaggcactggccccaaagagatatattaacccccatacaaagctactaaggtaatactagaaatacctaaggctctttaaataagataaagctgaagaactactaccataccagggagaggggattaattacaaaattaagcttgtataggaggagagtaggaaggatcctgaagtcccctagggccccctttataatataacccaggaagaactaatagtcctctggaaaatactctctgaactactatagaaaggctttatctatataagctattccccagctgcagtcctagtattctttatataaaaactaggaggaggactgcagttctgtattaactactatactctaaatactattactaagaaggactactatctattgcccctgatctatgagatactaaactaaattagacaagctagatagtttactaagctggatatatctgctgccttctataagatctgtatagctaaaggccaggaatagatgactatcttctatacaagatacaggctctttgaatagctagtcaccccttttaggttggctaatgtactaagcaccttctaaaaatatattaactggaccctctgggaatatctagataaattctgctcagcctatattgataatatacttgtctatactaatagggacctctgccagcactggaagtatatataaatagtcttgaagaaactggaagaagcaggcctatatttagatattaagaagtgcaaatttaagtataaggagataaagtacttgggctttataatacaggcaggt

SEQ ID NO: 23885 - DNA, 835 bp, Emericella nidulans
gaccggtcgccgcggaatggtagtcacgactcggtcgacccagatagtttgaagtcgccagcctcaccttctgtgcacctagtcacgcgataccctcattctccggtgcctcctcgaccgctcatcccgtctcgcctcccgtcatacacggccactggcagaaacgccaggattccgcagaaaacgctcgtccttgacttggatgagaccctcatccactcactcgctaaaggtggccgcatgtccagcggccacatggtcgaggtcaaactagctacaccgatgacgactgcactctcacctggcgctcctcctactactctcggacctcagcatcccatcctatattatgtacacaaacgacctcattgtgacgaattcctacgcaagatctccaaatggtacaagctagttgtctttaccgcaagtgtgcaagaataagccgatccagtcatcggctggctggaacaagaaccggaaaattcttcccaagcccgggttcctcccgggccaaccagatgttccctttcccgaaacgggccgccctataattaaaaggtcctccagcctcgggttgacgccggtatcctgacgcccgggctctatgatcttggacaacagtccaatgagttacatctttcatgaaggtaggctgattatattttggtccaatatcttgagcgaatactaacaccaatccttagataacgccattccgatcgagggctggatcaatgaccctacagataacggcctcctccatctcatcccaatgctagaagccctacaatacgtcactgatgtccgggcttttctagcactgcgtagaggagaa

SEQ ID NO: 23886 - DNA, 850 bp, Emericella nidulans
cgactatgtcatcctgtgcgtcaaggcgctccccgatgtgtacgatctgaccgccgtcatcgagtctgttgtcacccctcaacacacatgcatcttggtcaatacttcaaataccctcggagttgaatcacacctagaacagcggtttcctaccaacgtcgttttgtcccttgtatccggtgtcgagataacccagaccgggccgagcgaatttgagcacatcaactcatcagatatctgggttggggctacaagtagtaactccggaatcccggctgaaatccagaatgatatggctcaagcgctggcgatgacgctcgcgtctggacaggtcaactgcaaagtatcgtccaacatcagacaggagcagtttgagcgtatgatcgggtaagcggcgctgaatcctcttgatcttcgaccactgacagtctaggcctatcgcgttccacccggcaagtgtcatatttgagactccaaatcctaaacaactcttagagaaaatgggagtacgtcagctagtctccgatcttattcaagagcttgtcgacctggctacagcgcacggttgctctttcccgagcgatttcagtcaaaagacgattgacaaaatgacctccatcgatacaccaagcacaatgtaccaggatttccagcaccgacgaccgatggagcttgaaacatatctcggatcgcctataaaactagctacgcagtcaggtgtcaaggttcctcgtattgagactctgtatgctctactgcaccatgtcaataccacaaacttgaacaaaccccgagacgcaactccacccgccgtggctcaaccgcctcctcgagtctcctcagttccgcc

SEQ ID NO: 23887 - DNA, 500 bp, Emericella nidulans
acatgtatatctcacacccctcgcttctccagatatctctacctgtgctaaaatcatgcctgtaaatcagggcttggtaccaacgaagccggtgccgaattcggcgagggctcctaccccggcgaactgggcacggaatacatttggcctgacctgggtacgattggtacgctgaggaacgaggggatgaacatattccgcgttgcgttctccatggagcgcctggtgcctgattcgttggctggaccggtagcggacgagtattttcaggacttggtcgaggtgcgcctttcttctctcttgcctcagatcttgggcatggcccaagaacagcaagtcgctaactgcatcagacggtcaacggcattacggccctgggtgcgtatgcagtccttgacccgcataattatggacggtagtatgtatccctagtcaacagaccctacgaacgggccagcaatgctgacgagctaaagctacggcaacattatcactggaac

SEQ ID NO: 23888 - DNA, 500 bp, Emericella nidulans
tgtcacttggagccagccctcggcacttcctatggctcagtatcgtcgcgcgttagcgagtctgctaggaagcacgttatagagttccacaggcagcaacaagcctacagtgagcctgctgtcggccacgagggagagcctctacttgtcaagcaggtacagcacgaagacggaacgcgagagagcattgttgtcggccagtccactgtaccgcagacggtattcaattcggtgaacgtgctgattggcgtcggcctcctaagtttgccgctagccatgaaacacgccggatggctatttggtttgacgttccttctctttgcagcaattgccacttcttataccgctaaaatcctggcaaaatgtctcgacgttgaccgagggttggtgacatatgctgatctggcctacataagctttgggcaaagtgctcgcctggtcgtaagctttttgttctgcctggaacttctgggggcatgtgttgccctaatgactcgtgt

SEQ ID NO: 23889 - DNA, 850 bp, Emericella nidulans
cggtgggcctggagggtctatcatcttcgagggtaggggatcggtggatgcagtgcgccaagcgcttaagcaggtggcgcagcaagtcggttctaaggtatgcgtctttttcgctattctcatagtcgaccctaattaaatctggtctagcaatcggttcgtgtcccaattcccacctcagctcgtcctcacattatcggtaaacaaggagctgtcgttcaggaactccagcagcgcactggtgcgcgcgtgcaggttcctcgcgcggaagagccaactggcgatgaggacgaggacaatgacaccattgatgtgttgattgaaggtgatgctgttgccgctgaaatggctcgccgagaaatcgaggctattgtgaaggagcgagcgtctaacatgaacctacgccttcggtcaatcccaccggaattcttcccctttattgccggtcctcataatgcgaacttgagagagattgaggagcgcaccaaagctcagatccatgttcctcgatacgatacgtggcaaagccaacctccaccgcaagaagctgagcccggccacgttcagttcacgccggtctcggacaggcatatacttatttccggagagcgctccgcgactcaggatgctcgtgctgaaatcgaaaagcttgctgctgatcttcagcgtcagttgacaattcgacagctcgccatcaatcggggtcaacatcaatttattctcggtgacaatgccaacgcactgcatgacttccttgctgagactggttgcgctgtagtactgccgcctccgtccgatgaaactgaattcctgaccgttactggtgcacttcagcgataaagaagatggt

SEQ ID NO: 23890 - DNA, 850 bp, Emericella nidulans
tcaaatgggtatccagaaaagtcgtttgctctatacggcggcgtcccgatgaaaggaatgcactctcacgagggtggtctgcggctaatcttgaacagcgttgcgatagctgccggaaaatacggcctcgcaattgagcctcttctctctctatcgatcgatttttatgctcgactatttgtccgtatccatcggtcccccgcacaggcgaagtttatgtcgggcaacacaatgcttgtgtacaattgcgactcgggttgtggagcatggactacccagcctttgactcaaaccaagcagaagctcgataagaaaggaaacccgttctaccattatggacttgcacaggctccaaccgcaaaccaaaagtgtgagcattgcgggatgaaaactcatttatctggcccaatgtgggctggacctctgcacaacccacacttcatccagaagattctcgatctcctcccgcaagtcgacagagacgtatatcaaacattagacagagtggaagggatgttgaccactgcgctcgaagaagatctgagcttggaattgtcctcggaagacgagacgagccagttaccgactagctctgacgaaggcaccccagccccatccggagaccctacacacatcattccccgaacagacccttcttttcgagatcctcatcctttttatttcagcctctctagtatctcaaaagttttacacacccttacggttcctactacgaaatctgtggtgctcttcgtcactgggctaccattggcctcggagtcacaccaaaccgacacggtttgacccgatgctcatgggccggtattgggagatcatgcgcgatgggcca

SEQ ID NO: 23891 - DNA, 500 bp, Emericella nidulans
ccttgagtcctcaaagcgcccagaacttagaagaggtggaagagcaaaaacccttagcgcgagctgctacagaacccacaccccgcccacaacaacccaagccacgtgggccatgccgtggctgcggcgagatgatcattggcaagtccatctcctccgctgacggccgcctgacaggccgctatcaccgcgcctgcttcgtctgcttccaatgccgcctccccttcgaaacaaacgacttttacgtgctcaaggaccgaccctactgcgcccaacactaccacgaacgcaacggctcgatttgcgctggatgtcacgaaggtatcgaaggcgaataccttgagacaaacgaacgcactggtcctgggcccggcgatacccagaaattccacctcgactgccttcgttgtcgtacctgcaacatcgacctccaaggcgagtactacgaatggaacggctatgtttactgcgagcgagatgccaggcgcgccgctgcttcc

SEQ ID NO: 23892 - DNA, 850 bp, Emericella nidulans
ccgttgcggagatccagttcgcagactacgtctttcctgcgttcgatcagattgtcaatgaggcggcgaagtttcggtatcgggaaggagcgacgggggggaatgctggtgggctagtaattagaatgccttgtggtgctgtaggacacggagctttgtgagtttcaatgtaacgggcgaggatacgagaggctaatgaccctgcaggtaccactcgcaatcgcccgaggcgctctttgctcacattcccggtctccaagttgttatcccccgttcaccgtcacaagccaagggtcttctccttgcgtcaatcttcgaaagcaaaaacccagttgtgtttatggagccgaagtgctctatcgggcggcagtggaacacgtccctagtgaatactacacgatccctcttaacaaggcggaggtgatcaaacccggcaatgatgttactatcatttcgtatggacaaccattatatctctgctcggcagccatagcggccgccgagaagaatctaggcgcaagcgtcgagcttattgacttacggaccatttacccttgggaccgacagactgtgctggacagcgtcaacaagacgggacgggctattgtcgtgcatgagagtatggtgaactttggtgtcggtgccgaagtcgctgctactatccaaactggcgcgttcttgagactggaagctccagttcaacgagtggcaggatggagcacgcataccgggttgacatacgagaagctgattcttcctgatgttacaagtgagtataattcccctataaggatccagcggctaaccatgcgtagggatctatgacgcgattaagcgaacacttgagtat

SEQ ID NO: 23893 - DNA, 500 bp, Emericella nidulans
ttcaaggggagatggcccctatacgacatacccatgcttcttcttagtgtcagctgagctgtccaatgcgcgcttctatcgattgataagaaccctaactgcggcgctggtgaattccggagccggaggacagcataaaggaatttactcgtcttatcttgaggtggtccatacatatactgtcaaaaaacaaaaaggcacttgatgatcgttcaagaaaacgggtcataggccggtatttccactcagggttgccaacgcccttggcggttcgtgcattataggcaatacgagaaaggtaaccccattgccgacacgcgaatagcggtttaacctggactaacgaattggatcacgacaaccttactcgctccaattctgaacagacaataaccatcggttttaagcaacctgcaaaccctttaccagggacgagaccagcacgcggaaggcagctataatatcctgctctgaaggcggttgtgctcacggtgacgaga

SEQ ID NO: 23894 - DNA, 500 bp, Emericella nidulans
gggaggcgagaaagcctccctcgcgcgtctctgcgcatataacgccctaccacctcaccggtgctgacgaggcaaccacgatcctcctgtcgttcccgacaacaacgccctccaattccgagcatccaggtgaatcccaagccgtggcatccacgtctattcgtgttgcgaccgatccgattgagaccaacaccgctcgtccagcgatccgtatccagggcacaaagggggagatccaagtcgatgggccagcgttccggccagaggtgtatcgcataatccctgtgaaaggccagggtatgggtgagttcaaggagaagaagttcgacttccctgccaacggaaggggcatgtactgggaggcagatgaggtagcaagatgtctgagggacgggaaattggagagtgagactatgtctctagaggagagtattgtgattatggatgtaatggatgaggcgagaaggcagaatgggttgacttatcctgagaagatcgag

SEQ ID NO: 23895 - DNA, 500 bp, Emericella nidulans
tgaagatgttgaaatggaaaatatctcatccccagagcctccaagacgcatgacgaccagagctcagaccaacgcaggcccaccacagcacgacgccgactccaggcgtgcatccccctccgcatctagcgatacgctaagctccctccccacacctcatccgctctatctcgtgccagaatcggttcgaccagatcccaactttggcctgcctccaaatgaagctgaggacacccgccggctactctggtcgtacgtccaaaaacaggaagagacagttcgtgggctcgaacacatgcatgagagccttttacgagcttgccggatgaaagaagatgtcttcgaatggtgcaaagccgagggacatgttggcgagttgagcgacggagaggactggtatgatcgtgagaagtggggtctcgcagaaggggaggacctcaagaaaggcgcggacgaagatgatattgagccggtcgaggagagccggtcgtcaaataagc

SEQ ID NO: 23896 - DNA, 500 bp, Emericella nidulans
agcggggtcacgtggtccgcttagcgagctccgcaccgcaccacctcagaattgtgtcagtctagcgaagcacgccgcgaagaccgattcgactcaaccacccaacgccaatcgacaacatctcgtcccaaccggtcgcgcatctataacgttcaagatgcgtacctacgacgattctttcagcggtcagaagatctaccctggaaaggtgcgttctgtcctcccgcccaaatccaattcgatgaatcctgggctccgagcgaaggcccaacaggcttcacggtcgatcgaaatcatcgttatttggaaggcttaatttgagaatgtttgttgacagaatggttttggtgcaacagggtaagctgtacgtccgcggtgacagcaagatcttccgcttccagaatggaaagtccgagtccctcttcctccagcgcaagaaccctcgccggatagcttggactgtcctttaccgtcgccagcacaagaagggtatctctgag

SEQ ID NO: 23897 - DNA, 718 bp, Emericella nidulans
ccagacgacatcacaccatatatgggcttgcgagcacgcctgtcacaaatatggatgaaccgatggaccatcctcctactcctggtgcttgtcagagtcctgatcgcaattgccagtcttaacacaaacatggattctgccagacgcgaggctttgtccgcatgtacctctgtcgaatccatgggcagcgccatggcctcgatgcctcactactcagcccgcggcatcaacgaactcacagcttctggcgtggagaccgcggtcagcgcgcttaagaccatgctcacactagtcgtatcaggcgtggaggagcttattgtgttcttcatcaagatgatgtaccagacatatctctgcctcattacaatggctgttcgcggcacggtcgacgtcggagtcgggctcctgaaagatgccagcgacttcctgaactcgacaatcaagtctatcggcgaaggcatcagtgacgcaacacagacgttcgaggatggcctcaacaaattcgtcgatggaataaatatcgtcggaagcgtctttggcggagacgaggtccccgacttagatctctcaagcttcatcgaagacctcgaaaacgcccagcttccatcctcaatcgacgatggcctcgacaagctcaatgactcggtaccgacgttcgacgaagtcagcgagttcgtagagaatattatccgcacaccctttgatgaagtcaaaaagc

SEQ ID NO: 23898 - DNA, 500 bp, Emericella nidulans
gcagatggtaagcactagagctcccattcacgatcgagccatattgatgataagggcagcattcgtccgcgacctcctcctcgacccgtctacccgctcagcctccgacatctcccacacagttgtggcagtctcctcctcgtcctcagcgtcccgcgccgagaaatttattgcaaataccgggattccctccccctgcaccgcctatggatcctacgaagctctggtggccgatcccaacgtcgacgtcgtctacgtcgcaaccccacactcgcaccacttccagaatgtcatgctctgtctggaagcgggaaagcacgttctctgcgagaaggcgtttacagtgaatgcgcagcagacgcggattttggttgagacggcacggaagaagaatctattcctaatggaagctgtgtggacgaggtacttcccgctaagtattgagattcgagagttgatcaagaacggcgccattggggaggtgttaagggttacggcgg

SEQ ID NO: 23899 - DNA, 662 bp, Emericella nidulans
gctgggtcgcgcacggccctaaatccccccttacgtacggagccttcactcccaaacctttcgaggaaaccgacattgaagtccaaataacccactgtggcatctgcggcagtgacatccacaccatccgctctggctgggccccagcagactatccctgcgttgtcgggcacgagataatcggcacagcaacgcgcatcgggcgcgccgtcaataataagcaaaacatccaacccggcgaccgcgtcggcataggcgcacaatgctcctcctgcctacgtccagactgcgaagcctgcgccgacggtgaagaatcctactgcccgaagatggtgggaacctacaatagccgtttccccgatgggagcaaagcctatggtgggtatgcgaatcggtggcgcggcctggccactttgttttccgcatccctgagcaattgagtagtgcggaggccgcgccgttgctctgcggtggtgttactgtattcgcgccgctacgacgctttggcgctggacccgggaaacgcgtaggaatagtgggtatcggcggactagggcatatggggttactgtttgcgagggcgctggggagtgacgcagttgttgcaatctcgcggtcttcgtcgaaaaagagtgatgcaattgggccattaccgacaaatt

SEQ ID NO: 23900 - DNA, 512 bp, Emericella nidulans
gatgaggtggtgctaggcaccgcggtcgcgaccattaccgatgaattccagtcgctgcaggacattggttggtacgggtctgcgtacctgttcaccgactgtgcctttcagctcgtcttcggccggctgtattccatgttgccggtcaagatcgtctacttgggcgcactcttgctgttcgagatcggctctatcatctgcgcaaccgcacccaattctatcgccctgatcctgtaagtcaaacgtacaggagaagtaaataagagaaaaggaaatgtagtcgctgactgtcgtgcagcggccgaactatcgcaggcatcggcgcaggcggcatcctgtctggagccctaacaatcctctcgcaatcggtcccccgggccaaagtcgccgtcttcaacggtattctcggcgcggtcaatggaatcgccttcatctgcggccctctgctggcaggggggattatcaacgggacgacctggcgatggatcttctacatcaacccgatcatatcc

SEQ ID NO: 23901 - DNA, 534 bp, Emericella nidulans
ccttgacatccgatgcaacaaggacgccagcaccaacggcaacgcgactgagactctgcctgtgaaagcaggcgaggagattggctttactgtgcgcacaaacatcggccaccccggtcccctactcgcgtacatggccaaagcacccggtgacgcgagcgacttcgacggcgacggacaggtctggttcaagatctatgaggacggcccaacagtcactgatgatggacttacgtggccaagtgatggttcgcccctgccacctccctccttgacgcaggtaacagtaactaatcttgtcataggcgcaacaaatgtcaacttcacgatcccttcatctctacctgatggcgactacctcctccgtgttgagcacattgcgctccacggcgccggcactgaaggtggcgcgcagttctatctctcctgtgggcaggtccccgtcaccggtggaggaaacggagacccaacaccccttgtcgcgtttccgggagcttatgaccctacggacccgggtattctgatcaacatctc

SEQ ID NO: 23902 - DNA, 500 bp, Emericella nidulans
agtgttgtgcaggtataggaaggttagggaattagctgtttggctttactcttattagaccaagaatgatttgtttgttctcaaggccttctagcatatcgtcaagtgggataaatcaccttcctccatgtgtaggtgaacccgctcttgcatcaacctcttgtgtttcagagtagtttcaccaaacatatcctcgtgtcctctcttctgctcttcaatctcatattacactgttctctatctatatcgtcaacaaaactaccacccaaacaccaaatgtcacactttccagcacgaaatttcttcgtcgctgacccctacgacatcctcctcgctgctatcacaatcctcctgaggaccactaactctctaccaacccagcaaagcgcaatcgtcttcccactaccgagaatcaatcctttccatccttctggcacacgtctttcacgatacaggactcctcctaccgaaatagatgatccgcattgtacacctcatct

SEQ ID NO: 23903 - DNA, 500 bp, Emericella nidulans
acccgtggacgccgctatcccagccagcaagcgcaagtacattcccacctcgggcacgtatccgaagggattctttgtctcagggactcacgttggcgtgaaagcatccaacaccaagttcccagaccttgcgctcatcacgtctgagacgccctgctccgcggccgcagtgtttacgacaaacaagttccaggctgcaccggtgcaagttagcaagaagatacttaatgcgactcaaggtcaagggatccggtctgttattatcaactcgggctgcgcgaatgctgttaccggcaagggcggtcttgaagatgcgatgagcatggctacaaaggtggatgagtatactggtgtcgccgagaacgggacgctcgttatgagtacaggtgttattgggcagcggtatgtttctcatcgtcatgacttgcaaatgattgccaacagattccaatttctctagtcttcctatctctaagatcctttccaagattcccgaagcc

SEQ ID NO: 23904 - DNA, 630 bp, Emericella nidulans
aacagcgcaagaagatcctcaaggttttgatgacttccttgttactagacctggtatgcttgccatctggaacatccaatataactcctaacgtgcaaaaatggcagatatcgttcacgttcatcctccccctcttcccttccctactatcgttctaccgcgagcgtgatccctccccatcctcccctctaaacacagtcttccactacctgaacgcctacaagaatgctttcgccaaacccatcgattctcgttacgacatcgtccttctaggcggcgcccttggctccctgttttcacttctgcaagccattgccgcccccgtgatcggccggctctctgacaagcatggccgccgcaaggcattgctagcatcaatgctcggaaacacactcagcgttgcgctgtgggttgctgcaaccgatttccgaacgttccttgcgagtcgcatcgtgggagggctgagtgaaggcaatgtgcaacttgcgcatggcgatcgcgacggatatcagtgagccaagtcaacgcgggtcgacgatggcgctggtcgggcgtgcttcagtatcgcgttcacgtttggacctgccctaggcgcgtacctgtccgggattatgactgttaaggcgaatc

SEQ ID NO: 23905 - DNA, 500 bp, Emericella nidulans
aggtccccagccccagctttccactggcgttccgcggctcacttcatatagccactatctgcacctccccagtcctttcgttctcatcaccggcgcaaaccagggcattgggcaagccactgccaagaatcttgcatcacagtacaactaccacgttctaatcggctgtcgcagaatcgaagctggcgagaaagtcgcctctgagttgcgtgccgccggccacaaagctacctctctccagctcgacctcgactccgaagagtctatcaaagccgccgtcgatatcatcgagaaagactatgggtacctggatatcctgatgaacaatgccgctgtcctgctggatcatgacaacaccctctcgccctgggcgctatacagcaggacattcacgccgaatgtcatcggcactgcaacattgacacacttgctgctgcccttgattcggaaggcaaaggcaacgccgccaacgatcattttcgtgtccagcgggatgggaa

SEQ ID NO: 23906 - DNA, 500 bp, Emericella nidulans
acacactcgatctcggacgagactatacaagcagagtcagagggggagggttcggaccatggctcagagcgcaaggaacatgcaccaccgaccaagaagaaaaaaggacaacggttttactgcaccgactttcccccctgcaatctaagcttcactcgaagtgagcacctggctcgtcatattcggaaacatactggagagcgtccatttcagtgccactgttcacgaaggttttctagactcgacaatttgcgccaacacgcccagacagtgcatgtgaacgaggaaataccagacagctctttggccgccaccggcactcgctttcaacgtcaggtcagaacagatcgggtgcgcccccagggtcgcgcgagggcaggcacgggaggtagtcaggcaacccatactaggggccacagtaggaacctctcgacatcaagcatcgcttccacaacctcgacatttagccaacccccagagttgcgccggcgcccgccacc

SEQ ID NO: 23907 - DNA, 500 bp, Emericella nidulans
aattcaaagcgcgaaccttgaagcgtaaaaacgtcaagggtcttgccctgaacgcagctccgaagtctacgtcgactttgtctaatggcgattctcaggttcccggcgccgctggcaacggcgaaagcaaccgcactgataccctggagattggtttggagttcaggttggatttgcgcagcgaggacctgattaccctgaaagaactcggtgccggaaatggagggacggtctctaaagtcatgcatgcttcgaccaaggtcgtcatggctcggaaggtaggatttacctatatagcatgggtcctgggctctgttgacaacgctgctagattattagggtcgacgcaaaagaaaacgtcaggaagcagattctgcgggagcttcaggtgggtcacgattgcaactctcccaacatagtgacctgaaaaggagcgtttcataacgaagcaagagatattgatgtatgtgcatggaagatatgaaagtaagctacccgta

SEQ ID NO: 23908 - DNA, 500 bp, Emericella nidulans
aaaaaacgggtggaaaggaccagggttatctcgaaggggatacccttttactgtccacgaaaaactaccgagcctttctgcagaacatatagggcaactttccatttggcagtctcggtcagggggccagccaaggaatccccaaaaaagaaacaaagccgccgcggcggaagcgcgggattcaaaacgtcaagcgacttaaaggtccagatccagcgtgtcgaacgaacaagggcaaccaagcaggtgtggttacaggactcgaagtttcggattaaagaattagaaaggtggccaaggagctgggaaagaaatttgcaacaggttcgtccgtcacgaagtctgcttctggcattgaggagatcacagtgcaaggcgatgtatgtgaggacatcaaggaatggttattggaaaactatgggaagggaatttcggaatctaatatcgagattgtcgaggataaaaagaagaagaaggggacagctgaagcttaaagtgat

SEQ ID NO: 23909 - DNA, 502 bp, Emericella nidulans
gacgacgtagaattgaacacaatggcaggctaccatctcccagtcgacctcaagcagttcaagaagctgcagctggatcccaacagcaagaagctgtccgaccagcagaaaaaagatctcctacacaacattggcatcttccgcgatgccatcgtcgccttcacagccaccggtgctgcccgtggccaggcaggccacacgggcggtcccttcgacacggcccccgaagtctgtatcctgctaggctttatcaatgccaatccggatgccttctatgatgctattttcgacgaggcgggccaccgcgtcgcgacgcagtacctgcttgctgccatcgacggtaagatcgagcccgatcacctactcaactaccgagatgccaactcgaagctccccggccatccggagctggggctgacccccggcgttaagtttagctccggtcggctgggccatatgtggccgctggtcaacggtattgccatggcccacaaggacaaga

SEQ ID NO: 23910 - DNA, 505 bp, Emericella nidulans
tttgagactctattcagaagcattggcaggcccctgaccattcaccatgtctttccaatcctctctctacacggctttccggagcctgtccttgacagcctcgaaacgatcgttctcgacaacacgacctgcccagaagctcccgaaagtaccggactacattccgccatatccttatggcccgaattacatgtttcgtcaatccaacaccggtctctacggtggcgcaacgattcaatttggaaataagatctcccagggccggaacgaagggaaaacgcgtcggttctggaagcccaacgtgcgacgaaagaagctatggagtgaagcacttcaacagttccttttcatcaaggttacaagaaaggctttgcgaacgattcgaaaggctgggggccttgatcaatacttgttggacgatcggcctgcgcgaatcaaggagttgggtgtttttggatggaagcttcgatggcaggtgatgcagactgataaaatccaagagcaa

SEQ ID NO: 23911 - DNA, 850 bp, Emericella nidulans
cgtttggaggttcactctcctgtcaacggatctgaggcacgcgatggtgttcccgacaccaacttcaagttcaccgttgggaagaagggtcaagaaggtgtcccggtaaccgagttctttgacatcgaggatgctgagcttgagaactggcagttcagctggtacgaaggtacggacacgcttcccgcacggcctgttgctgttccaggcactaattgactgcagatctgtttgctcaggatgctgagacaccctctgttgtcaacgtcacctcgaaggcctacagaaacctcgccttatacgaaccgggcgagtatgaggctatcctgacttactatggcaaggaacagaccgttgcgaattggctcgttcgtgatatcccgaagaagcgccgcgctaagaacgttgtcctctttgttggcgatgggatgaccaccaacatgattactgctgctcgcctgattgcacacaagagcattaacggcaaataccagaccaagctgcaattagacaagttccctgtcctcggtcaccagatgacccattccatggactccttcatcaccgactctgcaaactccgccgctgctttgtacggcggccacaagaccaccgtcaattgtctcggcgtctatgcggactcgtccgaggaccccttcgatgatcccaagttcgagcttcttcctgagatcttccgtcgccagcataacggtggtattggcattgtctatactgctttccttgctgatgccacccctggtgctatgacgtcccacacccgtctccgtagtgaatacgaccacgttatcaagcacttagtcgagggtattaccaaccacacttggactga

SEQ ID NO: 23912 - DNA, 697 bp, Emericella nidulans
ctcagcacgttcgcaacatgtctcctggcatcagtcggaggcgactccagtctagttgcttttccccagcaacccaactacccaaacctcgtggcaccgtacaatcttgatcttcttacgactcctgtcgccattgtatttcccgaggacacctctcaggtggcagcggctgtcaaatgtgctgtagatgcaggaatcaaagttcaagccaagagcggcggacacagctatggcaactatggctcgcccacggacggactttccatcaatctggagaacctccagcacttcagcgtggataccgacacatggatcacctcctttggtcctggtaaccgcctgggacgggtgaccgaactccagtacaacaacggaggccggcataccccccacgggtccacctttacagtcgggctcggcgggcatgcgacggttggaggggctggagcggcgtcacggcagctcggcctcttggttgactacctcgaggaagtggaagtggtgctagccaactcgtccgttgttcgcgcttcgaagacacagaatacggatctcttcttcgccattcgcggcgccggttccagtgtcggcatcgtgaccgacttcgctatccgcactgaacccgcgccaccttctaccatcagttactcgtatgtctggacagagacggactcggccactcgcgcacaggtcttcc

SEQ ID NO: 23913 - DNA, 850 bp, Emericella nidulans
  unsure (1)..(850): unsure at all n locations
tggttaggcttcacaacaaactactccgagcgaaccgtcaccggcttcctagacggcttcaaggaccggaatctgccgctcagcgtctttcattttgactgcttctggatgaagtcctaccaatggtgcgacttcgagtttgacgccgatatgttccccgatgcggccgggtacctagcgcgtttgaaagagcgcggtctgaaactcagtatctggattaatccgtatgtcggacaggcgtcgccgctgtttgagattggaaagagggaggggtattttattaaggtatctgccatcactgcccacagctggctcttgtaatcaggatagacgctgattacagacggttggtatagcgcatcgacggctcagtctggcaatgggatctttggcaagctggaatggctgtcgttgacttcacaaacccggccgcatgttcctggtacaccggtcacctgaagcgcctaatggatctcggaattgataccttcaaaaccgacttcgcagagcgcattccattcaagaacatcacgtaccacgatggctctgatcccgcccgcatgcacaactactatgcacttctatacaacaaagtcgtctatgagaccatgacgtccatctccggcaaatccaacagccttctcttcgcacggtctacctccgtcggtgggcagaaataccccgttcattggggtggagactgcgaatccacttacgaagccatggccgagtcccttcgtggtcggctttctctgggactagcggggtatatattctgggcatcggtatcgggggttgnagggggaacccccccgcagcgctattaagcggtgggtacagttcggccttt

SEQ ID NO: 23914 - DNA, 718 bp, Emericella nidulans
gcccccgactccgccaaacaaaacatcatccccgtcccggcggatgtgacatcccaggaatctctacagtctgcatatgagacaatcgccgcccaaacaggatatgtcgacctcctaatcgccaactctgggatagtaggcccacctgctatcatcaaacgtaaggacgatgggtctcttctccccatctccgagctcaaggactatctctggaacatcccaatggcggagtttaccaaggtctttgaggtgaacaccacaggcgcgtactacaccgccatcgccttcctacctctcctagatgcggcgaataaacgccgtcctgcgccagagaagaataagctgtccccgccgctggctcagattatcatgacctcgagtattgctgggtattcacggcaggttccattggatttcgcgtataatctgtccaagggcgctgtgaatcatctggttaaggcgctctcgacgagtctaaccgagtacgggattagggttaatgggattgcgcctggactgttttactcggagatatcggtgggagcaactttgagctggggataagggtgtccagatgggcattccagcggataagatccccatgactagggctgggggtgaggaggatattgcggggttggtactttggatggcaggtgcttcgggaggttatttgaatggcaatatcacggttattgatgggggaaggctgagtgtt

SEQ ID NO: 23915 - DNA, 758 bp, Emericella nidulans
ccaacgactttcaaacccataccgaagcaatttacctcctccgagctcgaacacttagtggttcctccgatcctggtccgccttctgaggcatacttacaatcttcgactgagaacaagactttcgtctctgctgaagatactccaggctcggcctccgaaggaactatggccttcatgaaggcgagcctcctcgacttcatgtctgacaagcgcaagaagaacaaatctaagggcaagaagaagggtaagaatgttcccgtcgaggaacatggcgaaaattcaagtacacctgcgaagaataataccgggagcagtgttactgtcgaggagcaagctggcgaactctcagaggcctttgagaaaggtaacagtgccgaactcgccctgcgtgagaagggtacctcacaggattgctatgaagctggccttgctgcagagaaacagttgatcaatgatcaatatcctaatgataatgccaagggcaaaggcaagcaacgcgtcgaggcattggagactgaagcctcagataacaatacaacactctctccattagagcagccctctgttcaaaggaaggtccatgcagccgataacgcgactgatggagccgaaacttctccaagcaatgatggaaggctaccttcgatcgagtcatctctggggcagaagaacaccgacgctagcaaagctgtcactgaggagcccaaatcttgctcggagaaagatgcgacactaccttcatctgagtttttatct

SEQ ID NO: 23916 - DNA, 500 bp, Emericella nidulans
ttaatactcatccctgtgtcgcttagccacccagtcataactagtagacaagtagatactcacatttcagctcgagaaaggcagcccgctcaacctcatcacctaactcacaaatccttagagcaacagcatcaaacagcgggcgtggaaacggcgcaactccatcatcgtcaagcaccgacttccaaagatctgagacgataaactgcttttccaaatctatcccttgcagcactgctccctcaacgactctcttccacacgtccagcctcattgcagctgaaggtcgccaacacgagtgcgctgggattttctcttcggttgcagtaggcgacaagagaataaacgcgcacatctccacccagtcacgctcacactgggctcttgatacgggaacatctgcaaagatgcgatccagaatctcgtttctcgctttcgtagcttctgagctcgtgacgttctcatccgtactttctcccccgttcatatcttcccaatct

SEQ ID NO: 23917 - DNA, 668 bp, Emericella nidulans
agataggcaagcaatcagttctgatgagagcgtacggtaatcatacagagattctcatagaccgcgaaagtatgcgaagccggcgagcccctttttccactgcccaatgcgacatatgctaaagtagaatggtccaccaggagaaacgaactcgcatgcgctcctcgctagatatggcttagcacctccactcctggctcggtttaagaatggtcttttgtaccggttcattcgcggccgcccggccacccatgaggatctggttaccgagaacgtctggcgcggtgttgcgcgcagactggggcagtggcatgctgttcttcccatcaacgcagccagcacaatgcccacatcgaaagggacttcgctcatagactctgtagaagtggccgcggacggccagcctgtgaaaagagacgacttgaacgtcatccagccgcggcgacctggacctagtctttgggctgtactgcagaagtggattcttgcattgcctacaagtaccgaggcccagcagcagagacggcgcagtttgcaaaaagagctggagcgagtcgtccgtgaatttgacgacggaaatggactaggagaggatggggtatgccctcccatagttaaactcctggatgaccttttattgactgttgcagttggtattcgcacactgc

SEQ ID NO: 23918 - DNA, 723 bp, Emericella nidulans
gaatgcacttgcgccagggcattctctgcgaggaattcgtgtatatgaatgctattcagaccgtcaagccaagagggttgaacatcgtcccggtggctattgatgacgagggtatgctgccatacggcccgggcggattggccgaggttttgggaaactggaaccatcgcaaaggctgtcgtccacatctgatgtataccataacgtaagttaatgctcgaagaatattgtgcttccactaatggcccatcaagcatcggccagaacccaactggtggcacattgtctgtcgaacgtcgcaagcagatctacgctatttgccaaaagtacgatgtgatcattgtcgaggacgacccatactggaacctgcagtacccgtcagcccaggaactccaagcacgacatcggaactcgtcagtaaacccagctttgtcggagcgcaattacaacgctggaagaaagtcatctgggtacaagtttcttgattcccttgtgccgtcgtatctctccatcgacatggacggccgggttgtacgcctggacacgttttcgaagacaattgctccgggttgccgtctcggctggattacagcacaaccagctttcattgagaggctggcgcgaatcgcagaatcgtcaacccaagcacgctctggtttattacatagatacgttgccgaactgatcctgtgccaactactgtatgaaacaatttggtgatat

SEQ ID NO: 23919 - DNA, 850 bp, Emericella nidulans
tctgcagctgatcacgatcctcaagaaactgtgcaatagtccatctctgctttcattaaaggatgccaacgaaaagccgagcgagaccatcgctgccatcttgtcatccttgccacctaaccttctgcgtcacttctccccgtcatgcagtgctaagattcgcgtcctagaccagctactccactacctacgcacatcaacctctgaaaaggttgtgcttgtctcaaactacacttcaaccctggatcttctcgccaaccttctaagctctctctcgcttcctttcctccgccttgacggctccactcctgcgcaaaagcgccaaagccctcgtcgaggactttaaccgccacccagcgagcacttgctttgcatttctcctctccgcaaaggccggaggaaccggtttaaacttgattggcgccagccggctcgtcctctttgacgtagactggaaccctgccacggacattcaagccatggcgcgcatccaccgggatggccagaagcatcactgccatatctaccgtatccttctgcagggcagtttagaggaaaagatatggcaacggcaggtgacgaaaatcgggcttgcggataggcgtgatggagcataaggatagtgtcgcgcagttttcgcgcgacgaacttggggaccttttaggcttgatgtggtgagtaattgccagacgcatgatctcttaacctgcggcttgcggtgggaaaggtatcccacggtttaaggtatgaccatacgcttaaacaagaaacgggaggcctaatgaagaggatgaccagtcaaattttcctgcctaaaattccaaccttataaaagccatgaaggaacatg

SEQ ID NO: 23920 - DNA, 850 bp, Emericella nidulans
gcactctcggaaggttacgacggttgcaaagaaccggatgaagatgctggtttaccgcctactgaagaagagccctgacttcggctgtccataagcgacgtcactgctcacattcctggcacgagtgacatgcagaatcgccagaaggtcaaggatttccttcaacatgataaagacaccaaatattgggtgcctcttgaacccgtaccagagcaggatgtcatacgatcatgggtgcaaccggaagacgtctgtcttcttgaggcgatgcaagtcggtcaacaacatctgcatgataccggatatggcaatgatgctgagactggaggcgacgacgataacgatgaggagtcggaaagttttgagcaacaaatggcgccgtggaaggccagtcgaaacttcttactggcgtcgcaaggaaaagctatgctgaaactgcacggcgagggagaccctacaggacgtggagaaggtttcagtttcatcaagacatcaatgaaaggagggttcaaagcaattggtgagagtgttgaagacaaattggacgcgcaacgtttgaaggagctgggcggccacagctataacgttgcacgccaacaaaagtcttatgaaacgtctattcggcgaatttgggacgctcagaaagcaagcttatcgtccactattgaacattcggatgacgaggttaacatgtccgaggaagaggaagatgactttaacaagccgactccgcgttcggaggctcccacacccgctcccgcccgccgggatgatgaaacgaccagtcaattcagtaaaatgagtcgaatgagcatgtcggctcataaaggcaaagtccttcgtattgttc

SEQ ID NO: 23921 - DNA, 586 bp, Emericella nidulans
gccagcgccagcccagagccagccccaagccaggacacagcagagcccgccaaagccgtacagagccaggcagggccaggccgccaaagcccagaagcatacgccagccagggtcagagcccaacatcccagaggccgtacagcctggacagagccagccaaagcccatcagatcccagcagagcccccaaagcgcgtaagtattcgcgagccagagccagagccgcccaatgtgtcggcagcccaggcccaagccaggcaaggcccagccagagtccggtagggcccgtgcgagcaagccaggccagccaatcccgtcagtgccagagcaagcccaagccagagcccagcgagcccgccaaagccatacgcgccatggagccagacaagcccggagggtcaggccaagcggagatcgagagccccagatgcagaggcagcccagacccggtcagcgccaattaggcatacaggcacaaccgagggccagcacctgatgacagcccagatatcagcagccaggtcgggaatgccatggtcagggttcagattgttgcagtgcatggccaagcaggccagatattgg

SEQ ID NO: 23922 - DNA, 499 bp, Emericella nidulans
gcgattcgctcttgcactacccccggaaccgttgctttaacctacgatgacggacccaaccagtatacccgtgaccttctggatcttctagacaaatatgacgctaaggtaaccttttttgtcaccggaaacaacaacggcaagggccagattgacagcccggaagttccctgggctccactcatccagcgcatggtgcttagcggacatcaggtggcgagtcacacctggtctcatcaggatctaaacaaaatctctcaagtccagcgccgcactcagcttttgtggaacgaagtagccctccgaaacatcctcggctattttcctacctacatgcgtccaccgtactcgagctgcactacggatactggctgtctaagcgacatgggcgacctcggttaccacgtaatcctttacgatattgatacagaagactatagccatgacagtccagacacgatccaacgctccaaggacatctttgatgagaacctagctc

SEQ ID NO: 23923 - DNA, 500 bp, Emericella nidulans
agtgtccgctcaacgccacctgtgtcttgggatgacttcgctaatactctctcgcaactagacgcatttgacgatgaagaaggcgaagaatatgaagcctcaaagtttggtgggttcagcgactatatgcgccgcaagaagaccaaacttcagaatctcgacaatgatattcgatcctccgccgcggccgataactgtcctcagatattccgttctgttgtagcatgcgtgaacggctacactcaaccatcgctgcaagaccttcacaaactcatcgtgcgccatggtgggggctttcttcagtatctcgatggcaagacctccgcaacccatataatcgcgagctcgctcactcccaagaagagggaggaatttcggcggtaccgcgttgtcaagccggcctgggttgtggatagtgtcaacgctggacgcctacttccttgggatctgtatcgagttttggacgagggtcagggacagaaagttctcaattttgaagg

SEQ ID NO: 23924 - DNA, 850 bp, Emericella nidulans
tagagcccctgtaaaatcaacgacaactaccctggaccgccgcgctagcgtagcatcaaccaccgggacgcgtacatccactacttcctcgacaagaccagtgacaaagccgacgaccacaacaacccggcctaccacttcaacaacagctacgcgaacggcaacaagacccacaactaccgccgcgaagcgattgagtacagcacccaaaacttctgaggaggatgccatcaagttgcaatctctacaggacaagctcagcgagagcgaagctaccattgagagtctgaaaacagagctggagaccgccaaggagaaattgacactgccacctcagaccgaaggaactgaggcagagcctaacgactctacaaaggctcttcaggagcagcacgctaccgagatcagtcaactggtggctagccatgaagagcagctccaggctttacgcgcccagcttgagaaggcggaagcgaagaggaaggaaatcgaagagaagtcgctgaaggctctggaggacgcatcccaggctgcagcctctcaaggcgatgagaagctgtcggcggctctcgatgagctgaagcggtctcatcaggcccagctcgaagctctcgaaagtgagctagcagcacagaaatctgcagctgctagttacgccgagcagatcgattccctcaagattgagttgcagtccaagtcagatagtctggaagcggccgccaaaggatttgaggccgaaaaggcgtccgccctcgaggagctgcgcggcgagcttcaggctgaaattgaaagtctgaagcaatccaaggacgaggcggtccgcgctgccgaggaatctactagacagtcc

SEQ ID NO: 23925 - DNA, 850 bp, Emericella nidulans
tattatgtaagataggcctttctatggttggttggttactgacacctctaggcaacgtgccaacaatgtcgacccgtttctgcgccagtcccgcttagcatcgtttgtggaaccgatcaagcaagcctggcaggatgatgagatccgaagtaaatcttcaacgtttgaagggttttgcaacctgctaggactgcagaacgtgggcccgtacatgcaatcaaaacatgctcagaagctagcagattggtcagaggtacctcttgatgcggaaggcaagcaggtccaggaggaaatgacacagagattccaggtaccagacgcctcgaaattcgattacagccaaagctaacatcgatgcagcaactacctttgagaggcacaaagacaatgatggcggtctccactgacaagctcaagaaagcagacccgccgtatgagatcgcttgtactctctggcacgacctgatcccaattatcttgccaaccctattgcaacttgttaggtaaaaaccatttagatgatttgatgatctgagctaatagcccgcagcaacgctcatgcgttccacaatccggagaactgggctggcttgcccggagatatgtggggtatcgtcgagcgtatattaactgacagattctggcaagccggcatatcaagtggaagtcgggatgaattctatgctaagatcactgcttggcggacatctcttgagggcttcgcatgctcagtcagagggaaggtcagggcagtcagggaatcttgctactcgatgctcttcagcatgagtaggttgcgtgaacatttctacgggtttgcggaactacctggtcctttatcccaagcact

SEQ ID NO: 23926 - DNA, 850 bp, Emericella nidulans
gtatttatggagccggtgtcaagtttgcggcgacgctgtgcgccagttcaacccatcgatgtctgaaagagaaacccaggaggtagcaagtaagctttataaagagaccaagggtgccaaaaccactcgccgcctcctgagcgataatccattctggcggggaggcacagagtcctttgtcttcaacaagctagaagagtttgctgatcaagaaagaccacgaaccccagttctaggcgccggtatcaccgaagccctaatgcggcgctttatcaacagaggaagctttatgacttcccgtatcaactgggctattcagtcttctggtgtcgactatctacacatgctgatcatcgccatggattatctcattcgacgcttcaatattcaggcgcgtctagccatcaccgtccacgacgaaatcagataccttgtcaaggagcaggataaatatcgcgctgctctggccctgcaggtttccaacgtatggacgcgcgccatgttctcgcagcaggttggcatcaacgatctgcctcaatcatgcgcctacttctcgcaagtcgacattgaccatgtcttacgcaaggaagtcgacatggactgcgtaacaccttcccacccacacaagatcccacacggagagagcttaaacatcacccagcttcttgataagaatgacgcagcccgcctcgacccatcaatcacccccatcttccgccctacacccgaaaagtatacctacacgcctcgcaaaaccgtcatgtctgcgctccaaaccaccaacaacctagcatttatcaaagcccagattacgaaagatgacaaagagctccgcgatatcatcaaagat

SEQ ID NO: 23927 - DNA, 850 bp, Emericella nidulans
aacgagatcctcgtcaaggtggaagcatgcggtgtttgcttctcagatgtcttcgcgcagaacaacgtgatgggtgggggcttgtatgtttcctccttctttactcctcctgcaaaggcgaacactaaagcatactgccgcattctagtcccatcgcgcctggccatgagattgttggccgagtagcagacgtaggcgacagagtgtcgggctgggcaattggagaccgcattggaggcgcatggcatggttgacatgacggtatgttgatttcccgtttcgagttggcttttgttactcattgggtaggtatgtttttggcagactagagaaaagggtcatgcaaagcttgccgcaaggactggtatcagatgtgcgactcgcaggtcatcaacggcgtgacgaaggatggtggttgtatgttttcccacttcaattcagcttctatgcaaccgctgagcatcacagacgcagagtattgcctcctaaacccagaagccgctgtccgtgttccagcgcatctctcagccgccaaatacgtgcctatcccctgcgccggtgtctcggtctctaactcatttaccacatgaaagtccccgtcggcgaaaccgtaacaattcaaggtcttggcggactaggccacctcgccattcagtacacgaataagatgggcttccggttggttgctatctcacggggagcgacaaggagggatttgctagagagctaggtgctcatgagtatattgactccagcaaggtgaatgatgtcggattggcgctgcgcgagttgggcggcgcatccttaattgttaccacagccccctcggcggaggtgatgaagccgctct

SEQ ID NO: 23928 - DNA, 850 bp, Emericella nidulans
gtctctggtgtccaatgtttcgcagcgcgtctcaacatcggacggcatcgcgactccgccgcccacctctaggcaacagcaaaaaaagcccccaccgctgcccgcccgcaaaagctcgagccaactcgccccatcgctgtccacctcgagaccgtctgcagcgtctatcgactcggtaacgtctgatgcgtctcgatcgacatctacgagcacaggaaggtcaacggggagcactagagctacaacaccagggtcggtcgtgaaggcgccgccatggggcgttggagagcttcccccgttgccgccgaagcgaacgagcacgaacaccagcacgcagtccgttgtatcgccatcgaggccgaaacctaccacatcggggagcaatgggcggttgccgcctccgcgaccgacgcttccgcctcgtcggtcttccggccagggtgtgttgaccgtttcgacggagagcagtgttcagccgcggtcggttccaacactgcctcagaggcgtgacaagtctcccagtcccccagctgatgagacaagcgggcggactcagggtagacgggtccctccaccgcctccatcgggagctgcattggacaagatcagaggggcagggcttggaggactgaacaagaagacatcgggcactaccacagagcctgccggtgcaccaccgccagtgcctttggggtctcgtccagacctctctgcgatccaggtgacaaagccacgcattgctgtatcaaacgaggcgccgcctgcggccgcagcggcgtgcttgaaatgtcgcgacttctctgcgcctgacgcacatgccgcgcggtatccgagacagtcgctgccgacc

SEQ ID NO: 23929 - DNA, 602 bp, Emericella nidulans
ttaccatatgctgttcggtgtcgtgcacagagtaagtttttgattctcgagctatgcgatgatattctggtgtgttactgttgttctcgccaactacgagtgcgtcagctcgatcttccacactttccgcgtcagtgtcgcagaccgctaccctgcgaagccagagcaatggaaggagctcgggatttatgcagcgaggaatactcgcgagatacaagccttcgcagttgagaacccgcttatttgggcgcgatacttgcgaatcgagtttctaacgcattatggaaacgagttttactgtccgcttagtttaattcgtgttcacgggacgacaatgttggaagaatacaagcacgatggagaggtgaatagagctgaggaagaattagctggaggtgtggcagaaccagctttagagacagagactgtcacggaagatgccacgaagactgaagtgccgccgccggaggcaccaagttttcacgtcgtcaactctgaaatacgcccgtcaaaaatatgtccccgaatttgtactagtgttgagctggcattgctcggttcagtgaatcctcaaacgtgtggcatcaatgacacctcggaga

SEQ ID NO: 23930 - DNA, 850 bp, Emericella nidulans
tttctgtatcggcgtcgtgattcagcttaccgcggctgccggcagcggaagctcatcgaatattttgggaggtcgattcgtcacgggtatgggtgtgggaaggtacatttacccatggctgcgcatatattagagctgccagtcactaacccgtgtctcttagcctctcaatgagtgttcccatgtacaacgctgaagtattttctttccgaagatggatgtcagcttcgatctaacttcttgaagatagcaccgcctgaggtaagaggctctttggttgccatgcagcagctcgcaatcacgttcgggatcatggtcagttttctcacgcctagaacaggcttatcccctttgtgacatatcgctaaccgtatgggtaggtctccttctggtaggtcctcgtctcgatttattctctcgcaacctaacaaccccaggataaactacggaacaaaccacatcggtggcactggtgagactcaaaaagatactgcgtggctcttacccttggctcttcaactcgtcccagctgtcatcttaggagtcggcatgatctttatgccattctctcctcgctggcttgtacaccatggcagagaagaagaggctctcaaggttcttactagccttcgtggattggaggcggacgaccccgtgttgcagctagagttcctagagatcaaagcccagagcgtcttcgaaaaacgtactgagaaggaaaggtttcctcatctggagaggtccagtctctggagttatttgaagcttgaagctgccggttacaagagtctcttcaccagctggcccatgttcaaacgggtgaatgttgctacaggtatgctttcaccct

SEQ ID NO: 23931 - DNA, 850 bp, Emericella nidulans
tatttacagttttggcaagcatggcacatggtattgacctgctcaagtatcatgggattactcctttatatcgccacctgcttcattttcaatccaacacggacgggaagaaaggagggaaataccaacgtcaaattgtgcaagacgagcacttcaaaaagctcatgaactatctaactccatggaccaggaaccctgagtttattggacatccaaagctagaatacctgaggcaggttgttttgaaccactttatggatgctggtgaaggcctcatggagctggtaatgagaacaaacagctaccagagtgatgattttcgtacattttcgggacagcgctgaagaagtgacaagagttctcaaaagatatgagcccatgatacggccccatgtttttgttgggcaaagcagtgctaaaggctcagaaggaatgggtcagaaaacccagcttgacatcattcagaagttcaagaagggtacctataacacgattgtggccacctcgatcggtgaggaagggttggatatcggagaggtcgacctcattgtgtgttacgattcttcggcgtccccaatacgcatgttgcaacgcatgggacggactggtcgaaagagagccggtaatatcgttttgcttcttatgcaaggcaaggaggaagagaactatcttaaggcgaaagacaactatgaaaagatgcaacagcttatagcgagtggatcccagtttacgtttcatgacgatagatctccgcgcatcatacctcgtggcataaaaccagtccctgacaaacgacatgtggacattcccaatgaaaatgaagccagcgaccttccggagccgaagaaac

SEQ ID NO: 23932 - DNA, 794 bp, Emericella nidulans
tatggggtgtcgaggctaggggtcactgctccctcaccacgcaggagtaaactgaatgtcgctaagagatcggctcactgaaacccagaaaggaggagaagggcttgctcccgaagggtggtattctagcagacgatatgggtcttggaaagacagtccaagccatcgccctgatgctcacaaatcagaagccgaaagacgggtcgagacgtcaaccagcactgtccgatcacgaccgaaaacctgaagatactgatgaagaaagtgccgagtcgagaaatctcccgaaaggcttgagcaaatccactctggtcgtcgcacctctcgcattgatcaaacagtgggaatccgagatcaaaaccaaggttgaaccttcccacaggctccgagtccttgtataccacggcaatgcaagggctaaagcaactgacagtttggacgactatgatgttgtcatcactacatatggtaccctgacttctgagcacaacgcagtgaccaagaacgataagaaggcgggcattttctccgtctactggtaccgcatcattctcgatgaagcccacaccatcaaaaaccgcaacgcaaaggcaacacaggcagcatatgcattggatgctgagtaccgttggtgcctttcaggcacgcccatgcagaacaatctcgatgagttacagagtctgattaggtttctccgaatcaagccatacaacgattagcctaattgtagggaccaattacacctgccttaatcgaacgggcgcgttgtaattggcaatttaaccggctaccaa

SEQ ID NO: 23933 - DNA, 850 bp, Emericella nidulans
agcacgcatcataacgggtataatgagtagctcggaagcaactacctcaaacgggagcaatgccttaccgtcgagaggtcatgtgcggcttggatttgctcgacgggaagcagatcttgatgtcaatgtaggagtcgactgttacggttacggaatccgtgatgtaaacggcgaggtggtcaatcgcatgcggtgcgaatacttcttccccaagggtgagtcgattcgcgaaggcgatgtcattggcatgctcatcactctcccgccgctttcactccacagaaagattgtcgagggaacatatgacccggcttgtgataatttcaagcccgggcctgcttcagctactaatatcatccgtgatcgcatcccctttcactacaaaaatgacttttgctggcaacagtccaatgtctttccaaccaagcaactgcgtgactacgctttcaatctcaaagaaacccctgcattcggccctccatccccattgaacgcagaggatccatcactacgtacattacctggctcaagtatcacgatatacaagaacggcataaaaatgggtacgccatttaaggagctctacgcctttctaccacctgctagcagacttgcgaatggcacgaacaacctcgggctcggtgagcgtgaaaatgccgatgatggtatgatcgggtactacccagctgttagctgctatggaggtggtgctgttgagtgtcgcttccaaggtccctggtggtttagtccgccgtccgctacagaaaatggtgagccagtcaaaggaattggagagcgcttcgacgagcaaattgtcgaagacgtactggccgatattgtagacgaggtc

SEQ ID NO: 23934 - DNA, 850 bp, Emericella nidulans
gagattagctgagcggtacccaattgccctgttaacgttggcaaagagacttacaggccttcttccgcgcctcctcctccacatcgatttcgctctggagtgggtccaggtaaatgctggccaagttatttaccaccagggtgacgaaagtgatgctatttatattactctaaacggccgccttcgatcagttcacgagggcaaggggggtaaaatgaccgtggttggcgagcatggacaaggagagagcgtgggcgagttggaagtgatgacagaatcgacacggccggctacgttgcacgcaatacgagataccgagctggcaaaatttcctcgatcgctcttcaacagtcttgcgcaagaacacactgggataacaattcaggtctccaagctcattgcccaacgaatgcgagatttggttgaaaaccccatgactgaacaaggcgaacctggcaataccggtagtgtcaaaaccgcaacgtcaaccctcaatctccgcactgtcggtatccttcccataacgaccggcgtcccagttgtcgagtttggcaatcggctgctgagtgctcttcagcaaattggcgttaccgatggtgtaacttcgctgaatcaagcagctatcttgaaccacctgggccgacacgcttttagcagaatggggaagctaaagctgtcgcagtatttggccgatttggaggaaaagtatgggatggttctatatatcgctgataccaacgtgaactccccgtggacgcagacgtgcattagtcaggccgactgtatccttctggtgggtctcgcagagtcttctccgaatgtgggggagtaagagaggatccgtagtgcg

SEQ ID NO: 23935 - DNA, 500 bp, Emericella nidulans
ataagtcttccaccatcaatctcgcgatcctagtagtttatgctgtcttgatgcaacctatcgacaagatgtccatctccagcacctcgcctccatatcccctccacccttccgtcaaagaccttttagatcctgagtacgtcgcattctacaacgcccacgtcatcgacaagcaacaagtccatcttcagcccgttgagacctcgcgcacaagcggtattttgattccgggtggcggaccacttgtagatgttggcaagacagtcgatatcaccatcaagcgacgcgctactgaggggccggagatattgctgcgggcattcacgccgattggggaggcgcccgagggaggatggcccgtaatgttgtacttccacggaggcggctgggtgctaggaaacattgacacggagaatgtggtctgcacgaacttgtgtagtaggggaggatgcgtggtcgttacagatgattatcggtatcttggtcctcgcttcccattt

SEQ ID NO: 23936 - DNA, 500 bp, Emericella nidulans
cataaccgccactatcaccgacaaccctgctcaaattatggctgcccaggttctcaactacgtttacgtaggtataggactttctgtgatccccgtgtcccaagcggagattagcatagatactgcatgacttcgcaaccgatccgccaaaacaaggacgaacagttccagccgaagtacgggtctagttgtcgggacgcaccagcttagtctcacattggaaggcgtggtcatcaatgctgtctgctatggtaccagtgggcttcctgataaccgcgcatggcgcatccctctcggcctattctacgtagtccctaccatcatcgtggcctcaatattcttccttcccgagtctcccaggtggctgattcggcagaatagagtggaggaagcgaaggcgagcctgcagaggctttgcgagggggctttcaaagcggaccaagtcgacaaggaatttagagagctggagtttgcccttgaaatgagggtgagcagggaat

SEQ ID NO: 23937 - DNA, 850 bp, Emericella nidulans
agtcattcagaaggaccgtatcactttggcgatgcttttggcgcaggcggctccttaccccatggacaaaagcattatcgacaccatcctcgatgaatccgttgaaggtacggatttgtcggccaatcccgaggcgaaggtccaggtgatgagcgcgtttgggaacatgtcgctatttaaagcgcatcttccttctgtgactgctgagcaatgggatcagttcctgggcgaagaattggcagagaatttcgttcccaaggtctgggatgagaacacgtcagagcttgacaaactacttcggtcgctgctgctcgtcaaactttgcagaatggatagattcgttccggccgctgagcgattcatcgtggccgtctttggtcgcgaactttatgagggaagcaccgatctcaaagacatcgtgggccaagttaccgcaactgcaccaatatcccttagctccagccctggcttcgacgcaagctacaaggtcgatgctctcgtcgagcgcacgcacgcgacatgcgcaaacattgctatgggttccaacgaaggtctcgagagcgccgacaagcgatcagcaacgccgcctccgcaggaacttgggtcctagttaagaacgtgcaccttgccccctcctggctgcagagtctcgagaaacgcctcgcctccctcaaaccccacaaggatttccgcctgtttctctccatggaatccagccccaagatccccgttaacctcatccgcgcctctcgcgtccttatgtacgagcagccggctggtgtacgcgcaaacatgaaagactcgctctcgtccctctcaactcgtgccagcaaagctcccgttgagaagg

SEQ ID NO: 23938 - DNA, 500 bp, Emericella nidulans
ctccgctatgggtactccgctgccaatatcgaaatgccgctctccccagaaccaccgggttcgcccccgaactcatccaacgattccttgaaacgccattcccgctacacctaccgtcatttccagcttctccgacaagcgtcccctgcctcgccgctccgcgtaatagcacacatcgacctcgatgccttctacgcacaatgcgagatggtccggctagggacgccgcgcgagaggccgcttgccgttcagcagtgggactcgctcatcgcgatcaactatccggcgcgcaaattcggcattacgcggatgatcagcgcgaaggaggcgaaggctaagtgcgcggatattgtccttcagcatgttgctacatttcgagagggcgagggcggcaagtgggcgtatagagaggatgcgtggaagaatatcgggacggacaaggtctgtcttgatccgttccgggcgtaatccccattgatactagggaccttcaaaggaga

SEQ ID NO: 23939 - DNA, 781 bp, Emericella nidulans
agcagccgtgctgctgctggcacctttgggggctttggagggttctcatcatctgtgtcgggtcagggaagagagctgtcttcccttacatatgtgactgagccgccggatttgtcccggatatcggaccctcaactggcgattgctttcaaaaactttctgaagaaggatgatgtgaccaggacgaaagctatagacgatataaagtctttcgtttccagtgtagctgcaaatgatggtacacttgatgatgggttcttagaggcttgggtgagtttatttccataaaaaacactacttcgaagcctaacatcggccagatcagaatatacccaagggcatcaattgatctgtatcgccgagtgagacagtccgcacactcggcccaagggttgattgctagcctcgttgggaagcggtttgcccgatttttgcccaaagtagttggggcgtggctggctgggggttatgataatgataataccagattaccagacactgcctgggggttttatacgcgccgtttttttacttgtttaaaaaaggaacagacggctggaaggtctttcagagtccgattcttgactttgttgatgatgtcattcttcagcagacacctctgaccctgagcgatgaaaggacagtcaagcccgaggatgcagaggcaaagtatgcccgtgtggtagggaccgccattctgctgttaaaccggattctaggttcgctcatatcgtatcacattcatgaaggatgtcgctgacaatagtactaggaaacacta

SEQ ID NO: 23940 - DNA, 500 bp, Emericella nidulans
tccgtcagttcggccatgtgcttggtgaaatcgtcgaacaggtggtagataatgtctgcggtgaaaatcttgacaccaaccttcgtctgggtatgcttgtgctttcttaataaactttgaatctaaacatagcatgaacgcgtacttcttgtccttatttagaattttccttgatatatggccttgtgttgttgcttgtaccatttatgttttgtatttgtatcttatttttcaatatatctctataagttttatattattatgttttccttacatttttttctttgttcttaattttctcttatttcatttctatacccttactatattttctctttcttattttttgttaatatatgtcttccattatgtctctttctatttgtttattatcactttattgatttattttactttatgatttcttgttcttataatcctttaatttattctattctttcctatttcctactgttattatgcttttctttattttttat

SEQ ID NO: 23941 - DNA, 500 bp, Emericella nidulans
gactggcttcctgactggctcccgcaagtgacacccggagcagatacggtgacctcagatcaggagcttacccagactccacatgcatcatcacccaatagctctcacagcccgaaaaagttgggctacccacctaatgagaacgatggcgaggccgatcaattcaaattcaagcaagctaagacgctttacgtctctccgagcgcaaataggacggtcaagaggaagctaagtgggatccatgtattcgtatgtttaggtacctcccttgcattgttattatctaccggcgctcgcgacaccaattacttacgcccaccacgtgttgagcgtgcagtttatttagcttttccaagtgctaacgatctatagatgattaccgtgaacggaaccctgggaactggactgtactggcgcggcggtcagattctcgagctcccggggcccctcgcggcggttctctccttcctactcatcgggcttttatcctgggccgtgat

SEQ ID NO: 23942 - DNA, 536 bp, Emericella nidulans
gtcgaggtcggccacggcaagaaggctgtcatcatcttcgtccccgtccctctcctccaggccttccacaagatccagcagcggtacgcttcatccacccatcctctctataccaacccgccatgaacacgattactcttcgagaagggaatataatcaaactgacaataccagccttacccgtgaactcgagaagaagttctcggaccgccacgtcctcttcgtcgctcagcgccgcatcctccccaagcccaagcgctccgtcaactcccgcaccaaccagaagcagaagcgcccccgttcccgtacccttactgccgttcacgacgccatcctcgacgacctcgtctaccccgttgagattgtcggcaagcgcatccgcaccaaggaggacggctccaagaccctcaaggtcatcctcgacgagaaggagcgtggtggtgttgaccacgcctcgacgcctacgcggaggatctacgtcgtctgacgggtcgtgctgtcgttttcgagttccccagggtggtgcttctgagttt

SEQ ID NO: 23943 - DNA, 850 bp, Emericella nidulans
gtgcttcagggacccctccacccggacttggaggtcggaataacgaggcagatgaaaaggagtccaacgaacttgacgagctgcaacagaggctgaaagatgctcagctcagcccagaggctcagaaagttgcggataaggagatgcgacgactgcggaagatgatgcctgtgaaccaggaatatggagtaatccggacatatcttgagaatctagcggatattccgtggaccaaggtgaccgaagataaacttggcccggagaccctgaaagcagcgcgaaaacaattagatgacgaccattacgggctggaaaagatcaagaaaaggctactcgagtatcttgcagttttgagattgaagcagtcgacaaaccagggtctggagcaacaaatcagcattttaacgaaagaattagacaactctggaggtgatatagagaaggacataccgtctcttcccgaatcggatcgcgctgcgatcgagtcaaagctgaacgcgctgacatctaagcgaacggtcgacaaatcacccattctgttgcttgttggaccaccgggtaccggaaagactagtctagcccgatctgttgctactgctctgggccgcaaattccatagaagtctccctcggtggtgttagagacgaggctgaaattttgggtcatcggaaagcatacgtggcggccatgcctggcgtaatagtcaatggtcttaataaggtcgacgttgcgaaccctgtgttcttgctcgccgagatagctaagattggcgcccctgatttccagggaggcccatctgcaacaaaactggaagtgaaggaccctgagcagatccaaaccgttgttgaca

SEQ ID NO: 23944 - DNA, 649 bp, Emericella nidulans
  unsure (1)..(649): unsure at all n locations
cgtctcacattgacaaactgccgcaaactcactgacattggcgtatccgatctggttgtcggcagtcgtcatttgcaggccctggacgtctcggaactacggtctcttaccgaccatactcttttcaaagtggcggaaaattgcaaccgtttgcagggtctcaacatcactggatgtgtgaaagtgacagatgattcgttgattgctgtttcgcagaactgtaggcttctcaaaagagtaagtcaccttacgattaaatcacatggttctcattctaattttcgcagctgaaattgaatggagtgtcccaagtcaccgataaagcgatcctgtccttcgctcagaactgcccatctatccttgagatcgatcttcaggaatgcaaactcgttacaaaccagtcagtgacggctcttatgacaacgctacaaaatctccgtgaactaccactcgcgcactgcacagagatagatgattctgctttcctggaccttncagacatattcaaatgactaggcttcgcattcttgatctgactgcgtgcgagaatatcagagatgaagccgttgacgaatcgtagttcgcaccgcgttgcggaccttgactccgaagggcagtcatacggacgggcggtgggcattgaaatagg

SEQ ID NO: 23945 - DNA, 428 bp, Emericella nidulans
tcgccagcgagaagaaagagaacgccaagaggaagcagaacgccaagcgtcagacgcagccccggagcctatggacgatgtgcagcgaactggcgttaccgccgaacctagcacaactgcacaaccggcccaagctgaaccaagtccagccgaacctgcccgccgtgtgcatacaaccataagaggccgccagttggacattaccggactggaaattgatccagaatatctcgaagcgctccctgaggagttgcgtgaagaagtgatcatgcagcaattggctgagcagcgctcacaagctgccgctgctggcgaggagcccagtgaaatcaatactgaattccttgacgcattgcctcctgagattcgtgatgaactcctccagcaggaagcagccgaccgtcgacgccgggaacgtgaaaatgctc

SEQ ID NO: 23946 - DNA, 702 bp, Emericella nidulans
gctaattgttggaattgattttggcacaacattctccggtgtcgcatttgctttcgcgacgaacaacgaggcgcgagaggatatcattaccgaatggcctggagctggcactcacaccaaacaaaaggtgggtctcttcttccttcccccaccacagttgtggcgagggcaccccggagtcgataatctggaactatcatgttgaaccatgaaactaatcttctgattttctaaactagatcccaactgtcttgtactatgaccaataccaagaagtagtgggttggggaccagacattgcaaatgcgctggctcccaccggctacccaaagcaaggggtgcagaaagttgaatggttcaagcttcagctgatgctttccggtaacacatacatcgaccccatcaacttgccgcctcttccgccaggaaagtcggagattgatgtggcggccgactacctctttaagttacgacaggcaatgcgctcccagttacagaaaacactcggtgaggtatttacgagagaagagcgtaacatcaagtactatctcacagtgcccgcaatctggaacgatgcaggcaaggcagcgactcgtgcagcggctctgcaagctggtttcttgcgagacgaaaacgacaatcgcctgactttgatctcagaaccggaagctgctgcgctcttctgcgccaaaactggcttac

SEQ ID NO: 23947 - DNA, 500 bp, Emericella nidulans
aaagtcaatgccctctctgctactgcagacactttgagtcaatctggtgtggtttctgtgaagccggatcccagccttcttaattggatgcaaggcgaacaccctgaagaagagacggagagattcaacgccttcctggagtcattgcaccagtttagcgtggacatcttcggcgacgcggtagtgaagcgcgtaaaagacatcgaggttctcgctcgaaaatggcagaaggaagcccgaggctaccgagacaaataccaccgtatgcaaagcgaagcgcacgacaagatcgcttacaggtcattcaaagaaggcgatctcgcgctcttcctgccaacccggaaccaagccatccgctcatgggccgctttcaatgtcggtgcaccgccctacttccttcgcgaacaggacgtccacaaactccaagccagagactggctccttgcacgaatcaccaagatcgaagagagagttgtcgatccactttagtgagggttaat

SEQ ID NO: 23948 - DNA, 500 bp, Emericella nidulans
  unsure (1)..(500): unsure at all n locations
cttctaaattagatagaagagggaccccctaataagcccctgggccccctatacctgctaataaaagagtactactgggctgccctctatgccctacccccctctgcccctggggaggacaggcttgctactactacttagagggagctctggcctgtcctaggagatataattatataactatactataggtatatagaggaaggctgctttctactaagcctgaagtcagcanagataataatattactaaaactaggaaagagggactatacctaacttaatgcctggcagctaattaccctcctctctatcctaggcaaaggcctagagtaccttctagcacagcagatagctggaagagtatttaggatatatattagncccctgtactttaggggcctgccagatactctgctttaacctattncaggtcttgttattgggtgagaaggccttaacaaggaaagagcttactaccccccaaattaaaagggttt

SEQ ID NO: 23949 - DNA, 786 bp, Emericella nidulans
cgcccagaacgccctgctcgagtcgaactctccgagggaagacgacactgctcgccaggctttgaatgaaattcaggatgaaatctcgattggttatcagaagctaaatgatgacattgcgagggtcaagaagacgcccggatctgccactgtccaatcccagctcgaagttcagggccgtgctattcgcaacgaatttgaacaattccaaaagagtcaggtgtcctttcaaaaacgactgaaggagcaggtgcgtcgacgtgtccagctgaataacactgaggcttctcctgaagaaatcgatcaaactgtggaagctgtgctggctggcagggaacaaaccttccaggtaagaaatccgtgagtggcgtactacaatctatgctcactcatcctcaggttgcaggtgccagactaaagagaggccacgatgtacgggatgccgtagccgcgcgttctgaggaaatcagatcgattgaagcaaagcttgtggaagtgagcaatctggtcactacaatggcccaaatgatcgaacagcaagcaccagctgtagaacagatcgatcagggtgcagagaacgttgctcgggatcttgggaacgcgaacactcagctggggcaagctgttgaaagtgcgcgcaaggcccggaggtggaaatggtacgccttgatcatcgttagtaagtttcgccgcttcgacgcttcgacgcctattttagcaagtctaacaagccaccaagtcattatcattgccattattgtggctattgccgttgctgttacgcag

SEQ ID NO: 23950 - DNA, 500 bp, Emericella nidulans
cagggatcagcggggatgaacaaaacaaaggccttggtgaccgcttttgagaaattcgagtacgattaccccgagaagccgatggctaataccctggccccgagaagccggagccgtggaggaagcttgtcattttctcagagagacgtcgtgagagaccactcaccgaaacgacatataccgcccatgaagtcgcctagtccggaaccggcgcccgcactgtttgtgcgcgccatgtatgattatgatgccgatgatcacacaagtctgagtttccgacaaggagatgtcattcaggttctcaaccagctcgaaactggctggtgggacggtgttatcaatggcaacgttcggggctggtttcccagtaactactgcgctgtcattactgacctgcgcgaacttgaggaacatgtatcacaggttcaggttcatgacgaagctgatatcagcgcggagtctggtgctggcgaggaagtagaagaggaacacgacgatga

SEQ ID NO: 23951 - DNA, 500 bp, Emericella nidulans
tcctttcggctctggccattcacatggacctgatgagctcacgattcaagtcgttcagctggaagcgaaacaagcaacaacagagtagcgtcacctcattatctccagttcagtccatcaacactccctcgacccgaactcttgtctcaccgacaccgcagcctgcgcccccagcgtctgttcccgctcccgccctttcgacaacctccgccagttcccccccttccggtcacacctcgtcctccacaagcagtctcccaatgaataacccgaatcaactgggacagccgcccagctacacctataataatgtcgctggtcggccgaccagtcctatgccccccggcaaccagccgcagatgccgcatccacttaacaccaacatgccttatccaggacaacaaaccttgggcgctccgccagtctacggtatgcagcagccggtaatgggtcgagggctaccctcgtcgcaagtcccttacggggctcggaaccccgcc

SEQ ID NO: 23952 - DNA, 345 bp, Emericella nidulans
cgacgacgacgaatccgattctcctccccgcacatctttcagacgtgccgcatcccgttcagaatctcctccgtcagcaggtctaggtctgggtatgggctcagggatgggccgtggtcgcggaagaggcttaggcatgggtcaaaactcccggaataacaatgcgaccaagcagtcctccggaaatggcctcgcggcacactccttcggtgcccgcatgctagccaagatgggttatgttcaaggccagggtcttggatcgagcggccagggtatcgtgaatcccatcgaagctcaggctcgtccgcagggtattggtcttggggcggtccgcgagaagagcaa

SEQ ID NO: 23953 - DNA, 652 bp, Emericella nidulans
gcgccacagccctcatccgcggcgggatacccatacccatacccgccgcaaacatacaacaatccaccaactccggtatctgtccagaattcgaccccaactcgacctttcggccatgatggtcctgcgcagctcctctacctgcgctccccgccgacagacctatgccccggccaatccctcagtctactaccccaccagcccggcgcccgattcccaggtccacggcggcttcaacaactgcgccaggccagcgccagcatccagaaccagcaccagaaccagcaccagaaccagtaccagcacaaacatcaacaccggtatatgcacctgcgcctattcctgcgccttcatctgtaccaccagtgaacaatctcattgcgcaacagagaaccccgccactgagcgagggggggccggagcagaggaaatccaacggcaccagcgactctttggaagacctcatcccgtcgcccgaaccagagcctgagctagacggtgcgagcagcacacccaatgaaaccgggtccagcgaagaggacaacagacccttcacaccaccggaggttgaacccgttgctgtcccgctgaccaaactgcattacgcctgctaccaggatcatcgcgcaatgccggccaccgggaacgtgtg

SEQ ID NO: 23954 - DNA, 535 bp, Emericella nidulans
gctctgggaaacagcgttgcggccatccaccctctattccgagaagccatggaggactgggagccgctcaaagccccgaccttcttggtggctaacctacggcgtctccaacctattctatctcgtaaagccagcgaagggcaactcgtgcagcgctcgtcgacctctccttacgaaactatgatctataccttatggctaccacgcgtacgctccgctttgctcaacgaatgggacgttttcaatccttctccggccaccacgctcatcgtctcatggaaagaactcctgccccccttcgtctacgccaacgtccttgaccagctagtggtccctaagctaacaagcggcctaaactcttggaaaccaaaacggtcatcttcttcatcccactctcaacagaactctcgcgtcccctggtggcttttcacatggctccaatacctcgacgaacgacacacaaacccgaagcaagcaacaggccttctctcggacgcaaagcgcaaattccgcagagttctggacacatgggatc

SEQ ID NO: 23955 - DNA, 320 bp, Emericella nidulans
gcgctgggacgacgtcaacagggcgactgcgcctacgggtcgccgtggtgggggcgacacagccagacgggtgtaggcggctcgacgctggggggagggtacggctggctcacagggcgatacgggctgatcgtcgacagtctgctgcgcgcaacggtggtgctcgctaacggcagcgtcctcgaagcatcggacgaggcccatcgagacctcttctgggcgatccgcggtgcaggccaggcatttggcgcggtgaccgagctggagttccgggcacataggctgccggaccaggtgtttggcgggctgctctacttcaa

SEQ ID NO: 23956 - DNA, 850 bp, Emericella nidulans
cgttcccaaggcagactgctacggccaaattgcaggcatgtacgtcaacttgctgacagacatcccctcaagcgatatgttcgttgccaccggcctcgagctggtgatgcgctcgccaaaagctcaaactgtgacagatggccgggagaatggtccaaatgtctggcatgtcctcgctcgccacgcacgtcaaggcgaaaaggcttacgtgaccgatgtctttgtcttcgatgcctcgacgggtgctctggcggaggtcatcctgggcctgcaatatgtccgcgtacccaaggccacaatgagcaagatcctagcacgaatgacgacggacaagtcatttgtgagaagcaccgcaacagcgtcactgctgttgcctgatcgaccccagcctcatgacggccccatcactgctactgttcccaggccggcacctcccaaagcaaccaagacaaacgtcgcgaagacagaacctgtcagtagcgcacgcaatatcgcaaaagaagtatgcaatgtggtcgccaacgtttccggcatcgaggccagcgaattgagtctcgacagcgagatggctgacttgggtattgattccctaatggccatggaagtcgcgcgagagatggagaacactttccattgcaccctcgacagcaccgagacaatggttgccaccaacattcgtgattttgctgcctgcgtgtcgaatgcgttggcgagatctggaggtcaagacggtgcctcgaccagcaccgagagcgatgctatgctctcagactcggaggatgaagacaccgactctggtatttcgactccggatgacgcctcagaaattactagcaagagtcacgatccg

SEQ ID NO: 23957 - DNA, 572 bp, Emericella nidulans
gtatctgggtatggtgatctcgcgcgcgcgggcgaggagctagtccggccaatgcagacaagcaacggaggcagtggaggcgtggttgtttgtctaggtgttggtggactcgtggatctcgccgagatattagggttgaatgtgggggaagatcaagaaggggcggacgatatgggtggcgtggaagtttgggtgtttgacgcgaggcggccgtggaatttggcgaatgtcttcggcggcggagaggggacgcagcagcaagactccatgcggaggacgcctggtgtggataaaggatgtattactgtctcgtataagtttgggagtggaaggggcggagttgttgtttatgatgatggggatatcgaggaagagatggagagagagagagaggcttattgtgcgttgttggatatgccggaggtggatgatgatggcgatgatgaagacgaggatgatgagccgccgtcgagcaccgactcaaagaagcgcaagtcctggtcccgggaggatgatgaggacgaggagttcgatgaagacgatggaccgcctcgacagcggaggcggagtaa

SEQ ID NO: 23958 - DNA, 500 bp, Emericella nidulans
ctgcgctctccaaagtgctgatcggatagggatccgacttcggtcgaatccgccaataagaatataggatcgttatcagcttatcgcatcaaaatgcggggaagataacgtggaactgtagatactagatacatgagatcactaatagaatatcaactgctcacacaaaccaccgcagtggcatacagaaagaagccatcatacatctgtcatgggaagtgcctccacaaaccccgagaagcgcagggtggtcaacgcctgctcgcgatgtcgccagcataagatcaagtgcaccggcgactgtccctgcagcaactgtagacagcgcaaggtgagatgcaagtttgagggagaggaaaccaaagttcacattaccaaaaaacatttttcgagtctgaagcgacggacattagaactggaggaggagaaccgtgcactccagcagcagctggcagccctgaccacgacttctaccccagtggccaaacggagcacaccga

SEQ ID NO: 23959 - DNA, 500 bp, Emericella nidulans
cccaagaaaaaagtcgctccggatctcagcattgccaaccccagtttccaattcggagacaatcacaccatgatgcttcccaggcttttgacgcctctccggtctttgggcagagcaatctcctgcccatcagcacaattaactcgcctaccgcaacaatcaacaccacaattactaccgcggacgttatccgcttatacaactccctcaattctcacgaaccttccccgattctctctctctctctcccaggtacgatacgcctcccactctgcccaaggagccgcaaacaaacactcccgtgaccccgccggaaaacgactcggcgcgaaacgcacaggcggcgagtacgttgtcccgggatgcatcatcttccgacaacgtgggaccaagtggtggcccggcgagaactgcgccatgggacgtgatcacaccatctacgctacggaatcaggatacgtgcgctactaccttgacccggagcgtcacccggaccggaa

SEQ ID NO: 23960 - DNA, 850 bp, Emericella nidulans
ctcttgagaaagttcggaacgaacgtcttgaacgaatcatgtttacgtcggacttcagtgacttaaggggcgctccagagatggtttacaaactgcagtcacgcattcgacaattggaggagatcaaggaacatttccaaatccatgctaagtacctcgataagcgtggttgggaggatcggttgattttggagaaggatattgcccggtgcgaggatgagctattcttcttgatgaaggcaatcactacctcacaaaggaaagttgagccaactgtgacaggagcaacgggtctcttgcgttggaatatctccgccagtgagatcgtttggcacttgatgaaggacgagtcagagccactagtagaatttcagctgaggaacgctgaatacgaccgcactgataatactgatggttcgaaccacaaccaagtgtccgttgagcgactttacggcctgaatctccttccggatgcagtgtatccgcggatcatcgtgccgtatcttgaccaggcgcgacgtcttgaaggccctgatgactatatgatcaagatcaaatggcatatgctggaggcccgtgctggaattcctggtgtggatgactaaaaagtgtcattgttccccgtggaagatccaattgtaacatgagcttgggcagagagtattcgagtacatgttcccgaatgttgggtcgaccgcattcgaaaatggtggcttttcgccttttatgataaaaaacgtcaagccattggagagtcttgattccgactacaaggagtctggtcaaacctgtccctgcagcctacaacatcatagcgacacatctggagacgatcccgcaatgggcccta

SEQ ID NO: 23961 - DNA, 748 bp, Emericella nidulans
cgatgatggccgtggtgatatccccaagggtggttacgaatcgtctcttgaccgcaaacgagcccgcatggccaaattgatgtatgcactgttcttgcttggaagtgtcggtggtatggcttatctcgggcgaaactgggataccgttgaggaggaaaatgcccatcctgatgtcccatccggctggagttttggactttggtataatcgcatcaaggctcgaatgggcgactttacaagctattacaaagaccctgctttcccgaaactgcttcccgacgaagatccaaaccttcgccaaccttatacattagtcctgagtctggaagatttgcttgtccacagcgaatggagccgtgaacatggatggcgtgtggccaaacgacctggagtcgactacttccttcgctatctcaaccagtactacgaactcgtcctctttaccagcgtgcctagcatgatggccgatcaggtgctccgcaagcttgacccttaccgcatcatccgttggcccttgttcagggaagccaccaggtacaaggatggagaatacatcaaggtacgtaacagctgaaacttgctgcaaagggctttatatatggctaacatggttcatcaggatctttcttacctcaaccgtgacctttccaaggtcatcttgatcgacaccaaggaggagcacgcccgtctgcagcctgagaatgctatcattctcgacaagtggaatggaaaccccaaggataaaacc

SEQ ID NO: 23962 - DNA, 500 bp, Emericella nidulans
gaatatgtcaagccgccgcctgtcaagaagcgcaagccgtctcgttctccctctcccaactatcctccagaatctgcgtacacgcctgaagacttggcgaagccgccgtataactatgcggttctcatttttgacgccctcacagaggctagcacacccatgacgctgaagcagatctatagggccctgaagctcaaatacccttattttcgcttcaaatgtgaaaccgagggctggacgtccagtgtacggcacaacctcaatggcaacggccacctcttcatgcatgcagaacgagatggcaaaggatggtcatggcagcttcggccaggagcatctgttgagaaggagaagaagagacgaccgtcaccaccacctcctcccgctcaacctgcacaggctcctccgtcctctgtcaccccgcaatacatgcctccaccaacgaactcgtactcaaatcaacccaacggtcagtcaggaatggccaacccgcaattcca

SEQ ID NO: 23963 - DNA, 356 bp, Emericella nidulans
  unsure (1)..(356): unsure at all n locations
gggagcttcattttcccattcaatagcacncggnnttttatctccgactnaaacctggagnggagtttgtcttttttgcgtgtctaatcgcacacacacactcccgtcgtccgaaatacatgcaggcactggctctcaatattccttgtctctcagaccgttgggtagaggattgcgttgctaaaggccaggtaatggattgggaaatgtaccttctccctgctggtgaatcatcatacctcaatggggcaacgaagtcgagaatcctcacgccctacccggcgactagagcacgactctccaagactatctcatcgcggccaaatcttctaaacgggcaatctgtcttgcttatt

SEQ ID NO: 23964 - DNA, 685 bp, Emericella nidulans
cgactcaacgtacaacatctcgtacttccgcaaaatccccttcgctgcgcctccaaccggcgaaaaccgcttctgtgctccgcagccaccattgcctgtacgagatggcatctatgacactgaccagtccttcgacatgtgtccccagcgcacggtgaatggatctgaagactgtttgtatctaggtctgttttcacggccttggaccgagggttcgagtgcggcttctcgaccagtcctcgtcgttttctacggtggcgccttcatacaaggaagtgcatcattcactcttcccccgtcctcgttccccgtattgaatgtgagcgccttgaatgattatatagtcatctacccgaactaccgagtgaatgcttttggcttccttcccggaaaggcagtcaaagactcgccaacctcagatttaaacccaggactcctggatcaggagtatgcccttaaatggattcaagatcatattgcccattttggaggcgatccacgtaatgttactatttggggccagagtgccggcggaggctctgttgttgcgcaggtcgctgcaaatggacgacgaggaagaaagaggcttttctcaaaggcgcttgctagctcaccattctggccgaagacgtatcgctacgacgactacgaggcggaggttatctatgacagtttggtcaacttg

SEQ ID NO: 23965 - DNA, 611 bp, Emericella nidulans
atgtatccacacctacgatttaggtgacactatagaatactaggatctcattcttgttgctgcgcaccttgcaccaatggagggtgcggtcgcacgaagaaatgaagattggcgtagcatggtcgaaaggctggtattcagcgactcggagagcagtatcaggcgtaacggcggaaatgaggatgaatcggagacggaggcattgctatccagctcctcgaacgcggccgccaaatatccaggcatcttcgcgccttcgaactacctcttcattggaggcgacctgaactaccgcactgcagacaggattcccgccaaggacgaatatatgaaatatccccaggcaaacgtcgaaccagacgacccactgcatttctcacatctcctgaaaaacgaccagctgaagcgcgaaatgcaagagtctcgctgttttcaccgactatccgaagcccctattacatttccaccaacatacaagtataaccatgacgcacaggtcgctgctctcgatcctgcgcacgccgacaagcctgcagagtggaaatggtctagccaccgctggcctagctggtgtgaccgcgtgctattcctagaaacccccccaggactcg

SEQ ID NO: 23966 - DNA, 762 bp, Emericella nidulans
cttcgaggaccggcgttaccaaccatagggaatgctgttgctggtgccgttggcgctgcagcgtcgaaccttgccacttatccgttaagccttatcattgcgagattgcaaacccagaagcgacggggacggagagcaagcgatgaacagaaacacgaagatggtgatgagtatgctgggatagtggatgcagcgcggaaaatatactcgaaggagggcatcagcggtctttattctggccttgtgcaggacacgctcaaaagtgtgcttgatgcgtttttgttcttcttagcgtacgagttttttaggcagcggaggattgctgcgaggtacggttcgcagcgcaaatcaaggcataaggtattgcctgttcttgatgaattggctgtcggagtgctggctggggcgttttccaaattcttcacgacgcctttatcgaacatcgtggcccggaaacagacgtcgaagacttcagctagctcgtcgcaaattgcgtcaaagattctctcggagaagggtattgcagggttctggtccgggtactccgcctcgcttatcctcacgttgaatccgtccatcaccttcttcctcaacgggattctgaaatccgttcttcgccggagcaagggggctccttcgtctgcagccgtcaagttcttgattgccgctctcagcaagtcagcagcgtcctcgatcacataccctttttcaatggcaaagactcgttcccaagtatcgggttctagttcgagatccaaagat

SEQ ID NO: 23967 - DNA, 850 bp, Emericella nidulans
ctgcaatctactacttcggttacctcgccttgccctaccttaaatcttcttcttcagcggctgccgcttgcaaaatacatgggagtttcgcttctggtctgggctgggttggtaatagcgcacgttggcgcaaagaactatgccgggatgctgatattgagatttattctgggaatggcagaagcatgcgtaagcccttgcagtacgttacatacctacttcccaaaacagacaagatcttgctaacgggagcagtgatgagctttacatccatgttctacaagcgatccgagcagccgctacgcatggccatctggctctctgcaaatgggacagcaacaatggttggagcgctactcggctttggtctgggccatgtgcacaacacatctcttgaaagctggaagcttatcttcctcgtcatcggcctcctgaaccttgtcacaggggtgcttttcctctggctcatccccgactctcccagctgcgacaagttcctcacccacagacagcgcatcgtcgcagttcagcgcgtctccgaaaacatgattggcattaaaacgaagcagttcaagttcggccaaaccctggagctcgtatatgacatcaaggtgctctgcatcctaagcatgggaatattctgcggcgtcatcaatggtggcgtctacacttcgcttctttctgatcagggctacggtttttcggcattacgctcccttctacacttcccaaggggcaatgagaccgcgcgttccattgcggttggttccaatgtcggactacgtgattgggtgttatgttcctcacccttggggctccagattcgttacgatttttacgtgacttgggt

SEQ ID NO: 23968 - DNA, 567 bp, Emericella nidulans
aaaatgcctcatccttttcattgtcagctggaacactttggtggtcactttcctcagcacatcactcctcatcgcgacgcccgagatcgcatccgacctagaaaccacatctgagatcctcaacatcactaatgccgctgtgctaatcgcgatgggctgttcctcactaatctggtctccactagccgagatcttcagtcgaaaacgtagctacgatgctgcgacggcggtcatgctgcttgcctctattgggaccgcgctggcaccgaacatggctgttttcacaagtatgcgcgtgatctcgggctttacgggaacgtactttatggttgccggtcagacggtcattgcagacatttttgtgccgacagtgagagggcgtgcagtgggctgtctacaggtggggagtgtggcggggagtgccttaggtgcgtatcaggtcttggtcagaaactgaaggactactgtacttataaaacaccaactataggcccctgcattagcggggtgatcgtaacattcgcccactggcgcgatatctactggctgcaagtcgccatggcaggg

SEQ ID NO: 23969 - DNA, 672 bp, Emericella nidulans
tctttgtccggttcaattccgcatttagctctgatcgcttcgcgcaactcgcgtctcgaccagcttccatccaccagatctaccagtccctctcgaccgatccttacgtgaatctttcaatcgagcacttcctgctagagaaagccccgccagattcgagtatactttttctgtacgtcaatcgaccatgcgtcgttattggacgaaatcagaacccttggcttgagaccaaccttcaaaagctccataatgatcgcgaagagagtaccaaacacagtgatggagcgttacttgtccgacggcgatcaggcggtggcgctgtctttcatgacgccggcaacctgaactacagcgtgatttctccccgggctacctttacgcggaacaaacatgcggagatgatgatgcgggcattgcaccgtgtgggagcagttaacacaagcgttaatgagcgccatgatatagtcatgtcggagtctgacggtcagccacggaagatttcagggtcggccttcaagctgactaggttccgggggctgcaccacgggacatgcctgctcgattcgccgaacatcaatgaactcgggtcctttctccgatcccctgctagagaatatatcagagcgaagggtgttgagagcgttcggtctccggtggccaatgtatcctcat

SEQ ID NO: 23970 - DNA, 512 bp, Emericella nidulans
gccaatattcgcggcatctacggttcaaaggaatgggtcaacgatctggacattgtcaatgagttgagggggccatacggactgtgtgaatgcgttgaggtatgtgcgcgaccctcgcccgtcccacttttcagcatctctttgtcggcgcttcttaatcattcccagcggctgggaaactgatgatttgcagctggtcgcgatctggtcgccttctcgcgtcggggtcggatgattttcacttgaatatatactcgtaccagccagactcgtccactgcaccgtttgcactaaacaccagcgtcttcaccggtcacacagggaatattttctctgtcgcatttatgccgcactcaaatgaccagactcttgtgactgctgctggtgatagccaggtccgagtttttgatatcgagtattccagcagccggaatggctcgcaggggatgccgccagcgttcgccaatcaagcaagaaacccgcatttgaaccgagtttttcggcaaggcgcg

SEQ ID NO: 23971 - DNA, 500 bp, Emericella nidulans
cagccctaatctgcctgactctccttacaaaaacatcttcaacaatccgtctgcatggtctgatgtatcacattctttcactcgagagttctgtgcattactaggactgtcccctgattcgccgctctatattgctgcgactgccggtgcgatagctctacctacactattgaagttgcagaccatcatgaaagccaaacggaccgagtggactacagagcacgaactaccggtatgttgagataaagttagcgggtttggctcttgactaatgtgattatcaggtcgagattccacttccgccgtcctacctattccattctatttttgtgtgtcctgtttcgaaagaacagacgaccgacgcaaatccgcccatgatgatgccctgcggtcatgtgattgcggaagagtcgctcaaacgactctgcaagggcacaagattcaagtgtccatactgccctaacgagagtcatcctcgggaagccaagaaagtgtttctt

SEQ ID NO: 23972 - DNA, 500 bp, Emericella nidulans
ccgttaatggccccgtacctccgttacctggtcaaccgagcatcgcccaagatccccctactcctgttgaagaaattgacccaactttcaatgctcttgaggatggcgaggagcgcggtaggttgtttgtgaaggttgtcgggctgaagtatctagacttgccgcttcccaaaggtgattttcccaagtcctcgcatatcgaatgtttatactaagattctgctatcaggggagagaacctacttttcactcacattagataatggtcttcactgcgtaactactgcttggctggaactgggcaagagtgctccgatcgggcaagaattcgagctcatcgtccagaatgacctcgagttccagcttactctccagatgaagatggatgaggaaaagttcaggatccgcgaacctgctccttcagcatctccatcccggcaaaaacattcagcattcagcaagatgtttgcatcaccgcggaacgcaaggaacttgacatg

SEQ ID NO: 23973 - DNA, 811 bp, Emericella nidulans
ttaccagagtttcagcagatatttcaagatactccaggaattatacttccattttcttctcaagcaacacttcgccggcggcttatagataactttgagatacaacgtttgcaattaaaagaagagcttaaaataacatgcaagtctattgctttgtctcttgatatttggacaagccagaaccaccttccaattcttggtattattggccactggctcatggaggactttatataccaggaaaaggtgctagagtttacagaactccatggagtctatagtagagaaaaccttgctgctgctgttcaactaactctatctgagttggaccttgaagagaagttaatcataattactggagataatgccagtaacaacaagacaatggcttcagagctatactatactttaaagggaaatataggtgaaagcagtatacttcagtttcaaggacttgatagttatatccgctgcctagcttatatcttgaacttggttgtgaaggacattcttcgagcactgaaatctggcagtagtgaggaggcatatgctgcctgtattagtctctgcaatggacagcctatatctacacagtcagcattggcaaagctctgaattctcagtctttggattgatcgcagccctcaacaaaggcaaaaatggaaggatatttgccgattcatggacctctctgataaatacattgaatatgatgttgaaactcgatggaattctacatattgaatgcttgatgatgggttataagcaaaagcccagattaatcattttctggctctccaggctgagatct

SEQ ID NO: 23974 - DNA, 445 bp, Emericella nidulans
ggaaaggcccgggccggcagacttgaggtatcatccacgtaggcccctattcattcagtagcgccagtactgatggatgatgattaaatgagcagtgcccgctactatctagccgccgagcaccagctaagccaggaaaagggctcgatcagactcacaagcgtgcaagcacggctgacgcaatgctactacctcctctcccagtcgcgcataaatcactgctggagtttgttcgggacagtctcacatctcgcgctcgctatcgggttgaatcgagagaggaaggccgatccctctataaatgggggcgggatgagtgttatcgaggccgagtgccgccgccgcacattctggtgcgcgtacaccctcgatgcatacctcagtgctgcattgggaagacctcgctcgttccacgacgaggatatcgataccgagtttccggcat

SEQ ID NO: 23975 - DNA, 850 bp, Emericella nidulans
gcccagctgcactctactgggataatgtgtcctacttcgttaatgggaaggagattctttcgggcattcagggtgttgcacagccaggacaaattaccgcaatcatgggagcgtcaggtgctggaaagaccactttccttgatttgctggcgaggaagaataagcgaggtatcgcccagggagacttttatgttaacggggagaagttggacgacgcggatttcaagagcatgatcggcttcgtggatcaagaggatactatgctccccacattgactgttcacgaaacgattctgacaagcgcgttgttgcgtctaccccgagacatgagccgagccgctaaagagcaacgagtaacggaagtcgagaagcagctcgggatacatcacatcaaagaccaattaattggctccgaggaaggctcaggtcgaggcatttctggtggtgagaagcgacgagttggtattgcctgcgagctagtcaccagccctagcatcctgtttttggatgaacctaccagtggattggacgccttcaacgctttcaacgtgtaagtgtttcctgtgacgcaggtttaactttattatctaacggaatcagggtcgaatgcttggtatcgctagcgaaggattacaatcgcactgttatttttaccatccatcaaccgcggtccaatatcgttgcgctcttcgacaggctgattctcttggccaatggtaaaactgtctattctggcccattctcgacatgccaacagtattttgatgacgccggatacacttgtccaccgggatttaacattgctgattacctagtggatctcacaatgcatgctggcagcactactcaa

SEQ ID NO: 23976 - DNA, 746 bp, Emericella nidulans
cgacattttggttactatgaaaaatgacacctggtggttccactaagcaaggctttgcgaaatatggaagataagttagcagcatcgttagaccttagacctggctcttatgttattgatgctggatgtggcattggccacgttgcttttcaattagcgagcaagcatggccttagagttgagggtattggcattgtcgagcatcacctactcaaagcaaggcgaaatacctctcgatcaggtctttccaaggtcgaatctctgtgcagagaatggattatcaccatctagaaattcccaggccggcatctacactatggaaaatttcgtagcaacggagcctgaggctgtcctagcagggacttcccgtaccctaaaaccaggaggtcgtctatcattgtttgagtatgaccatgagctggacgaaaaaaccaagatgtgatgggacagtctatgcgcaagatcagcggattcgctacgatcccgacaaacattttctcgcacccaggggtattccagcgtatgcttgaaggtgctggattcacgaatgtgactgcacagcattattcggacaataccaagcctatgacatgactgtttcacctgattgcctacattcctcaccttatcgtcacgttcctcggcttggacaaatactttattaatacgatagctggagttcttcagtcttaccgtggccgcaaccactggcgtatctggccctcacagcaacgaaacgaagccgg

SEQ ID NO: 23977 - DNA, 810 bp, Emericella nidulans
atgggaaagtcctcgaaggacaagcgcgatgcgtactaccgtctcgcgaaggaacaaaattggcgcgcccgatccgcttttaaactcatccaaatcgacgaacaatttgatctattcgagcatgagaatccggagaaagtgacccgggtagtcgacctttgcgccgcgcccggtagttggagtcaggtgctcagccgagtactgatcaaaggcgagagctttggccgccggtcttgggtcgagaagagacgcaaggaacaggcggcattggagaacttagacggagatgcaccggcggcgaaccagggcgcagacattacagactcaactgcattgaagccgcggaagaacgtcaaaattgtttctatagacctgcagcctatggcacccctccaaggcattacaaccctccaagccgacatcactcacccctccacgatccctcttctcctacaagccctagatcccgaagcctacgactctacatcttccacgccgcatgcagtccgccagccacatccagtcgaccttgtcatctccgatggtgctcctgacgttactggtcttcacgatttagacatctacatccagtcccaactcctttattccgcactcaacctagccctaggtgtcctccgaccaggaggcaagttcgttgccaagatcttccgtgaccgcgacgtagatctcctctattcccagctccggactgtcttcgagcgtgtaagcgttgcgaagccaaggagtagtcgcgccagttctctggaagcctttatcgtctgcgagggtttcatcccaccagccattcac

SEQ ID NO: 23978 - DNA, 763 bp, Emericella nidulans
ccgaaaatggtacaactggtactctccagaacatacgccccaagagctgaagctcattacaaagctggatctgctcatagtgccttacgcattcacggtatactgggtgaaatacatcgacagggaaatattagcacgcttccctgcaccccctgtggcagacttcccattagtgacggcttctaatatgtattacagacaactcatacgtttctagcatggctacagagctaggcttccaccgaaacgaactcgtccaatttcaaacaatcttcacagtagggaacggcatcgccttactaccattcatgtatcttttcccctgggtgccaatgcactacctcgttccggcattagacctcctctgagggattttcacattgttgaagtaaccaagttatgccggaatttatggcgtattgattcattgtctctatatttgaggtaggcaattgcctcgtggccactgttgaactcgctcgtagacacaaccttaagctgagagtcactgtaggcctcctacttcccaggtgtgcactatgttctcggctcctggtacaagaataatgagatcggtcgtcgaggtggcgcattctacatgggtctcgcactaggctatctcacaacgagccttctatagagcgcgacactcgataatctcgacaggcgttcacggacttcgccggtgtcgatggcttttcatcggaacacagttattacatttaccccttgctgtgatagaatgcttctataccccgttcaa

SEQ ID NO: 23979 - DNA, 759 bp, Emericella nidulans
taaaccactacgcgatttgtctactgatgcgcaggagaaggcgattctggaggacctattgtttgttttcatggggttcgaaggccaatacattcaataccaggctcaatatgaccctactgcagagaaggacagattgacgggaccggctttccaactgccgtctgggctggatcctactctgagggaccttacacggtccatgttgaagatggcaacacattacagtgcgctggaggcgttcgttgaggttcagagtcgtgcagagtacggtgcagtgagccacgccctatgcgctacgattcgaaaattattaaaggactatttgatcctcgttgcccagctcgagacacaacttctcaacaacccgaatttcaccctccatgtactccatcttcataccatgcccaccagccaatgtttagctcaattgtactctttaggtcaggagctgctgagacgaaacggtctcttggatcaggatattgatgagtcgattgacgactttgacgacgttgataacattctcgaacagcttagagaaggaggagatcttattcctggagcaatgtctagcaaaaaaatatgtaaaggaggcaatgtactacgcttactgaccgagcgactggcaactttctccggcgatccgacgacaaaagcgcttgtagaaactcttcttcgtgaatcgagcaggccctacatgacaatgctcaatgaatggcttcatcatggggaatcaaagaccttaccagaattttt

SEQ ID NO: 23980 - DNA, 334 bp, Emericella nidulans
agaagattctatggtgtcctgggggggatagtacgacttgacaaaattcgcttccagaacgctcttctatcgaccacaccgacccctcgggaacattgtcttgtcggcccgctcccacgaccctaatactcccttggcagacttcctctggttcgggccgcggtgggacgtcgcttcgaacacctttcgactcccatacttccaccgcaattctgcaaccgagttcctggcgtctatatacgggaatggcctcggccgttcggacgagttccagcctggcggcgggagcgtagaggtatctcacacgccgcatgggaatttcagcaaagagtat

SEQ ID NO: 23981 - DNA, 702 bp, Emericella nidulans
gcattcgccatattctccagttcgagagttgacgaattggcttgcgccgcaacaccgttctatcgtggccgccgcgacaaatgagcgccaggtttcggttgcgctcagctcaggtaagatagtgtacttcaagctggacgctgacgggtcactcgctgagtatgatgaacgacgccaaatgtctggaactgtaacgtgtctcagtctgggcaaggtaccagaagttcgcgtccgaagctcattcctggctgtcggttgtgacgattcgacagtccgcatcctcagcttggacccggatacgacgttagaaagcaagtctgttcaagcgttgactgctgcaccatccgctctgaacattattgccatggctgactctagctctggcgggaccactttgtatcttcatatcggtcttcactcaggcgtctatcttcgaacggcgcttgacgaagtgaccggcgaattatccgacacacgcactcggttcctgggatctaaagccgtcaaactcttccaggtctcagtgacaggccagacagccgtgcttgccctgagctcgcgtccttggcttggctactccgatacccaaacaaaaggctttatgcttacgccgctggactatgttggactcgagtgggggtggaacttttcgagcgagcagtgcgtcgagggtatggtgggtattcaagggcagaacctaag

SEQ ID NO: 23982 - DNA, 597 bp, Emericella nidulans
atgcgattgatccaaaatcccgggaacagtttattcctaccggtcaactggagaattccatgcttcaactcttggactccgagttcatcgagcatgacgcattcagtttgttctgctcggtaatgcaaagcaccagagtttactatgaacacaatacgcatcgatccatgaatggacaggctgatgcacttccgattgttcttcgatgtgagcacatccataacgatctacttgtggcgacagacctagagctcgccgaccatctacaagcgctcgaaattttgccgcagatctttttaacgtgagtcttactcttatcatctcatggcgaatacgcttgttgactcgccgtttaagtcgatggatgcgtcttctgtttgggcgcgagtttcccttccaagacatgcttgcgatttgggatcttctcttcgccgaagggctccgatccgagctgattgacttcgtgtgtgtggctatgctactccgagtccgttgggagtgtaagtcctcctgcatctcttccagacctaaaaactcatatgaacagtactgagctctgattcatcgagtgctttaactacattgcttcgttatccc

SEQ ID NO: 23983 - DNA, 850 bp, Emericella nidulans
cgacttactcgtggaatcagaagcctatgcgatgatctcacaacgaaagtcaagcgaaaaagtacaattcagtagaccacttcataaggatatggatctaatgttcaccattgcgaaagcctccaatcacccagagagtcagatctacaaggacgcggtgtaccttcaaatggaggcaagaaggcttgcagatctagagaagaaaaaaccggacagcgattatctaatggaagacggccgtctaccgcttccggatggcattcttcataagggcgagttgtggaaggttggggactgggtgcatatccagaaccccaacgatgtgaccaagccaatcgtggcgcaaatataccggacttggcaggactctgagggcgagaaatggatcaatgcctgttggtactatcgcccggagcaaactgtccatcatttcgaaaagcacttctaccctaatgaggtggttaagactggtcaatatcgtgatcatcgaatcaacgagatagttgaccggtgcttcgtgatgttctttacgcggtataaccgtggaaggcccagagactttcctctcgacaaggagatctacgtgtgcgaggctcggtacaatgaggaaaaacataaactcaacaagatcaaaacctgggccagttgccttcccgacgaagtacgggagaaggattatgagatggatttatatgatgttccacgcagaataaagaagatacccagtccgatcaagcatctgctcaaaagtgatgcaaaagagacagacgacctaccaaaaccatcctggggggcagaaaatgcaccgccagtggtaggtgcagttcattgtcgtccgcgcgatgaaaat

SEQ ID NO: 23984 - DNA, 850 bp, Emericella nidulans
agttgaaggcgccgaatacacagaagccgcgcgcggtaaacgttgcgggcatatccttcgagctggggaggcaacatatcgatgcaacacttgcggagtagacgagacctgcgtctttgcagtaggtgctttgattcttccgatcataccaaccatcagtaccagatttatgtgtcaccggggaacagcggctgttgcgactgcgggaatgaagaggcgtggcggatcccccggcactgcgcgattcatacagacaatggggaacgtaaagggaaggagcgcgtacgtgcccgtctcccagaggattgggtgaataatatcaggttgaccatttcccgcgcgcttgattacttcgccgatgtgatatcgtgctctccggaacaacttcgtctgccgaagacagaagaagggattaggcaagatgaagtggcgtctcgtctgcatgccggatggtacggcgagggagatgctccagaagaggaaccggaattcgcactctgcctttggaatgatgagaagcacacgatgcaagacgtcactaaccaagtgagccgagcctgccgggaaaggactagctatgggaaggcgaaagcccacgaaacgaacgatattgggagaagcgttgtcaaatatgggaaagacctcaaaacactgttaggggtgtcgaagatcattgaacaaatcaagatcaccactacaatccgatcctcccgcgacacgttccgtgagcagatgtgcggaactattgttgaatggctggcggatatcgccgggtgtagtatcctcgatgacaaccagatactccgtcagctagtctgtgaggagctcctgggaccctggagacgcggca

SEQ ID NO: 23985 - DNA, 850 bp, Emericella nidulans
cccacggtgtcttcttagcaaattcgaatggtatggacatcaaaatcaataagacactggatggcaagcagtatcttgagtacaatatactgggaggcgtacttgatttctatttcttcaccggttcgactcccaaggaagctagtacccagtacgcgaaagttgttgggcttccagccatgcagagctactggacctttggtgtatgttttcctctccgacgcgcatccgggcatctttatagctgggatgaattttgccgctgaccagacatagtttcatcaatgcaagtacggttatagagatgtttatgaagtggctgaagtggtgtataattatagccaagctggaatcccactagagaccatgtggaccgacattgactatatggagctgagaagagtgttcaccctcgacccggaaagattcccacttggcaaaatgcgggagcttgtggattaccttcatgaccataatcagcattatattgtcatggttgatcccgccgtaagcacgagtggtaagcctccatgaggattacccggaaaccatcattgacatgtgttagacaacccgggctatcggaggggagttgagcaggatatattcctcaagacgcagaacggtagtctgtacaaaggtacacaagccaatctatggcggtcagtgtttattgacataaagagagagctaactcatgtccaggtgctgtgtggcctggtgtaactgtctaccctgattggttccatccagccattcaagactattggaacggggagttcaataagttcttcgatcctgaagccggtatcgacattgacggcctgtggatcgacatgaacgaggccgc

SEQ ID NO: 23986 - DNA, 598 bp, Emericella nidulans
atggatctcaaccgaacagcgctgcaagagttcatcgcccagccggtctcgcgggacatggttgcttacctggcccagcaggctgcactggtcatccggtgcgagtctcatgtgacaacaactgcttccacacaaactgtgcatggccagcatacacctcccagcactccgccgatggatgctgctgatcagcagctcccaaggttgccgtcggtcgaagccttcattacctccctggtcactcgctcccaggtccaggtgccgacgctcatgacaaccctcgtctacctcgctcgtctgcgtgcccgcctacccccagttgcaaagggtatgcgctgcaccgtccaccgcatcttcgttgcctcgctcatcctggcggccaagaacctgaacgactcgagccctaaaaacaagcactgggcccgatacacagtcgttaagggctacgagggctttagcttctccctccgggagatcaacctgatggagcgccagcttttattcctgctggactgggacacccgcgtcactgaagcagacctctttctgcacttggagccattctcgcccccgatccgtcatcgtctccagcaccgaa

SEQ ID NO: 23987 - DNA, 850 bp, Emericella nidulans
tgcatgcttactattgcagttattaccacgtggtcagactacatgattggtgtcttcaagctgaatcaccgtgaggtgtattccattgctgacgccgttgggcttatgtttggacgagttggaaggctgttctttaggggcgcattcgtgctttgtatgctacatatccatccttaatgtatctctgcatagtgtagaccgctgactgattgtcagattggatcttcgttgccggctccggaatgctaggcatatcaatcgggctgaacgccgtctcgacgtacggcgcatgcaccgccattttcgtcgtcgttgcagcaattatcggatttgtctttgaaagtataaggaccctaggcagattgggctttcctgcttggataggattgtcttgtatccttactgccagtacgctccctgtcacatccccttctagccctagatagacctgacatcccattctttaccgtcactatcgccgttggcgtccagaaatgcccctcagaagcaccgcgcacctctggcccctgatccggcccctggcccttcgactacaagctcgtcagcaattcctccttcactgaggcgatcacggctgtctcgtcgctgatcttcgcatactgcggcatgcccgccttattcgcaattgtttctgagatgcgtgatccaatatactacacccgcagtctgatgatcagcctgtctggtgttacagcagtctacatcaccatcggtacggtagtgtactattgttgcgggagctatgtggcatccccggctttgggctctgcaggaccgacggtcaagaaaaccgcgtacggatttgcgttgcctgggttgatagtgacga

SEQ ID NO: 23988 - DNA, 664 bp, Emericella nidulans
tgcttatcgctccccaggtaccaggctaagctcgcaaagcagcccattctcacagccagtgttaccagcgctgtatgtccttataatgacctgacagccgccaaccttactttctctttcgttttcaatgctgctggaaactgtagctaaccccttgcccctttaaggtgcttttcggcgctggtgatgctttagcgcagcaggcagttgagcgcagaggcctcgagaagcatgatttcgccagaacagggcgtatgactttttacggtggtggtgagttaatactgtgttattacatcatgtcgatctgttcctgttcgctcgtcatattacatgtttttagctaacgccgatcaagctgtctttggaccggtcgccacgctttggtttcggtttttgcagcgcaacatcgctttaaataatccgaaagcaacaattattgctcgtgtagcggctgatcaatgtctctttgcgccggctcatcttaccttcttcctgtcgtcaatggccatcatggaaggcacagatcctgtggcgaagtggaagcagagtttcgtcccaggctacaaagctaatctcgcggtttggcctttagtccagggcattaactttgcttttgtgcccctggagctgcgtgtgctcgtagtcaatgttataagcttgg

SEQ ID NO: 23989 - DNA, 561 bp, Emericella nidulans
tgcccgagtctcgggtgctgatcatcatgactgggggtactatctgtatgcgaccgtcgccagcgggcttagtaccagcacgagacttccagaaacaatgcctggctcgtgtgccgacattcaacgatgggtcgaactctactatgatggatgtggtgaccaacgccgtgggggagatcaaggctcatgtgagtctgcggactccgctgacagcatacggccggcgagtgaggtacactgtctttgaattcgatgagctgctcgacagcagctccatcgacgctaagggctggtctgagattgcgcggaccattgagcgaaactacacactgttcgacggcttcgtcgtgctccatgggacggacagtctggcgtatacctgctcggcgctgagcttcatgctgcagaacctcggaaagccggtgatcctcacaggagcccaggctccgatgctggagctacagaacgacgctacagataacctactcgggtcactggttgtggctggccacttcatgattccagaggtctgtctgtacttcaacaacaagctgtttcgtg

SEQ ID NO: 23990 - DNA, 850 bp, Emericella nidulans
agtttggcttccggtatcccggcagcccgggtgatacgtccgctgctcgcgtaaatcggttcattgatgcacagggtaggggagaagaaggccactggaacattgcccgaaaggttgcagcggagggcatcgttctggtcaagaacgtcggtggcgtcttgcctctgtctcgttcacctagggccaacgctgagaggccttatcgggttggcgtatacggggacgatggcggtcccgccgctggtcccaacatctgcaccgaccgagggtgcaactcagggactctagcaatgggctggggtagtggcaccgtcgaattcccatacctaatcagcccgatcgatgccttgcagggcgcatggcaaagcgatgttcagatgacgccgtatttacgaaatgcggtgatgcctgcagacacgtcggacaaggatctctgcctcgtcttcgtcaacgctgactccggcgaaggctatatctccgctggcggtatccacggggaccgcaacaacttgttcctccaaaagggtggtgatactcttgtccataccgtcgccaccaactgcggcggtccaaccgtcgtggtcgtgcacgccgttggtcccgtcattgttgaaccctggattgacctccccggagtccaagccgtactcttcgcccaccttcctggagaagaaagcggcaacgcccttctggacgtcctattcggtgatgttgacgccagcggccgcctcccctataccgtcggcaaaagccttgaagactacggtcccggcgcgcaagttctgtacgaacccaacgcccccgtcccgcaggtcgacttctccgacgctctttacatcgaccaccgtta

SEQ ID NO: 23991 - DNA, 500 bp, Emericella nidulans
tccagtacggaaagtgcaggagccagcatctatattcaaagctgaaagcgctggcgcagcttacgtcgcccacccggaagtctacggcgatgaacccagcagagctatcagcgagtttgttgtatcaagcgagactacaagcagcgaaagaacggatggaaaggatagaggagcttcgagctaagggtattgtcattgagacagccgctgagcgcgctgcatttgaagacgaggtagagaatcttgttgagaaagcaagacaggaaggtgaggcaattgcaaaacaggaacgagcggcagctaaaaaggcgaacggtgaggatgaggacgatgaggaggatattgattttgaactatctggatcggaggatgagggtgcgggtgacgcagacccggagggagaagggaacgaagaagacgaagacgaagaagatgaggaggacgaggaggacgaggatgaagaggatgaagaggatgaagatacggaggataaggccgag

SEQ ID NO: 23992 - DNA, 500 bp, Emericella nidulans
ccttaagaaacaaaatgtctttcccccacgttccgccgtccggcatctgggttccagccgtgacccccttcgatcacacagccgataccatcgacatcgaatctttcaagaaatactgcgcctacttatcatcccatctaactggcctcgtatactcggcacaaacgccgaagcattcctgctcacccgcgacaaacgattcgcggccataaaggccgcccgcgaagccgtcggccccgggtatcccattatggcaggcgttggtgcacactcaacaaagcaagtccttgaacttgcgaatgacgcttcagaagcaggggcgaattacctcttggtcctaccgccagcatattttggcaagcgacaactcctgcagtggttaagaggttctttgcggatattgcggcaaaggcactgcacccagttgtggtctacaactttccaggtgccacaaatggggtggatattgactcagaaacaattgctgatattgtgagaac

SEQ ID NO: 23993 - DNA, 687 bp, Emericella nidulans
gaggcatattggtgccacgggctcggccctctgtcaaggctggggtgaaatccaagaaagataccagtgcttatgtacggggtctggagaaaaagacaccgcaggaacaaatggatggctgcgatttttccggatggatgaagaagcggtcctcaaacctgatggcaacttggaagccccggctgtttgtgttgcgtggccgtcgcctttcatactactactcggaaagcgatattgaggagcgaggcttaatcgatatcacagctcatcgagttctccgagcagacaatgacccaatcgttgcgttacatgccacgatcacgggcgcaacagtctcccctacatcacctgcaggtagcgttccggccggtaatggctcggtttcagagaacggctcgacatcggaatccaggcgcggatcgcgctcggacaaggagggcccgttcttcttcaagcttatcccgccaaagacaactcgtacggtgcaatttacgaaacccgcggtccattacttccaggttgatagtgttcaagaaggtcgcaagtggatggccgcgttgatgaaggcgacgatcgagcgagacatccatcttccggttgagacaacaaacaagcagagaactatcagtcttaaggaggcccagatgagtaaccagcgacctccggccttgatgcccgaaggtcaga

SEQ ID NO: 23994 - DNA, 676 bp, Emericella nidulans
ggcgccctgcaaagtctgacagtgaaagagctgtgcagaaagccttggttgagtttctgcaagtgcctgctgaggggattaatatggatgattctatttacgacttgggtgtgagctcgttgaatctgatattgctgaggtctacgcttcagaggatgctagaccccaagatcgatatcccattgtctatcatattgaataagtgagatcccacattcccttcaaagaccaaatacaaactgttcgttaatggctccgcagtccgacccctggagcaatcgcaaggtcgattgactcatcccgctctagtttagctggatacaatgcgatcgtgccactgcagcaacacagacacggtggtacaccgttgttctgcatccaccctggaagcggcgaagttctggtattcgttgcccttgctgcacacttcccgacgcggcccgtgtacgcgctgcgtactcgaggttatggctcaaacgagcaattattcggctccatcgaggaaactgtggagacgtatgcaacacagattcgccaagttcagccgcatggtccgtatgcaatcgcagggtactccttgggatccacactggcctttgaagtagccaaagtgctggaagcgcagggagaggaggtaaatttctggcgagcattgactatccgccgcatattgccc

SEQ ID NO: 23995 - DNA, 850 bp, Emericella nidulans
atcacacccgatctcagtcgagatgggggcagtttcccataaaagtttcaaggattttgcagatggtgcatcttctgaggtgcttgattgctccaagggacgggcaacgttatcggacagggagcccattcttcatcaagattttgtcttactcgtcctgtgtaattctcgcgaactttcgcagtcacaggctattgctgtggcgcacatggtcagcccgctcactccacgattgccgtcaccatccatcccggggatatattgcgtcaaaatgtctacgtggaggattttgtcggcgaaattatcttcatggcggatcgatcagggtcgatggagtccaagatctcctctcttatcaatgtcatgaatatatttatacggagtctccctgaagcatgttcgttcaacatcgcctcctttggttccgaagtcacgtggttatggccttgttcgaagagatacagccaagaaaacttggacgttgcctcgaaacacgtggattcattccgggcaaactacggtggtacgaatatttattgcgcactggagagtgttctggatcatttcaacaagcaggatgacgtaccaaccaatgtgattttgttgactgacggcgaggtttgggatgtcgacaatgtgatacaactagtgcgcagaacggtctcaatgaatggatcgaatattagatttttctccttaggaattggagatcgagtctcacatcgcctggtcgagggcatagggctgcaaggagccggatatgcagaggttgtgccagagaccacgatgggttcgtggcaggaaagagtgatacaaatgttaaggcggcgttgtcaccatcagcctcagt

SEQ ID NO: 23996 - DNA, 500 bp, Emericella nidulans
aatccgaccattgagcgtgtgcaagcgtccacgtccattcatacggccaaccagaaagcaagaggaaacaacggcctggtgaaagtaggctcaaaacagctcttctaccaatttcagggtcagaaggacggcactcctgttattttcatccacggcctcggcggctcatcctcctactttacgccgctgcttgataaactctcagctacgcacgccctccaccttacagacctcgaaggtcacggcctctcgcctacgtccgcactcagcagtcttacaatctcatcgtttgccggcgacatccgcgatgtatacattcttgccgcaggatcaaacccaaaaccagcaaccgtgatcgctcattcaatgggctgcctcatcgcgctcaaacttgctctcgaaaacctcaacctcgtcagcaacctcgttctcctcggcccgcctccctctcctctccctgaagccggaagcaacggaagcttcgctcgcgctgaaacagt

SEQ ID NO: 23997 - DNA, 600 bp, Emericella nidulans
cccggttcacacacttctcctgccagacgcagcagataaaacaagcttcacaatgggaagaactggccccggagtttgacagtataaatgaaagttcagctgcaggtacctggtggcttgacgtccacgatgccacagaaacagacgtggccgctgtggctcgcaggttctctatccaccctctaacggtcgaggacatcgccctgcaggaaccgcgccagaagattgagacattcccgggctactatctcatctcgcttcggactttgacatcgccgcttgacgatgataatgcagagccaaagcagcaagagcatcttcctccgacgccttctggtatgacgatgctctacatcttggtgttcagtgagggcacagtgaccttttccgccggtggatgcgagcacgcatctcgcgttcgaagtcgaatctcgagactccatgatccgtccgtgctctcaagtgactggatctgctacgcgatgttgtacgttttccgcactccatctggccatctttcccaacctgcacactccaacttcaatctcctttgaattatgtatatactgacactctacagtgacgacgtaatcgacagct

SEQ ID NO: 23998 - DNA, 850 bp, Emericella nidulans
ccaacaacctcgtggactacgcgcagaagtaccgcggtatgcagtctgtggttctgcatgagctggaagcattcgccgatatcacgctgtccacggagaagagtggcacctggactattccgccttactttatcgacagcgtcgcgcatctcgctgggttcgtgatgaatgtgtccgacgctattgataccaaggccaactactgcgtgactccgggatggaagtctctgcgattcgccaaaccgcttgtagcaggtgccaaataccggtcatacgtcaagatgattcagaccgaagaggatcctactgtttacctcggcgatgtatacattatgcaagacggggcgatcattgggatgtgtggtggaatccagttccggcggtatccacgcatcctgcttaataggttcttcacggcaccggaagaggcaggagccatttcgcatgccgccgcttcgagtacgccagcccccagaaccaaacccgagcctgttccagtcgctaccccggctactgcagctgcaccagttgcccagtctcctgcagcaccggcgtcagttactccagcccctgctccggcccctgctcctggccctacacctgcagctgcaccagccgccgctggtgagagcgacagcgtagcagccaaagctcttgtgcttattgccaaagaagctgcgctggagctttcggatctcacggacgatgcctcgtttgccaacctcggggttgacagcttgatgagcctggtgatagcagagaagtttcgggaggagctgggggtcacggtgactggtagtttgttcctggagtatcctaccatcggcgatctgcgaagctggctattaga

SEQ ID NO: 23999 - DNA, 850 bp, Emericella nidulans
cagactcggcgcgtcgaatccttaggacactcagtagaagtggacaaatgcacgccacgcagtttcactatgccctcgtcttgtacggctatgtcaaagatcgcaatcgtgacatggtacacgtcatcttccgtgagatccaggagcgattcggacaccatgagccaggcacgcagcttcttttcctgaggtctcaactgcaacgggatctgcatctcattgcccaggctcaggcggaagaagctggaatggactcaacagaagttcatttcgtgcatgcagagaagctcctggccgaaatcatcgaggatttcgaccaagcgagattagtgaaaacagccccaatacccggtgttagcaggttgccagttgctgaagctttcccgtcgagctattacgagcctcttatgaccgagtacgcaaagaagggtaatcttgacagggttaagcagctgttcagcgagtatgcaaaagcccggaggcagtcgattgaggatgctcaagctagagctccactcagtctccttacaagtttaatgctggcttatttgaaggcagaccaactcgaaaaagtggatgaatgctggaaattagctcatcgccgagcgcggagcctggcaagcccataagcgagcgattatggaaaccgcaagaacttccggcgactaccaaacgaccacccctactaccagcgtaccgtttcgaactttctcgacccttgtctttatatatgagatcacttgcttatcggaaaagatttaaagaaatagacgaagtagtagcacaagttgagaaggatgggttctgcctgtcgactttcaattggtctacgtacgtgcagatgtttgcg

SEQ ID NO: 24000 - DNA, 609 bp, Emericella nidulans
gcctctaacctcccattcacctgcgcccttgtcactggcggcggcggcggcatcggcaaagcgttctcagcctatttgatctccaaaggcgtcaaagtcatcatcgctggccggacagaatcaaatctccagtcgacagcacgcgaaatcggggcagcagcatactatgtgctggatacaggcaggactgatacaatcccccaatttatctcgagcgtaacaagggagcatcccgagctggattgccttatgaacaatgcaggcgtgcaacggccgttggaagtattcaagaccccaaccgaggagtatctccaaaaagcagaccaggaaatcgatatcaatatccggggcccaatgcatctaaccctcgggctactcgagcatttcaagacgaagccgtcggcggctattatcaacgtttcctcggtgctaggtttcatacccttctcggtgattaacccggtttataatgggaccaaggcgtggctacatttttggacggtgactctgaggacacagattgagtgggcggggctaaaggatcggatcaaagtgattgagattgcgccgccgagcgtggagacggacctgcatcgtaaagggagaatc

SEQ ID NO: 24001 - DNA, 850 bp, Emericella nidulans
gcatttgagtggaagcttggttgcatatatcggactggccttattgaacagcgtcagcgccgcgctagagaggatgcgtttcacctcaaactccagaagctcaaggaatctgaccaaaggcgagcttcttcgaggttgcgtactcgatccagccaccgaacactgcgcagcgagcgggtcagttcagactctcgcaggagcaagagcgcggatccaaagccgagaaacgatagagcagaggagaaagaggaaaagcgcgggcgtgcacatagattccgctacgataccgaaggagcgtcgtctttttccaacgaagcgaaggtatcgtcggaaagtgcttggtattggctccagcactataatgcgcgcagctggaaagccaagatcgatgcggctctacagtttcaaaactctacaatcagagaggttcgaaatctttttgagggtgctgacgatcctccagaagatgtgcaagaaaccgagacagtgctggctattccaaatagacctgctctcatggcagctctaattagcgacataaatctgaccatcgataaacccacatttccttcggaaaactaccctcttttcctccataatattggcaaaggcatgccgatgtctacgaagtatgcgttactgattccgatgagcattcaactggacatgggtgaggctcgcgtcaacctgagagactaccccttggatttgctgcacataccagggctacggcctggacaatcacctaggcttcctagctggtcactccgaaccaattttggaattgcagaggaatatcgtgattacaagtcgtccagaaaagtcaatgtggaacttgacccgacaccta

SEQ ID NO: 24002 - DNA, 850 bp, Emericella nidulans
ccccggtcctcaagcgacaaaccatcgcgaaccggaaaaaaaggcgagaggggcgcagggaagatgcagtgcagacggcgagtaagctacttgctgtgcagttgcaacgcacagccgagcaagaatcagctaagcgcaggagccggaggcaggagaacgaggaagacgttccagataatccggtgtacgttgaggagacgttcatgacagacaagcaaaaacaacagtcgcggactttcaagaagaaagatgcctatcatttaccggatatgcaggtctcgcttcaagaaatgggagccccgaatgatccgcgtattatgtcgcaagaagagctagaagagtatgcgcgccagtttcaccagggtgaagacatcaatctttacgatttctccaaaatcgactttgatagtcctttctttctcagcttacccgctactgatcgctacaacatcttgaatgccgcgagacttcgcagtcggctgcgtatgggatactccaaagaacagctggatacgatgttccctgaccggatggctttctccaaattccagatcgagcgtgtgaaggaacgaaatgatctgacccagcgtctcatgaacattaacggtatgaacggagatgaggctttttataaatccggtcagaggattgcaggtgagcgtggcaaggaatacgtgctcgtacaagacaactctgtcgaaggcggctgggtattaggtgttgtaggtaacaaggaaggtggtcgggaagaaaagcctatcgacgttgaccgatattttcatcatgaaatcacaccggagcccgaggcttcggaggatgaagggggcttcgaggatgtgcccatcgaggg

SEQ ID NO: 24003 - DNA, 376 bp, Emericella nidulans
ccgcattctcgctgtaatggtcccgccgccccctctctccagagatttagcagatgcaatcgccttgctctgatggatcccagtccgacaatgccggatggcgaaagtcgactgcgcgtcctgcgtgcctgtgaccgttgctctcagtccaagcagcgctgtgatggccgacgtccatggtacgtcccatcccatctcagtcccaaatgtccccgtggctaatagcgcccagccagcgatgcacgggttggtggcttttgaccccgcactggcttgaaatctggcgtctaggcgactaacttgaattcgccagagagaaacacctcgtgtcattatgagaagctcgtccgaaaacgaggtcggcgccgtcgaacga

SEQ ID NO: 24004 - DNA, 473 bp, Emericella nidulans
tgtctacgattactgccctagggacagagacaggccttcctttctcaatagagaaaacagagatacaacacttctctagaaagcagcagcagcatctccccacagtcactctacctggtataggggggattacaccatccctatatacacgttggttaggagttcttctggatacaaagcttacttttaaagcccacattaatttggtctttagccacgggaaacgactcgcccagcacctaaagagacttagcaatacccagcgcggctgcccagtggccttcatgcgggcagcagttatacagtatgttcttccaacagctctgtacggggcagaagtcttctatacaggcaaacaacaaaaaggggtagttaactccctgctttctctcttccgcacagcagccctggctattatcccagcctacaagaccacccctactgcagcactcctccgcgaagcagacctacca

SEQ ID NO: 24005 - DNA, 380 bp, Emericella nidulans
cggggctggaacggggggggtgcactgaggttgtcctggaggcactcagagagcaagatgcacctggcccgcactatcgttgtgccagctacgacttcaccgacatttcgtcaggtttcttcgaagctgccagtgagagattcaaagaagcaggtgatgtgatggaattcaaaaagctgaatattgaagaagacccgtcggggcagggattcgagagcaacagctatgatcttgtgattgccagtcaggtcttgcatgcaactaaaaatatcaatcgcacactggcaaatgtcagaaagctgctgcgtccgggaggaaagctcctcctggtggaaatcactcgggatgagatcgacctgcagctgatatttggaacttta

SEQ ID NO: 24006 - DNA, 850 bp, Emericella nidulans
cccatcatcctccgtaagcccgaccaaccaagctgcccaattgagcaggtccagtaactaacagcaacagcattcaaactcaccgaccaagaagtaacagacttctacgcccgctcaaaaagctcgcccatcccaggcgtacccagcttcgaccccaaacgagtcgtcgacgggcagcgcaaaatcactgtctacaagcaattgcctacgacgagcgcaggacggaaatttgagctccgtaacaaggtcgttggggtctacgacaaggggaaggcctctgtcgtggagacagagcagacaattgtcgataaggagagcggagaggtctatgccagtgttgttggcagcgccttttatgttggacaagggggctggggcgggccgaagggtgagcacccactccaccaggtgaaagtttccatttagagagaaggtgactgacgattattgccatttgtgtcgcaggacctgcaacccccaactatccccctcccaaggaccgcagaccagatgctgtgcgcgagatccagacaaccactgaaacagcccagctgtaccggtaagtcacacctgccttctcaccctggaccatcaaccgatcactaaccatgttcatctagtctgaatggcgactacaacccgctccacgcaacccctgagcccggccagaagatgggcttcggcggcatcattatccacggcctgtacagctggaacgccgctgcgcatattgtactcgaggcgtttggtaacagcgatccagccaactttagagagttccaggcgcggtttgcgtcaccggttaagcccggatgataagctcattactgaactgtggcgaactgggaag

SEQ ID NO: 24007 - DNA, 637 bp, Emericella nidulans
gctgctgtcaatcgagctctctggcaggatgaagctggcattgcaggtgttatccgggaaaatgcggtccctacgactgttgccgacaacgaaatcctggtcaaggtgaacgcatgggcaatgaacccggcggatgctatacttcaggacgcggctcttcccgccgttaagtatccactcatcctggggaagacgttgctggcactgttgagaaagttggctccgaagccacgggcaagctcaaagttggcgatcgcgtcttaggccttgcccttggagctgctgtgttcaagaccgagcaaggcgccttccaggagtacgtgattctggactataccctggcatgcaaaatcccagactccctctctttcgccgaggcgtctgttttccccctatgcatcgccactgccgcatacggcctattctcgaaggattatcttggcctgccgttgcctaagatcaaccccaccagtactggaaagtccattcttatctggggaggaagctctggagtcggtagcaatgcgattcagctgagcaaggcggccggtttcgaggtgatcaccacatgctctgcacataacttcgattatgtgaagcgtctcggcgcggacaaggtcttcgattataaagaccc

SEQ ID NO: 24008 - DNA, 567 bp, Emericella nidulans
agggggaagccatgccgccccgggcaggtgacaatacctaaacgggggtcgaaaaaacactcaagaccagtgtctaggcccttgggcagcctcaaggtctacaagaacctggtgggcagtgctgctgcaggggctctggcagggttcaaggcccagccgcacaatgttgtcacgcgaatttatcttgccactggtcaggatcccgcacagaatgtgcatagcagcaacactctgaccgtgatgaaaaagtgagtacactgcctctaaagatattctgatagatgttgcggcgctaactcccgaacagtgtgaatggtgatttgcaaatctctgttttcatgccttccattgaagtcggcaccgttgggggagggacagtcctgggccctcaaaaggcaatgctgcacatgatgggcgtccaaggggccgaccccgaacagccaggtagaaacgcacaggagctggccctgctggtggcggctggcgtgctggctggagagctcagtctttgctctgctctgtcagcgggctcgttggtgaaaagccacttgacccataatcggaaga

SEQ ID NO: 24009 - DNA, 850 bp, Emericella nidulans
cgagcggtataaccgcgcacacgagtacatggatgtcctatataaactgtgggaggggagtttccgggatgatgccgtggtgaaggatcgcgagtcgggcgtgtacattgcccccgacgcagtgcgacagatccaccacgtgggcaagtacttcaaagtacccggaccgcacttttgcgagccctcaccacagcgcacaccgtttctgttccaggcgggtgtgagcgaggccgggaacgggtttggtggcaagcacggggaggcgatcttcgtcgcgggccagacgcccgagggtgtgcgaagcacggtcgagagtatccgccgggttgcggcgagcgaggggcgggatccaaatcatatcaaggtcatcgtaggcatcacgttgatagttgctgccacggacgaggaggcatatgcgaagcgcgacgagtacctcaagtatgccgatcacgagggcgtccttgccctatttggcgggtggacggggatagacctgtccaagtacgaggatgacgcggacttccggtttgcagacgagaccaaagtcgcaagtatcgtgaagcggtgggcgtcaacggatcccggcaccgataatctgccctggacgaagcgccggatcgtcgaattcctcagcgtgggtggcatccagacaaagattatcggcagcggcaagaccgttgcagacgagttggaacgatgggtggaaatttccggagtggacgggttcaacctggcgcatatcacgaacccgggcagctttgaggatatcatcgagtttctcttgccggagctgcgcactcgagggctcttcagggagacagttgctaaggagggggccacggcgagagag

SEQ ID NO: 24010 - DNA, 500 bp, Emericella nidulans
tctgccaccgggggaagaatctttacaatgggctggctttaatggacggtgcaataagtatgcggatacctgttattcattctggaatgcagcaacgctggatgtaagagcctatgaggatctaccggatgaagctttggctaatactcagctatagatgctaggcagactgtcgatggttgatgcagagcggaacaggcgatacttgctgcagaagacgcagcatcttgttggcggttttgggaaaagcgtgggagagctaccaggtaaatcaataagtcatcgttctacgtctttcgtgctgactgacattccggacagacctactacactcttattttggaatggtctcactcgctttccaaggtgaacaggggcttgacagtgtcgattctgcgctttgtgctacccaccggacagtacggcgtttacacagtctgccttggtggcaggagaacgaatgacctaatcagtctgcctctcactcctttctttaagct

SEQ ID NO: 24011 - DNA, 584 bp, Emericella nidulans
gcatttatttctgtgggaattctctcggtctccaacccaaagctacggcaaagtacatggaagcacacttagatacatgggcatcgatcggtgtcaacggacatttcactaagatcgaggattctccgcttgacccatggtgggtgatggctgagcaagcggcaggctcgatgagcaagcttgtcggagcagcgccggaggaggttattgcaatgggcacgctcacatcaaacttgcatctactccttgcaagcttctacaaacccactgccactaagcacaagatcctgctagattggaaagcattccctagtgatcacgttagtttgccccaccggacctttagatctctcaacacacattccgccatcataaactaacatgaacttccagtacgctatcgagtctcatattgcttggcacgatggattagacccaaagaagtccatggttctcattggcccagatgagggcgagtatgagatccccacgcagaaaatcctctcaatcatcgacgagcacgccgatgaagctgccctaattcttcttccggggatccagtactacactggacagtattttat

SEQ ID NO: 24012 - DNA, 850 bp, Emericella nidulans
attgctaatgattactaggtgtcattcattccattcattatcacaggctcatccttgacgaagctcacagtatcaaggtatatctcgttcatcattactggtttcatgatgctgactctagcagcaacgtaccaccggggttgcgcgcgcctgtttcgcacttaagtccaactacaaatggtgtctttctggcactcctgttcaaaatcggattggggaattcttctcattattgcggttcttagaggtccggccatttgcctgctatttttgtaagcaatgcaaatgccaggagcttcactggtcacaggatacagagaagcggtgcacgaaatgcaagcataggtactgtacagtccttctactcagtctcacgtcaaatccccatattgaccgttctatagtggattcagtcatgtatcagttttcaaccaggaaatattgaacccgagtaagcacacatacggcaaattctcgttttggcttgattaacacatgcagtcacggaacgagacgacccagaggcgcggaaggcagcattggcaaagctgcggctaatcacggataggatcatgctccgacgagtcaaacgagaccacacagcctcaatggaactacctcccaagcggtgagtatgtccggagcatagaggatggattgatttctaacccaagtcagtgtcatcatacataacgaattctttggagagatcgaacgcgacttttctaccagcatcatgaccaactctactaggcagttcgacacgtacgtgagccaaagtgtaccgatgaacactcacgctaatatctttggactcattatgcaagagcggcaagttgcgaaccatccc

SEQ ID NO: 24013 - DNA, 802 bp, Emericella nidulans
cagccagaagaggattcaagaccgcggaaacggttgattcgaggaccaaaaacccgggtgtccccgataccgtcaagccccactcagaacgaaacacctccaaagaagagcttcggtcggctggtccaagggcgcaggcgcccttcacctacacgatcagagtctcctgaggctcctcttgtgacctccgatgattctgactctgcatttgatgcgcaagatggcgcggatctggagacgaaagttcttggtttctttaacggatgcaccgcaccggctcttgcggacctagccgcgattactgaggaccttgctgagtacataattgcaaggcggccattctcatcccttgatgaagtccgcgtgattcctgctccggaaaccgaacaaactgcaaccaagactggaaggaaacgcaaggcacccaagccggtcggagaccgtatcgttgacaaatgtcttgatatgtgggtaggctacgaagccgtggattcgttagtcgctcgatgcgaggcgctaggaaagccggttgcgaccgagatgaagaaatggggagttgacatatttggcaagcgagagggtgaactggacctagtttcgatggagccttcaggatctcacgactctggtataggaactcccgctagtcaaccatctgatgaagatagtgatggtcctgggtcaaggtctcgaaaagctcggttcatttcgcagcctggaataatggctgaggatctcaaaatgaagaattatcagattgttggtattaactggctgtctttgctttttgagaatgaactaa

SEQ ID NO: 24014 - DNA, 683 bp, Emericella nidulans
gtttaatttatatgaccctcatccaattcatcagggggtttctggattcaaaggcaattctgcgctggagagtattctggcggccaaaatcctaacgtggttaaggggcaaaaaatgctcctaaccaatggagcccgttatggtcaacgagctggaaacaagggagcatgtaaccgaatgccattttgaagtcagctacaaagctggataccgatctccggcaatgggacgtcaccctcctcctcgatgaaggcgccgcatctgcccttgacacgcacatgcagttctacctgtggaaggggctcatccagaaaacaacgctcggcgagcttggaaaatccacgcttgaaactgtccagcaatatgcagacataatggcaggcaagcagcaagacccatacggccgtactgcgtttgggaactggacactctctgatcctcagccggagtcggtggcatatgtgggcaaggtcacgcccgttttgcacttcacgatgggcggtgtcctctttaacgaacagggccaggtgcttgaccagacctggactcccatccggggcctctgggctgcgggcgaggtcacaggtggtctgcatgggcagaaccggctgggtggttcctcgctgctagagtgtgcggtttttggccgcattgttggggatcaggtagctgcgttttataac

SEQ ID NO: 24015 - DNA, 500 bp, Emericella nidulans
aacaccagcggcccgcatcctcaggcacataccaggctcctccacccccgccgcaacaccagcccatgatctcgcccgtgacaccggcctggcagcaccaccactacttccctccttcctcaaacacaccctaccagcagaaccacgaccgatatatctgccgcacctgcgacaaggcgttctcgcggccctcgagtctgcgcatccacagccatagccacaccggcgagaagcatttcggtgcacacatgccggatgcggaaagcctttagtgtacggagcaacatgaagcgccatgagccggcgtgccataccgggagggctgtcgcgatggtgtaacaattgtgttactccactcctcgcatcataacaaaaaaaaaaggaaaaaaaatctacactaatcgcctgcttaagcttgttatctgtttcatgcatgataccctctcatgttctgttcatgttcatcgcaccggtgtcacggggatcaaggaattggaatt

SEQ ID NO: 24016 - DNA, 500 bp, Emericella nidulans
ggaaggtggagcgaaagttcactaagtacgttgctcttgacctgcatcaagtactcccaaaaatcaactagtaaatcttgcctggggaataacagccccgcgtcatgggcaaggcacctctgtgtataccagtcgcatctacctcatcatgatttcgtcctatttttgccgttgagccgactctaatcgcaatattcagcaaatctgccagcgagtactacgacccttgtcaggatttcgcggaccggagtcttagatgcatgaagcgcaaccccgatgatagagatatgtgtcacgattacttccagtatgtatttccctacgatgttcaacccctatcattacgtcgagctatctgcttttccttggctatatggtcgtaagccatggaactgcaaaggtcaaggtctacactcggtctagttcatttgatcctactgacaccgatattcagagcatatcgcgattgtaaaaagcagtgggtgagtaccaatgccgca

SEQ ID NO: 24017 - DNA, 660 bp, Emericella nidulans
cgtgccatccgcaacttcctcaaggtccgcaccagctatgatgtccttcctttaagtttccggctcatcgtcttcgacaccgccttgacagtgaaagagagcctaaatatcctcactcagaatggtacgtctggcagatggttcaatcatttctcaatcagtaatgcacggccgatactgacgcgcgatcgataggaattgtttcggcgccgctatgggactcgaagtcgtccaccttcgccggccttctcactacgtccgattacatcaatgtcattcaatattacttccaaaatcccgccgccttagataaaatagaccaactccgcttggatagccttcgaggtgcgtgatgtgaaaccgtttcactgttatacgttcggaactgacaagtgatatagaggtggaacgggcattggatgtcgccccgccagagactatctccattgacccagagcgaccgttgtacgaggcgtgccggcgtatgctcgagtcccgagctcgaaggattccgcttgttaccaacgatagccagacagatcgacatctcgtcctcagcgtcataacccagtatcgtattctaaaatacgtggccgtgaacgttagcgatacacaaaaattgcggaagccgctcggggagataagactgggtgccttgaa

SEQ ID NO: 24018 - DNA, 594 bp, Emericella nidulans
  unsure (1)..(594): unsure at all n locations
aagttgaagaagtttcaggagaaacaggcaaaggctgcagccaaaactacgacccccaaagccgaaaagaaagcgcccaaggtcgaaaaggacaagacagcagacgcgtatgatcctaaagttattgaggctggacgataccaatggtgggaggaacgcggccttttcaagcctgagttcggccccgatggcaaggtcaagcctgagggctacttcgttattccaatcccccctcccaacgttaccggatcgctgcacatgggtcacgctctcacaaatgcccttcaagacactatgattcgctggcagcggatgaagggcaagactaccctgtggctgcccggaatggatcacgccggtatctccactcagagcgtggttgagaaaatgctttggaagaaggaaaagaagacacgccatgacctgngtcgcaaagcgtttctggaaagagtctgggattggaaacacgagtaccatggcaatatcngtaatgctttgcgaagagtcngaggctcttttgattggactcgcgaggcttttacgatggatgacaaatctttcgcagccgtactgaaactttgtccgtcttcatga

SEQ ID NO: 24019 - DNA, 787 bp, Emericella nidulans
acaatcagaatgttgacgttctatctagcagctagcattattgtgaccgtcttgttcatgcggcgactttgctcacctatcgcaaagctcccaggaccatggtatgccacgttcaccagctgggtactcaaataccatgaattcacctcaaacagacggctttttatccacgatctgcacaaaaaatatggttctactgttcgaatagcaccaaatgaaatttcgtttgcgagtttggaggcgatcaaagagatttatgggtccggtgggagcggttacgacaagacggagttgtatgatttgttccgtcaattcgggatcaagtatgacggagcggagaactgatttggtgtcgagagttgctgacccgtctaggacgatgttttcgactcttgacaagcacagtgtaagttttgcctgtcggacccgtcccagcttgatttgctaaccaccaacatccagcacagccagcgcaaacgcgaattggcggatcgttacgccatgagcaatatcctgcgcgaggagcatgtttccgccatcgtggaccgtgcgagggcggtcgtatccagatgtgctgcgtctgcagagagcgtggatgtctatgtatgtttcccaccgcagagctgacgcgtctttgttgattgcgcctgcaggtatggctccattgctacgcactcgacggggtcacgaacttcatgttcagtcctgggggcctgcactcgctcgactcagagcatgacttcaaaattatggaggagctcacttatcatcagagtttgcagagttc

SEQ ID NO: 24020 - DNA, 500 bp, Emericella nidulans
tggcaacggggctcatcaggaaacagtggcgccgtcggacttacgccagtacgcgaaagtaagactgtctctttgcccggtgggttgcagcatatgttgacagtgcagcatgtgtagctggccaaccgttcgcaaatactctatgcgcctttgatcttcgtcacaaagctgtctattttccttctgtacctgcgcgtgtttgcgtcagcccggcgaggcatgacatatctatccattcacttgctgatttggttcaatctggccttctacttggccaactttttcttgaagattttccaatgtattccgcgtgctaaaatctgggactcgaatacttcaggtcactgtatcaatattaacataccgattctcgtgacagctgctatcaatgtggtgtctgatctcctgatgctatgtttacccattatttgcgtttggcgactgcaaatgtcgattaggaggaagttaggtatttctgctatatttgctgctggtatctt

SEQ ID NO: 24021 - DNA, 670 bp, Emericella nidulans
cgtggtatccaaaaaaatatgcgatcatcttatgccaacccatcctcttttcgggttttagatgtcacagcgcgatccctctataaccattaactgtacggcttagacgaactctatatgggactatgctatgtcccctttggtctcggcgcgaccgtagcatcaatagcaacaggaaagcttctagactccaacaccccggctggcaaaacaactttacgttcctcttcaagaaactcgcgcccggaatctccacccacttccccattgaattcgcccgtttacaggtcgcgctcccgctgctgacgctaggcgcattcacaatcatcgcgttcggatggtgtctcaattacggcggacatctcgccgcgccaacaaccatcctctttctcatgggtctcacgttgacaggagcattcaacacggtctcaactctgctggtagatttctatcccagcaatgcatctgctgctactgcatcaaataaccttgtgcgttgtttacttggtgctggggctacagcgcttattgatccaatgttagaggctatggggcggggatggtgttttaccttcattgcacttgtgatgttgtgtacaatgccgttactttgcgtggtgatgcggtggggtccgcggtggaggaatgagaggcaggcgaagatcgatca

SEQ ID NO: 24022 - DNA, 500 bp, Emericella nidulans
agctcatagtgtgctcctccgggatgccggcattgccagtgtggtgaatccgaatcacgtacgaagttcggccgagctctccgtaagccggaaatcggcataccggattatattcgagaaaacggacagaggaaaagattcgttagaacgcttatttaaaggcaaagagtaatcgatttactgtctagtcgctatacttcaaaagaaactggcatcatgccttcctacacgcttgaacaggtcaaggcccactgcacaccggatgatatctggataatcctgcacaacaagggtacatattgctcccatagtcgaggatttattctctaaccatgtacagtctacgaggtgaccaagtatctcgaagaccaccctggtggaagcgccgtccttattgaagttgccggggctgatgccacggaagcttttgaggagatcggccactctgatgaggcgcgcgacagctcgagccgtattatattggtgatttgccagatcag

SEQ ID NO: 24023 - DNA, 850 bp, Emericella nidulans
ggcaatcctttctgcagtggagagacggccaaaggatattgggctggtcctcactgccgtacaactctacgtgaaccagggcaataccacttccgccatcgtgatcttggagagaacccttcagcttctcgacgagtccatttccgagcaggacaaggagatccgcttcaaccccggtttactcagtgtacttattgccttgtacaaacgtgagggccgaaagactcagatcaaagccgaattggccaaagctgcgacgttctggagtggccaagctgcccagccaacgtcactgctccgggcagcgggacgtctcttctgcactcttcacttgcatcggatacatcccaggccgcggtgttgttcaaatctctgtatgagaagacgccagacgatctcttcgctgttgccggctacgtagcctcacatgcagccattgattactcccaagtcgaagcgcaagcaaaatatctcccatccgttgacgacctgatctcagatattgacgttgccgctctcgaaactgcaggtgttgccccgtcatcctctaccactgccgctgctgccgcagcgatcgcgggagcgaggaagcggcctgctcccactaaggaccgtgtcgcgaagcgagttcgaaagtcccgactccccaaagattatgatccgagcaagacagccgacccggaacgttggctgccgctacgtgaccggtcaacctaccgacctagagggaggaaaggtaagcagcgggctgcagagcgtacgcaaggaggggtggtcagtgagaaatctgaagagactacgctctctgggcagcagcagcagcaaaagccccaaaccgggggctctagtc

SEQ ID NO: 24024 - DNA, 544 bp, Emericella nidulans
cgcgataacccgctcggcatgacacccgagttctggcctccctatatccacgaagcgagctttattccttggatagatgtttacttcgatcgtctccatccaactctcccagttctaaatcgatccttactctttactcaaatcattcagcaagaacatcgccgcaacccccagtttggtgctatgattctgtctctttgtgccttctccttgacacaaccgatagatatcagtgaacgaccgacctcttcatcacggtctgatcaggcaaagatcctggtccacgaagcaacaagaatgcgcacatcttctgattttggcgagcacccatcaatagaagctgttttaactagtttcttcttgttcgggtaccttttcgggagtaaccagcacaatgcagcaagactccggctgcgagaggcaatcgatctagcctcgacactgggcctgaataatccagccacttacgcggattgctcagcagaggaaaaagggcagtggctacggacatatttagttctatctgtgacagaaaggtatatat

SEQ ID NO: 24025 - DNA, 805 bp, Emericella nidulans
accatgccatattccacccaaactgtaacccgtgcccgcatactagtcaaaagcattgccgcagaggtgaagtctggatatggtttcagctccatggccgtatctatctacgacactgcctggctagcatgattcgcaaggaatccgaatggctattccccgaaagtttcacattcctgctagaacagcaaggacaggatggaggacggatcttctggaccaatccaccagaaccacgccttacccggcattcctatggattcccgaatgtattgtttactccctcgctgggctgcttgcactttgtcgacataccagattcgctgctaacgccggcagagaggagctgccgacggatagctggtccgaattcctctcgcaaaatcatttttagaagaaaactggcgcactcaacattggatgggatcactcacttagggtttgaactgatcgtccctgtttctcttcgcctgctacaacatgaagggatgcgtttcgcctttccagcgaagaaggagctgcttcaaatgttcgaaaagcgctgagtgagatatgacctggctctacgacaatggggcttgcaagataccattattttgtcttgaggccatccttggcaaagtcgacttcagtcggctatcatacttggtacatccaccactggagttacggcatcacctgcatcaacagctgcatacctcattcattcaggactatggagccgagaaggcgaagcatatctacgccacgtaatcagtaagacgagaagacggcactgtgggagaataattttcctcggcaatat

SEQ ID NO: 24026 - DNA, 500 bp, Emericella nidulans
gccgtgtctatgggcaagtgccaccagattttccgcataaattaggggaaacttcgaaagggtactcctgagcaactttttaacggggatggtacctgcacgccaaagggaaatcgtttacgttccttaggcatttcgggtatcgctacaaccctcggattctccgggttgccaccctcacctacgttctctatgcattcgacaatttgcgacggaaccggcgaaagtctacctttctgatccctatgcggatatacgaagacattacgccaccgacccgtggtctgataccggcaacaacgtcgacggttgtatcaagcagttctatcttttgaagcaacggaatcataacctggaggtcctgctctctatcgaaggctggaaatactccacgaactacgcacagtcagcaagcagaatagtggacggaaacaatttgcgcagacagctgtcaagctgcccaagacctagggctggacggcttggacaacgactggaag

SEQ ID NO: 24027 - DNA, 500 bp, Emericella nidulans
aacaaaacattcatccaatgcccagcaacaacctccaggcaggataagcagttagtgttttcaaggacgctggggccgtcaccagtccggcgaggtaagtagttgtgccaaaaggttgtttcgatgtcggaatcctcgaacgacatccctatacctcgcagacattctccccgcttggtctaagctcggatgacaaaagcgcgtactacctagtcatcgtggcgccaacactacttggccaaaccgccacggcacggacagaagctggagagagtgtatctattcgtgatccaccgaatctgagtaaactcagggcatttgtggcgagtggggagcacgccgttacgtatgggcctgggacctggcatgcgccaatggtagttgtgggtgaatgtaaggtggattttgtggtcacgcagtttgtcaatggagttgcggcagaggattgtcaggaggtttgctttggggaggggattgttgttgatctgagtgagaggcag

SEQ ID NO: 24028 - DNA, 522 bp, Emericella nidulans
gaagaggcatgtaccatgatgtccgccgccggttaccatattactggagcgatatcaccgacgcttttacctaccggaccgttgctagtaccgtccgcatgtactttgtcaagtagtttccctccccatctccttgtcctcctacagtgcgtccactaaaaccatccagcctgcttcctgcaatagcctacactttagacatgtcccgccgcacaggaaacttctatgggataaacgagtccctcttttcgtcagcactggcggcaatggtgttcagcgtcttggccgcacagccattaactatcgttggagtaacggggctgatctcgctcttcaactacacaatctacgatattataacgcggtacgacccagccatatacgcaaacttcatgtgctggacggccatttgggccgcaatcttccattggattgtggccgtctgcaactattgcgattatatgcgctatgtgactgacttttcgagcgaaagttttgcaatgtatgtcgggattatttatt

SEQ ID NO: 24029 - DNA, 850 bp, Emericella nidulans
tttcctcgccactgctcaatatttcgatacccgcaagcgcctggactttcgcaagaagcagatcgagttcgcgcgagaaactgccctcgaggagctacagcttgaaattgcccacgttgaggaatccgaagtcgaggattatatccgcgagcgaacggcacagattaatgccgaagctcaaaaggatctcagaaacgcccagtaccaccttggcaatgccttctggcaaaacgatcccagcatagcacccctgcgtggagcattagccgtttggggtcttactattgatgacctcgacgtggcctcctttcacgggacatcaacgaagctgaacgagaaaaacgagtgcagtctcatccaggcacaactctctcacctcggtcgcgcaaaagggaatgtcatcctcggcgtcttccagaaatatttaactggacaccccaaaggcgcagccggagcatggatgctcaacggcgctctgcaaatcctggacacagggatcgtaccggggaaccgcaacctcgacaacgtggaggccgaattacaaaagaacgagcaaattgcctttttaaatcggtccttggacacaggccgtggcagcatgcgcgcggtcagcgtcacttctttcggattcggacagaaaggcgcacagactattgtcgtgcatcccaagtatttatttgcgacgctggaggagcaggaatatgaggagtacctggacaagcgtgcgaagaggcagaagaaagccgattcgttcttctatcgggggttggcttccaacaggcttttcgagctgaagactgccccgccgtgggcaccgcagaaggagctggagacgctgctagatcccacg

SEQ ID NO: 24030 - DNA, 500 bp, Emericella nidulans
gacatcctcttaccttcctggtagcagaagacaataagatcaatcggcgggttctggttcatatgttgaaaagactcggctaccaagaaatttatgaagccggcaacgggaaagaggctgtgcgcaccatgcagaatattctcgacgcgcagaattctgagcatgacgctgcacaagaacaaaagccgttaaattgccagaccacggcggatgaatttctcgtgcccgggccaccgcaccgacagaagagagcaaagccagtggatgtcatactaatggatctttggatgcccgaaatggacgggtacgaagccacatcaaagatattcgagatgatcaacgagcgttaccagaatccgattccatcgcaatcacagttgcatcgtcccggacttcccctatcgcaaccacccactgttctcgccgtcagcgcagacgttacagatgaggcgcttaatcgcgccaccaaagtcggcatgaagggttacatgacgaagcct

SEQ ID NO: 24031 - DNA, 752 bp, Emericella nidulans
ccgacacgatattcgttcgggatcccttcgctagcccagaggacattacccgcggttggacgaagatgtacattttccggagatatgggttgtctcacggaggatggcacgctgatttttatgggccgcatggacggcgacaatcaggtcaaactaaatggtttgcggattgagctcgatgagattgccaacagcatactcaccactgggaatgatctggtgtccgaagccgtcgtaactgttcattctggttcgggttcgggttcgccattgctcgtcgctcacgtcgtccctcttggagacaacgtcgacaactcaagacttcagcagctcgctagagaccttcccctgccacagtacatgctcccatccgtagtcgtttccctggaccgcctgccaatcaacgccaacaggaaagttgataggaaggctatcatggccctgcctctgccaactcagcgcactgagagcgcggcgggtacaggcaccgatactgcaagacatctcagcctcgcagaaggcgagctacgtctgctatgggagaaggtgctcccggcctccggtggcccgtcacgactagacgctgattcggatttttttatgcgaggtggaacttccatgttactggtcagactccagggagctatcaaggaatccattggcgtttctatccccgttgcagagctctaccagtttccgactctcggccaaatggcgcggcgaatcagtcgccgaaaggaagatcatcaagc

SEQ ID NO: 24032 - DNA, 741 bp, Emericella nidulans
aaccccggtcagacgattgaaactatcaacgagcacctgtcgatgccggaaacgcctatggcgccgccgtcggagcctcgcattcgcccggctgcgaacacagatctcaaaaagttcggatataaacccatggctatgcgcctttcagaagcatctgagattctggatgaccgaattgatgagttcatgactatattcgagaagatgtatgagaaggaggatgtcacatttggaagtgccgctgttcagagcacaaacgagattgttgccgttggccgtattgcctctgatagcccggaagggaagctcaatcctgcgtctcttgtgctcgagacgtcgagacgtagcggagctgggcgaagggttcctctgaatgtcgactctattccatcagtgaacttctttcctggccagattgtcgcactgttgggaatcaatgcatcaggaaattatttttcggtcaaggaggtccttccaccaccgctgttgccgccagccgtatcgtctgtacctacgattgagagcactaatgagcgattatcggaaggagggtcttcacccttgaatgtaatgatcgcttgcgggccctacaccgccgacgacaatctggactttgagccgttgaaggaaatatgccacaaagctgcagagggctacgcagatgggctcatactgttagggccgttcctggatcttgaacatccattgctggcatcgggtgatttcgagctcccagaaagt

SEQ ID NO: 24033 - DNA, 544 bp, Emericella nidulans
ggatcaccacccgccgccatttgcgctgattccgaaggtcatggctagcatgcgaaactggttgcagcggttggatgggtcgggagcggacggacaggagaatcagaggaaggggcaacgggttgcagtcgtgcattgcaaagctggtaaagggcgcacgggacaatggcgtgctcgtacctgattagccaggaggggtggaagatggaggatgcgttgcaacggttcacggagcgccggatgagagtaggattcgggtctggcgtcagtatacccagtcagctcagatgggtacggtatgtgaatcggtggacgaacgaactggggaaaaggtacgttgagcggccggttgagattcttgagattcatgtttggggtctacgggatggagtcaaggtcgtggtggagggcttcgtggaggaaggacagaagattaagcagtttcacctgtttcgaaaggatgaacggacggtcatgtcagatagtacattgcagtctcagtcgtccaacggtcgtccacacaactagcgaagacgacgaagac

SEQ ID NO: 24034 - DNA, 500 bp, Emericella nidulans
agcattccaggttgatgccaccgcaaaggcgaactccggtcaccccggtgcccctatgggcatggccccggtggcccacgttctcttcaacaagttcatgaagttcaaccccaagaaccccgaatgggctaaccgtgaccgatttgtcctctcgtatgaagcccatttctcttgcgagtacgatcttcgctaacgtgctcgctatagcaacggccacggctgcatgctccaatatgctctcctccaccttttcggatacggcatctccatggatgacctcaaggcgttccgtgtaagcaacaactctattcgttctcatactgatcattcaggccgttagttaatttatcaattcttatagcaactcgacagcattactcctggtcacccttgaggttacaacacaacccgtattgaggtgaccacttgttcccctcgggcaggggttatcccaacgctgttggtcttgccttttgcccaagctaacagtgggtgtgtct

SEQ ID NO: 24035 - DNA, 285 bp, Emericella nidulans
ccaatgatgtgcattcaaacgccttgtgcgcttgtttgggcaggcagtctggccgcacggttgggcagcaagggctggagcacgtggggtattctaatcgtcacggcgtgcttacagggcacactccttgtcctatgtgtgttcttcgagtatcttggccccaataaaggccatagccacgactataacaaggacaccgcaccaagccagcctggtgaaaacagtgatgcccaagatgaggacggcccatatgaagaaacgccactcccccgagacagccgttga

SEQ ID NO: 24036 - DNA, 3758 bp, Emericella nidulans
caccatgtcaagttctacaagtggatgcaggataccgtcaacctggcactcgcgcgccgctggagtgccgacagcgacacctggattcatgacagtcccgccgtacgggaaaagtacatttcccttgctgggtcgcagacggtggacggagagctgatctgccagctaggcccattgctgctgccggtccttcgcggggaacgagcgccgctggaggttatgatggagggacgcctgctgtacaagtactacgccaacgcataccggctggagcccgccttcgagcagctcaagtcattgctgggcgcgatcctgcataagaaccctcgtgccagggttctcgagatcggagccggcaccggcgctgccacacgacacgcgctcaagaccctagggactgatgaggatggcggtcctcgctgcgagagctggcactttactgacatctcctccgggttcttcgaggcaatccgcgctgaattcgccacctggggcggcctgctggagtttaataagctggatatcgagcaggaccccgaagcgcaggggttcaagctcggttcttacgatgtcgtggtcgcctgccaggttctgcacgccacgaagagcatgcaccggactatgaccaatgtccggtccctgatgaaacccggcgagcacgctgctccttatggagacgacacaggaccagattgacttgcagttcatctttggtctcctgccgggttggtggctgagcgaagagcctgagcgccacgcgagccccagcctgagcattgacatgtgggatcgggtgctcaagggggccggctttacgggagtcgagattgacctgagagatgtgaacgttgatgctgagagtgatctgtacggcatcagcaatatcatgagcacggctgtcggcacggcgggttcgagccctgagaaggtggatgccgcccaggtggtgatcgtgacgggcaacaagacgggctttcaggacgattgggtcaggggactgcaggcagccattgctcaggactccggtagcgatgcccttccagagattatatccctcgagtctccctcgctcggggcagaggccttccagtcccggctggtcgtcttcgtcggcgagcttgacagacccgttctggcgtctcttgactccacagagctcgagggaatcaagaccatggccctcgcctgcaaaggtcttctctgggtcacccgcggcggcgcggttgagtgtacggaccccgactctgcgcttgcatctgggttcgtccgcgttctgcgcaccgagtatctcggccggcgcttcttgactctcgacctggacccagcagcccattcgcctgcgtctgatatctcagtcattgtgcacctcctctcctcgcgcctacagccggccgttgagacagcggccccggccgacagcgagttcgctctgcgagacggcctcctccttgtgccgcgcctttacaaagacgttgtctggaatgcactgctggagcctgaggtccccgactgggcctctccagagagtattcccgaagcccccttcttccaagccaagcggccgcttaaactcgaggttgggatccctggtctgctcgatacactcgccttcggcgacgaaccccgacgcgctggacgccgccgggcccatgcccgacgagatggtcgagatagagcctcgcgcttatggcctcaacttccgcgacgtcatggtggccatgggccagctcaaagagcgcgtcatgggtctagagtgcgcaggcgtcatcacgcgcgtcggcgctgaagctgcggcgcaaggcttcgccgtgggtgaccgggtcatggccctgctgctgggcccgttcagctctcgtgcacgggtgagctggcacggagtcgccagtatgcccgcggggatggggtttgcagatgctgcctctatcccgatgatcttcaccacggcgtacgtcgctctcgtgcaagcagcgcgactgtcgcaggggcagacagtgcttattcacgccgctgcaggaggtgtagggcaagcagccgtgatactggccaaggaatatctcggagcagaagtctttgcaaccgtgggctcgcaggagaagcgagacctactgatcaaggagtacggaatccccgacgaccacatcttcaactctcgcgacagttcctttgcaccggctgccctggccgcaacagccggacggggcgtggactgcgtccttaactcgctaggtggcgccctcctccaagccagcttcgaggttctcgcgccctttggccactttgtcgagatcggcaagcgcgatctcgagcagaacagcctgctcgagatggccaccttcacgcgcgctgtctccttcacttcgctcgacatgatgaccctcctccgccagcgcggcgacgaggcgcaccgcgtcctgagcgagctcgcccggctggccggccaggggatcgtcaagcccgtccaccctgtgtccgtatacccaatgcgccaggttgacaaggccttccgtctgctgcagacggggaagcatctcggcaagctggtactgtccaccgagcctgacgaagaggttagagttcttccccggccggccacgcccaaattgcgcgccgatgcatcttacctccttgtcggcggcgtgggaggtctcggccgctccctcgccagctggatggtcgaacacggcgcaaaacaccttatcctcctctcgcggagtgcaggcaagcaggacagcagcgcattcgttaatggcctacgggacgcaggatgccgcgtcgccgcaatctcctgcgacgtcgccgacagggccgacctcgaccgcgcgatcgcggccgcctcagagttggggttcccgcatgtccgcggcgtcatccagggcgcgatggtcttgcaagactcgatcattgagcagatgagcattgcagactggaatgcggcaatcaagcccaaggttgccgggacacgcaacctccatgaccgcttctcccagcgcaacagcctcgacttcttcgtcatgctctcttccctatccgcgatcctgggttgggccagtcaggcctcctacgcggctggcggaacgtaccaggatgcgctggcgcgctggcgctgctccaagggtctgcctgccgtatccctcgatatgggcgtaatcaaagatgtcggctacgtcgccgagtcgcggtcagtctcagaccggctgcgcaaagttggccagtccctccgcctctctgaagagtcgatcctccagaccctggcaacggcggtcttgcacccattcggccggccccagctcctcctgggcctgaactccggcccaggcagccactgggacccttccagcgacagccagatggggcgtgacgcccgcttcgcacctctccgctaccgtaagcccgcatctacgaagtccgctcagacatcttccagcggcgacggcgaagagcccctttcatccaagctcaagtcagccgattcccccgatgcggcggcgaactatgtcgggggtgcaattgccaccaagctcgcagacatcttcatggtccctgtggccgatatcgatctgaccaagccgccaagtgcgtacggggtcgactcgttggttgctgtcgagctgaggaatatgctggtgctccaggcggcgtgtgatgtgagtatctttagtatcctgcagagtgtgagccttgcggcgctggcggggatggtggtcgaaaagagtgcgcatttcgagggaagtgccacgggaactgtcgttgttgcttga

SEQ ID NO: 24037 - DNA, 720 bp, Emericella nidulans
ttcagcgccctgctcacatatgatgctgtctcatttgtcgaatatcttgacactattgtgaccgcgaattcccctccgccgggctccacgaggcacaattactcaccctggctgtttctcgacgcggcccacgtcctctttcagacagcaaagtctagagtatacgaagggaagattggcaatgaattatctcgctcatccatgacatctttacctaccacgcttcggcctgtattggaagagcagcccaaatgggacgttctggctgagatcctcgaggaaatagaaatggacgcatatcataatccggccagtacaggtgaatcaaacaacacggtactgataatgtgcacagatcaacgaacgtgctgtcaacttcgggagtatctgggaacaatgaataccaaagtcgaagatgagcggcaggaggttgcagatggtagcgaggacaagcaagagaagaagcgctcaggagaagttatgttgcgcaggaaactaagggagtatgtcaactggaaacgctcactggtcaatgtcaacaaaaacttgacagcaaaaccagtgaatgaagagcctcgaacaggatcaggccgggattcaccacgaccgacgactcagcaaggtcgagctccaccgaacaaacgacgccgagtccgtggaggagctgcttctgttgcagctccccgtcaaccaaacagcagtgttcaagcagatactgag

SEQ ID NO: 24038 - DNA, 633 bp, Emericella nidulans
atgccttcttccccgaccaattccagccacaccgcgcagccatctccagctgacctcgaatccgacctcctcgcgcacctggcctcaacacacgccctcgaagacctgcacacaaacctgctctcaacactccaacggctcggctggaccgagaaaatccggcgattgagtactgagcttctccgcgcgaaccgatgtgagcgattcgacgacgtcgttgaagcagtcgtcgcttcggcgcagggccgctcgcacccgttccttgtcgattccaactccgataataacaccggctctcgcgcaaaccatacacacaatcataacggggatgtggacggagttgaaagcaacagtgcgtactccattgaaaatgcggatttgcggattccgagcgtggtcgttgagcaaggggttcgagcaatcaaggatatattaagagaggtcgttatactggaagatgaaggggatggagccggagatagcagtagtgctactgggacggttagtaataatgctgttgatgtggttggagagactgcgacgaaacgacagggagagaaggtggttaatggtgatacaagcccggccaagaaggggggcaagaaggcgaaacagccgaagcagataagatga

SEQ ID NO: 24039 - DNA, 321 bp, Emericella nidulans
gcaatcgccgagattgtccctacccggtacagaggctactacattgcagccgtggtagcgagcttcctccccttcgcgccgggaagtctctacggcgcattgatcgcgcaacacaactggcggtactgtgcgtgtatggtagcgatctggaatcttctgacagctgggatgatctggtggttttataacccacctccccgtacgaacacggccggcttaagcaagatcgaaaaagtgaaacgcattgactccatcggcgggctaatcatgactgctggcctggttttccttcttatatcgctgaactggggagggcagcag

SEQ ID NO: 24040 - DNA, 621 bp, Emericella nidulans
  unsure (1)..(621): unsure at all n locations
atggcggaatgcgatcgtcttcttcgtccccagcgccgctcctcctcgcaggcctcgtcgtcgtcgcgccacagccagaaagctaaggccatccgaacgaaagcccagaaacgccactccgcgtccaacgtgaccacgaccacgacaacgaccgagtccgaaaccgatttgacctccttcccgtccctgtcgcccgaccgctcgcccaacggattcttcggacagcccgccttgaaccgtgcgctgactagcgcgttactggacgggaccgaggagaacgagtccgctatggatcgtaaccgggaccgcaaagcggcgttggctaagctgaccactgctgcctcgcacagttctggccgggcggctttgtttgaggattccgtaccgattcggtatttccctggggtnntgcatttggcagtcgatgcgcatatcgagcgcttgattgcgagtaatggggccgtaaagtttgtccggcagtttgcaaggcacctggcgcagcgtcacgcggagatctctgcgttgcgccaacgtgctgacgagagggacccggccctcaagaggatgctgcgtgaggcgaaagtaaagaataaggatattgagcggcggttgtatgcgctg

SEQ ID NO: 24041 - DNA, 870 bp, Emericella nidulans
atgaccttgggcggtgtgaaaagcgcggttcggattgcggcttatctggctgcatacaggatggtcgggtctggcgtactggaggatggtcggatcaaggagctcgctgggaaccctgtggtcttgctcgacgagatcgataagattggcggccctaatttccagggagacccatctgcagcaatgctggaagtgctggaccctgagcagaaccatacctttgttgatcattacattaacattcccattgacttgagcaaggtcctgttcatagccacagtcaactccttggacaccattcctgcccctctcctagaccgaatggagacaatccagctgtccgggtacacaactgtcgaaaagagacacattgctaagagacaccttcttcccaagcaaatccgagcgaacgggctttcagatggtcaagttgttttgtcggacgatgttatcgacaagaccaccacctcatacaccagagaatccggcgtccgcaacctcgaacgagaacttggttcgatctgccgctacaaggccgttcagtttgcggacgccactgacagtgctaagcttgagtcgtacaaccccgttgttacagtcgatgacttggaagaaatcctcggtatcgagcgctttgacgaggaaatcgccgagaaacacggccgtccaggcgtcgtaaccggcctagttgcatactcaaccggcggccaaggaagcattcttttcatcgaagtcgcagacatgccaggaagcggtcgcgtccaactcaccggaaaacttggagatgtcctcaaggaaagtgtggaagtcgcccaaacatgggtaaaagctcactccttcgagcgtggcatataacatccgaccccaact

SEQ ID NO: 24042 - DNA, 420 bp, Emericella nidulans
ctggggctccaatatttcaggttcgggccccatggccttccagggaacgttgaccatgcacccaatcgcaccttcagccttagcgagatgactccctttggcgcgcggatgatgtctgaggtctggacgtgcccggcaaatacctccttcacttctttagatccggtactctatgcgaatcccctcctaaagtctgctggtgccggtacttctaagtacatccgctttctcttgaacggcgcacctcttcctctgaagggcctagttggctgtgagcacgcggtgaatggcttttgtcctctggaagggttcctgagcggagttccgactctgaaggagcgcgcgcagtaccagagggcttgcttcggcgagtaccctactggcgaacaggttggtgatggtgttcctcctccggcttaa

SEQ ID NO: 24043 - DNA, 502 bp, Emericella nidulans
gaataaccctttcagccccaactctgcacatgcgaatgacatcatccacaacggttggatgaagaagcggaaaacctctaagctcatccgccacgaatgggaagagaatcacttcacccttcgaggcactcatctgtgcatgtatccagatgagcaggccgctcttcgggactccaaagcattggagcgtattgatgtagatgattatgccgtggcgtgttcttcactgcgatccacctctagattgaccaacgctttcaaaaagaccgtcctgaagcgcgtcaataacaaccaggaaccaggggcgtttgccttttccctcatccctgcctcgaataccgaccgcaagcatttcttgccaggcgggcccaaatcacaccatttctccgtcgagacgcagcaggagcgcatcgactggatgagagagctgatgctcgcaaaagctctccgacgaggccgagaaggcggcgattctgtcaacctcaatggccagcctttctag

SEQ ID NO: 24044 - DNA, 408 bp, Emericella nidulans
atgacggccaaatgctcggcttcttatagaatcaccaaggctctcgcgcggtacccagcagtccagacccaaacccggcgaggattctcagcggctccccgacggcaagatgcggcaaaagcagccgaaaatgataagcaaccagaggcaagaaatgaagacaaaagagaagagggcgcgatgagtcggcgtctctcagagatggcagagcaagcctttctcgaaggaggtcggtcagcacgcaagaacctctcgcaggcggggttctcggaggagctcaagaaggagcttgaggagagggtagcggcggcgacattcaaaagcgaacatgcggctgcacattctattgttaacatgccagtatgttgtcttaactcacaattcagacggattcgggttcaggattag

SEQ ID NO: 24045 - DNA, 2326 bp, Emericella nidulans
  unsure (1)..(2326): unsure at all n locations
ttttaataccccgcgaatgatggttcctctggccctgagaaccaacgtcgaggcagccattcgncccacgcccgaaccccatctaggaactttgacggtaactggcgccagcccaacaaccaatctcaaggccaggaccaatctaaaggtctcggtcagcagaactcaggatttcagtccggacaccgtgcacgtgcgtctatgaaccagtcaatcggctgtatcggttccttccaataccctggccagcctcagctcattcaattgccccaaggccaggtggttatggctcccccacaaatgtttggtggagcccagcagctgaaccccttgcaactcgctcagcttcaagccctgcagcagagtgggcaactaaacggtcaaggtctaggtggcctccaagctagtcagcacgccccccagccgctgtctgcccagcaaacccaacagcagcagcagcagcagcggaagactctgttcactccctatcttccccaggccaatcttcccgcgcttttgtctaacggtcaactcgtctctggtgtcctgagagtgaacaagaagaatcgttctgatgcgtatgttacgactccagacttagatgccgacatcttcatctgcggtagcaaggatcgaaaccgtgctcttgagggtgatttcgtggccgtcgaactacttgacgttgacgaagtctggtcccagaagaaagagaaagaagagaagaagaaacgcaaggatatcacggacgcgaggtccgctagtaatgctggaacagacaagatgtcccgctcagactctactggggaccgtcaagaggtgggacctgacggtagcattcgtcggcgtggcagtctccgacagcgtccaacccagaagaagaatgacgatgtcgaggtcgagggtcagagcctgcttctggtcgaagaagatgagattagtgatgaacagaagcccctatacgctggtcatgtcgtcgccgttatcgaacgtattgctggccagatgttctccggcacacttggtctactccgccctagcagtcaagcaacgaaagaaaagcaggaagccgagagacttgcgagagatggtgcccatggtcgtcatcaagaccggcaacaagataagccgaagatcgtttggttcaaacctaccgacaagcgtgtgcctttgattgctatccccacagagcaagccccgcgcgatttcgtcgagaagcatcaagactacgctaatcgtattttcgtcgcttgcatcaagagatggcccatcacgtcgctgcactccttcggtactctggttgaacaactgggcgaaatgggtgatctaaaggtggaaactgaggctctcctccgcgacaacaactttggctccgacgagtttactgatgccgtgctgaagagcattggctgggagaactggtcaatttcaagtgaaggtgatttgtcttcccgtcgggacttccgccaggaaactacattcactattgaaccgaccgggaccagcgaactcgacaacgcctaccatttcaaagctctgcccgatggaaaggcggagatcggcatccacgtcactgacatcgctcattttgtgaaacccaattcgctggttgatcgagaggccaagaaacgcgacactgccgtttatcttgttgatcgtctagtgaaaatgctgcctccgcgtatcgcgactgaactatgcgctttgctcccaggtgaggagcgcttgacagtcagtgtcgttttcaaggccaacccagaaacgggggccattgacgacgatatttggatcggcaagagtattatcaagagcagcggcaagctaggattcgatgaggttgagtctgtaattaagggaacgtcggatgttccattgtctggagtctcggtggatatcatccgtggtttacaggtgaaaagctcccactaagttcaatacatcagatctcttttggctaactttaaagcagcgcaccgcctcgaaattccgtgaagcgagactcggaaatcgtgtttctcagatccctcctctccgtcttcttcattctctcgatgacgagaacgtgccggtggaaagcaacatctttggctcttcggctgtccgtgaactcgtggaagaattaagctgcaaagcgaacttcctcgttgcccgcaagttggttgcagctctgcctgacaaagctttccttcgccgccagcaatcaccaaacccccgtcgcctccactcatttgtcgatcgcatgaacagactcgggtttgggtttgacgaatctagcagcggaagcttgcagagtagtctctgcaaggttaaggacgatgatttgcgcaag

SEQ ID NO: 24046 - DNA, 1385 bp, Emericella nidulans
atatttacaaaagtcaagccaggcacctggcctggtatgatcaagatggcgaacccacgatccataaccccttcaagaaatttcgaagaagcccgcgacggacgaattcgatccagctcgaaagcaggttgacacaattctcctctgctggcgccgtgcgccctgaggaggaaatccggcgcaatagagaaataagagaaggtctgggcgggcccgctcattcggactctttcccacccggcactgggacgacggtggattcagtagcacggcccgaaagtatggaaaaggcagagccggagccttcgatgagcagtggcgaccccatcaatgtttcaactcgtgcaagcccggctggggagtcagagggcatacctcggaagcggacgcggtttctaaggctaagcgagccttcgaacgaagaaggtaaagaaatttccgaagatgaactgcgggacaagcagaagtttacgccagtgggacaattcaaggccactgtcctaaattcatggatcaatattcttatccttgccgcgccggttggaattgcgttgaactatgttgacgtcgaccccgtggcagtttttgtggtcaatttcattgctattattcccttggcggctatgctgagttttgcaacggaagagattgccctaaggacaggcgagacgattggaggtctcctcaatgccagttttggaaacgctgtcgagttaatcgttgccatcattgccttggtccacaacgaggtgctcattgtgcagacatccctcatcggtagcatgttgtccaacctccttttagttctggggatgtgctttctcttcggtggcatcaaccgcttggagcagcacttcaatcctgtcgtcgcgcagacagcagccagtcttctttctctatcggtcggggctttgatcatccctacagctttcaacgcctggtccgacggtacgtcaaatttctattaccgcattgaagaatactaacaatcgtagcggacaaatccaagactgccccgctatccagaggtaaggattgttcctcattaccaagaactactctcaccagtattaggaactagcgtgatccttttggtcgtttacggttgctacctctacttccagctcagtacacacgttgagatgtacaacgcgcccagccagaaatccgaaaagatacgccagaaggtgtccgaaggcgacgccagtcgcggcattgctcagatcggccatatgtcggctgcactggcaggagcgaacaatgagcctgtacaggaccctgacgacgagccggaagagccgcagcttcacatctatgttgcgattgcgacgctgtgcatctccactgcactcgtcggcgtgtgtgcggaattcatggtacgtcta

SEQ ID NO: 24047 - DNA, 1021 bp, Emericella nidulans
gcaccctgagtacgactactactggaactgggagatggacgcgcgctacactggccattggtaccacctcttcgacaaggttgtcaactgggcacgccagcagcctcgcaggggattatgggagcgaaactccagattctatgtgccatccgtacacggctcttgggatgactttagacaaatggttcgcgtgcagacggagctcggcacgaacagcccaagcaacatgtggagcgcaggtgctactcacgacttcgctcatggcgagaaacctggtcgacgccagggcgacaaattcatctggggacctgtgcggccggacgaacaggatatcttcgaagtcgatggcgagggtattcccccaacgactatggagaaggacaaatatgaatggggagtcaacgaggaggctgatctcattgtcttcaatcccatcttcgatcctgatggaacaacctggcctctcaaggatgatgttaccgggtacaaccgcgagaatggcctgccaccacgacgagccgcaatcattaccacctccagactttcacgtaagttgctactcaccatgcacaaggaaacaaccttcaagcggcacaccatgttctcggaaatgtggcctgctactacggcgctgcaacatgggtttaaagcagtttatgtgccccattctgtttacattgaccgcaactggccaaccgagtatctcgagtccgtcttcaacgcgggacgtaacggagcctcgggaggcgcgcggccgtccgtctttggtgatcgtgagcataacttccgcggtaccacctggttctattccgctggcttctcgcccaacctctggagacgctggctgggctacaaggtcgacaacgacggcggtgagcaggaggagcttgcaggcgaaggacgaatgtgccttcccccgatgctgctccaccctgttaaagaggtggagatgatcattgatgatggggtggaagctgatgtcgcagaaaccgatgaaatggaaccagaggaatggatatag

SEQ ID NO: 24048 - DNA, 646 bp, Emericella nidulans
atggagaataaaaccgacaattcctcggccgggaccaagcgctcctgggaaggcttacccctccacaacgacggcaagtcacagcggtttccatcaacgacaatggtagaatcagcctctttcgacgtcctctcaatgttcgagggcttccgcgacgagctagatcaacaccacgaccgtcgtgagcggctgatcaagataagtcgtgatattacagcacttagcaaaaaaatgtacgccgcgatttatatcctcttttcatttactaacaagctaatacgggtcatctcagtatcttctctctccaacggtccgtctcactccacactgatcgaacaggcaaacactgcagagtcctaaccacagccattccagagtccgaacggccggcgcccccattccgccatcaattctcaaagacgtccaatcccgcttcacccagataaatgacctcttcctctcggctgtcccagaaacacagggtctcaataactaccgctacctgcgcaacctcagcggcggaatccaagaattcatcgaagccctctccttcaaacactatctcgagactcagaccctcataacccgcgagcaagttacatcacatttgcctccggatatcctagtcacggaagatgactatgtg

SEQ ID NO: 24049 - DNA, 1581 bp, Emericella nidulans
atgagtgatcaaatatcctcgtggaatgtcgtccacaagttcgaaaagcgcggccttctcatcgccattaactgcgtggctgccctgtcaatccttttctttggatatgaccagggtatgatgtctggagtgaacaactccaaggactatatcgatctcatggggtttggctatacggagatgaaggatggccacccttcccccgtggtgaccaacagtctgctccaaggcggcatcgtcagtgtctattatttaggtacgctcttcggtgcgctggttggcggttggactggagacaaggttggtagaatcaagacgattgccttcggctcagtctgggccatgtttggggccgctctacagtgctcagcccagaaccacgactggatgatctgcggttagccgtcttgcccgatccctgtgtttttgtgacttttctagctgacttaggtagcgcgatttataaacggaattggaaccggaatactcaacgcgattgttcccgtatgggcgaccgagactgcagaacacacgagtcgtggccagttcattgcaatcgagttcacactgaacatcttcggtgtcgtgctcgcatattggcttgaattgtaagcaatagaagaagccaacttggaccatgcactaacgatcatacagcggcctgtctttcatcgataacggcgcatcgcccttccgctggcgcttcccgatcgcgttccaaatcatcttcttgctcgttctattcgccgccgtttggttcttcccggaatccccacgttggttggtgagggttggtcgggagcaggaggctcggtatattctgggtaggctgcgtggcagcagcggtgaagatgccatccgggccgagggccgagttccaggatattctcagcgtcgcggaggcagagaggtccatgggccacagcacgtcttacctggctatgcttttcggatacaagaccgggaagttgcatcttggccgccgggttcaacttgtggtatggctacagatcatgcaggagtgggttggtattgccggtgttactgtttgtacgtcgcccttgagataatgtcgggcccaggctaatggttctgcagatgccccgactattttcagcattgcaggattcgattccatgaagagtcaatggatcagcggtttaaacaacgtcttttacatggtatgtcgtccttctctgggcttggtacaggcacatgctaacagaacagtttgctactatgatctgtgtctttactctcgaccgaatcggccgtcggtggactttgtactggggagctgcagcccaaggaatcgccatgttccttgctgggggtttctcacgtgtttcgatcgacgcacgagatgcgggcaacatggcgcgagctgaatcattcggtgctgctgcagcgtccatggtttttgtattcaccgcggtcttcggagccacctggctcacagtgccttggatctatcctgcggagatttatccattagccgtccgtgcaaagggtaatgcctggggtgttgtcggctggagtattggaaacggatggttggtgagtggtcgtgacccaaattac

SEQ ID NO: 24050 - DNA, 1023 bp, Emericella nidulans
atggaaacgattacagcccaggccattcgggatatggcggctcttcggaaaccgccggctccatggacactagatgagccgtatccccagtcttactacagcttcaaccccacaacatctgcctgggtctccaaaacaccatctaccgcggccgagcagagcagcccgcatgctggggctgtcgccgccattgcactctacacctggaatatcgacttcatgttacctttcgcggctgctcgtatgcggccggctcttgctcatttgcacgaactcatccgtgatctccaccaaaatatcgcccctgtgatttttctccaagagtgcactccttctgacctggggaccatcgctgcaaccccctgggtgcaagaccattttcacgtgacggatcttgaaccaaccaattgggctacctcgcagtatggcacaatcacgctgatcagcaagcgcgtacccattgtgtctgtctttcgcgtgcattactctcacacacgcatggaccgcgatgcgcttttcgtggacatcacaattggacatgagaagcggatgcgcctctgcaattcgcacctagaatcgttggccctcgaccctccctaccgcccattgcagatgcagctgatcgcgaaatacatgcatcaagatgacataaacgctgctgttgctgcaggagatttcaatgctattcagccaattgatagaacactgcatacggaccagaatctcaaggatgcatttttggaatttggtgggaaggaagacacccctgaaggatatacatggggccagcaagcagcaaccgcccagcgcgaacagtttgggtgttcgaggatggataaggtctacttctgcgggtgtctcaagttgttgaaggttgataggtttggtgagggggtgctggtggaaggggacgaggagagacggcagattgtgggtctgggattcgagaagccctgggtcacagatcatcttggtgtcatggccgtatttgatgtcgggctcaccatggattcgcaactctag

SEQ ID NO: 24051 - DNA, 539 bp, Emericella nidulans
aagccatctccttcgacagtcgatacgcccgtttctactgagagatattcgttgccagatgaggctcccggcaagaatgactatgcccctggggtggttgagaacgttgctcgcgtcgttgatcataaggctgaacgggcgctctgccgtcgatttgatctgcggttgatgcccgtgttggctattatgtgttggtgatgtgcaatcttcaaacggcgttcagtagttgactttacgtatagaccttttcaatgctctggacaagggcaatctcggtaatgcagagacagatggaatgagcgacggtaagtccgccgaaaatcaatagctccagcccctgctaacaggtcagacctccatttcaaaccagggcagtacaatcttctgctatcgatcttcttcgttccctatgtgatcttcgcgccgccaatcgctatgctaggcaagcgcttcagtccggcgagggtgctgccaatcctgatgtttagctttggctccttcacccttattgcatcgtccacaaagaactttggtggcat

SEQ ID NO: 24052 - DNA, 609 bp, Emericella nidulans
gtgttgcttagctgacactgttcagaaagtggctgataatatccaagatatcacggagtttggtgatcttccatggcaacctttacggtatgtatctatttcaaccagaagtgcggcactgctaatgtacatgccagtcgcctaagtcaaatactttcaaaacgacgggcattgacacccaggacactggatcttttcctccgacccgatttgggattcattgacatatgcgactcgggcagtatgactggtgtatcctgcttatggttttgttcatgttttaactcacctgtttagagcttgagacggacgacttcagaaagattttcacgtttatgcccgctctgaccagcgtaaaccttcggtttgctggacagttgaaagacgatgtcatagactacatgctcgatcgaaatctgagtatccgacatctgcaacttgattctgcaaatcttgtctcggatctgagatggagacaagtattccagaagctgggggataagctagagacactcaggctgtccaacctggactcttcgctagatgatgagagcattgaagtcatgtgtaaacactgcacgggactccgacggttaaagctcacccaat

SEQ ID NO: 24053 - DNA, 207 bp, Emericella nidulans
atgtcccttcgttggatcctccttcggcttctcctcagcctcctcccactagccgttaccgctaccgtctatctgtacctctaccccgtcttctctggctgcgcatatcctctccctctgaacagctacaatgcctcacagcgtcccagcgcattcattcatcaccctcagaacacatcctcacaccacgctcaacgccaggcatag

SEQ ID NO: 24054 - DNA, 1435 bp, Emericella nidulans
cttgatcaaacattctacaaccagtccgaagactgcctatatctcaacatagtgcggcccgctggctacgaccaggagaaactccccgtcggcttttggatccatggcggagggttcagcaacggcggcggcggcgatcagcgctataacctctcatttatcgtcaagcagtccgtcaagatcggcaagccaataattggcgtttcaatcaactaccggcttaacctctggggattcctccactcaaatgaagttgtaggggaaggaatcacgaacctaggtctaagggaccagcgccttgctctgtactgggtgcaggagaacattgctaccttcggcggagaccctgggaaggtgacaatcttcggcgagtccgctggcgccgcctcagtcggcttccatgtaagtcattgtttgggataatgccgtgctcggctaacgcgcaaagctcactgcctatggaggtcgcgacgacaagctcttccgcgccgcaatactacagtctggtaatcccatattctacggagccgaaaatggaacgcagcgctcgcaagcctccttcgaggcgatcgtatcccaggttggatgcgccgaggcctgggacaggatccaatgtctccgcgaggtctctttcctgacgctgaacgctacatatgactcgatcaacggatccttcgcacctacaattgacggcgactttattcgcacctacggcagcaaacagctcctcgatggccaatttgtcagagtacccatcatcacgggcaccaacagcgacgagggtgcctctatgagccccacaggaatcaatacaaccgaagatttcaaagcgactctttccagcttcctccctgtttcatttcaagacgccatcctaaaagcctacccggatgacttgtcggtcaatgtcattgccagcctaggagaccagcgaccagtggctccttacggggcacagttccggcgcagcgcctccttctggggcgactactactttatcgcatcgaggcgacaaaccgccaagacatgggctgcgcatggcatccccgcgtatgcgtacagattcaacgctattcccgcgggtgttcctcccgaagttggcgtgggccattataaggagatcgggttcatgttcaacaatctcgagggcgtaggctacagaccagatatcaaacccttcgagggcaagggacagaactatatcgatctcgcggacttgatgagctcgacatgggcgagctttattcatgatctggatttgaataactatacagggcgagacacgaatatcccggattggccgaggtatgatgtgctggagccgcgggattttgtctttgacgcaaatgtcaccagctatacggaggatgacacgtatcgggcagagggtattgccttgattaatgaccatgctgcgggggttttgcacaggtag

SEQ ID NO: 24055 - DNA, 654 bp, Emericella nidulans
atttcgcctgactctactctcattgttaccacaggagtttatgatcggtttgtgaaggtatggaagaggttagcattcggtgctgacgacgtgcgcttcgatgtatcatacctcgcgcatcctgctatagttacggggtttcactggcgccggccgcttcatggagagcagtcaatggcgaatgtcttctacacattatgcgccgataataaaatccgagtttgggcggcgattgataaccatgccccatctccactacagctatggacgcagattgacatgaaccgttccgtacagccgagacacgcaacgaatggagtgggcgtatcacgccgctacgggtttatcatcgatagtcgggatttctgcagcgctaccgagcgggcggtggaacgaggtgcaggaaacaaaggaaaccatgctttggaacatattatcgaagttgcgacgaggagcccggagatatatgtggtaatggatggtgaagggcatatggctgcctgggcgttggaagacgtcggctccaaggcccaatccaaaatgaacgtgttcaacatcctccatgtcgagggtttggatttctcgttcttgcgcggacatctctgcgaggaagattatgcgcaaatatgtgcctttcaaagtgcagatcctgga

SEQ ID NO: 24056 - DNA, 284 bp, Emericella nidulans
tctatttcgggaccacgaaaggtcgtcaaatccgagcaaactatcttgctctcgcccgcactgaagtcatcaatggacgcgaaatcacagtaccagtcgttgatggtttgagtgagtcatcaagttcgatcacctttgaggaaccaaatggactcttgttctcgacacagtttgcacagctggcgatcagtctgatgaacatagccgaatcaagtgcgctcaaagcccgcggtctcttccaacaaggtgccgcgttcgcgagccactcgcttggcgatacagcg

SEQ ID NO: 24057 - DNA, 414 bp, Emericella nidulans
agcgctgttctcggtttcccgcgtatgggaaagctccgtgacctcaagaaggccacggaagcttactggggtgagaagatctctcgtgatgaactcctgagcgagggaaagagacttcgtgcggagcactggaagatccagaaggatgctggtgtcgacatcatccccagcaatgactttgctttctacgaccaggtccttgaccacatccaactctttggtgttgtccctgagcgttattccaagtacaacctccacccccttgacgagtactttgctatgggccgtggtctccagaagcctgccaaggatggccagcccgccatcgatgtcccctctttggagatggtcaagtggtttgactccaactaccactacgtcaagcctactctccaggataaccagaccttctag

SEQ ID NO: 24058 - DNA, 1149 bp, Emericella nidulans
  unsure (1)..(1149): unsure at all n locations
atttacctcagcaccaagctgcttctcacccacgactgatgccgctcaacttcctcaaaaacctcttgccctggggcgagagagtcatattcaatctcccgccatgtcaaatagtcgagatcgatacagcgcaggagaaagctgcaagagccctaaagcacctcctcaaactcaaccatgccaattatgcgatcctgtggaatgaacgcaaatttcacaaccatgcgcctcactcattatgctcgttttatttgcttggagccaacgcagatgacctaaatcggttatatgaggcggaattaaagccgttagaagcttggattgattcacctggtgagattagcacgtacgattggagggattatctgggaaagagagagtgagatgtctgtctttgtggcatgagaaaatgctaatagggctcgttcagataccaaagagcgtacgtcgatttcttcgaagacgagcttgtccgccacggctatgattggaagaccgtcgtgtttcaatacctcttctcaggcaaggaacctcttttcaatgctctggcctctgatcgtaagtattagcctttcttaaggaaagcctgatactcacaatgagacagttggccatcctctcatccatctcgcctacgctttcgaagtctccagccgtgaagtcgccatggaagccctttcccttgcaactgtctgctacggcaccgctcacaaatacctcgatgacccatcctactcccaagctgaatcctcctatcattccacgtccccctttgagatcctccagaaagtccgcgctgacaagcgcctaagcaacctcttcacagcgcctggagaccacaatacggaaatcgtcttccgcgatgcggaagcaacaatcctcgatcactggaatgcctggaagattacgtccaacagcgaccccgtgaaatcgttccgagaaagtcaagagcttgctgttgcattattgacagccacatcaagttctgataaccgggacgcgaaatacgacttcttcttcgtccacgtcctcacgactagtcatgccgtgcgggtcctgctcccgctgataccagcgaaattccagatccccctcgtgcggcagtggtggttaatgactctngctgtgtatatcgggcagctgaagcca

SEQ ID NO: 24059 - DNA, 245 bp, Emericella nidulans
acggtgacaccaagtgtgctttcaccgaagacgtcactaagcgctttgaggcctacggctggcacgtcgtttgggttaaggacggtgacaacgacctcgagggcatcgaggctgctatcaaggaggcccaggccgtcaaggacaagccctccatgatccgcctgactaccaccatcggtttcggttctaagctccagggtaccggcggtgtccacggtaaccctctcaaagccgacgacatcgaa

SEQ ID NO: 24060 - DNA, 627 bp, Emericella nidulans
atgccaaagctgaagctgaagtgccgccaacaagtcgagcaaagcacagcggatagcagagcacaaaaccacgccgcaaagccgccgaggacgaagaggacgacgagagtgacgaggacgaggccgagaagcgcgccgctgcgccgcacggaaaaggactccgacctaaagcacgcggaggatctctttggcgacattgaccttaaccgcaaccggggcaagaacaagacaattgttgtgcatgacgcctcgggcgacccgacgcaggctgtagatctttccgcgatgcccctgttcaagccggcgaccaaggagcaatttaccacgttgtcgaacacgcttgtaccgcttttgaccgcgcagagcaagaagccgcagtatgcactctggctgccggagttcgccaagcagctggccaaggaattgcctagtggagatattaagaaggtggctagtgcgttgacgacgctgagcaatgagaagatgaaggaggagagggcagctgataagggaagcaagaagactaaggcggctaagacaaaggtgtcgctagttgcgtcgaggagtgacaaaattgagacgaccgcttatgatgatgatggtttggatgacgatgattttatgtga

SEQ ID NO: 24061 - DNA, 362 bp, Emericella nidulans
acacgaaacagacccgtgttgttaagattactgtgccaacagaatccttcttcaacttctttgctcctcctcaacctccggcagatgatgatgataccgttgcgacggatatcgaggaacgtttagagctcgactaccagcttggagaagatattaaagaaaaacttataccccgagccatcgattggttcaccggtgaggctcttcaattcgaggaacttggtgatgatatggaccccgatgagtttgacgagtttgacgacgaggacgacgaggacgacgatgaggatgaggatggcagagggtcggaccaagacgtcgatgactccgatgaagaggtttgtgtttacccgtacacctag

SEQ ID NO: 24062 - DNA, 629 bp, Emericella nidulans
ggctctgctgaagactcggggccacagcagattgttgtccgaactccgaaaggtcaacagcgcgttcaagccgacaaggtcattgtcaccattccaccactactgggagaattagaaaactttgatctcgatgagcgtgaatcggaaatattcggccgattcgataataactcctatttcccggcgattctgcgtatgtcggcctccccggcaacgggacccaattcgtcaacaaggcaccagagacaccgtataatatcgcccccgtgccatctacacatgtattcgagcccactgctagccgagacttatggacggcatttttcggaggagggtcggcgccgatatctagtaagcaggctcgacaaactatactcgataacgctctgtcactgcgcgctgcagggtatcctatatcggacccagaaatagttgcctttcgtccccacgttccgtatgcgttgcacgtttcttcagaggatatcgctgatgggttctatcgcgacttgtatgggctgcagggataccggaatacgttttatacgggtgctgcgttccattcacatgattctgcagagacgtggaagttcaccgagaatttgttgaatgagcgcgttttgatggactag

SEQ ID NO: 24063 - DNA, 376 bp, Emericella nidulans
aagattaaggcaactgtcattgctgaggttcaagcggacagaagacttttacattcaggtgactgacgacctgatcggctgctttggggatgcataccaggcgcgcaaagccggttctgctccaccagaactgatgccgtatacgatgggatggacgtttcgtcttccagagatgatgattgagagactggaagaaagagagccgatcgcgctggtgattatggcgcactggaccatcctgcttcgctatatgggcgaggcctggtttatgcgcgggtgggaccaacatatcatcttggggattagggcctgcttgcctccagcctatcatgaccagatttcatggcccgaggaggtcatagcttttggaggatga

SEQ ID NO: 24064 - DNA, 367 bp, Emericella nidulans
atggccattcctacagcgcaacaagcgaccaacggccacgcagagaccataagcaatggacaaacgaacggcggtacagcagatgctcccaactacgccagaggtacactcggtctctccgctgaagcgacgccgacacctcacccctgttccgtacccttgaacccccagtatgggtatacgccacgcaaactgcgcgtcattactatcggcgcaggcttttccggcctcctgatggcccataaactgcagcacaggttttcagagcttcaggaatttgttacgcacaagatctttgagatgcgcagcgacgttggcgggacatggcttgttaatacatacccaggagtgcagtgtgatgttcctg

SEQ ID NO: 24065 - DNA, 2652 bp, Emericella nidulans
atggacctcctttccagcctgactccggccgctgttggaggacgcagcccgcaaattgtgggctacagactcggctacgtcgagccttccactgctgtccaggctcttcgtggaatcatccaaaacctcagctctccttctcctatccagagtcttgaaatcggcagttccaacgttcctactctccagacccccctcgagcagccccgtattgagaacgcctatctgaaaatcctgaaccagcttttcggtgagcggttataccttgcgaaccagcttagctcgaacaacgccggaatttcttccaccattgcggccagccctgagtacggtttcggttctctgattgctagaaaggaacaccgccagcgcttcatccgtgaggttgaggcggcttccaagtccaacagctttgcaactgacgtcgtttccaaatggcttgccgactgggctttgaatgcgactgacgctacaaaggccaacaggttggcgccagatgtcattgctcgtctcagcaacgacggctctgcgctttcaaagcagctgctgcagactaagaagctgttctacagtgaatcccagtggctcattggttccgacgcctgggcttatgatcttggtaactctggtgttcaccacgttcttgcttctggagcggacgtcaacatgctcgtcattgactctcagccttactctgagcgctccgcagcagaccctacccgcagaaagaaggacatcggtctctatgctatgaactttggcaacgcttatgtcgcttccgttgctgtctacagctcttacacccaggttctccaggccatggcagaggctgagcagttcaagggcccgtccatcgtagtcgcttacctaccgtacaaccaggagaacgactccgccctcactgttcttcaggaaaccaagaaggctgttgacctcggttactggccgctctatcgctggaaccccgccaacgaggacaagggcgagcctaagttcgctctggactctgagcgtgtcaagcgcgagttggaggagttcctccgccgggacaaccagcttacccaactaatgaaccgccagcccaagttctcctctgtcctctccgagtcttacggtacggaggtccgcgctatccagaagcgcaaggccaaggactcctatgagaagctgctcgaaggtctctttggtgctcctttgactatcctcttcgcgtctgacggtggcaacgccgcgacactggccaagcgactgggtaaccgtggacgtgcccgtgggctcaagaccttggtcatggccatggaggactacccatttgaggacttgcccaccgaggagatcgtcgtcttcatcaccagtaccgcaggccagggagaattcccacagaacggccttgccttgtgggagtacgtgaagaacactggtgacctcgacctgtccaccatcaactactccgtcttcggtctcggagacagccactactggcctcgcaaggaagacaagatctactacaacaagcccgctaaggaccttgatgctcgcatcgctttcctcggtggacgcaagcttacagacattggtctcggcgatgatcaggatcccgacgcttttcagaccggttactccgagtgggaaccccgcatctggcaagcactgggtgttgacaaggttgagggtctccctgaggagcctgctccccttacaaacgaagatatcaagatccagtccaactacctccgtggtactattgctgagggcctgctcgacgagagcactggtgctatctctgctagcgaccagcagttgaccaagttccacggtacttacatgcaagacgatcgtgatgttcgtgatgagcgcaaggctcagggccttgagcctgcctacagcttcatgattcgttgccgtctccctggtggtgttgctactccctctcagtggctgcagatggatgccatcagcagcgcttatggtaacgagaccatgaagctcaccacccgtcagaccttccagttccacggtgtcgttaagcgcaatcttcgtggagctatgcgtgcgatcaacaaggctctgatgacgactattgctgcctgtggtgatgtcaaccgtaatgtcatgtgcagttcgctgcctgagctctcctactaccatcgtgaagtgcacgccgtgtccaagaagattagcgaccatttgctccctgccaccactgcctatcacgagatctggctccaggatgagaatgacaagaaggtccaggtcgctggggatgctgttgttgaccaggagcccttgtacggtcctacctatctccctcgcaagttcaagattaccattgcaattcctcctcacaatgataccgacgtatacgctcacgatattggtctcattgccatcaagggtgccgatggacacctggaaggtttcaatatcctcgctggtggtggtatgggtaccacccacaacaacaagaagacgtacccccagactggtcgcatgtttggttacgtgcccgctgatcaagcccacatcgtttgcgagaagattatgcttgttcagcgtgactatggtgaccgcaagaaccgcaagcacgcccgtctcaagtacacaattgaagatatgggcgtccaggcgtacaagcacaaggtaaaggctctt

SEQ ID NO: 24066 - DNA, 681 bp, Emericella nidulans
atggcgaccccgcaggaacttgtccctcgaactgaatccatcgctgaggtttatgccactgacaatgcctctgctactactgcctcaccagaacatgtcaagcggttcaacaatctagtttctcacttccacaagcaatataaccactcccccgatttcgttgcccgcagccccggccgcgtgaacatcattggagagcacatcgactacaacctgtacgatgtcctccctacagcagtgagcgtcgacgtgattatcgccgtcaaggtcgttcccacagagagctcagaatcggctgtaaagattgccaatgttctgcctgacaagtttccgacgcgtgagttctctgtgcccaaggactcggacgtcgaaatcgaccccaagaaacatgaatgggtgaactactttaaggctgggttagttggtgcacttaaagttttgcgcaagggtgctgcagatggttcgtttgctccggccagtatggaagtgctagtcgacgggaacgttcctcctggtggtggtatctccagcagtgcagcttttgtgtgctccagtgcgctggccgtcatgaaggcaaacaaccacgatgtctcaaagcaggacttgcttgatctagctgtcgtctcggagcgtgctgtcggtgtctattctggagggtaagttgcctcgttcatctattgt

SEQ ID NO: 24067 - DNA, 1422 bp, Emericella nidulans
gggccatacttccaggactactccattgatcctgccctggtcgactccttcagtttcgtggacagccttggtgcatatggtcccgacttgacccagccttcctttcagaatactgggttcggtgattcatatactgacatgggcaaacaaaattttcccgttaccacttcagaggggtttctgtctggtgtgtcgaccgcttccggtccttcgattgccagcgcttcttcatcagccatgggctcgccttactcggcaaatacgcaaacctttcaagaggattgggttgacacaacccacggtttgagccatcctactgcagtcatgggagatttgttttccaacgagagtatggtaaacacttttgacgcggaggggttttaccaaaagaaatcagatagctttgctggtgagtggctttcggaatcttatgctggagttgagctgacatttgacagacccctctcttatccagcccatgcagcaaccgcaactcactcttactcctgccgccatttcataccctgaacagcccgactacaacctggccccaaccagcttctaccctcagtctccggaaccttctcgatttcactatgcagaaaattacatgccgaagcaatcattcccgcaacaatccaacctcgcccctccctcgccaataccctcaggccctcactctcgccctgcgtctatatatgatcgccggtcgtcgatatcatccatacactctcgtccttcacaagcaagcccagctcccagcggtgctgaattcgaaggcgatgtcaaggagaagggacgttgccctcatcccgactgcgggcgtgtttttaaagacttgaaggcccacatgctcacccatcaatcggaacgacccgaaaagtgtccgattgtgacctgcgagtaccacatcaagggctttgcccgtaaatatgacaagaacagacacactctcacccactacaagggcacgatggtctgcggcttctgtcccggctccggctctcccgcggagaagagtttcaacagggccgacgtgttcaagcgccatctaacctcagttcatggtgtggagcagaccccaccaaactgccgcaagaagagcccggctgcctcttctgctaagagcgtctcggactactgccaagatgcgacgggcaagtgctccacttgctcaggcaccttcagcaacgcacaggacttctacgagcatctcgacgactgtgtcctccgcgttgtgcagcaagaggaacccagcgaggcgatcaaccaacaaagacttgcagaagtcgagtcggatgaggaagtccagaagacaatggaaaagcacaggctactcgacacggctggctccgttgatcaatacgacgatgaaaacgatgacgacgacgatgatgactctgacgatcgacgaccagccaa

SEQ ID NO: 24068 - DNA, 1676 bp, Emericella nidulans
ataatccgtatgtgccttcgccgccgagcgttgggcctgggccggacgaaagctcggaggggctgcgatctcatgagacttttggctcgagcgcggccttgagcgctgcgggtgcaccggcagggaactggacaccaccgagcggatcccgtcacagttttctcgatggatcatatcagggtgtagcgtcgggaccgtaccagcgacattctgcctacagctcgcaggactatcctgctgacatcaacccggatgatattcttgacgatggagatgatggttttgcggcagccccgtccaacaaacctaacgcagctggaggagcagccactggcggtgcggctgggggtcttttaggagaattctttggtgcaaagaaggcagccgatgcttcttatgatcctgttcccggcgcaggcctgccatctgtcgaaaagtatgctaaacctagaccctccggtgcgagccgaaaacgtggctggattatagggggcatattggctttcattgttattggagctattgtcggaggcgctgttggcggcacgttgggcaatcgcaggtctgagaccgcatcagaatcgtccgaagtatctgcagatgatgacacggagaccaacggtgatctcgacaagaactcggacgaaatcaagtctcttatggccatggaagggttgcacaaggtgttcccaggcatggattacacaccctggggcgtccaacacccggagtgtgacaaatggccaccatcccagaacaatgtcacccgtgatatggcagtgctctcgcgactaaccaacaccgtccgcctttacggcacagactgcaaccagaccgaaatggtcctccacgccatcgaccgcctcgaacttacagatatgaaactttggctcggcgtttggattgacacaaacactaccaccaacgaacgccagctctcccagctctacgacattcttgacaaacgctccgatcactctgtctttaaaggcgctatcatcggcaacgaagctctttaccgcgcaggttccacaaaggaagaagcgcgcaagaacatcatcgactatatgcgccaagtccgcaagcactttaacgaccacaacatcgacataaaagtcgcgacctccgacctcggcgataactgggacgaaacactcgcagatgccacggatgtcgtcatgtcgaacgtccaccccttctttggaggcgtggaggtcagcaaggcagcgggttggacctggagtttttggaactcacataacgctccacttacacaggggacgaacaaaggcaatatcattgccgaggttggctggcccagcggtggaggaaacgattgcggcgacggcgccaactgcaaggatgatacctctggtgctgtggcgggggtcaagcagatgaaccagtttatggcagactgggtctgcccggcgctggagaatgggacagattatttctggtacgtttcatccatccacctaccgtgcatcccgtcaatccttggagtcattagtactgacaggaattacaggttcgaggcctttgacgagccctggaaagtgaaattcaacaaaggtgacgagcagtgggaagacaaatggggtctcatggaccctggtcgcaacttgaagcctgggatcgaaatcccggattgtggtggcaagacggctgcatag

SEQ ID NO: 24069 - DNA, 1033 bp, Emericella nidulans
atgccccacacccgccgcaaaaaaccgtccccctcgcagaacaagcgcctccaagtcacagacgactccggctggacgcacgtcacaacgaacaaacacgctcgccgcatccgacagccgagcgtaaacccgaattcaggctcgagctcgactgggaaccgcaatggtctagagaaagatgccgcgaaagaagaaatagccgaggaacttgtccccgccgaagcaccacaaaagaccacactgtccgacctccagcggcagcttggattgtataaacagcgatgggaggagtcagtgacctgggattgtgttgttgagggcctcaggcgcggggtgccctccttgctggcggagcgtggaagcagcagcaacagcgacggtgacggcgaaaaagaggtcaaggataaagacgaaaatcagagcaagaatggcatctcgattatctgcatcggtctgggaagtcccagtggttttctgcgcggcggttgggtcgatcgtcgcgccgtctcaatgtaccagctcgctgcattggcgagtatcctggaatggattggttcgttcccctgcccctggacctatacttgaacgcaaacccctaacttctcaatgactgctaggagaaagcacctcgatgcagaaccccaaccccggaatgagagcttacgcgcaagatcccgtcttcaacacccacgacgaaactctactcaacgagctaaagataaccgtcctcacgcaccccggcgccttccagaaagtgacgccgaaaaccctccttttttgtcctggggcagaacggcgtcatattgagctccttcttgcgcacgatccggcgattgtggtcggcgggccgctagaggatatcgagtcggatgttgtgaggcggtttgtggagaggagggagtcagtcagactgaaggagtttgcggagcttgagacggcgttctgggggatgaggatttatttcccgcgttctggagccgagaagcaagataaggtttccagtagaattcaggaggggggagctgagggatag

SEQ ID NO: 24070 - DNA, 847 bp, Emericella nidulans
atgtcaacgtcgccgtcaccatggctcgccgcggccatgctttgcatcggcctggcgaatgctcacaccgttatcgtctatcctggatacagaggcaataacctacacacaactgggacggttgagggagctgacggtctcggtattgcgtggagcagcgacaacgagactttgatctatccatatggaatgcaatggtcctatccttgtatgtcatcactgcattatcttccatcgatctgatgacaatctgtgctgacacctctaggcggcggcatgcccacgtcagagaaccgaacgaaatggccggtgcaagggggcgccgtatccttccaaccaggctggtttcagggccattcccgagctcagatctatatcaacattgggctgggcactgtgccgccgaacatgagccacccgatgatcacgccctttgagatcgtcggcccagacaacgacccctaccccggcacaatctgtcttcctcaagtcaggctgccggccggaatcgaggtccaggtgggggataacgcgacgatccaggtgattgagctagctcagcatggagcggccctgtacaatgtaagtcatgcccgttctcttccctagtgctcgctagaagatctaatgcggcatttagtgcgcggacattaccttcgccgaacccgaggatgtcgctgaagtcaactccacaaactgcttcaattcgtcacacatctccttcgagacaatcttcacaacttcctccctagaaaatgccggactcgaagctgtcacagtgccgtctttcctcactgccgtcgttcccacgttcctaggcatcgcatacggccttctgatggcgtag

SEQ ID NO: 24071 - DNA, 654 bp, Emericella nidulans
ctcgatactctcggatcctggatagacgaggattttcttatcctcctcccctccccagttccgccaccatcattcgaagatcattcttcagaatcagacccagaattgaaatcccaataccacctcgaagcctatacaacttactatccggctggctttgacacacgcaagaagctctctttatcgctatccgcaattcacgccccactgcccggatacaagcagaaactctccaagagcatggatcggttcttcgaacggcttgaagtgggcaaagcagttgtgcgcgtgaactggagtattatgcccaagggcatggggctgtttgctgcgtttggagggttgcataatcattcccctaatgctgaaagagggaatgaaaaggtggaaaagttacatccggaaagctttgacggagaagacacgttcctccgatgcgagaggcagacgctacatcggcttccgaacagtaaggcgcttctgtttgcgttccatacgtatacgtatccacttaaggatgtcaaagaggaggggctgggtgaggagctggcgattgcgatagatggactaaaggaaggcagtgtgccggagatccacgagtacaagaacgggccatattggggagaagctgtgaaggcttttttgcgctcttaa

SEQ ID NO: 24072 - DNA, 279 bp, Emericella nidulans
gccaaaatggctgctatccaagagggtgctgagaagaccggcaaggtcgtgcaatacgttggtagcgttgatgttgctatgaagcaggtccgtgttggactgcatcagtttgacaaggacagcgccattgccggactcaagggcagcgacaacattatctccttctacactcgtaggtacggcagcaacccactcattgtgcagggtgctggtgccggaggtgatgttacagctatgggcgttacggctgatctgctgaaggttattgagcgtctgtaa

SEQ ID NO: 24073 - DNA, 454 bp, Emericella nidulans
cgatgacggaacgatcaagcggtggtttattcctgcgagcttcggagcgtccggtcacacgtcgagttccggtagcgatttggatattacgagctactttacccaccggggtcacgttggagctgttactgctttggcggcatgctctccatcgcagaacttttcgaacggtggccgcacggttggcgatggctgggttttctccggtgggcaggatgctagtgtacgagtctgggaaaggggcagggtagatcccaaggcaactctggatggccattccgatgcagtctggggtctatgcgtccttcccggaacagcaggctctatatttggcgaccagtctagccattatggcggccccgatcgcgttattctcgcctcgggcgccgctgatggcaagataatcatctgggcggtaagtggaccgcctcaactttcctcaccacaagctgga

SEQ ID NO: 24074 - DNA, 718 bp, Emericella nidulans
ggatcaccggcagcaccaacattcttgtcgccggtatctacaactgcctaggccctctcgccaatctcctctttatccttttcgttctcgacaaagtcggacgccgccgacccatgctctttggagcaatcggtattacaatcgcgctgttctgcgaggcggccttgaactctcagaacgaagacgggcaccgtagaggctacagtatcggcggtgtcttcttcattttctgcgtcaccatcatcttctcctggtcctttgggccttgcagttggtacgtttctgtagcttccattacattcgcagaactgacaggaacagggtctacatggcggaagtcatgcccatgcagatccgcggccgcggaaacgccttcgctaccggcgtcggcaattggactgtcagcacgctctggtcgcaagtgtctcccatcgctctcggcaagatcgggtggaagttctatttcatcttcgcaggctggagtacgtccgcccttcaaccccatcccctctgatccaagaatactaactcaaaaccagatatatgtgtcacactacctgtagtatactttttcttcatcgagacgaaacaaaaatctcttgaagagatcgatattctgttcggagggcgtgcgctgggaaccctgccggaggatatcgcggacaaggacaacgaggtcgtggctacgacagagcaccacgataagagggaggtctga

SEQ ID NO: 24075 - DNA, 263 bp, Emericella nidulans
agcaaatcagcaccaatgtcaccgagctcttgggcgtccgacacccagtgctcctggctggcatgtttaatgttgcttcccccaagctcgcagccgccgtgaccaatggcggcggccttggagtgattgggggagtcgcatatactccagagcttctccgcgaagccctgaacgagctcaagagctatctcgtagacccgagtgcgccgttcggagttgacctaatcaaccccaaagtcggcggcggcgcccggaagaccaag

SEQ ID NO: 24076 - DNA, 276 bp, Emericella nidulans
tctgccatccggatactgaacattgcgtcatgtcgccatatttcttatgcggccttcgaagaagcgtttgcggagggcaaaaactatcctaacttgaaagagttggatgtctcatttcacggcgtgatggatgactatcttgtgggtcgtattctccaatgctgcccagcaattcaaaaggtcgttgcattcgcttgcttcagcgtgcgagaacctcaggttcccaagggggtgtcactaatcggcggtctacgcactcaagattcccttgcttag

SEQ ID NO: 24077 - DNA, 664 bp, Emericella nidulans
tcctgtgccttctggctggacaggttcagagactatgtacctgttgagatctgtccactacccaagctcgacagcactccaaatatgctaacctcgaaaaagcgcaatcccctagccctccactcaatcacagaatcctgcaagaccatgtccgtcacaatccaaactgtctccctgctttcctacgcaaaggcctacgcgcaccttctcggaacccgtgacgtcgtgttcggtcaagtcttagccggccgaacactgcctcaccctgaggcagaccgtacattaggaccattattcaacactgtcgcgcaacgaataacgcttgatcccacatttatgagtaactgcgctcttgcgcaacggctccaaagggatggcgtcgaagcacaaagacatcagcatgcaccgctgagaattattcagaatacgctgcgtcaagagggaaatcttgactcgaagcagttgtttgatgcactctttgtgttccagaagagtgccgcgctctctcagggtatcctgaacgagcaggagatttggacatcatatgaagatgaggatttcgtcgttgacgcggaatataaactcaatgtcgaggttgaccattctcacgacgaggacgatgttagggcaacggcaaatggtgccaaccataaccagaaaatgc

SEQ ID NO: 24078 - DNA, 1356 bp, Emericella nidulans
agcaaacacttgttcggtgtcttcagccatgccaaaaacgcttaccgcgagcgcaaggctcaagttcaagccgagcggaatttgaagatcgcagagaaaattgctgagcgagaagcactgagggcgcttcagaactatactattgaagatgccccatctgtcgcgtcctcgcagaggagtcgttcgcgacatcatcgccatcatcatcatcatcatcattcgagtcgaagccaatatcaatacgaccgcccccgcggcggatcggtctacgaagaggatctacactcttccgcgtcgcgtgcgcggtctcactacgagcctccaactgaaatggtccggcgtcacactcatcatgatattaccattcgagaaccggacgctcgccctgttactgctcgctccaaatccgacgcgcatatagatatggacctagcctatggcgagttccacccatccgccatagctccgcgaggatctccacaagatcagcagcttcagtcgatcgacgatcccgaactgaacggccttgtaagccgcgcacagtggttattggaggaggccaactgcgtccagcacaccgcgacagccaccatcgaccatcttcaaaagaacccagatgctatggcagcggtggcgcttactcttgcggaaatcagcaacgttgctggcaagatggcgccgtcggcgctcacaatgctgaaaacctcagcgccaatgatttgggctttactcgccagcccgcagtttttgattgccgctggtgtcggcctcacagccacgatcgttatgttcggcggctacaagattgtcaagcagctacaacagccttcgcgtgctctgcgtgaagaagtattcgaagaacaatccgaccccagacaaatggacgagatgattgaattcaacaccgactgcctcaactccgtggagatgtggcgacgaggtgtagcagacgcagaggccgagagcgttgcaaccgtggacggcgagttcatcacgcccagggctgccgcaatgtccggcatcgacataaccaccgcccgcatgtcccgggacccccgcttcaagttcgacgatgatgattccgttgcatcttcccgccggtcccaccgttcccgccattctcgatctacgcacagtcacagccatgccccaaccaaagtggatacgagggcagaatcgatcttttcaagacgcactaaggccgctccttccaaagccccgtcaaaggcgccctcgaaggctccctcaagggctccctcaacatccgagtcgcgatattccgacaaagacaagagcaagaaacccaaggaaaaggtgaaacggtctagtcgcctgcgcctgatgttcactgcttga

SEQ ID NO: 24079 - DNA, 426 bp, Emericella nidulans
gtttgggaactcgcttcctgccgcctccagaccgaccacatcggtcacactggctacatcaacaccgtcaccatttcccccgatggatccctctgtgcctccggtggtaaggacggtgtcactatgctctgggatctcaacgagtccaagcacctctactctctccacgccggtgatgagattcacgcccttgtcttctcccccaaccgctactggctctgcgctgctaccagcagcagcatcaccatcttcgaccttgagaagaagagcaaggtcgacgagctcaagcccgagtacattgagaagggcaagaagagccgcgagcccgagtgtgtttctctcgcctggtccgctgatggccagactcttttcgctggttacactgacaacaagatccgcgcttggggtgtcatgtcgagggcgtag

SEQ ID NO: 24080 - DNA, 531 bp, Emericella nidulans
acaccgtggttgacccggcgagatgctgcaatggctcttaccaatttggcccaaacttacggagaattggacaagcacgacttggccctcccggtcttcctgcgtgctttagaactactccgcgaagatgaaggcccaaaaccgaccgcttttcagttctacctgctaggcattattgcgtccacactcaacgttcaatcgctgaagcctcttcgagcggacgatcccgatgccgcgcgcaatcatctagttggccatgccagggaatgggcaatgactgctaataaaataatggacaagattcccgacaatgagaaagacgagtcatatctcttggggtgtatatctgttaagaacaccctaggtcagcttgctgagcggcagggcgagctggaagaggcggaaaagtactacagggaagcaattgatactgctaaggtttatgccagtcactcgacaatggttgacccacgacatgaggaggtggttgatgatttaagagcagctgtggaaagagtatcgaagagataa

SEQ ID NO: 24081 - DNA, 1808 bp, Emericella nidulans
tgtcttggggcagccgctgcaaatacctttcattgctactaccgtgcttgttgctaatacgataaaatcggacctcgccgccgacgtcctaaaacacgcagttgagcgcttccagcacagtgttgatgccggtgcttggcgcgaagtcaagcttcttgtacgctatctcggatgcttacaatgtatatagtagggggatggcgcctttgcgatcttggaggaacttttttcccgtgctgttgatcttcaaaccgcgtcttccgaagatgtaggctgttcttacttctttggtatggaagtgtgctgacatctgcattttgtctagctaattggattggagctcgtgaaaatcattctatacacgatcccgtacatcatggcctccccggtcagcgggtttgaaagtcaggcgctgggcctactagaaaagactgatatcatcgcatctacgccgcatacgcttgtagacttggcgaaccccttcggacctgatagtcagaaatcggcgactgttcccagcgttatcagcctactccaaagccagctacaagccgaagcgagtcgaaattgggaactggagtgcctgccccggccatgggcaaatgtaagagaaggcgatgaagaaccgaagcgtcttgaagaagggccgaagcatgtgttacctgatatcacgataccgagccccgtactaaatggatcgagggcaatcttcccagaggtttttctgtctgtctatggagatcaggatattgagacagttccatcaacgtcaaacattgcttcttctctgctgagagacgctcttgttgacaccattaacatcatggactttaaccgcattgcaacggcaaagttcctgattgatctcgactgttattttacacccagcatcttcgtgaagcgtgccactccattcgataagttgcgcgatctccctgatgaccggacaacgtggaaaccggaggacgtggctgtagatgctgttttctctcagctgtttcaattgccttcacccgagcacaaacttgtttattaccattctgtcctcacagagtgctgcaagattgcaccggcggccattgcgccgagcttgggtcgcgcgatccgatttctctatcgcagtctcgacgtaattgacctggaacttagtcaccggttcttggattggtttgcgcatcatttgagtaattttgggtttacttggaagtggagtgaatggttggtcttttatcataaccgacacgcgtgccacaacattgctaactaacctggaataggattgaggacctagagcttccccttgtacatccaaggatggcgttcatcaatggcgcgctagataaagagattcggctgagttttgcccagcgcattcggggaaccctcccagatccttatcaagacctcatctctgaaggaaaagagaaggacacccctgacttcaaatacgcatctgacagtgagttgaactggtgtatggaaaacgaattcttctttggaacgctaactttccctcttcagcgacgccctatgcaaatgaaggcagagaaatcatgcagctcattcgtagaaaggccgcagacgatgaaattcaacctcacatcactgcgatcgaagagcgagcagctggtctgggagttgagatccccctgttaccctccacggatgccttcgttacctccatctgcttcgtaggcgcaaaatccctctctcacgttctgtcctgcatcgagcggaacaaggaacgcctcttggcgattggacccaagtcacctggtgcgcgtcgccaattatcacatcagtcatga

SEQ ID NO: 24082 - DNA, 288 bp, Emericella nidulans
gacgaaggaaacattttcgaggcgacgcccgaagaccgtcgccagatcggtgtcgtcagtgcatcgttcctgatcttcaatcgcgtcattggaaccggtatcttcgctaccccgagtacgatcctgtcgttgtccgggagtgtcgggctatcgctattcatgtgggttgctggcactttgattgccgtcgccggtactgcggtctacctggaatggggtactgccattcctaagtatgtttgttccatacaatgttcaaagttagggcttgtactaaccagactagga

SEQ ID NO: 24083 - DNA, 336 bp, Emericella nidulans
atggccatgtcgaagattgctaccctcgcgggtcttctcgcctctgctggcctcgttgcaggccacggatacgtgacgaagatgacgatcgatggagaagaatatggtggatggctcgctgatagctattactacatggactcgccgccggataactacggatggagtacgacagtgaccgacaatggcttcgtctcccccgatgcctttggtaccgacgacatcacctgccacaggggcgccactcctggtgctctctctgccccggtgacagccggcagcaagatcgatatcacttggaacacctggcccgaatctcataagggtgggtattaa

SEQ ID NO: 24084 - DNA, 404 bp, Emericella nidulans
ttcaaccgggcgtcacgcaggcatcagattggctcaagactcatcgaaaacccagtcgaattgcacgtcgaaaggagaaagacgtagccaaggatttgaataaagaagagcggaagaaacaagacagcgacgaggtcgacgacgagccgttgttcgtcgacaatctgctggacatcggccaggagacggacctgctcgctgaagcgaaggatatccgtgacgagctgaacatgatccgcatggtcctgcactaccagaaaaacgtccttgacgacttccatgaagttgtgggagagatctatctcagccagggccaaagccagagagatatcaagaagcggtttggagagcagcagcgcacgatcgatatacacctgaaggacattgaccgcatggacaagcaa

SEQ ID NO: 24085 - DNA, 336 bp, Emericella nidulans
accccttcgcgtcctggtgcaaaagatagaccacccgttcaatttcaatcgcaattccaccccactcaccaagctcgtctactctgtaaccaccaagctagctatgtcggtcagcaatacactcggccgagatgagaaatactccccaacagtagagaaagtcgaggatgcagggcacgctgcgctcaacaacatcgattacgatgaggagttctcgccggaggagcagaagagaattattcggcggatcgatctgcgccttgtcacgatcactggactggcgtactgcgtttcgctgatggataggacgaatctgagtatggccgctgttgcggg

SEQ ID NO: 24086 - DNA, 1313 bp, Emericella nidulans
cattcggtgacgccgccgcattctgtctcgattactatctcaaaccgaataatgtcagtcgcctgtgcgcgctcatctgctactatcctaccagcatccccgacattcggtcgcgatacccgccgtcggtgcagatactaacacacctcgctggcgataccattgacgtcgtcacgacgccgacccttctgggactccagggcaagaagaagagatcgaccaggcgtatcaaccccggaatcgggacgggagaactcctcgacatcggacaccgcgcgtacacttactcggacgcccagccgggttttgcggaagtagacctggatgagtaccaccggctagatgcagacctcgcctttacgcgcacgcttgaagtactgccaaggcgtacggtcgggagggtgatctggagcagccgtgggaggagcatttgcagggtacgttataatcttccctattcgattgcaatccatggctaacctgcggacaggcaagttcttctccatgaatcttagcgatacaatgtcccactacaccaagaaccttacccccactgccacctatgtcccaaccctaagcggacgccacgggtcccgcgccctccgtcggttctacgatcagtatttcctccacaaactgcctccttcaatgcatctccgcctaatctcagcaccgtcggtgctgatcgcgtcgtcgacgagctgtatgtctcctttgaacatacgcaagagatcccctggatgctccccggcgttcctcccacgaaccgcaaagtcgagattgttctcgtcagcatcgtcagcatgcgcgcgaaacagctttactcggagcatatctactgggatcaggctagtgttctagtgcaggtgggcctgcttgacccgaagcttgtgccgaaggagacgcaggagaagggtgttgatcggttgcctgttattgggcgcgaggctgcgaggagaattttggatgaggacccggaggtagaggagccagagtttcataatcggttgatcagaaggtcgaggcagaggagggagagtggtagggttgccgagagctcggtgccgcagtcgcccattgtgcagtctgaggcggaggggtctgggccgaagaaggggaagagggccggtcctcaaaatggggagcaaaatggggagaagagtggcattcaggctggggatgatggtgaagggttgaaggatggtcaagaggatggggatgcccacaacagccatgttgaagagcgggacggagctgaaaacaagaaggaccaggagaaggacaagaacgagctcaactctgaatctaattag

SEQ ID NO: 24087 - DNA, 201 bp, Emericella nidulans
aacatggacgcctatgattcatacattggaaagccggtcacagagctaccgactccggctctagttctgagcaaaccgaccattgagcgaaacatcaagcagcttcttcaggatgttgagaggctggggattgcgtttcggccgcacgttaagacgctcaaggtacagagccattcaaccaaagcgcagttcgcaagctaa

SEQ ID NO: 24088 - DNA, 921 bp, Emericella nidulans
ccgcttctggccttggacggttatatcaacccatcgttaaccgtcacggctgtcaattcccagcaggctcaggtcttcaccaactacgtcctcgcttcgtttccatgcttcttccggtgtacagaaacacgagtccctgtcaattgggtggaatatgttgatcaaaggggcagctcgatgaactcttgtttcgactgggccgtacgagcatgtacatctgcatatctgggctcccttcacgacgatcagcgatatttggttgcgtcgcggagcttataccaccgtgctcttcgcggcctcggcaatctattatctagcgaaaagaccgccaagtcggatgaggttctagcgtcggcgatcgtattagccattttcgaaaagcataactgcagcagcccggatgcgtggctgcgacatgccgccgggatccggacgctgatgaagcttcgtgggccgaaagcgcatctggagggctttggtcgcgcgatgtacattgtataccgaaactttctcattacggcggctttggttgaaggcgaagcttgctttcttgaagagcctgagtggcaggcgctcaacgaggagatcgccgccagtgatgccaagttaccgacttcttcgctgtatacagacgtggtcgagagaggattcctctcagtaattaagatcccggggctcgtgaaacgaacacgcgaactccagtgtctttcatcgaagaagagggcggaagttcaaccggcactcctccaagacgtgcaggcaactcgagctggacttcgaggcatatacacggaatttggagtcgcagtatcaatgcttcgctcgggccaggatgaaaacgataccttcgtggggcctgtcccgaatttcttcttcgagggctactcttctctttttgcccgaggcgtccgcttagattaa

SEQ ID NO: 24089 - DNA, 549 bp, Emericella nidulans
atgttttcgaggctcctttccaccacggtcctagtggccctggccctcacaagccaagcagcccagaccttcagcaataccggcaccatcgctggctgggacagcaccaaccaagaacaccgcggcaccgtgcaagaagtcagcaacgtcgccttcgaaggttcccaagccctaaaagtaacacaagtctacgattccagctacagcgggcgctaccactcggagctcgtacataacgccggctaccgccgcggcgaaacggttttttatggctttgcgttccgcctgcaacaggattgggactttacgagccagtcgtacaatctcgcgcagtttatcgctgatttcaacgattccgggtgcgacgactggatgccctcgacaatgatctggctgcaaggaaaccagctctactcgcgcgtgaagacaggtaccgtctgtgcgcagcagacacagacgtttgcgaatctagcgtccgtctcggcgggtgaatggcataaaattgttttgcaggtgaaatgggagtctgactcgacgggatttttcaag

SEQ ID NO: 24090 - DNA, 1014 bp, Emericella nidulans
atacaaagtcactcgaggtcttctggaccgcttcggccccaagcgcgttatcgatacacctatcacggaagctggcttttgcggtctggcggtcggagctgctctcgctggattacacccaattgtaagtcatccttcgatgcaggcgcaggctcagaagaagcccgcaggacattgctaacaagggcgtcttaaccagtgtgaattcatgactttcaacttcgcaatgcaggctatcgatcaaatatcaactctgcagccaagacgcactacatgtccggcggcattcagccttgcaacatcaccttccgtggtcccaacggttttgctgctggtgttgctgcacagcactctcaggattactccgcttggtacggcagtattcctggtttgaaggtcgtggctccctggagcgctgaggacgctaagggtctcatgaaggcagctattcgtgacccaaaccccgtcgctgtccttgagaacgagtatgtgaatcacctcaaaatcactccatcgaagcgtatcacaactaatcgtgtccagacttctatacggccaggccttccccatgtctgaggctgcacagaaggacgattcgtcctccctattggcaaggccaagatcgagcgtcccggcaaggacctgacaatcgtctctctctctcgctgcgttggacagtccctcaacgctgctgctgaactgaaacagaaatatggtgtcgaagctgaggttattaacctccgttccgtcaagcctcttgacgttgagacgatcattcagtctctgaagaagaccggccgcctgatgtgcgtcgagtctggtttccctatgttcggtgtttcctccgaaattctcgctctgtccatggaatacgggttcgactacctgacagctcctgccgttcgtgttactggtgctgaggtacccactccttacgctgtgggattggagactatgagctttccccaagaggacaccattgttggccaggctgccaagcttctccgattgtaa

SEQ ID NO: 24091 - DNA, 374 bp, Emericella nidulans
acttcgaaaacgaccaacgcaacgccaaatcccatcccgacaatgccgcctttctaggcagcggcggagggtcatcctcccgccgcaacaggtctccaggaggcacaccaaccaagcacgcatggtggtcaatccactactacgagcaatatttcgacgtggacaccaatgaggtcctccgccgctgcgtggcctctgtctacccgcgtacaacatttctcgacgtcctcgaaggcaatgcagacctctacggccctttctggatcgcaacaacggttatcgtgatcctctttcttacaggcacaatttcacaatggctctcgaacaacgacaaggagcacttcaagtacgacttcacgctgctctctggggcg

SEQ ID NO: 24092 - DNA, 442 bp, Emericella nidulans
gaggccaccttggagcacgtccttcaatttaccaagacgatagagtcacttggtctgcacggtcaagaggaactggtttcctggaccactcaagcccctcgtttatggctgactaggcgaagagttgactcgttggatcaggtccgtaaggtgcttgctgctagtaaaggggactcgaggcaggtagagagaatcgaaaagagacaagtctctgaaacagatgaggtattattagacaactcaacttcggatgactgggacgccggctgggatgacgagaaagaaaatgctcaaaacaatgacgacgaagaagacgttagcgcctggggcttggacgatgatacagatgacccgaaggtcaccaaacctaatgatgcatcaggggttgacgatgatgaaaccggggatgcttggggttggggagaggacgacgaagacgaag

SEQ ID NO: 24093 - DNA, 1567 bp, Emericella nidulans
atgaccgccactctcgaacgcagtctctctcgcacctccagtgtctctatgccactctcgcctatgatctcattccgccatgaagctacaactcctatctccgaatcatccctttctcacatccacgagcggctctccgccattgaatcccgtctcctcgagctaagatctaccgctctgactaaggatggatacgtcgaccgacgcaatcgggaagatgagcatatccgtcgagaattcgaagcccaccgatccatcagcaacagaatcgacctgaatgttgttgcattgagagcggacgttggccagttgaagtcaggaatattacagctaaagtcaagcctcggacaagctgggaatgaaaccgtcttccttcgcagcgatgtggatcgactgtcgaagaatgtcgaccagatccaggttgatttagaacatatgcagactgacgtctgtgggtgtcgtgtggagattagtaaattgcagtctgccatcagccagcttcgcacagaacttatcacattgcagcatgagacgtcgcggcatttgaactccttcctcgaacgcttttcccttatcgaagcgcgcatgaagcactccgaacgtgtccggtttaactcgctggctcatactacccacgcacctatcacacctgttcctattgttgaggaagatgggtccttgcgttggccggattattttcccaggactgtgtggaggttctggtgtttgaaaaaacgcagtcggcgtaagtcacataagtgaatacccccccaaacccttctaacacactctagacaaccgtttggcacaactcgccgaattttaccagctgggtggatatgaatattggggccgcatgcatcagacagatgggatgttcagtgatagcgactctagcgattccagcgactgcccttcaaacctcacccgcgctgaagcggttcgcatgttcccggaagctgcccatcaagctctcgccgcaaccctgggtctcgtgtactataaaatccgcaacgaggtgggagaccaccctttatctcccattcagcgcccaccgaagcgacatcaggaagaggtggcctccgtctcgtcaagttccaagcagaagcctgtcaagatggctcgccgtccgacgaacctctctcctaccgcccttcacaaactcatcactggaggtccatcgctggaatccaaatccctgacatctgaagaatctgccaaactcggttggaacgctaacgcgaccgagatttcggatgatacgatgagcaaactccggggcattgtttcagaagaagtcgggactattctccgcgcattagaacgtggtcgactgaagatcgtacctagcagatctgagcgcatggagatgagccccacaggttctcgctctagttctcgcaatgacaaggctcctgctgtcaaggatgtggaacccactgttccggacacagttcccactgagattatctccctttccttgagaaaggacgtgcaaaaggcagaagtggggattgaacctaccattcctgatactgcttctgagactaccagcgtgtcgacttga

SEQ ID NO: 24094 - DNA, 449 bp, Emericella nidulans
ggcgcaagcattgcccgcaagtttgcccaagcatactctgtcgttgtgctggcccgcaacccatccaactaccacggggtcgtggacgagatcaactcctccggaggccaagcactgggcatcagcgccgacgtatcggacagtgccagcgtgcagagcgcattcgagaagatctcacagcagtataaggacacgcctctggcagcagcagtgttcaactctggcgggggatttgttcggaagccgttcttggagttgacggaggaggagtttgcgggtgggttcaaaagtcaagggtgcgccttcccttatccaatatattattcgtcttgtctgaaggattgagagctttactgatgacaagcacagaattggcgcattcaacttcgcgaaagcgacccttcccctcctccagaaggctacaggtctccagcacccgccaactttaa

SEQ ID NO: 24095 - DNA, 1168 bp, Emericella nidulans
cgcaataaagacccggaggatattcttagggaacaacatgaagaaatgcgcgggatgtttctgcagctggccaaggacctcaagaaaatgttcgagctggcccgagcagagatcgaccgggtacgactcgcacggtgggaagaggagcagaaagcgaaagatcaacgagctttggatcgggcgattaagcagtccaccatgttgtttgaaaagcgacggctggagattttgggcgaaacagggagcgatgccccggagactacaactgatgatgaagaagtcgagactgataatgggtctgagaatgatgacgaggagggtgagagtaatatgtcgacggaaaccgaagaggaagacggggatgacagggacgatgatgtgggcctcactgcagaggagctgcgattgaaatatgcaaatttaccagataccaacccccatccagaccaatctccatattccgatgaggactctgaggacagtgacgacatcgctgctgacaatacccctggcgacacttctggcggtgtcaaccgatctccgccgccagattcttcgggtcaagtagaactcgacgaagttgacccagtgctcatagatgatagtgatgaatctaccgatatggacgatgacatgggtgacagcgatgacgatggatatagcgaggctgagtcggatgacgaagacggtggtgaacctggattactgggatttttctccgcaaaggacttaagtctcagtaatttgcatcaaactaactctggtgagggcgatactcatcaaacaggcgctgatggtgaccgcaacgaggattcatcctttgatgagtccgaattcgggtccgaagacccagacgaagttacgcttgttcctactggaccaacgaataaagacctgagcacaccggctacagtcacagcttctgcggagctggaacctgcggcaatgaccccttccatagatcagacatctaccgaagagcctatcgccatcggtactgagaccccaattgaaaccgtcgctgaggatgccgctgcgctcgctgatacagagcccgttgacgttgatgtattggatacttctactaatgacagcgttcctccagttatgtcacctgcgacaaacctcctcaagcaaattgagcggcaacagcatgagccctaccata

SEQ ID NO: 24096 - DNA, 1087 bp, Emericella nidulans
cagacacccaattcacctgaacctctgcaaaccttaaggatcccatccttgtttcctgagagaatgaagctctcacacctcctcacctccgccgtgagcgtcctctccctcggcctcacagtcgaaggccacttctcacgctctcgaaatgatgccgtaggccccaagcggcctttcaagcctctcccctacagccacccacgcaagaaagtctgccatgtgcgctcccatggcgacggccgcgacgactcggcgttcatcctctccgccttgaagagctgcaataacggcggaaaggtcgtcttcgccgaagagaaggagtataccatcggcacggctctagatctgacgttcctgaagcatgttgatcttggtgcgtttattatacatgcccagcttcttttctgcattgcacgtatgctgatcatgggcagaaatcctcggccgcattcagttcacaaacgacacggattactggcaagccaactctttcaaacacacgttccagaacgcaacgaccttcttccagcttggcggcgaagacgtgaacgtctatggcgggggcactctcgacggcaatggccaaatctggtacgacctgtacgctgaggacccgcttatcctgcgccctattttgtttggagtgatcggcctgcacggcgggacaattgggccgctgaagttgcgctactcgccgcagtggtaccagcttgttgcgaacagctcggatgtgctcttcgacggcatcgacatttccgggtacagcaaaagcgagaacgaggcgaagaacacggatgggtgggatacgtaccggtctaagaatattgttattcagaattcggttatcaacaatggggatggtatgtattctacccttgtccctgccatagaagaatgtatggcgggtgctgatatgttatgtacagactgcgtctccttcaaaccgaacagtaccgaaatacttgtccagaacctgtactgcaatggctcgcacggtatctccgttggttcgctaggtcaatacattggcgaggttgatatcgtcaagaacgtgctcgtctataacatctctatgtataatgcttct

SEQ ID NO: 24097 - DNA, 1892 bp, Emericella nidulans
tgagcctcgggatcatctttgttccgcatcggcgtttctctccgccttcagctgcactacgacacctatcccactcgagagctctacttagtctcttactttgtcctcggtttctcgtcttttgcgtcataatttacgatggatggccggggactcactcttcgcagcaaaaatcgccgcccccgtccccagattagtgcgccgaaacccatatcgggcccgctaccccagaatcaccagcccgcagcttctggctctggcactgcttcgtcgggctccggatcgcgcgactatgcgtcgtcaaatcatgcgacgtcggatctagtcaagcgaagatattccacacgtttcaatcaagttcctgattttgacggcgcccctccggttccgagtgtaccgcaagttccctccgcatatgcagggcttgggcccccgcagcctagcagaaaacagtcggctgaatcctcagggcctcccgaagttgatctaactgccctacgggatccaagtttaccagttgatcgatgtgagttaccctcaatcagagctcctagcattatccgcagcctcagtactgactcttcgttctttgatatctagatgtgaccaacctgctcgcaaatgcctccgaagatgatatcagagaataccaacaggccctcagaaaggtcaagaaccgcacttcgaccgaccttcaacagaatgtgtatcaaaaccgcacccaattcatccgtatcagtcaggaggcggacaagctcaaaggagagatgaagactcttcgctctttgatggctgaactcactactgccttgggacaaacagctattggggattcgccgaaccccatgtctcctactttggatgagcgagcatcaaagcgcagcaatcgcagctccgtcgccaatctggagagcatgtggaacgttcagctccagacgttatggaaaactgtcgaaggctcacagaagttcctgcccatggttcctggtcggcatattgtgctaaaaactggaaactgggcggaacttgactctgctacttggaaaccaagacgcccggttcatctcgtgcttctaaacgatcaccttttagtcgcagccaagaagcgaaaaagagtcgaccagagtaacccgaaccaccgcggtccagtcccaactaagctgattgcggaggaatgttggccgctgcaggatattgatatgattgacctgggcgccaacttgactggatctgctcgcgaagaggccgaagatcgtggtatcacgaatgctgtctgcgttcgcgtcggctcgaagccctttacatatcgtcatgacaaacgaaatagcaccgccaagagtgaacttttggcgacattcaggaaaactgtagaggacctgcggcggactttacgctcagaaaccgaggcagctgggaagaacggcgagtctcttgggtttatgagtgccataaactccaggaactcgttgttatgttcgccgaaattggacctcagtgagaatacagacaacccccgcgacaggcctgaagtccgcattgacgttgatggaaagcaacagaacttgcgctgggtcgacagccaggtggatgaactcgacattgatatcgcgcttcagagattcgaagaagctgtctcaaacattgaccgactgcgcaaattggcccgtggcctcaaaggaaatgccgtcgcgcaggatgtaatcaacaccaaggtcgatgaacgagctgcgaaactggcaggcatactttcacggtctctggttgatactcacgggttcccagtagcgacgaaaacaaacgtcgtctggctcacccgactcggttttgaggaccaagctcgagaatcctacctcaaagctcgctccgatgtcatctccaaacgaatccggtaa

SEQ ID NO: 24098 - DNA, 315 bp, Emericella nidulans
cccagtccgcggagtgtaagctgccttctcgcgctcgaaatcggcggaaagccatcgctagtgacgatgtttggagaacacgatcctagcagcctgggtcaccagggggcaggaaagatgctctcagacgcttgggcgttcgacattgagtccgagaagtgggacaaaattctcgtggaaggggaggagcctccatctcgagggtggttcgacgccgacgtgctttacgggtctagtataatccttcacggtggacttgcagagtcgaatgagcgcctcggtgacgcatggtcattgcaatttgccggggcttga

SEQ ID NO: 24099 - DNA, 654 bp, Emericella nidulans
ctgctatcggtgccctccaaggagggttgacgatggatcggtttggccgcaagttcacgatccagatgggcgcttcgatctgtctcgttggggcgatccttcaggctgccgcgacaaacctggctatgatcctcgtcgggcgtattctcgcgggttgggctgtcggtctcatgtccatgtctgtccctgtctatcaatcggaatgcgcgcatcctcgaaaccgcggtatgattatcggtctcgcccagcagatgattggagtcggtttcattgtcagcacgtaagccgctcgttccttaaaatcttcgcgactctgaccgtagtagatggattggctttggctcgttgcacgcacccgagagcagtgaattccaatggcgattcccattggcgttccaggtcgttcctgcagtgatcctgctcattggactgttcttcctacccgagtctccgcgtcacctgatcggaaaggagaaatacgaggaggcaatgaaggttttgcgaaaacttcattatgacggcacgaacgaggactggattcaacgagagtatggcgagatcaagtccaccattgacgcagaaagggccgtgaccgagcctggttggctagtgatgttcaaggttcctcagtataggactcggttattgtacgct

SEQ ID NO: 24100 - DNA, 916 bp, Emericella nidulans
ccagcttcatcccgacgtggtcatgcacgcttctatcggccctcggcactcggaaactcaaaagctggttgatcacagcaaagtaaaccgctggcgcccatcctcaatgaaatgagagcgttcaaaagtgaagaggaggttgtacagctgcggcgagtcggccaggcatctgggcgggcattcaccgaggccatgaggcactcgttcacaggagaaaaggacctatcatcctttctggaatataacttcaagctcaatggctgtgatggcagtgctttcgttcccgttgttgccgctggctcggtaggtttattccccgaaaagggaagatgatttactaacaaagatagaatgctctaagtattcactatacgaagaatgatgacattttcaagtaagagtaatgagcgtcattgttagggtgcctgctaactcatcgaagggacggagatatggtccttgttgacggaggcggtgtatgtctccttgggttcaaaaacttggattttgctaattgctgcaggaattgggcacttatatttcagacattacccggacttggccagtaaacggcaagttctcggatccgcagcgcgacctctataatgcggtgttgaacgtgcatcgcagctgcgtctccctttgcagggagagcgctggcctctcgcttgaccgcttacatggtatcgctgaaaatggattgaaagatcaattgacacagctgggctttgatctctcgggagatgtatgtcaaccgtacgtaatgtggcttgaccgtcggcgctgaccgcaaccaggcattgaggactctttttccacaccacttgggccactacatcggattagatgtccacgactgtgccgggtattctaggggctatgaccttaaggccggtcaatgtatcacgattgagcc

SEQ ID NO: 24101 - DNA, 657 bp, Emericella nidulans
agtaatgcttggccctcaaagtgcggcaatgggggaatcgactcagattacacccacgtctatgtcggcgcggtagcaaatgagctatatcttgcacttgctgctcagctcgccaatcgcgcctccgacagcgagtactaccttggctgggccaaacgccaatggtcctggttccgggatagcggattgattaatgagaattacacgataaatgacgggttgaccaacgactgcgcaaacaacggcgccacagcgtggacttacaatcagggcattatcctggggggtttggttgagttgaaccgcgccgtggataacgagacttcctcaaattcaacgtatctacaagaagctcataagattgcgatgagcgcaatcgccgcattgacagacgattaccatgtccttcatgaaccctgtgagccagataactgtgggggagaccaaacgcagttcaagggcatctttatgcgaaacttgaggctcctgcacgaggtgacaccaaatgatacctatgcccaggtggtcaatgcttcagctcagagtctgtgggcaaatgatcgaacggatgaaaaccagtttggaattgactggtctggtcctgtggacagtggcaaagtagatgcttcgacacagagctcggctcttgatgcgttg

SEQ ID NO: 24102 - DNA, 600 bp, Emericella nidulans
atggcagccgctatcaagagccttgtggacaagtttcagggtcactccgaacccgccctccgtcaaccctcggctgaggaggtccgagagctgaaacagaagtatgagcaagcgggacagtcacaagtgtttgcgttctacgatcaactgagccagaaggagcaagcccagctgttccatcagctgtccgcctttgaccccgctcgcatcaacgaactcgcagacagggctttgaacccccccaaatccgagactggaccaatctcgctcgaacctctgccggaagtcgctaccgcctcaattctagactccgatccgaaagacatccagagctactacaatgagggtatcaagctcgtggcggataatcaggttgccgtggttctgctggcgggtggacagggcactcggctgggaagctcgcaaccgaagggttgttttgacattggtctcccaagtcacaagtctcttttccagatccaagccgagcgtatcggtaaacttcagcttcttgcaaagaaaactttgggcaaggacgcagtgatcccttggtatgtgatgacgagtgggcctacacgcaagcccacggaggagtttttc

SEQ ID NO: 24103 - DNA, 743 bp, Emericella nidulans
atgaacgtagatgaaagcgaagcgcctcagttactggacagtccatctgcggatcgtgatgacctggctacagttgctccagaggaaatcgaaatggaagatgatattgagtccatgccagacacagataggaagggtgtgcttcttgatgatcaccactacttttccgacgacgacgaccacatcccggccaaaccgaaaaggctgccaaaaggtacctctgagtaccaatcccactggttcttggatgatgtatcggactctggatctgacgttatggacgatgacgatgaggaggatatgcaaatggacgtctccggtgctcccgaagacggcgtattccccgataaccacgacgccatgacagaaggcggaccttctgaataccctcagtcagagatgttcctcgacccgtcaccagaggatgaagcacagcaactggaagagtacagagccagccgtaggaatgaagcgaaagatgacctagaattccctgacgagattgagcttcaccccaacgtcctcgcgcgcgaacgcttggctcgataccgagggatgaaaagcctcaagactagtccctggaacacagcggaggaccggccacacgagcccgaggactggcgccgtctacttcaattcggcgattacaaggggtccaagaacaggattctcagagaagctctcgtcggcggcgtcaacccaggcacccgcgtcgatgtccacctccgcgcagtccctgcctt

SEQ ID NO: 24104 - DNA, 1144 bp, Emericella nidulans
ggcgctacaggctatattggaggcgaagtccttcacgcactagacaatactcaccccgagtatgaaatcgcagcgttgatccgaaacacggagaaggcgagtaaggtcgtcgcagcttatcctcgagtcaaggtgatcagtggcaacctggacgatacttctgtcatcgaggaagaagccaagaagagtgacattgttattcgtgcgtttgtgcattgctctccacgtcatgctgtgattctgacaagcaagttagatgccgcaagtaataagcacattgctagtgtggaggccattgccagagcgttgaaagaccgacgtgacggtaagcctctgcttttactccttcccacaacgaatagctaaagaataaatgcagcatactacgtccaggtcacaggtgccagtgtccttggaggccccgagatcgactccaatgcctatggcgagctatcagacagagtctacgatgacctcggcggaatccaagccgtccgcgacttgattcgcatatacccggaccgccgtgctgtcgacaacttcatccttggtcttgccggaagcggtcccagaacggcaataatattcccgccgattatcttcggcaccggcagtggaccggtgaaccagcggagcattcaagttccttcaatagctaaaaacgcgctacaggaaaagcaagctgtttatgttggccagggtctgagccggtggggcgcaatccatatcgcggaccttgcacagctgtttgtaaaacttgttgagaaggctgttaacggtggaaatgatgatttctgggatgaaaacggactatactttgccgagtctggggaagaggtatgctctcatgtacaggcatcggttccaaccgtacgctgaccaccaataggctttcaaaaatatagctggccttgtcgctgaggaaatctacaagctgggatacaccgacaagccgtgctcagttcgctctatcacaccgcaggagtgcgacagtttgttctttgcccatggggctgtggtcctaggtaccaatgcgcgtggcagagctctacgtgctcggaagctgttgggatgggagccagtcaaggggacattaggagactatattgctgagactgttgctgctgaagccaggacactttaa

SEQ ID NO: 24105 - DNA, 416 bp, Emericella nidulans
gattccctgccttcgacaagaaactcaagagtttgattaagagcaagaagacgtccttgatgcaggaattttcgttctggcctacaacgccgccgcgccgcctgggaggcctctttgaacttcgatcttacactcttcatcctggcaatcttcttgagtgggaaactcattggcgccgtggccttaaggctcgtcgcgaggtcatggaaggcgtgggcgcttggttcgtgcagattggagacctgaacacggtccaccatctgtggcagtttgcaaaccttgaagagcgcaagatccgccgggagcagtcttggggcatagaaggctgggctgagacggtgcataaaactgttccgctcatccaaaccatgcagagccgcatcttaatccccatgccctggagccctgtcggctag

SEQ ID NO: 24106 - DNA, 495 bp, Emericella nidulans
aactccgcaagcctcacagacatggttattctgcacgaacaccgtggtacccctactgcgatgacgatctcacatcttcctcatggcccgacagccagcttctccctgcataatgttgttctacgtgccgatattcccaacgctgcccgcgggactgtgtcagagagctacccgcacttgatctttgagggtttcaagacaaaactgggcaagcgcgtggttcaaattctgaagcatcttttccctccccgagaagctggaaaagttggaaaccgcgtggtcacctttgtaaataaagaggatagcattgaggttcgtcaccacgttttcgttaagacgggatataaggatgccgaactagcagaagttggaccgcgcatgacgatgagattattcgagatcaggggaggttcgctcgaaaaaggctcgagtggagatgtggagtgggcgcttacacagtacacgaggacttctagaaagaaggattacctctaa

SEQ ID NO: 24107 - DNA, 2832 bp, Emericella nidulans
gtcttggaagagagtctttctttacgcttgcgatcccgaaagcatcaccgatgaatcccgggttttcgagtcgtttttgtcacatcctgatagcatcgaggtgcttctgaaccgcggcagcgtctttcctacgccatcccctaagacaaaatccgagtttgataggagaacagcagcgatccatgcggagaccattgcacaagcctcgtatgacctgaaggaaatcaaagccgatgctctttggttgagcgaaaaggctgggattgatgaaatcaacgcgcttcggatcacggtcttggaatggcaaacccgtcctgcttcacgtctccttggccgactcgctgatgaggaagccactagcttgaaacgggcagccggagtcgatacttttcgggtgtcacttgccgggccgagtttcgctgacatcctcaacgccagacccggtgatggaaacagtgcagccgagtttgtttcggagaagaatagacgcctgcgactccgggaactatatctgtctgaacgaagccatatcgtcaagacagcccgcaaacttctcgccttatctttgaacagcgacggtcatgataacgcgcctcggccacagccaggtaggccgaataacttgcacaaattgggagtgtccatcttcgaaacgaagatcactgggaacaactggcatgaattcgctcgagagtgcatcgacggcgtagaaaaacgtctcgcggcccttgatggcgagggtggttggctgggcgtcgctgaaagcagcgaggatattgagagcttgtggagaacgacgcttgtggaagaagtgtcgcatctactccagagtctgtttatgctgctccagtcttcatcggagatccctcccgcagacctccttctgtcttggctccgtctaatggttgacaatgttttcctcgaatccctccaggctgtatgtttccccaggtttcatctcttcaaagacttactaaatctcggcagccctgtgataaccctctagaacttcttttaccgcttcaaggctttgtgtgcctgattactctagcttttctaaaactgtccctttctatccctgccattcttgataaagatcagaggaatgatacatcctccaagccaccttattatctttcaaaagacgacattggccagatcaacgaattatttacagcagttgggcttcagtcaagaactgcaagtcccgcagcgtttgcatgggggcttattttgcacaccatggcagagcttgctcttaacgataaagagactcgggagttggaacagtatcaaagtgccgtggattccttccagtcaaacactcctcattcaaactcaggtcgcgctgccgaaatatctctatatgaagagctccttgaagttgctcgtacgccgcgatatagtattgatgagtcgattgcacttctcacttcggatgcaatgaggaatattgcgttcgataccattattgttctagcgcaaaagattgggccgtcatcgactatcgatgatatcgtgacgaatcgttgggctcgcatggcactgctggatctcatccggtcgatgatgatttacttggattattcaccagaaatcgttcagtctgtcttggctgtccttactgggcctctctcagactcagcatggcccttggctacgtcaccggtgtcgtcgaacgatccacgtttgattttcatgagagatgagaatttaaccagcaacatcctccacgtggcgcgctcgcggttcccttatgaaactgtaccctttctaaagctatgccgagcgctactcggtgcagaactggtcgatgaagaaggcttcccacaaattctgagcgagttggaaagcatggaatcgttcacgcaggttgttccagacaatttccaaggttatgaaactattcgggaggatgaagatgcgaactacgttagtctcctccagcctcttccaatgacggaatccaagttgcggaaacagacacgccaggagactagtaatgctctcattgttaccggttcgtcggagcttcctgcagcaacagtgggtcagatagtatctgagtccaaacctgcagtcgttatgtggcaacaccggtattcctgcttgagttatttgggcagccggctagaggagtggagcgagaatggtggattctcagaagagtttggcgatgactgcgttgcggagacaatctggctgttcacggatctaatttttgcgtccacgaacaaccaagcacgtagcaacgataattccgctgcgaaaagcatcctggagatggccagcgatggtctttctagtcaaactgacatcatcggacttgtttttgacatattcgagcgcaatcttcaaagtgtcagcgcaaggactgcgtcagaaggtgtagtcgattcggcgatagcctgtctgcacttcattcgcgccctcattgcggttctacccaatagagtatggcccttactatctcgaagcagcctgcttgggacagacggaaagggcggtatgatgacggctattatatccgctacggaagtgacttctggggaatatccatttcttatggcctctgtccgtctatttgaggctgttgttgatgacgcaatgtcccgtgctgtcctaaggcgatgcccagtagggaaggcaggggttgtttcggactggacttcaggagtcccgtcgcacatcatgagacgcattctgctcaactatgttcggataatggtcgaggtgtacaacagcaatggcaactggaggttcaacgctccggagaggaagttcgaaattaccactgcgattgcaggggtgctcgaaagaatactttactac

SEQ ID NO: 24108 - DNA, 1638 bp, Emericella nidulans
atggcccagtttgaagtcgaagcgttcacgcttctggcccttgcaattgtcgccatcgccctccgcgtcgtcgcacgatgtgtcattgccgggcccaagaacttccagctggacgactatatgatgccgctggcgggggtgcgttccctcctgagcctgttttttgggttccccctgtctaggagcttcgatgctaaccggttacatctcaggtggtttatgggctcgaaaccggcgccgcatactgcgtcggcgcatggtggatgggtctggccaacaatgccatgacggacgcgcagcgcctcgagctctcgcagcgccccgatagcgaggaataccgactgcgcgtcgggggttccaagacgcaggtgctggggtggtcgctgtatacgacactgttgtggctgctgaaggcttgtatggcggtgttttattcgcggttgacgtgcgtcactccccctcccaaaaatccaaccttccagccccggccctacggtcgtgggcgtgggggcggaggacctagactttagtgtgctaacgaagctgggtgcagagctggacttatcaacatgcggatccgtgtacagatcgcttatgccgtcatcggcgccacgtatatcgccgtcatctgctcgattctgtttgggtgccatcccatgcacaagaactggcaaatctacccgaatccgggcaattcctgccagcctgcggtatcgaagatcgacgtctacgtgacggtaacgctgaacgttgcgacggatatgtatctgttgagtattccgatgcccgtgcgtttggcggctctcaaaagaagagaacaagtgataacggctaatgctggcttggtactgtagattctattcaaagcgcgcctcccccttcgcgagaaactcgagctgctggtcctcttctccggcggaatatttgttatggccgctggcattctgcgctgcgtgctgatcgtcacggtacgtctggtctcctagccctgcctttcctacctctcctcccatctgctatcataggcaaagctgacagtagaatatgtaggccggtgcgaacggcgcccagcaagcaggctcctgggcgtgccgcgagaccttcgtcgccgtgatcatcggcaatgcacccatgatatacccgttcctgcgacgcatcgcaaagcgcgcgggcatttacataaccacatacacccatcgcacgggtcaatcgcaatcgtacccgctgggatcagccgacgacaagatgcggagtgctgggaacgggcgcagcattgggatgtcgcaggcatccaagaaacggcggttcagacatccgctcagtatcccggacacgcagtggcgcgacgacggcgagactgctgtgtttgatgaggacggcgatgagatggcgatgttgagcaagaaattcaatcagacgcagggccaatatggagcgcataagaagatgagccttgagggttttcgacgggatgccggtgctgcagaggcagtggtcacgagtggaaacggaagtcccgggtcgggaacgaaggggctaggacttggaagcctggggagtagtctggagtcggaccatggagagtttagcgggatcaaggtagtacgggagacgattgttgagaggagggatgtttga

SEQ ID NO: 24109 - DNA, 285 bp, Emericella nidulans
atgcatcatccgccccgagtcgcgtcgaatcctccgcctcctccaccgccgccaccaacacacctttcctatccccaccagcgccagccctggccgtcatatacgcttccggcgatgaccggccctgtcatgtccaatgtccacagccccggcggacagatgtcgctgatgggcccgccgcagtccggacttctgccgggcttcaatagcgggttggtggctagcatgcagcagatgtacggcggcatccgccgcacgcgatgcacggaatgggcgtgggtgtag

SEQ ID NO: 24110 - DNA, 624 bp, Emericella nidulans
attacatgcgagcagcccgctggagctgttcatctccctcgacagcggtgcgctcttacgattgaccaggagggccgctgacgatggtatgttttgagttggtgccagatgtgcggcagcaggcagctaacgctttgaatttcaggttcaaattggtctccgcttaccctggacgagagaacttggggttcatctcttcgagggctggtcaggtggaatgcccaaagttctatcaaatacggcgggcgcactctcgacacaaatgtagcaaatgcggtcgccacgacatccgatcagacgtacgttttcgcagtctgcctgaatcacacactgaagatctggaatctcgctacgaataaattggtggcaactaaggatctactcggccgcgagatgcagcagaattccctaacatactcgttgaaccccgccgagtcgtcgtttatccgcgtattcaatgttgagagggccctggacggcgggtaccgctactacgctgtgacttattcgccctttgaagatggatgtttcaagttctgggccatcaaagggggtcttaccacgcctttagaaattgaagacctttttcccgccgcgacgttgaggcctttggatcctgattag

SEQ ID NO: 24111 - DNA, 786 bp, Emericella nidulans
ctcaacagaaagctcaaagacaacctagcgatggagattgatatcctcaaataccttctccacccgcacatcgtcgcactgctcgactgtcttgagacaaattcacacattcatttgataatggaatactgtgctttaggcgatttgtcacagttcatcaaacgaagggacagtctcaaagaccatagctatacccggcatatgatatcaaagtatccgaacgtctctggtggagccttaaacgaggtgatcgtccgtcatttcctgaagcagctggcaagcgccctaaggttccttcgtgataagaaccttattcaccgcgatatcaagcctcaaaatcttttgctctgcccggcgccaaaacccgcgccaacgcagtcagaagccgagccacagatagtcccgctcaaaggcagtgaaacgtcgtttacgccggcggtgggcttagaaacgctgccattgctcaagttagctgatttcggtttcgcacgatccctccctgccacgtctctcgcagagacattatgtggttctcctttatatatggcccctgagattctacggtacgagaagtatgatgccaaggcggacttatggtccgttggcactgtgctatacgaaatggtcgtgggaaaaccgccatttagggcaacaaatcatgttgaattgcttcgaaagatcgagactgcaagagaccgaatcaagtttccagaagagaatcctgcctcagatgatattaaggcactagtccgtggccttctaaaattcaatccggtggtgcgaatg

SEQ ID NO: 24112 - DNA, 279 bp, Emericella nidulans
atgtttccaccgcaggatgtcatgtctggtgccttttccgcccagcgtcagtggagccaaaaccaacagactctgggtactgggccgactagacgagagccattccctgcctggagcgtggtcgaagacaccaaaaaaaaggccaatgcgataagcaaggaagctgcgcgggaatttgagattgccagtcaaaaagcgcagtccaagactggaaagatcgagccttggtccgcgaagtactatgcggcctgtacttttggtggcctgttggcttgtgta

SEQ ID NO: 24113 - DNA, 773 bp, Emericella nidulans
  unsure (1)..(773): unsure at all n locations
cgggcctttgctaccgtcattccaaaaggtccgcgttgactaccccgccgtacccggtggtaccagaccatcattgatcagccggctttcaaggccgttgttgagaaccctgttttcattgacgaggccatcaagtccactcctcccaagaaggaggagaagcccaagaaggaggctgctcctgctgccgccgctcctgctgctgaggaggacaagcctgctcntaagcctaagcacccccttgaggctcttggcaagcccactctcatccttgatgactggaagcgcacatactccaacgaggatacccgctctgttgctatgccctggttctggcagaactataagcccgaggagtactcactctggaaagtgaactacaagtatgacaacgagctcaagctcaccttcatggccaacaacctgatcggtaagtattatcctgctttggacgtgtcttcgtacagtttctaaatgaatatgtaggtggtttccacgctcgtcttgaggcttcccgcaagtacctctttggttgccagggtgtctacggagagaactacgcttgtgtcaaccgaggtgtcttcttggtccgtggccaagaggctcttcccgccttcgatgtcgctcctgactacgagagctacgagttcatcaagctcgaccacaccaacgaggctgatcgcaagtatgttgaggacatctgggcctgggacacccctgttgttgtcgacggcaaggagctccccaacgtcgatggccacgtcttcaaataa

SEQ ID NO: 24114 - DNA, 299 bp, Emericella nidulans
ctcccaacttcgctcgccctttcgtcccaccggcagcagcacgggctcgaccaacggctcgcaagaccagcaaggggggtggtgtgcaaatggttctcgaggaagcgggcagctggagtgagcttgccgatcagagtgccacccttcccgccgaagggttcgatgctagcggcaaaggaaagtctactaatagtggtatgctttccttcctgagccgcaagaagggacgtgacaggagtccgaagccgcaggaacctggtgttctgggcaaggaaggtgcacgacaaatcatcagctga

SEQ ID NO: 24115 - DNA, 615 bp, Emericella nidulans
gcatggcgcatgctcacccgttcctttatgacacccgaagagtctaagtccgttctcgcatacagtcctatgtatcatgcgcgtctctttgaggaacatgctggctatcgcgcaaaggccttccacccgactcgcgcttggggcgacaccaaatgcaaaggcgacgactctccatacctcgacggaaacccagcgattgaccggccgctatttgtgcagttctgcgccaatgatcctgatgacttttttaacgccgcgcgccatgtggcaccttattgcgacgccgttgatttgaacctgggttgtccgcaaggcattgcaaggcgaggccactatggcgctttcctgcaggaggactgggacttaatctacaaattgatcaacaagcttcatatggaactcgaagcccctgttacggcgaagtttagaatccaagaatcgaaggagaagactttggagtatgccaagatgatactctccgctggcgcaagactaatcaccctccatggacggacaagagagcaaaagggtcataataccgggctggctgattggagctatattaggtatttacgagataacctgcccccggacactgttatctttgcgaatggg

SEQ ID NO: 24116 - DNA, 1124 bp, Emericella nidulans
ccctcgctgccttgagcgcgagcacttttgtgtctgcggcccctctcgcacctgaggagaatggatcttgtccggccgggtactctccgagcgtgtactatatcacggtcacagcggagccgtcttctaccgttcgaccaacttcttcagctccaatttcttcaactccaacgtcgacctcaacctcaacctcgacttcggagacatccctgaccacgctcgcatctacctctacgggagatgtgactgtaacctcgagctctaccgcaggtctcatcgagaccatcccagctgtagtcgtcaatgcagctactagcactactagcgagtctgcaacttcaacctcagctctgtccatttcggagactgctccaactcaagtagccgtcgcccggcccagcactacgaccgcagccgagaaaacttccagcacatctacttcttcctcatccagctccacaagtacaaactcaggcgccacgactggcgaagcaaccttttacggcggcaacctctccggcggcacctgctcgttcacggactacactcttccctcgcatctctccggtgtcgccttctccggacaggcctgggacaacgcagccgaatgcggcgcctgtattgctgtcaccgggccaaacggaaatacagtcaaggttatggtacgcatccctgagctcagctttaataaccaatatgctaacaagccataggttgtcgacaaatgtcccgaatgcgcccaaacccaccttgacctcttcgaatcagccttcactaccctcgcttccgcctcggaaggccaaattccgatctcatactccatcaccccttgcggaataacctccccactcatcctgcgtaacaagtctggcacatcagcatactggttttcgatgcaggtggtcaacgcaaacggggcggtcaagtcgcttgaagtaagcaccgataacggaagcacatggcaagagaccacgcggagcgattacaacttctttgagaacagcagtgggtttggaaccgacacggtcgatgttcgggttaccggggttgatgggggcgttatcactgtaaagaatgtgagcgtggcttctggggagagtgtgacggctgatggaaacttctga

SEQ ID NO: 24117 - DNA, 931 bp, Emericella nidulans
tcgtctcgtcaggaacattgagtatccaaactgcttgacgatgtcgcggaggggcatcatatcatgtgtcgcggacagccgaaactattctttactagatgtggaacaccagcagaagattcctctattcccgatatcctttgccgacgagatgcaaaaccccggtcaaatagaggatatgccagttccgtctgctcccaaatcaccgctatcaaaagcgagttcgccaccggacgagagtcccggtcatggacggagctccagtttgaatacgctggcggggatgttgcagccttcggcacctccacggtccgcgtcgaaagatcgatcaaggtccctgacgccggagcaatcggagtccgagacgcccagaagatcagtgtcaagggagcgtggcaggtacgcttctccgatgggatcgccaagggtatcttccgaaatgccctcgcgcgaggcacaaccgcaacaggctgttgcagatgaacagaaacctctaccacctctgcctaagcagccttcaacccaactcagacctcatatcctctcgccgaccccgtccgagttcctattagtcagaggctctgatgaatcggaaccaggcgttggtatgtttgtcaacgtagatggtgatgttgttcgtggcacgattacctttcataaatatcccaaatcgattgtcattgacaagggggacgaaacaagtataatcccttcaccggaaaacacgaaaaatgactatgttattgctgtcatagaatatgacgaagacggccaaacaagaaaatttttggaggtacagccttgggatgttgacccagcagaagccgaggattacaagagttgggtagagataccctcaatacaagctgaccggacaaaacatgtcggaatcagccacacactcagtcccacacagttggagattcaaaat

SEQ ID NO: 24118 - DNA, 815 bp, Emericella nidulans
atgcccggccgcctcgaaggacatatcgcgctcatctccgggtcaagccaagggttcggacggggtatcttcgagacattccttcgcgagggagccctggtgctaggcctggacctgcaagccatcgacggtcaagtagagggctttcctgagaaccgcgcctaccagatcacagccaatgtcgccgaggaggagacttggaagagagcggtaactggccttgacccgtgtggttgtgcagctctaactatgtataccagctggaaaccagtatcgcaagattcgggaaagcgccgtcgatcgtccatcacaatgctggctggccgtacccgaacaaatctggtctagatgtgacagttgaagaatttgaccgtctgtttaatgtcaacgtgcgcagtatctacctggcctcgaaagtcctcgtgccggaaatgaagaagaatggtcccgggtcgacgattgtaatctcgagcgagaacgccatccggccaggagccacgcagacctggtacaacgcaactaaggccggtgtctcgtcagccaccaagtcgatggccttggagttcgcccgagaccagctgcgcttcaacaccatctgccctacgtccgggaacacgccgctgttgaacaagtttgccggtattagcgatgggcctgtaccaccggagattatcaaggccaagtgcgaggcaatccctataggacgacttgttgagccgtcagatgtcgccaacgtggcacttttccttgcggagcccgcgagctcaatcatcagcggtgttgagattctggtagacggtgcacgatgcgtgtag

SEQ ID NO: 24119 - DNA, 423 bp, Emericella nidulans
ggcggctctctctccgacatggcgccaagcggcaccaggattcctaacgatgcaggccgcatgaacaccatcccatccgtcccacgcgacgatcaaaaagccgaagatgactcctttgattatgcgggacagggtcagccgtctctcgcctttgccgcagataattacaccgatcttccgcggagtacgaaagatatgggctttaccggtgaagtcatgacgggcactgggaacacgttaccagcccaggctgagaacgcaggtaatgaaattggcgccaattggccaggtgctaaaggccagacaagaagtttaaagaggtcgaataagaacagggggggttttgacattcaggccggagaagatgaggatgcagggcagtatattggggagcatgaaggaaggaatgtgggagattattaa

SEQ ID NO: 24120 - DNA, 1604 bp, Emericella nidulans
gtcagcgacgagatttcagggctcgccgtttacgtgtctgccgcgacccagtacctgtttgtgactcagtcagacaaggttgaggtctataccccagagctagagcaagtgggctccttggctgtgacaggtgtggaagacctcgaaatcgctggaacttcaatctaccaatctaactcgtcccaatatccgtacggactgttgggcttcgctattgagagtgattctggcaacgccttcggtgtcgcctcgctcgagccggcttttacttccctaaaactgcagccaaatacgtcatatacgcccaggaggagctctgggcagtctggcccaaagcaaaacggcttcccgagcgcaaacaacactctctcctgttttgccggttggacgggctctgattgtacagagataacatgccacaacaactgttccagacacgggacctgtttaggtcccaacgaatgtaaatgccgtagccattgggcaggaccagagtgttcctggattggggttgaggccaagtacgagaccgatgcaaacggcggcgacggcgacgaccctgctatctggatttctccagcgaaccttaaccgatcaacaattatcacgaccacaaaatcggagatcggggccggactggcggtatttgacctgaagggaaatctgcttcagacggtggccgctggtgaaccgaataacgtcgatattatatatggcttccaggccgggcggcggacgatcgatcttgcatatgccgcttgtcgggaggacgatacactctggtaagtggccaccgtaggcctctatgaaggtcatcgcttataaacttatacagcctgttcgaaattacaccggacggccttcttacttctatcccgggtggaagacagccaacaccggaagactacacggtttacggctcgtgcagttaccgctcgccttccaacggaaaacaatacctctttgtcaacgaaaagtctggtctctatctccaatacgaactgacttcctcgcctaacggaactctcgccacaacccttgtccgcaagttcaccggcggttcaggcggccaaccggagggatgcgttgctgacgaagaaaacggctacatcttccttggagaggagccattgggactatggaggtacgaggcagagccaacggggtctccaaacggaacccttatcgccaaggtgggtgatgggactatctacgcggacgtagagggcgtcacgctactgccggggcaaacccctgaacagggtcttatcatcgtctcgtgtcagggggtgagtgcgtactccgtctatagacgggcggaaccgcatgaccatgtgttaacttttacgattggggaatctggcgatgggagcgttgatggggtcaccaatacagatggagttactggggtgtcgacaggattgaacgacgactttccgagggggttgcttgttgttcacgatgatgcgaatcagctatctacaggtgaaacggcggagctggctagctttaagcttgtgagtctcgaagatgtactggcggctgcaggcaagagaacgtggttgttcgaggaagtcgacgagacgtgggacccgagggcgtaa

SEQ ID NO: 24121 - DNA, 1536 bp, Emericella nidulans
atgacccctcgagacgtccatactcattgggatctctcgttcgaatggacggaactccaccggactgcagaacaactgcgtccattgaccttctcatatgacaaactagcggacgattgcatcgcaaagctcaacgagctctcgccttcagagaagtatcgtccaaaggctggcgagccgccgaaaaaggcacctaaacgtgacttgctagcattactagaaaagcacgcaaaagacgacgccaagctcgaagagttatggactgaagtcaatacagtccctgattgggtcgactgggatcagatacaaagaggacaggaggtcttttaccgatacgggatgccaatcatgaatgtggtatgcacagtcgctacgatacaggcgctctgctaatgtccatagcttagcttccaaagcttattaggtgggatgtgggtgttaatccgaccgggaccatggccggagagatactgactcacttgtaggggcgcgaaccgtgtcgttgaaacattggcgagaaccggagggttctctgcagaagttgtccgccgaaggctgctggaaactcttcagtttgtcctccaggtgtccctttctgtggactctatgaagcctggtggagcaggccaccaatcctctgtgagagtgaggcttctacattcctcagttcgatcaaggatcctcagacttgtcaaggagaggcctgagtactacgacctcgaagcctttggtatcccgatcagcgacctcgattgcatcgggaccatcaacacgttttcaaccagcgtggtctggataggtctccctcgacaaggaatctacctgcgggagcgagagatcgaggattacatagccctttggagacttgtggcgtactatatgggcactccgcacaatgtcttcggagacaagccgactgcgaaagcctttatggagtcgatttttgagtttgaaattgaccctaaaccgattggacaagttcttgcgaagaacattgtcattggtcttgaaaatactgcgcctagctttgcgtcaaaagagtttatggaagctatggccagacatcttaacggggataagctggctgatcgccttgacatcccgaaaacgagcctgtattaccaaacactcatctacggctactgttattttgtcatgataattgcgtatacgaatcgaatattcccgctttttgacaaattttggattgcggttcgtccgctccttctactttgtctcctggtactgaccaaacgcaggttcgccggaagatgtactactcaatcatcaaagacaaggagcacggcctcggcagcgaaacgatcttcaacttcaaatacgtaccctggtttacgcgcaccacgaagctagggacccgcaaggaaagaaatgtgtcgaagccgggcatcgaaacattcgcgcagctaggagttcttgccgtctgtgctctagcggcgactgtgatatacggggccgcggtaggcttacatctgctgagtctagagaaactgttgcgtgtctgactccagttcgtaa

SEQ ID NO: 24122 - DNA, 552 bp, Emericella nidulans
atggacaagagaagtttcaaagtgatagttgtcggtggttcaatcgctggcctgactttggcgcacagcctcgacctggccggtattgactatatcgtactcgagaaacactcggatccccttgctaccgttggcggatcagtcggtctgctgccaaacggatggcgtatcctgcatcagctggggcttcgccatcagctagagcaagaggcatgcccagtcaaggtcgcccatatgacgtacccagatggattcgtctttagtgacaatttcccagcggcaatccaggaaaggcaagttcctgaaatccagtttcctatcggttatatgccagctaacgatgaaagatttgggtattccctttccgtcctcactcgccagcagctcattgaggtgctctacctcggcctacgtgacaaaagcaagatcaaggttggacagagagtaataaagatccagcaccatcagaaccgcaggggcgtatctgtctttaccgagtccggacaggaacatgtgggggacttggttgctggtgcagacggagtacacagc

SEQ ID NO: 24123 - DNA, 345 bp, Emericella nidulans
tctgttcgatttcctctgacgacgagtactccttccccaaagcgaaatcatacttctacgggcaaacttcgaaccaatcatccctgggttcccattgatattgatgaaatcctgatggctggtgctagcgacaaggagaatgtcgatctccaaggtgcattggacaacctgaagggggatctgacaagcccagaaaagaagatgacggtggaagaatggatcctatggaatgcaaagaatggagaagaaaggctcaaacgagaatgcgaaagactagtcgggcagttcgagagagaaggggcgcgggcgatgcgcgcactggagggtattgagtgcattgattga

SEQ ID NO: 24124 - DNA, 400 bp, Emericella nidulans
gtactctacgaccgatgtcgttgccaacgttgcctacgatctcttcacgagctccagcattggcggagactctgagtacgagatcatgatctggctggccgctctgggcggtgcgggccctatctcctcgaccggctcttccatcgcaacggtaacccttggcggagtcacctggaacctgtattccggccccaacggaagcatgcaggtgtacagcttcgtcgcatcatccaccactgagagcttctcggccgatctgatggactttatcaattacctcgtggagaaccaaggcctgtcgaacagccagtacctgactcacgtgcaggccggtaccgagccattcactggctccgacgccaccttgactgtttcctcttactcagtctctgtctcataa

SEQ ID NO: 24125 - DNA, 349 bp, Emericella nidulans
ttacgaactgtacatttcgtacatcgtcaaccctccagacagcgactacaagcctgtcagttccccaactcggcagatcgccatgatgctgtgggtcacgctgtactggtactttcatgagcctgaaccagagttccagttgtatactgaagcatcggccaatacaccttttgctggaaagccaaagggagactggagggtaaatatcaggcgtgaggggatctttacggggcacaatgtgctgcagaagctggagcgcatgggattaattgcatgcgacgactcgtctgttggacctgatccagaggacagagatagctggtcgcatatgttcgtcagccggcgcact

SEQ ID NO: 24126 - DNA, 378 bp, Emericella nidulans
taccctatacgtgtttctgacggccgcatgactctgcatatgtgcctttcagttccagggggcctgcatggaccgatggacccgggttcaagcaggagttgtggccagtataccattaactacgaacgggcaatgggtgcgatgttccttcgacccctgcctaacgaagggttggagttagttgtgtggggtaccgatgtggaaggcctcgagcaggccgcccgtcttgtgccaacactgaccggagctggacaacccgaattcgtggttctcggtgacaactgtcgctggaagggccatgcgggcctttatgctgctggccactttgacaagttctggcaaatttcgaccgggtcttacattgcgaatgttgtatag

SEQ ID NO: 24127 - DNA, 476 bp, Emericella nidulans
agtttgcgactgagctcaagacagcagatccgggcatctcagttcaaaagctcagacaaaatgccatcgataccagctgcggcattgtgattagcgcccagtctgaggagttcttagacggctggaccatgttaacgccgcggcagccaaacacacttagaacattgccattcgagaagtcggttctgctcctcacggatgccgctgtctacagctgccgctttgactggaacacggacaaggtactttcatttgagcggattgatttgcgctcaataacgcggatcatctatggcacgtatataacgtctaccctgacagaggctcaatcagatgaacagcgcaatgttgggttagtgattgagttccgcgaaggcgacaacaacgctctccgagtcaacactcggtctctccagagcgaagtcgacccgaaagcaaacgaccatcaatgggacatgtcctcatggttcaggggc

SEQ ID NO: 24128 - DNA, 886 bp, Emericella nidulans
accgaatacctgcaacgactacagaaactctttcatagagttgtctacccctaccaccttcgtctcttcaacacgactgatgatgctgaggatcccgatcgtctttacgagttatatgcggtggtcgtacacatcggcggtggtccttaccatggacactacgtttcgatcatcaagacccaggatagaggttggctgcttttcgatgatgaaatggtagagccggtggataagaactatgtacgcaacttctttggtgacaaaccagggctagcctgtgcgtatgtgcttttctaccaggagacaaccatggaggccgtgatgaaggagcaggagcaggagaacacggagccgcctgttgaagtaaatgcgtctactctgaagcaaaacgggttttcctcttcggcaacacttgcccacgcccacagcgcatcccaggtcccgacatatgaggaccatgaccgtttcacgggcttgaaacgagctccaaccgcacctcaactatcaacgcatcctgaacatactaccacagactcagaaagtcgaccctcttccgatcctgatcctgctcctcttacttcattaccccctataccgccaatccctgagacaccaccggctccgctaacatcgcgaaagagcgatttgcagtctaaaaaagaacgggtcaaagaagagaaggagcggaaggcggccgagaaagaaaaagagaagcagcgccgaaaagagattgagacaagactcaaagatcgacaacggcgcgaagacgacgacttgaaggcagctctcgaggcaagcaaagtgtcaaaagaagatgaagatcgacgcaatcacgccgagaatggtacctctaagaagaatgccggtggtcttggacgattcagaa

SEQ ID NO: 24129 - DNA, 574 bp, Emericella nidulans
tctccttatcgatatccgcctctatcgccatgcgttccaagtttaaggacgagcacccgttcgagaagcgcaaggctgaagccgagcgtattagagcgaaatatgccgaccggattccggtatgttttttctttcgttatgtgtttgaagccgtttctttttttttttttcttgtgttatcctcataaggaacttgacagttctggtacaccgcttgttcttgttcaaggcactaaacgatattcattcacaggttatttgtgaaaaggtcgagaagtcatatattgctcccatcgacaagaagaagtatttggtacctgcagaccttaccgatggccagttcgtctacgtcatacgcaagcgcatcaagctgtctccaaagaaagccatcttcatctttggcgacgaggtcctgcccccaacggctgcactaatgcgtagcatttatgaagagcacaaggacgaagacgggttcctttatattacgtatgttatcccagaaccacctggggcttttccaggtgacaaactgcttgtagatccttcggagagaacacatttggcgactggttaa

SEQ ID NO: 24130 - DNA, 932 bp, Emericella nidulans
cggttgttcggtgatgacgacctcgctatcggcactagtcttggtgacgatggccgtccttttgttttgttagtcccaattgatccctcagagacttttttacagctatatgccaaggttcagaaggtaattgcatccgctgccagctctgtcgcgccgtctgacttgtccaggcctacgatgaagggtccgccgaaatcgtgccattgggcagtctacgatcctatattcaggagaaatcacaatccgagagaacgcctgtcctcttccgattcgccgcctacgatgcccctgctgcatcgcaggagtacccggccaatacctttgaaacgacggatctggtggtcaatgtggcgcccgcaagcacctctgatggagcgacggagttgggagcgtactacaaccagcgcttgttctccagtgctaggattagcactatcttgagccaggtggctcaattggttaagaatgccacaagcgacccggagacggcaattgggcgcattgattttatgacaccggagcagcgcgctcttctccccgacccaactgctgacctgcactggtctaaattccggggcgccatccacgatatatttgctgagaacgctgagaagcacccggaaaagctttgcgttgtcgagacgaagtccgccacttcttctcaccgcgagttcacttatagacaaatcaatgaggcgtcaaacatccttggtcatcacctggttgaggctggcgttgagaggggcgaggttgtcatggcgtacgcttaccgtggcgttgaccttgtcgtggccgcgatgggtattctcaaggccggtgcgatcgtctcttgtattgatcctgcgtacccttctgagagacaatgtatctaccttgatgtggacgacccgggctcttatatcattgcgaggctaccaggctgctggtga

SEQ ID NO: 24131 - DNA, 1425 bp, Emericella nidulans
atgtgggacaaagcgcagcaactctatgaaaatgcccagatcaaagctcgttccggcgccatgcctttctcacaaggcgaatattacctatgggaggatcattggctcatctgtgctcagaagctacagcaatgggatattctcagcgactttgctaaacatgagaatctgaatgatctcctcctagaagctgcttggcgaaacatagaaaactggcagagtgagaataaccgagaacagctcgagtctcttgtgaagtctgtctccgacgccccgaccccaagacgaactttcttccaggcgtttatggctcttttgcagttccacaacaagaaagagaacatccaggagttcaatggtgtttgcgatgagtcaattcagctgtcgatccgcaagtggctgcaactgccgaagaacataacaaatgcccatatccccattctccagcacttccaactcttggttgagctgcatgacgcgagccacatctgttccagcctctcacagaccaatgagcgtaaccttgacaccaagtctgcggagttgaagctattactcggaacctggcgagaccgtctccccaatttgtgggatgatattaatgcttggcaggacctggttacgtggcgacagcatatctttcaactcatcaacgcgacgtaccttggcctgctacctccccagactaacaatgttgccagcaactcctatgcctaccgtgggtaccatgaaacagcctggatcatcaatcgctttgcccatgtctcccgcaaacaccaaatgcccgatgtttgtattgcccagctcagccgcatatacacgcttccaaacatcgaaatccaagaggcgttcttgaagttgcgtgaacaagccaaatgccactaccagaatcccaaggaactcaatagtggtctggatgtgatcaacaacacgaacctcaactacttcggtgcgcagcaaaaggccgaattttacacgctcaagggcatgttcctcgcaaagttgaaccatgtcaacgaggccaatgaagcatttggtgttgctctttattacgatttgaggttggctaaagcgtggtctgaatggggtcagtacagcgaccagagattcaagaacgatcccagcgattatgagctcgccagcaacgctgtcagctgttacctggaggctgctggcctttacaagaattctaagtccagaaagctactcagtcggattctttggttgcttagcttggataatgatgagggagcagtcgcaactgccttcgagaacttcaaaggcgacacacctgtttggtattggatcacctttatccctcagctacttacaagcctatcccaccgtgaggcgcgcctgtgcaaagctgttttggtcaagactgcgaagctgtaccctcaggctctgtttttcttgctgcgtacc

SEQ ID NO: 24132 - DNA, 1212 bp, Emericella nidulans
gccgacgagctcctggctcaaggatggcttgcagctaacatcacagtgctcgagcaaggcccgctctccttgccgggcggctcgacttcgcacgccccagggctcgtcttccagacgagcccgtacatagcaatgacgcggttcgcacagtacacggtccagaagttacagcggatcgagaaagatgggcagaattgcttcaatcagctaggtggtttagaggtcgcgacgacgccagaacgagtggcggacgtgaagcgaaacactgggtatgctgtctcgtggggagtcgatgcccgtcttgttgatggagacgagtgtcgaaggctttacccgcttcttaacaaggaaagtgatgttgtgctcgggggtctgcatatcaagactgacgggctggcgcttgcggcgcgcgcgacggggattctgattgagaggaccaggggggctggtgtgaagtatcgggagcacactgccgtcacggggatccttcaggagaacggcaaagtcaagggggtgaggacgagcagtggggaggacttgtacgccgacaatgtcgtttcgtgcgcgggcttctggggcgtcgagattgggaggatggctggggttgggatccccctgctgccgctggcacatcagtacgcaaagactagtcctatcggtgaactgagcaaccgtgatgcgaacagccggatgaacgggctcaatgcgactctgcctatcctgagacaccaagaccaggacctgtattaccgcgagcacggcgaccgagttgggatcggctactacggacacaagcccatgcctgtcgacgcgagggctctcggtgcgacacccaagcatgttgacgaaaaaaatatgccatcgagactcgagttcacaagtgaggactttgcgccagcatgggaggagacaaagaagcttctccctgcgctgcgaaacgcacaggttgacgacgggttcaatggggtcttttcctttacgccagacggtgggcccctagtcggccaggcgcccaatctcgacggcttctttgtggcggaggccgtctgggtaacgcactcggccggtgtggcgagggctatggcagagattctcacgaaagggtggttgagcattcatgtttcggagtgtgagcgatcacggtttgagcgtgttcagctgaccaggtcgtatgtcgaggaggcatcgcagcactgctttgtcgagatctag

SEQ ID NO: 24133 - DNA, 950 bp, Emericella nidulans
cgccgaacaacccaccgaaacgcccccaagcggcagaagaggaacccggccatgcagcgaaaggagaagtcaaacgagtttgacgaagtcctacaagccgacgttgacagactactgaaaagcaagcgagacggcagcccagccgctgccactcccccgcagcctacgctcccagaaccctttacagagatcgaagtgacagtcgccgaaatatcctcgacgggtgatgggctggcgttgtccgaaaatggtgaccatgtctatgtcgtccccttcactgttcccggtgacaaggcccttgtgaaggtcgtgcggcacgtcaatgccctatcctacagcgtgacggactttatcaaggtcattgagcccggtccgcaacggcgagacgacgcaattggatgcaaatactttggcaaatgctcgggttgtcagctgcagatgctgtcttatgcggaccagctggcgcataagaagcgcatcgtggagaaggcgtacgccaacttctccggccttattccggaactgattcctgccattggggatactttcccatctcccctgcaatacgggtacagaactaagctcacaccgcactttccacctccaaaacgcaatgacgccggagagccccaagtaccgcctattggcttcacatacaagaaccagcgccgacacctagatatcgaagactgtccccttggcacagacatcattcgagcagggctcaaaagcgagaggaagaaggtagcggaaaatttgcagcagtacaagaagggcgctacgatcttactgcgcgaaacaacttcccgcacacccaagagctcgacagacaccgaccctacctccgccacaaaacccaccgtaatcacctacgaaaacaagaacatgccacaccaagaatcaggcgacgtcatcactctggatcggccgaactatagcgaagagaaacg

SEQ ID NO: 24134 - DNA, 689 bp, Emericella nidulans
ctacggaagctcctgatggcgttgaacgagtgcactgagtggggccgagtcacaatcctcacgacactgtctgagtacagaaccagcgctgtaaacgaagcagagcagatctgcgagcgagttgcaccccagttccagcacgcaaaccctagtgtggttctcgctgctgtcaaaacagtcttcttgcatatgaaaataatcaatgcggagctatcgaaaaactacctcaagaagatggcccctccgctaggtattccgagtgttctctggtgtttaatattgaactgctaatgaatgtttcagtgaccttagtatcatctgctcccgaagtgcaatatgtcgccttacgcaatatcgatcttttgctccaaaagcagccggacatccttaacaaagagctccgcgtttttttctgcaagtacaacgacccaccttatgtcaagtttcaaaagctcgaaatcatggtgcggatagccaacgaccgaaacttcgaccagctactagcagaactgagggagtacgccctggaggtggacatggatttcgtccgccgcgcggtcaaggcgattggccaggttgcaatcaagatcgaaagcgcttgtgagaagtgtgtcaatactttgctcgatctgatcaacaccaaggtcaactacgtggtgcaggaagccattgtggtgatcaaggatctt

SEQ ID NO: 24135 - DNA, 2470 bp, Emericella nidulans
agcagaaccagaaccagaggttgcgccggagccggagtcagaaccgattacactcacaaagtccgaaaggaagaagttaaagaagttaaagaaggctgtacctgagttgaagcccatgccggaagcggaccctgagccagagccaaagccagagccagagctggaaactccagcagaacctgatgcatcacccgaaggaggtgagaaggccctagacgtagagactgaaccagcgcctgctccaaagcctgagaagatggccaagaagagcaaaaagagctcgaaaaagccagtgccgccacaagaacctctcaccgctgaagatatgatggctagcggcgccttagaaccggacgatggtaaccctaagacacccgagaagcctgtcaagaaggaacgtactcgtgtagagcgcacacctgctaccacttggggcttctggggtgccacgcctcctaagaagtcacagacaagggatgccaggcccagcaagaaggaagcagcgccagccattgtgaggtctaagtcgagtaagcagtcaagggcgagggaatctgagaacgaagcagagagatcttcggcatccgacaaggacagacggcgagaagttagggctagtcgcggcatggcgttctcaaacttcatacttggcacacctccacagccttctcgcaccaattctgccagaaagtctgctgctcacgctgccaagcggtcatctaaacaacagtcggtcgaaatagatgcgagcgggcatctggatgatgttgcgccggataaagtggcgaagatgatgggcgttaaggaatcaaggtcccagcatgaaaggcatagggagcggagaaagtctcgtacgtacaacctttttatcataatggcagggttctaataaccttaggtgctctcgacccatacgcccttgacgaggaagatttagtcgtggtaaatagagaagacgtcgaccaaccctcgaaggaaggctcaaggcattctggctccaggcgatctggacgagactcagcgcgacgggtaagatcacctatttcaataatatcgcccctctgacatcgtctagtcgagatctaaccccgaagagcttcgcgaggatgaaagaggcccagaagtattctccggcccggatgacatcgcgtttgtaaaagcttcacaatcaagagaaagagaacgtcgtgtgaagcgatcaagcaccgtgcccaagagaccagagcctaccggtttaatgggcttgcttgggtctttccgacgaagcaccaaggcagaacctccggccccagagcgtcgcaagtctcgatcccgccgtgatgacgacagcagatacgcaactgagacggaacgtgacgaagctcgacgccggcgcgatgaacgacggaaacgctctacgcgcccagcctcggacggcgagggatttggccttggccccgaccctgctgtcgtcggcgcatttcctgacaccgaggtcgaggatgcggaggctcgacgaactgcacgcagagcacggcgtgcgtcacgccaggctccgcaggctgcagctgacgagctacgtgaggctgagcgtcgcgaaggcgaggagagacgggcacgtcgaagagaagaacgagctcgtcgagaagaacgagcccgcgagcgcgaagaacaagaacggcagcttcgggaagaagaagagcggcgccgcgaggagaggcgcgcacgaagagccgctcgggaggagcgcattcgtagggaagaacaagaagcacgggaggaagaagctcgcttagcagcggaacgacgagaacgcagacgccagcaggagcgagagcgggaagcagagatgcacgattaccccggttacggctacgaaaggcagcgacggcaccgttcccgcgttgacgatagggatccaagagatttctacctcgatagccacgagcccgaaggcgaacgtgagcgaatccggtttatccatcggtacaaagatgaccgtgaccgcgatcgtgaagccgacagatccagccgcagccgccgaaaatcccgcgcagctgatcccacaaaaccaaccccaatgccgctcggcgcacgcaaagacaagacttcctcttgggtagactcgcaagccgatgaaccgcccgagccgcctcccattgtgcccaccgtgctcgacatgccgccaggtccggacgagccaataccaggccacaccatgtcgtcagatgaagaggcgcgtcgggagttgaggaagcagtcgaggcgacgaagcaagtatcctggcctgactgaccaggaaatagaagagatacgggccaggaggcgtgaggcgaggcgggcggaaagggaacgcgagagggaacatgggaagacgagctcgagtggggattatgagcgagacagagggatgaggtacgaccgtgatcgttcgtacggtgaaccgccaaagaggccaagttggttgaagaagctcacgacttttggatga

SEQ ID NO: 24136 - DNA, 585 bp, Emericella nidulans
atggtctcagctctgcttttgcgcgcccgccagaacggccgagctgctcgatgcctcgactaccccaaggtcaagtgctgggcacttgcgtctttacctaaatcgtccctcgagaagccaggattttctcaagtacggaggttctcagttttccatccgcaatcacaagtgaaccttgacctgactcggaatatcggtataatagcacacatcgatgcgggcaagacgaccactacagagcggatgctctattatagtgggctcacaagacggataggagacgtggatgaaggttccacagttacggacttcctccctgcagaacgcgcccggggtatcactattcaatccgctgcgatcaccttccactggccgcctgcggagtgcggcaatgctactcggcaagaccctcgatctccaagatctgcgtcatctcacatggtaaacctgatagatacgcccggtcacgcagacttcacattcgaggttctgcggtcattgcgcattctcgatggcgcagtgtgcatcctagatggtgtggctggtgtggaggcacagacagagcaggtttggcaccaagcgagt

SEQ ID NO: 24137 - DNA, 213 bp, Emericella nidulans
gaggagctgcggatcaaggatatcgaattcgtcgagaaggtgttttagaatctgaagaagcagacgagacgtggtggacagtctctggagatgaagaagctaagagaagacgaggccaccacagccaaggttctcgagttcttgcaggcgggcaagaacatcagacatggtgactggacccctaaagaggtatgcttttttttcacccttttt

SEQ ID NO: 24138 - DNA, 791 bp, Emericella nidulans
atgcctcacgtcaccgaatttatttacttccagcccaagagctccgtggagcctgagaacccctcaagcgacacaggcgccgcccttctccagctcttcaaagcaacaacacaacaaagcggacaccttggttctgcatggggtcgtacgaaggaggataagaacgttatcgtttgggcgatcggtcagtacagcatccctacaaatgcatcctccggcccaatccacaaaacaattatcaaccatatcaagaagatgaaacaatctcctaatgagtagcagactggtcggacgcccacagtgggattcaacaaacgaactccccgctcgatccctatattgaggaaaacacccaaataacaaccctcttcacaactctcacacccaccgactccgacgacaccccagcaacatccacgcttgtctcaaaccccgtgaccgagctcgcgcctctggccttcccaacttcgctctcgtcagccgaccgctcatctctcgtcgctcacctcaccacattccgcaagaccctttcagaagacgcggaggagaaggtgcgccccaaatcgtttctgcttgggcaggttgagaggccgggagagtttgcgcatgggaagagtgagtccggtcaggcgtttgttcatttcctggttcttggctgggagagttatgagcagcatcagcaggcgagggacacggaggggttcaagagtacgattacgcccatcagggagaagatggtttcgccgttagatcgattgggaatgaagcacgttaagttccagaaggtgtag

SEQ ID NO: 24139 - DNA, 748 bp, Emericella nidulans
caccgcaacacccccgagaacaacccgtccattcccttcaagttctccgaacagaaccaacagctcatcgaggaaatcatcgcccggtacccccctcaatacaagaaggcagccgtcatgcctttgctggatctcggccagcgtcaacacggcttcacaagcatcagcgtcatgaatgaggtcgctcgcatccttgagatgcccccgatgcgcgtctacgaagtcgcaaccttctacacaatgtacaaccgtgagccggttggcaaatactttgttcagctttgcacgacggtacgctgtatcatttcgcatcgtaaaaatgtgtgatcatgactgacaaatcctcaagacaccatgccaactcggcggctgcggaagcgacaagatcgtcaaggccatcacagaacacctcggtatcaccccaggccacacaaccgaagatggcctgttcacattcatcgaggttgaatgtctcggtgcctgcgtcaacgctcctatggtccagatcaacgacgactactacgaagacctgacccccgagtccatcaaggagcttctcactgcgctcaaagaatcccgtaccgccacctccggccaggttaagatccctgctccaggccctctatccggcagaatcagctgcgagaacagcgctggtctcacgaatttgcacaaccccgtgtgggatcccgagacgatgatgaggaaggacggtgccctggacggggaggcgcagcaggcgcaataa

SEQ ID NO: 24140 - DNA, 1059 bp, Emericella nidulans
cagaagtcgaaggctaagcctactctcacgcgaaaagacgagaataaaaagaacaagagcgagcctctcctccctaccaaacccacagaacctcgagaatttgactcagagctccgagacgtcacaggcgtgctccgcaaactggtcgtcgaatgggtccatcgcaaacgagcccttcgcttcctcacagccgtccgaaagatccaaacgaacccgaatcctcaggccatccctgcgtgtgacaattgccaaacccagccgggcgttttatccaaactgaacattctcggatcgtgcggtcatgccctctgttcaaattcagactgcacccagaaaacacttgagaaggaggaatgcgtggtcgagggatgtcgcgggtctggcaaaaattttaatatcattaacgctatgacgcttggatgcgacactacttcaactccaactgccatgtccagcgatggggatagtaacggggatattgaccgaagctccaaacacggcggaacaaagctcgaggcgctgatcaacatcatcaccaaattccccgtcgaagagcgcgccctcctcttcgtccaattcccggacctcatgacggtcgcctcaatggccctatcctctgcaggaataaaacacataatcatcacaccaacagaccagaaaacaagctcgaaaatcgagaagttccaaaaggagggattcggtgataccaaagtcctcattttgaatctgggtaatgagatggcggcaggattgaacctgcagtgcgcaaaccacgttatttttctttcaccgtttcttgccgaaacgcagtatgactacgactctgttatgattcaggctgttggccggagtaggcggtatgggcagacgagacatgtgcatatttaccatctgctggcgaagatgacgatcgacgtgaatgttttccaggagcggcgcgggaacaaagttcttgttgaacggggtgggcgggcgactttgttggatgctgaggaggcggccgaggatgagacaatgacttgtcaggggccggctatggttgttgaaaatgcgatctga

SEQ ID NO: 24141 - DNA, 805 bp, Emericella nidulans
acaagatgctttcatggagacctacctcgcctcgcaacgagggaacatcttctccgacgttgcagtcctaatatacgtcttcgacattgaatcgcgtgaggtcgaacgcgatctcgacacatacatggctattattgccgcattaagagaatacagcccccacgcctacgttttctgccttgtccacaagctcgacctcattcaagccgagcaccgccaacgcatctatgaggagcgctccgcgctcatccgcagccgcacagaacacttcacgatcgacaccttcgggagcagcatctgggaccagtccttgtacaaggcctgggcgggcatagtccacaaactcattccgaatcttagcgttattgaacgattcctgcacgcttttgccaagcgtattgatgctgaggaagtcatcctctttgagcgctctactttcctaacagtgacatctgtctcctctgaaatcggcgatttaaatccgatctatgaccgacatgaacgattatcaaatatcatgaaggcgttcaagcactgcgctgctcggaatacacacacgactccggcttcggcaggcttcgttgtcatgcataccaaaacacctcagtttaatgtcttcctcggccgcttcactgacaatacgtacatctttatcgttgtgccaccaggcgaggcagcatacaattgtgccgtgctgaacaccatgctcgcaagagagggcttttctaaagccgcaggtgctgtccacggtgatggcttcccgcttcctgcacccgactccccagatgagtcaaatagcaactaa

SEQ ID NO: 24142 - DNA, 249 bp, Emericella nidulans
gttgactgggacgtcgttgttgacctttacttctaccgcgaccctgaggctgaggagaacaaggaggttgctgaggagaaggttgccagcgctgaggatgtcggtgccggtgccatcgagtctgcgttcgctgctgagagctgggatgctcagggtgctgctgcccctgctgctttcgcggctgccggtgctaccagctgggaggctgacggtggtgactgggctgccagctctgtcccgcccctggtg

SEQ ID NO: 24143 - DNA, 1791 bp, Emericella nidulans
ccttgtcgcaaatcaaagcttaaatgtgaccatggacggccagtttgtggacgatgtattgcgaaaaacattacgcagagatgcttttatcatcctgcgcctatgaccaaggatgcatcgcagcctccatcttatcgtcctgccaagaggccaaggacggaatcttcactgtacgttcaccagcttagtggaggaagcagaaggcaaaagaactgatttaaatagtacgccaagccctgaaccaacatctgcgtcgggtactgcatctgcatctgcatctgcatctacggtgcagtacggacttcgccttgcagccgcagaccagcgcccctccacaacacctgggtatctaggctcgaccagcttttccgccgtcttcagcgaacaccgcgcaaacatatcctttgaggagggtaaccatgccccagacggggtactatccaaattaacggacggttaccgtcttgagtccggcctcgaagtcatcaagtttctctaccggaacaacatatgggagatcctgattcgcaagttctacgctggccacttgatggccgttgtctcaaacctcatcataagagcgattatcatatcccttcgacggatcttcgacgccattgaccgtgagaaagacgtcgaaaagcacgtccgcgatctggtgcagcgcatattccagtcctcggctcatccactgacctcgcatgcgtccatgacggtcgaagagtattttgcctcgtttacagacgagaacctgcgctgggaggtagttggtcttgttttggcgacggccgggatcgcaatgatgtccacctcagatgacgaccccgatgttctgcgggtggcgcctgacgcacagggcgcggagatgctccgttcacgcttggtcgaggcaagcaggacgtgtcttttgttctgtgcaacagcggcgtcggttaatgaacttctgggcttctatcagtacaacgatatgctattgcgtacgcagtattatggggatacgagtacgccctgctctcatgacacaaacattgccactaacgacagtatatgctacgccgcctggcgcaaacttggcaatctcacagcgaccatatatgcagccggtctgcatcaggaaagcacacgcgcacaaaactgtcctccattcctgcatcagtggcggaaaatgtcgttcgctgctgcattctacgcagacaagtctctttctacgttcgttgggaggccgccatttattaattatcggtactgctctatttcaccgccgctggacattaaggatgaagacctgattgctggcgaggagcagctcaggcgggcaatggctaatctcgactcctcagggtggaatacgaaaggcaacacgctgcggggaagcctgttgcgtttacggttccatttggcagtgctgagagagcaggcgcttgagattgcgctggggaattatgatgacaagacgattttgagcaagtataagtgagtaggctctagctccaaccccgctgtggtaccgactgactctctgtagtgagcttatccaaaccgcccagaaccaatggcagtcatgtcctgtttacctacgacatgaccagtacatcccgaatggagaatcgcctaatatcaccttcgcgagacgccacatctacctcgattatctgtatactctattcttggttcagagaatggtcgtcaagcgaacaaacaccagccaggaagcccttttcatgacctcccgggaggtcctcgccatcatccttgaggtcactggcgaacggcacccgggagttgatatga

SEQ ID NO: 24144 - DNA, 450 bp, Emericella nidulans
ggcagacgcagcactcaaattgcagtgaaatatgggggtaacaatgtcaagtcgatgaagttggcgttagaggcgtcattgaagcggttgaggacgaactatgtggacctctattacgttcactggtgggattattcgacgagtataccggagctcatgcacgccttgaatgatattgtcagctcgggcaaggctttgtagggcatatcggataccccagcctgggttgtctccaaggcgaacgagtacgcgaggcagaaaggaccgcggcaattcgtggtgtaccaggggatgtggaatgcgacgatgcgcgactttgagcgcgatatcatccccatgtgccgagaggaaggaatgggtctctgcccttatggagtccttaaccaaggccgcttccagacagaagagggtttccggagcgtgaaaaacacaacgaggggcggaatttaa

SEQ ID NO: 24145 - DNA, 1036 bp, Emericella nidulans
atgccgaccacgcaaacgatccgtgtcccccatctgggcggcatctcagccggctacgccctgtccggcgacaagtacgacgcctccaagccgacctgcgtgctgatcaactccatgtgcatgacgaccgcgctgtacaatgaccagttcgaggatgcgagcttgacctcggccgtcaatctgctcgcaatcgagccactgggccacgggtccaccagctgtgcgactgagcacttcacctactgggacagtgccatcatggccctgcaggtgctcgacgcactcgggatccaaaatgcgttcgccctgggcacgagccagggaggatggatcgtgacgaggatggccctgttggcgccagagcgtgtacgttgggccccatcgcggatctgtggtccttgcccaggcgcaagcactttggcgggacactcgagagctaatagaagaacaggtgcttggcctcatccttttgggcacctccatggactatgagtctgtggactccaggagcaaaggatgctgggatcctctcccgctgctaaagcccttcttcgatggctggaccagtgacgccccgacccctgatttcgtggtcgaggagacctggtgcaagatggtcggcgccgtaggattcggcacatttgctaccgaggagcgagtgaacttctggacgaagacactgcaagaggtgtaccggggcgatgaaggccgcaagaaagtgcgcatggcgctgacgtgtctcctcgagcgagatgggttactattgaggctggttgatatcaaatgtccagtctactggctgcaggtacgcaatccgtcgcttaaattcgaatcatagcggttaggctgacagtcttagggcacggatgatacaccgtttgccacaacagtgccggcagagcagattaagctcttcacccggtctaaagaagccaagctggaaattatcgagggcggcgcgcactacctgaatgctactcacccaaagcaagttgacgaggctatcttggagctggtcaagaagtacgccgtctaa

SEQ ID NO: 24146 - DNA, 246 bp, Emericella nidulans
cagatctagacctcatactctacaaccgccgcaaccgccttcgtcgagttcaacaacgtcaaagtccccgttgaccaccttcttggtgaagagcacaagggttttattgtcgtgatgtcgaacttcaaccacgagcgttacatgatggtctgcgcggttgtgcgtttctccatgacagttgttgaggagtgcctgaaatggtgcaaacagcgtatcgtcttcgggaagcgcctgatcgagcagcct

SEQ ID NO: 24147 - DNA, 890 bp, Emericella nidulans
gcagccctgcagccattctccttgcgcaatggattgacgagtctgacactgaccacatggtatcgatgatcagtgctggcccaacctcgctcggtgactggatgttactcgcattgagtcagatgaacggccagtcccaggccaacaaggtcggccaggcctttgtccagaaactgctcgagctcggcgatgtgcacactgcggctacgatcttaattgggttaggtgacagagatgatgcaatcgaggtgtatgtctcgcaaaattactacatggaggccattctcatgacgtgcctggtgatgccgaccgattggcagcgacaatcgtaccttgttcgacgatggggcgagcatgttgtcgctcactcccaacaacaactcgctattcgctgcttcatgtgtactggggtagagccttctgatccctgggcatctccggcagttcatcaagcacacttcaaagatatgattcccggtaggtcgccagtcggatcgccggagcctgcgtatcaaaaccctgcaagtctccttcacccgacaactactgcaggcaatcgtcagtcgctcaagactccgtcgctcaagttaatcacttctttcgatggacagccaaaccagcgtttccgattccctggcctcaaatctgacgatcgaacgccaaccaacgcccctggaatcactccaattgcagattcagcggccggatcttctgccctttcacctgggggcttcgggtcatacaagctgaacaatattcaaagcctcaacaatgccatgaattctcggacaggcacaccaggcttctcaaagcaacgtctgccgtcaattggagaaaccccagtggatgttcacccttcaacattcctgtttaaagagacaaaaaattag

SEQ ID NO: 24148 - DNA, 717 bp, Emericella nidulans
gaggagtattctagagattccctccagaagaagctttccacacttgttgaaggctcgaaccgccactatgaagtgaatttgtcccgggcgagattcaacgctgcgctaaatgaagtcttataccgaagcggacgtatagacgtggcaacatatcacggcgtcgtggtgtcttcatttggagatctggacgtatcagcggacccagaaggcctgtgcgctaaagcggatgcgtttatttccttcaacacagcctcggcagaacaaccgccccacgacccagaagtccttaaaaagtcacttggtctccggtggcaagcattatccacagccatagacatgttaaccaaagcgtccaaactcccagatgccgaaaacctacccaagattcacctcgcgagaggcgatgctgaaatgagcaggtggagactcggtttcgcgccatgggaacacagcatggcgcaacagtacggcgcgactctccttcggaatgctcaaacgtactatcggggcgccgccgcattagcccgaagagacggaggtgctgatgaggagcgcgatggaacgtgcaaagaagcaatcgcagccgctatcgaaggccagaaggagaaactcgcccaactcaagggctcagcgcctaaggagctgctgcaggttgaagaggacatggtagaggaaggctgggttagcgggacaaacatggaagcgctgttgtcgtag

SEQ ID NO: 24149 - DNA, 1224 bp, Emericella nidulans
atgtcatctctccgacacctccgccccgttttccgcgcctcatggacggctcgccgcacctacgccagtcaaaccccaggcaatcctgtgctcgaaatcttcaaccgcaaggttaaacacctccagaaagaccgcgccgcacagaatgtcgaagagagtcgaaaagtcgactacctcagagatgaggtggccatgcggctatgtgaacgtcttcttgtacggcctcacccatttctctatggagcctagctagttagctagcttagctagtcacttctgcagtagaggaggaagactgataaagactaggacataaaacgaagattccccaatgttctcgatctcggtgcaaacagctgcaacattgcgcgcgccctcacaactcccattccccccctcgacgcagcagcagccccagacggagacgcagacgcggccgccgcaggagcaacgaccataaccaccgagggtgcgacaatctccccaggtggagagccagtcacccttgcagaccggatagaccacctcacctgcgtcgagacctcgtcggccctcctgcaccgcgacgcagacctccctttcaacaaactcctccctataacccgcaaggtcattcctgatctcgagtctcttccctacgaacccaacacctttgatgcagttctctcgtcgctttcaatccactggataaacgatctcccctcgttgctggcacaagtgaattcgatcttgaagccggactgtccgttcatcgcggcgatgtttggaggtgatacgctctttgagctacgaacgtcgttgcagctggcggatttagagcggagaggtggtgtctcacctcatgttagtccgcttgcggatgtgagagatgtgggagggttgttgaccaaggctgggttcaagatgcttacggtcgatgtggaggatatcgtggtggaattcccggatacgtttgccctcatggcggatctgcaggcgatgggtgagaacaatgcgattctgcagcgggagcagggccctatttcgagagatgtgttgctcgccaacgaggcgatctaccggcagctgcatatggaggaggggagtcgtggtattccggcgacattccggctgatatacatgatcggctggaaagagggggaaggacagagcaagccgttgccgaggggaagtggggaggtcaatctgaaggatattcttggtggtggtgatttcaggccatag

SEQ ID NO: 24150 - DNA, 318 bp, Emericella nidulans
atggatttaattaagtgggcgctggagggtacattcggtgccattgaagaaattggcaccgacgaggatgcagagaaggaggatcaacaaagcgaaagtgaagagaaacaacgcatgaaagaggaggctgatgaggaaatacccatggagaagcctcaagcatacctggttatgggctgcgttgtaatcagataccacccccggactcgcgaggtcgagcttcagtgggaagggaacatgatgaatgacgggattgccgatgcagtcatggccgtcctacttactgtggagagcagcccagcatccgtgaaacgtatg

SEQ ID NO: 24151 - DNA, 531 bp, Emericella nidulans
ccgacacagagggctgccatggaggtggttaagttttgggaaaccaagcaccacgccctcactttcactattgaagatggtctcaacgccctatcggatgttatctaccatctggagacatacgatgtgaccactatccgtgcgtccacccccatgtacctgcttagccggaagatcaagggacttggagtcaagatggttctgagtggtgagggtagcgacgagatcttcggcgggtacctctacttccatgctgcacccaacaaggaggagttccacaaggaaaccgttagacgtgtaaagaacctgcacttggcagactgcctcagagccaacaagtcaacatcagcctggggcttggaggcgcgagttcctttcctcgacaaggccttcattgagacgtcgatgtcggttgatccccaggagaagatgatcacaaaggaccgcattgagaaatacatcctgcgcaaggcgtacgacacttccgatgagcccgacgtcgagccgtacctgcccgacaagatccctata

SEQ ID NO: 24152 - DNA, 287 bp, Emericella nidulans
atatccaggacaacaagtgctcttggttagtgaaccaggctctgcagcgctgcagtgccgagcagcgcaaggtgctcgacgctgcctatggtcgtaaggacgctgagcaagaggccaaggtcaaggctattttccgggaattggacctcgaatccgtctacaaggagtacgaggagaagatcgtgggtgagctgaagacgaagatcgcggctgtcaacgagtcggaggggttgaagaaggaggtttttgaggcattcctcgggaagatctacaagcgcagtaaataa

SEQ ID NO: 24153 - DNA, 1225 bp, Emericella nidulans
gattgcgataccatcgacgcccggtgaggctagcgacgtcactccaacaaatcccgcacaaccaaccctcacatccatacgcaatgccctcctccccgaaaactgcctctctgcacgcttcacaacgaccgccggtcctgatttacgcgaagtccaaggcaccgtatacgttggcacccacagcgacggcgacgagcgagtcctctggttcaagatcgatcaagggcccggcgctgaaaaacgtctataccccaccgtgtacatgctctggcataatgcaaacatcgtgccattgctccacacaccagagtttgttatggggaagctccggtctggcgcggacctgatgactccgggcctggcaaatgagcctccgtttgatgagcgcgcagtcaagggagcagttgtcgcggtggcgagcttggatagggtggctgtgccgttgtttgtgggggtttgcgaaattgatgtttctgctcttggggaggttcaggggacaaagggacatgctgtacggggtattcattgggagggggatgagttgtgggcgtggagcccgtcctcgagacctggtgttcctgctccagagtatctggaggggtgggatgaggtggaggaagagagagaagctggtattgaggaaaaggttcaagggctagagttggaagataaagatggtcaggaagtcgaagcagacgctgcagagcctgctcatgaagcggcggaagagccgattgccgagaaagagcctacaacgaaaggtacggttgccgttgctaccagactcaaaatactaataggagcagaaatcgatgatgcattcgaaaaggcctttctttattctctatacaaactaaagcaggacaacccatcaacacccaaccatggcctgtctctccctatctcgccgtcagcattcatggcaaacatgatcaccccgtatctccctgtatacaccgcacagcaagctcagtattaccaaatcaagaaaacaagctggaagaacgtgaagaagttcatcaagtacctcgacaagcaggttctagtgaagtcaaaggaccgcagcgggcaggaaaccgttattcttgacgtggactttgacgaccgccgagtcgtcaacttcactccgtacaggctcccgaacaagaatgcagtcgaaggcgcaggaaagtcgtcaaatgcggctggcaagaagcccgcaacagctgcagacggcgacccctcc

SEQ ID NO: 24154 - DNA, 780 bp, Emericella nidulans
cttgcactgtccatagtgccggcgtcattgtccccgttcgctacagccgaacccttgccatggagggcttcgacaccatggcgttgccctatctggcttccccgctgtcgttagggaatatgcagggcacagattatctcaatgctttgcaaggcatggaccttcctgatcaacgatcaaactttgactccgagacattcgttaggtgcgtggtccttttgttcttttgcaaagctttctctctgacgggtcttttcttctagcggagacgatttgacctttgcccatctatctccacagacactgaagcgattctcttccggttacgaggactcgttcccagagatggtcacttcctttgaccccccgcctccagctgagccgcctgccgactcctccattgaccataataacaagctattgagcttctcgatgccagtatatccgtggactctgcttgattattcttttcgacgcgcctcaatatcaatttcagctcagctgcacggcatgtttttccttgccgagtcaccgtggaccacgtctccgacagaaaatgctccgcctcagcaaggagcagaactgacctgctaccggcgaaatcttttccagatcactggttctgtaacccttcctcgggccctgcgctatatcatcaccgacaccggtgaccggatacctatcgtcgcgcacgaactgacagtgtcggctaccgagtctgttgagggcaattcggtcaagattatttttgtgcccctggaagactcccgctgcaaatga

SEQ ID NO: 24155 - DNA, 653 bp, Emericella nidulans
  unsure (1)..(653): unsure at all n locations
gcctttggacatcctaccactttaaactcacaaacaaattcaatatgcgccgctcattattacgggctgtcgagtccaccaaaccccttgctcgggtgtcacgctcagtttcgcgaggttacagcaccgtcaacgaaactggcaccaaggtaaggaacaggcgatgcgctctacccgtgaatcaagattcggctgactttgagctcgattcctggattgtataggatcccgccgagttagaccaaatcactacgctgccgaatggcatccgcgtcgccaccgaatctcttcccggccccttcgcaggtgtcggagtttacgttgacgccgggtctcgctacgaggatgcgagcttgcgaggtgtgagccatatcatggatcgtttggcctttaagtcaaccaagacacgcactgcggatcaaatgcacgagacgctagagtcactgggtgggaacattcagtgcgcctcttcccgtgagtcgttaatgtaccagtccgccagcttcaactcggccgtcccgacaacgctcgggttgttggcggagaccatacgcgatccccttattacagaggaagaggttctacagcaacttgctaccgctgaatacgagatcaacgagatttgggcgaaaccggagcttatcctgcccnga

SEQ ID NO: 24156 - DNA, 597 bp, Emericella nidulans
cctctagcagccaacccttatgctcccagcacgccgccacccatgcagccgccactccagcaagtaccaccgcctcagagcgcgggatctcggccaagcacagcctcttctgtaaagaaggccagccctgcgcctccaaaataccgtgagtccaagaacttgacttccttattcgagttatatctctgatcttcatagctcccggtgaccgctcccacatccctgccgaggcacggcctatctttgagatcctctccgaggacatgcagcgcgtcaaatctcgggccccatcctccttcaaagctcaggtcgatgacgcagagcggaggctaaacttcctcttcgaccacctcaacaatgaagaccttctcaagcccaataccgttcaggacatggtgcagctcgcccgcgccatccaggcacgtgactacgagacggctcgtacaatccacattgatatcatgacgaacaggactgatgagtgcggtaactggatggtatagtactttcctatcgtttgctaaacatcttatgctaatcttatatctacaggtcggtgtgaagcgtctcattagcatgagtaaagtgactccttag

SEQ ID NO: 24157 - DNA, 969 bp, Emericella nidulans
ccaattgaaacggtcctcactgaaagcgcccagaaatgcaggctccttctcgacacagttggcggtattgaccgcaagcatctgaggggcctcattgaccgcaaacactctgagacgttggcgctgtatcagggtcagtcccggttcatgctggaggatctaggcgcgtatctctctgagcgcaatatcggctccaaggccaggaagaggatcgcgtctaaggttgcggaggagatgattgcggtacgtacagacaaccccctgaacaaaccgtctcacaagccttgctaataatgataatagcgaaaccatgcatactcaaaccttgtcgagcttctcttccctcatcatgtccgtcttagtattcatgcgtatgcctcaccagtccaaccccatccattacactagagcgaaactaacctggattttttccagacacacaaatgccggacccaaatttggcatccgcctcttcccccgcggggctgtgcgtgcggcaccaaccgcacaggctattctctctatttctcagtccaagtccgagtccgagtctggggcgatcaccaaccccctctacgagttccagatccctacgccctggcataactgtcttgttcgtgtagaggggttagagggcatgcttcttacaagatcaggaattattcgcgatgcgattagcaaaggcttgttcgagggcggctggtgtcagcgcgagggaggtccgggcggatactttgttattcgcaaggttaagcaggaggccgcgcctgcgactgcaatggaggaagtccacctcagcacaacgcagggtgatacgaggacccagacggagacgaagatcgagccgagaaacatggaacccatgtatctgttagcagacaagagcccgctgaggatgttgggcgtctttgtctgggatcagctcataggcttctggactacgattcgatcagttgttgggacgagcag

SEQ ID NO: 24158 - DNA, 927 bp, Emericella nidulans
cagatcgctgaggatggcaaaacggccacagttggaggcggcatcaaatccgctgagttgattccagctctcttcgcgcagggaaagcacactggtgagcagctgatccggtggattagaaactcggctaacgtctgcagttcatggcgtctgtgagtgcgtaagctatcttggaccagccctgggtggtggccacggcacgttgcaaggcaaatacggtatggcttccgaccaattcgtgtcattacggattgccacagcagatggcgagatcgtaaccgtttcggagaacgaaggagatagggatctgtggtgggcgatgcgaggcgcaggccacaactttggaattgtaacttcggtcacctcgaagatttacgacgtaccggagcaaggaaagtgggcgtatgagcagctattattcaccggcaaccagtccgaggagttgttcgctgcattcaacgagctcgccgatatccagccacccggtttcatggtttggacatacctcgtgcgcattccacccttgcatccaacagaggtaagtccactcatctactctgtcaagcccggctaacacctcagcctatttacctggccaacttcatgcgtgaggctcttgacgaaatcgagccggagcttattgaccctttccggaagatttctcaaaggcctgcgcttgccaaaaccgtcgggctctataccgacattcccacttggatcaacacggctgtcaactcgagaggctgcgcaggtgaggccaacaaggtgcggttccccattggtttcccgcggtacgaccccaaggcacaacagaggctctttgacgttttcgcaaacggcaccgccgggggttcaccattcaacacttctatgatcctccttgagcagtactccgcgcagggcgtcgagtcttatcctcaaaactca

SEQ ID NO: 24159 - DNA, 745 bp, Emericella nidulans
gtaccgtgtccaaagtgaacgtgagctacagccaatcgaacatttaattgccaattacggcgatgccactttcacctcatggggcgacgagcggtttaagatttggcgcgacatggccaccggtgctgcagtttcctatgtggtcagcagcaacaattacgtcgtcattccaggcaatccgttgtgcgacgcgaggcagtatggtcgggtcatctctcagttcctgcaatggctacgtcgtgaaactaaatacaggcctatctggctgttgtgctctcccgaagttgagactgttctcggtgagaagctcggctggcgcagtttgtcctgtattgccgaagaggtggtagagcctgcgcgcaaccaagctgctatggacggcgaacttgcccggaaaattcggcgcacagagaatgaggggatcaagattgtgactataaaccagggtgaaatggtgtctgaaagtgtccgagaggcgatagacaagcgaattgaagactggaaagccaaccgcaagggaacccaagtgcatctttcagacatccacccatggcgcgaccacgaacaccgctggtacttctatgcagttgacaaagaaggaacaatctgtgcctttgtcaccttggtcttgatctcgcccacgtacggcatgcaggtcaaatacacctttgacttccccgggtctccaaacggtgttattgagtccctcatcactcacgctattcaaacagccggccgctcgggc

SEQ ID NO: 24160 - DNA, 1005 bp, Emericella nidulans
cacaccccttggcattcaagcattgctgtcggcgcggatggttcatattgcgctacgcatgccgaccaggttcgcaacactcatgacctcatcttcaaggatgggcgtccatactgcttccgcgaacgctcagagctatttgattggggttccgatggccttgaagttacattcgagcacctgtatccgtgcggccttattattcgtcctgtagtcactgacgatcaagacccgccttcaatccgcctcatcccaatgcgcaaggtccgtaagctctccgccaacctgtcacccgtcattctccgaggttttggtgacacccacatggaggaagtattcatcgaaacagccaccaaactaggccgcatcaccacctggagcgaaaacatcatcgttaaagtccgcgactccggaaggcaggacaagcaaaacaacaatgttaagtccaacgaggccatgcccatgcatttcgacggaatgttccgtttcaagcacgagattgaccctgttacaggcgaagaagtccgagtgcaggatatccctcgatatcagttcttcacgtgccaagctgcggcggccgaagacgatgggttcacgctcttcgctagctcgcgcctcttcatgcggtatcttcctgagccctggaccgttgagcgactggagaaaataacctggagcatggagaatgacggcttctgggacgcgaaggtgtataatcttccgcttgtcattaagcatcctgatactggcctcccgtcactgcgatggcaccagccttggggatcgaaggataccaagttcagtacctgcgacgtcaccattgataacgatgatgtgagactcgtcgccctggttgataagctgacgtacgattatcgcgtctgcaagcgcttttcgtggcaagttggcgacgcgcttgttagtgataacatctccatgctgcatacaaggactgcgtttgagagtggttgcaatcgagagctttggcggattcattgcgactag

SEQ ID NO: 24161 - DNA, 501 bp, Emericella nidulans
tctgcggagatggtggaaaatcttcgcatctctagcccaccaacccagaagtacgcaaacggtactgccgtccgccgtattccagcacccgaccgcagcccgtctctgcggcgaccgaagcgacggtccagcggtgttaagcaaccactaggagtggacttgacatttggcaatagcccttccacggtccgtcaattccgtcgcgtgtctgataaatcgccaagcgaggatccattctcctcataccagcttaccggagacgaaaatgcgagtcctaagtctatatactcagaaaccaacagcaaagaagctcaactgggacgtcgagcatacagcaaggctgtaggtcacgcttgccaggaggttctgggaactactggagaccaagagaagcgggaagcgatttctcgtcttgctgaggcttggagtgacctagaaatggtggatccagaaggcctataccacatcctccgagccactaatgagaaactgctaaggtaa

SEQ ID NO: 24162 - DNA, 1944 bp, Emericella nidulans
cagttagcagacacccttcccgttggcgtcgctgttgtcaatccctccgacgagatcgtcttcaagaatcggcgcttccaggaactcacagcaggccacttgacggtcgggctcgactgcttggcgcagggggtaaacgcggacgactatgaacaattagccgatgcataccgcgcctcgctacgattgcgcgcagagattcgaagggaataccgggtgaagaatcatactgaagaatggcgggcgatgtcacttacgccgctgaaagacaaagatttggaccagtttggcttgggggataaaggaggctcgatatgcatgatcagcgatatcacgccggagaaaactgcggagctcctgcagaggaagattgcagacgatgcagaagaacggaaacagcagcaagagcggtttatcgatatgatcagccatgaggttcgcaatccgctttcggcgatcctgcactgtgcagaggatattatggacgttgtggccgaggatgtgccagaagatgcaaaggcgcagatggcgagaatagccgaagccgcgcagacgatcaacctttgcgttgcgcaccagaagaagatcattgacgacgtgctgatattctccaaattggacgcctccatgctgaccttgtcaccgcgacaagttcagcccaagtcccatgtggcgacattgctcaccatgttcaagcccgaactccgaaagcaacgaatcgattttcggtatcagctcgacaggtcttatgctgatcaagggcttgactgggttctggcggaccttgacaaaatgggccaagttttgatcaacctggtctccaatgcgatcaaattcactgcccaagccgaaggcgagagaacgattcgagtctcgatgggtgcttccaaatgccgtccaccgtcatacccgccaaacgttgtcttcttcgagccgaatgaagaggcattaaaactcgactcgacccaggacccggaatggggccatggcgagacggcatatataatgctcgccgtcaaagatactggaatcggcatcagcgatcagcagcaaaagatgttattcgagcgcttcaagcaagcgaccccccgaacggaacggatatacggcggctacggtcttggactgaacatcagtcgaagactttgccatatgcatggtggtgatattggggtcagcgctaaagaaggcgaagggagcacgtttggcttcttcttttccgtccgactatcctctgaagagcaccctcaatcttcagtagtatccaacagagaggcgtctccagtcgatgaactatgttatcaaatcaatgagcttaatagcaagattccggacgtgaggaatgacacgtcgatggcagacttcgatgaaaaaccaacagtacaacaagtcaacgaggtcaccaacactcccagcgacgaacgcaagcaacattcactaaagctggcaaaggaagtcgatgagaaccccggctcatctactgatgcgcaaaagtggggtagtaatgtcgatgaattcgcgtcaaatcaggagcccggtgcgatagccaccatgtcgaagctcgtcaagggccctcgcgtcctcttcgtcgaagataacgtcataaaccagaaggttgtctgccgcaaactaagggtatctggatttgaggtgacgacggccaacaacggtcaagaagcgctcggcctgtgggatagtgacaagttcgactgtattttaatggaccaggaaatgccggtgatggatgggaatacggcgacgcgggagattcgagccatggaaaaggaaaagggctcgcatattcctatcctaggagttactgcaaatgtccgacaggatcaacaagccgatatgctcaatgctggaatggatggaatcatccacaagccttacaagatgcatgagctgtgcgagaagatccacgatatgctgcctgaggcatga

SEQ ID NO: 24163 - DNA, 1305 bp, Emericella nidulans
gaatgtattggctatggcggggaccagaaaggctatctccagagcgaggattgtctttacctgaacgtcgtccgtccccgtgggcttgggaatgcctctcttcctgtgcttgtctggattcacggttagtacgatctatcagtctccctaaagatgttgttcttccacgcagctgctcatatacataggtggtgagtttaagcaaggagggacgatgataaacggtataacttgaccttcatcgtgcagaactcggtcaagttcaacaagccgatgaatgcagtaagcatcgcataccgtctcggtccgtatggcttcttcaacggcaacgaggtagcggctgagaaggcattgaatctgggtctcaaggatcagcggcttgccctgcactggattcaggagaacattgccggctttgggggtacagagttccttgtgtctgttctgtatctatgctgatgccactgtaggtgacccacgaaaactcactatctacggtcaaagcgctggcctgaaggtgtggggtatcatcttcgtgcgttcaacggccgcgatgatggcctgttccgggctgctatcatgcagtcagggccagtcattccccaagggcctctcagtctgaccgcgagctaccaatacaggtacgagggggtggttgctgaggaaggctgctctcatgctgatcataagctcgactgtttgcgtgccttgcccttcgcggttctaaacaatgtgctcaactcttctgcttacaatacaggttgggggcctacagtcgatggtgactttgtcgcccgctataccagcgagcaagtagatgatggctccttcgcccgtgtgcccatcatcgccgggactaccaccgacgaagggagcacacaatctcccaagcctgtgaataccactgaagaattgagaggctggatgaatagtatggttccctactccctatctctatctacccatgctatctacacccgctgacccgacccagcaacatcgagctaccagcttgccctcccaaaatcctctattaacgctctccttaccctctatccaaacactaccaccttcggcatacccagctccgcagagctgggtggcaacgttactctgccacagccctacggcgcagctttccggcgatcagcagcctactttggcgaccaagtcttcaccgcgtctcgacgcaagacatgccaggcctgggctgctcacgccttgtctgcctactgctaccgattcaacaccaagcccacaactaccagctgggtggagggcgtagcgcatttctccgatgtggcg

SEQ ID NO: 24164 - DNA, 369 bp, Emericella nidulans
atggcttcccccggactcgatgactacacgatcgcgtgggtttgtgccttgcctttagaggcagcagcggcccgggccatgctcgacaggatccacacaccaccccagcagatatccgatgcgaatgcctacgacttcggcgagctaaacggccatcatatagttattggatatctaccaagcggggtgtatggaacagtgtcttctgcgaccgtggtatcccgcatgcgtttgacctttcctcggctccagttcggactcatggtcggtattggagggggagtcccgagcgaaagcaatgacattcgattagacgttgttgtcagcaaaccgggtggaaaacatggcggggtgatacaatacgattag

SEQ ID NO: 24165 - DNA, 450 bp, Emericella nidulans
agcagaaccatgaaagtgttcagagccgcaacgttcatcactgtgttcctcgccgctacagatggagtaaacgccatcaccgataccaggactagcccgctgagaaaggaggcagcaggaaaaggcattctcattgggtctggggctattagtccgacctatctcaatgatcctcagtttgcgactgtccttgctgagcagttcgagagcctctctcccgagaatgagatgaagtggtcattcatcaacccgaccaaagggcactacaactgggagacaatcgaccgtctggttgagttcgccgaagcacacgatatggtagttaaaggccatgggctcatctcgagctgctgcaaccccgactacttagtcaatatcaccaaccctacggcattccgtgctgcaatggcggcgcacttcaaagcagttatgcggcggtatcacggcaag

SEQ ID NO: 24166 - DNA, 528 bp, Emericella nidulans
gtgccattttctttacgctcaataagctcctgcagaagattcccctcgctgtcaagcctttcttgccccagcttcaacgaacctttgcccgaggtttagctgaccagactagcgagactttgcgtaacagggctgccaagggtcttggaattttgatcaccctgacgcctcgtgtcgatccactgattgcaggtatgagcatttacctgttccccatgattctgatactgactgaatacagaactcatcactggaacgaagactgccgatgttggcgtgcggaatgccatgatgaaggctctacaagaggttgtaggcaaggctggtgcgaacatgagcgaggcttccaagaactctctccttgctcttatcgacgacgacgccagcgatcaaacaggtatgtgatatcacctttgcgtgaacttgcaaaaactgattcgcgcagatgccgtggccatcaccaacgccaagttgcttggagcactcgttaaagttctgccaccagctactgctggcccgcttatcaag

SEQ ID NO: 24167 - DNA, 600 bp, Emericella nidulans
tttaggtcatctcgttctggccgtcagttcggcgacggcgtcaaccgcactagaaccggccagatcgatcacgatgtcttcgaagggttacccgttcggcgatggacgcgccagatacaaaccgtatcgcaagtaccaaaagccgcggggacggaattagaaacgtcgggaaatggtgggaagccatccattccagaactcccaatgccgaaagatagtcatctcctgagcccgatgagtcgggcgctgctacgcgcggctcgtgcagggtgcatatacatccgccaagtttcgaaggacattgacgatgaggaaaaggagactacggacccggaggaacagcaaacccagcaaaacatggagcgtaatttctccttgcgcaagtggacgacggtccctaagcacttggaggccccagaagtggaatttctagcaaagagaagaccgggcttgccgtcactgtatggtgctgcagctgggacggtcgatggtgctggctcagtcccaatgaggaagactcgcttcaagaaagttgaccccgacacgggtaatattctaatctatgcggcctgggttcctgaaggacagaagatccattta

SEQ ID NO: 24168 - DNA, 757 bp, Emericella nidulans
gagctttcgatagatactgatttcgaccccctacccatggtcgctgcggcttaattcgccctaaacgttcggatgactcgatacgcgggactagggagaacgcgccccaaaaagctcactcccaaggcgcctatacccatttaccgtgagcaccagatagatgaccttgaggaagagatccaaaatggcctacagcaggttgaaaccggtgttgagaaggccgaggagtccgtaagtgtttatccgaatcatccctgtttccagtcacgtgatatcagacaacctcatctcatcatgaaaaatttgcacgggtcactacccctttaccagcgcaagctaatgcactgttgcggtataggaataccatttgcaagttgctatcaatgcagttgcatcggggagagttgtaaatgaggcccatattccaactccagagaccgtcctcagtaacctgcaatatgacgagctatatccaccagttttctcgcagcctgcgacatatatccgcttctcttccacggtggaggactgttgcgggtgtccatataacatgactgacgaggatgatgtattcctgaagatcatgaacgagaagcgggaccccgctgaccgatgcacggaggaccagtttgaggaggtcatgaacttcttcgaagagacggtgcgattaaagcagccgtacgcagcggtaggcagtgctccggtcttgagttttgcagaaatgcaagagtccatggatgcaaccgtagaggattat

SEQ ID NO: 24169 - DNA, 1456 bp, Emericella nidulans
atgtctggtaagcaaccagcagaactctattcgtacttggaggaaggcacacagcttgccatcacgagcgtccaccttgtcaaccaggatctgcctctgggtgggtaagttcctcggatcggcagctgtccacgctgatcacaaacatagttgatcgcctcatcgaaccacaaacaatagcccattttttcagtgcatgtggccatgggactctgcccaacggcaaaaccgtttcgttggaactcctcaaggacaccgagctggaactgctgcacaggtctccgacaacagataatgacgaacgggacatcatcacgcgggtcatgacccgcatcggctcgattgaggatgaggcgcggatgtgcatcgtcggacggaatatctggtccgtcaagaaccgcctatgggcgggcattacaccattgtcagagcagcgatggaaagagaaggggctcgaccagccggataatttcgatacagtgcgcagtatctctcggcagtggtcgcggtgttcgagtatcttaaccgacctaaagtgcaggagaacatccgggacacgtttaacttgatttcgcagcatttgggagaattcgaaacaatagttaacgcggagagggggaagggccacccccatgtgaatgtgcgacagctgtggactgagtatatcaaggctcatttcgaggtcataaccgagcgcgcacatcgctgggtccttgttcatgtcaatgccctgcggaagccgctcattcgtgaccttgtgacctaccgaccggcggatctcgacaatccggatcgcgtgcagtggaagatcacagatcggctgcatattctggcggagattgccggggtcgcagactatactatcatgctgccaatgcacggatattacgggtacaccgcgccttcaattccggaaggggtcctgccctccctccgttcacccaaatgggatgtccgaagcaaggcgtacgggccatatatgaagacaatttctcgcatccagcaagtgcaaaatatacttgatcgaagggagcgcgagggacatgtagagtaccatatcgcggatcctatccagtttcagcggacgaccgaaattcaacttggttgccagcatcgggctaggcgcgagatccgaggagagccagtggagcctgtacccaaggagccgtggattacggacattctgcattggatgaagaccgatgagcaccgggttggatttgtcgtctataggttgacgtatgggcaaaacgaagcagactggaatgcgttccgagagaagttcgaggcccatctgtcggactggggaagcggacagactgggtctgcagctctcaagcctcatctggccctacactggcgtgatggaaaagacctagggatccctgaggatgacgttgaggcagccagaaagtgcggcttctcctgccagcccttttatagactaatatgctaa

SEQ ID NO: 24170 - DNA, 344 bp, Emericella nidulans
cgcagttcactttgcaggggacaaacacatatattgtcggcaccggaccgcaaagactcatcatcgataccggccagggaattccggaatgggcagacatcctcgatgcctacctcaaagaacgctcgatctccttgtcgcacgtgttcctctcgcactggcatggtgatcataccggaggagttccggatctccttcgtctttaccctaatcttgccggcgccatatacaagaactcccctggcagcgaccaacagccaattgacgacggccaagtctttcgtgtcgagggcgctactattcgagcagtgcatgggccaggggactcgcatgaccatatgtgc

SEQ ID NO: 24171 - DNA, 762 bp, Emericella nidulans
atgcctactctaggaggtcttttgaagaaacggcgaacgagggattcgcaagacctctccaaggagctccaggccggttccaccacgactggccacaccacgacgtcaccaatcgctgccgaagactcccagtcccagcagcaccacggccaccacggcggccaccatttcttccaccataaccaccataaccaccagccttctaacaattcggctaattcggcgaattcgcagaattcccacgccgctaaacaccaccaattcgaccagtcttcagctaccagtaaccagccttccgacgggcaaaccgcctccatgcaatcccccgcacaacagccctctagtacttccgcacactcgaattccggccaccacagcaatgccgccagcatacacaacatcatacacccgtcgcagcagaataccccgcaggtgtcgcgggcggagcgtaccaccaagggcaaatacaccctcgatgatttcgcaatccagcgcaccctcggcacaggtagttttgggcgcgtccacctcgtgcagtcgaagcacaaccaccgctactatgccatcaaagtattgaaaaaggcgcaagttgtcaagatgaagcagattgagcatacgaatgatgagcgacggatgctgaaccgtgtcaggcatcctttcctgggcaccctgagggggacttggcaggatgctcgaaacctctacatggttatggactccgtccagggtggagagttgatcagtatgcttaggaaatctcag

SEQ ID NO: 24172 - DNA, 495 bp, Emericella nidulans
ccatgttcttcacccaagaacgtgctcactatgcccgtgcggcggagcttactcaggagcctccgaaaggcaagccttactctgttgctatacctggcaccgagaaggatggacggagcccaatctaccgttcctggtggacacagaaggagctggttaaaacgctggatcctaaagtacgtataaagcttggttattttattatttgctgagaggctggatggagttaaccattttaggtcaccactgcccatgagatttttgagtcaaccgcgaatgataccccgaaggccgattgtcttggatggcgtccttacgacccagtgaagaagacctggggtcaataccaatggataagctatggtacagtccaaaaacggcgtaccgatttcggtgccgggttggtggagctacatcacaagcataactgtgctcgacccgggcagtacggtattggtctctggtgtcagaatcgtccagagtggcagatcacag

SEQ ID NO: 24173 - DNA, 596 bp, Emericella nidulans
aaaggcacaaatggatgttgcaaagggtcttccgaggagactaccgaagacgttaagcacaagtttgcgtctcccgactttattgagtacaaaccagacacggaactaatatttcctccgtcgctctggaaacacgagttgcgccctctcgcttttggtaacaagagaaagaagtggtatcggccggtcaccgtacagcagctcctggagatcaagagtattcatcctgatgcaaaattgataggtggcagcaccgagacgcagatcgagatcaaattcaagcagatgcgttatggagcatctgtctaccttggagacctcgctgaactccggcaatttgcctttcatgacaactacttggaaattggtgccaacatttcattaactgatcttgaatctgtctgtgatcaggccatcgagcgctacggctcagctcgcggccagccctttgccgctataaagaaacagcttcgctactttgctgggagacagatcagaaatgtggcttcgccagctgggaacctggccactgcatccccgatatccgatctcaacccagtttttgtcgctacaaacacgactcttgtcgccaggtc

SEQ ID NO: 24174 - DNA, 517 bp, Emericella nidulans
acaaccatctatctcgatctgagtgtatatgattccctcgccatgactagtcgtgacggttatcaatggacagcagagactggcctggtccagggcgtgccttcgatcagtgtcatctcgccaccaacgaatatctctcccgagtcccgccagtatgacgtcgttgtcgtaggagcagggtattcggggctcacagcggcccgcgatacgtgtctcgcaggtgagtgcggattcaagacaaatgaaagcagagggctaatatatcctaggcctcaaggtgctgcttctcgaagcgcgtgaccgtattggtggccggtcatggtcgtctgatatcggaggatatccattcgaaatgggcggcacctgggtccactggggacagcctcatgtttggcgcgagatttcaagataccagatgcggaatgaattggagagttcattcgacttttctcgcggggtcaaccattttgaactgcggaccaaccaaggaccagcgattatgagccacaaggaagag

SEQ ID NO: 24175 - DNA, 750 bp, Emericella nidulans
ctcgagcccgtcaagcgcgcgtccaacacgacgacctcctccaagcgcggcgccgcttacaacgatgcctccctcgtcgaggccctcgcttcctccggcaccatctcctgggcctacgattggaacatgtacaccatgggcgatctccccagcaatgtcgagttcgtgccgatgctctggggtacaaagatgttcaccggctggttcgccgcgatccagacgctcttgaactctggaaacaactacatccttggtttcaacgagccggacatggcgtctcaggccgcgatgtcctcgtccgatgctgccaaatactataagaactatatcagcaccttcgccggcaagtcaaagctcgtctcgcccgcggtcaccaacggcgagggagacgacgtcggtctcaactggatgcgcaacttcctgaactcctgtacagactgcgacgtcgatgctcttgctgtccactggtacggtgactcggcagacgacttcaaggccttcgttgaaaaggccaccgcgctggctgacgagttcggtctcagcgaaacctgggttacggagtttgcgctcaactcggatttgtccggctccgcggatgccagcacttcggcggacttcttgagcgaggtgctgccttggttggatgaacatgacaaggtcagccgctatgcgtacttcatgtgctcggatggccatctgctcagtggaaacagcttgagcgtgagtggaaaggcgtatgtttcttgattg

SEQ ID NO: 24176 - DNA, 1265 bp, Emericella nidulans
gacatggtacgggcgagccttcgaaaccgacattgaagtataaaccacgcgcagtggggcggcgcagcaaagaagaacgagaggctattgagaaacttgaagctgagcggcatgctgagcggttggcagaggctgcagcaatccagcgcggaaaggcgagcctcgcagcgcggggacgggcgggattctctggacgtggacgtggcggcccaatgggaatggctggtgctgccgggccattaggctctggatttgctgggcgaaggggccgtggtggttcgaggtttggaggtggggattctagggcaacgtcaatgtcgcggaggagcaagtcgatgacggcggcccttgggggtggttctgcttcgtccgacgaaagcgacggagagatcagggtcagtatcgacaggatcaacttggaaagcgacgccgatgacgacgatgacgatgcgctactggagaagaagaagaggcagcggaagggaaaaattgctcttgggagcgtaagggaggcaggcttacgcccgatccgcgtcgagagacatgagcacgaggaacgggtggtcagcgtgaatatggagtctagtacagccaagtccgctgaactccgacagcaggcgaaggagaaagccaaggatgatgcgctgtttgtgcaggatgacgatgagacacctacggaggaacctcaggtgaaacaggagcctacagacaatgatcaggcaatgaccgatgtcccacatgcagaggaacccgttacaactgatgacggactattacctgcaccgaaggtgaaggtgcggcggaagctgggctcaagggaaccatctgtgcctgtagtaaaggacccgaagagcttgttgcggacgaaggaggatattgaagaatacgatcgacatgcagaagatctggaacttattaaggatctattcacaaaggagcctcctgccacaccagctgaagctacggaaggcgtcgagcctgcagagggcgctgaaactacggctgatgacacagagaaggaaaagaaaggggatgctgaagacggggaagagccccaggacgataaactcaccggccagctcttcctgatgcaattcccacccattaccccgaatctcattgaacccaacgcggatgggacacttcctgatagcgaagctacgatgatacccgatcccgctgcgtctcaaggcgtgggcaaaaccgggtattcaatgaagggcaaaggggaaaccccagtcttcaagcgcgaggatgatgtctaa

SEQ ID NO: 24177 - DNA, 734 bp, Emericella nidulans
aggcttctccaacggacaggtccaagtagacaacaacgacaatgccgaaggtctcctttacaccctcgatctctcccaatccttcaacaccgagaacgacaatctcactgcgctcttcgatactttcgaaaaggcgggcggcattgcgggcaacatcgcgcctacctaccacgatgggttcatgttcgccaacgacaacttgttctatctctatgggtaagcgagtctctggaccctccggcaatcgatcgctgatttttgtaggggtcttcttgataacactgacgatttcgatgaccctgccgagaatactgccctggcctaccaggcgtaccagtacggaggccaacggcccgggtgggagccccggttcatcagcataaatctgcccgacggggtcactcgctatatcaccaacggtgcaggcgtgaacgcgccgagcgagaatatgggttggtacatcagcgggatgcgcgccccgggttggggtcctatgtgggacaacgagactgcgaccaacgtgtcgcagcgcatgatcacggtggacatgtcggatatggagaaacctgtgtttgagaatgtttccttgcacagtgatgatgtaccgggacgggctaatgctgaagccgtatgcgtccccgtggcggagtccggggtcattgtgctcataggaggcgtcaccgagccagacaccatctttgccgccggactgagcgatgagcagatggaaaaga

SEQ ID NO: 24178 - DNA, 1123 bp, Emericella nidulans
ttatggaccaattacttacaattaatggataccatgatttacctactagaagatgccctagaactctggagcgccattttgttgcaaaccccatcgcccccttctcccgagattctttccctcatccctgccctcttccccatcttcgaatccgccatcgacggcgtgggtctggccctccagattgcggagtcctacatcatcctcgcaccccaggagatccttagcgaccgcattcgtctcccactctttacctcgttcgagtccctcctccaacccacgctccgccagcgcggcggcgtatgtaccccgcctcgtagaactagctatccgcggcgccgacgccgtagacaacggcagtgaaaacacataccgtgtcatcatcagctctttactcgatagctccctcctatcttcaatcctcgaaggcctctactccgcttatgaatccagccaaacaacagggccgaacaaaaaacaaacgagcatctacggtggcgttgaaacagactacttctctgtccttgcacgtctcgccctcgcacacccgacgctcttcgtttccggcatcacacccgcttactccaatagcaacatcagcaacaacagtcaaactccagaacaggcgcaggaacatctcatcacctggctcctaaccgaatggtttctgcactacgacaacatcggcaccgcaacgcagaagaaactgcacgcgctggctttaacccagcttctcaccctcagtgggcctaatacccagccaccggcctatatcctaaaccacctgcaatcgtacctcaatgtttggacggatattattaccgagttggcggagggcacgacggagggtgatccaagtgatcctcgcggtggggattatctcatctactggaataatgcgcagacggggacatatgaagataacgagccgccagaaaacatgcgacggcgtgagtgggaaagctcggatatcgttcacaagacaaacattcgagagtttgtgcgcgacgggctgcagtccttgattgtgagttgtggtggtgaacagcggttccaagaggattggctgctcaatgttgatcgagatgtggttgcggcttttgccgcgctgcggttgctctga

SEQ ID NO: 24179 - DNA, 357 bp, Emericella nidulans
atggggctcgagcaacacaaaaccgccgttacacgtatcgcctcggccattcgcggcttctacgagcgcaagcagccgtttcgcattgcgcacggctcgacgaacagcacccgcccgatccgccggaagcacgaagtcgacatttcagaccttcgcaatgtcctccgcgtcgatccggtcacacgtaccgcactcgtcgaacccaatgtccccatggaccgccttgtcgaggcaacgctgaaacacgggctcgtgccgccggtcgtcatggagttccctgtatcacgcgggagggggctttgcgggaacagcatgagaaagcccgagctttcggatgggttcttcaccgccctataa

SEQ ID NO: 24180 - DNA, 639 bp, Emericella nidulans
atggatctgccaaccaacccgacagccactcttaagtctgccttcgtggtgacagacaagctcggccaaaacgtcaagaacttcctcgtcggcacagcggatcttaccccctccgtcaacgtggcctacaagaacaaagtcgacttccagtcccccgacctcaagaccgcgtgcggtatgagtggaaattatgcaggccggtatatccactacgggatccgcgagcacgccatgtgcgcgatctccaacggtctggcggcgttcaacaagggcaccttcatcccgatcacaagcacctacctcgttttccacctgtacgctgccgccgctgtacgcatggccgctctacaggggctgcaccagatccacatcgccactcacgacagcattggcgttggagagaatggaccaacgcatcagcccatcgccgtaccggcactctaccgtgcaatgccaaacatccttttcattcggccctgtgatgcagaggagacggttggggcgtacatcgcagcaatccagcacgacacaactccctccgttctggcactgtcgcgccagaaccttacgcagtaccctgctcactcctctcgagaaggcgtgcagaagggagcctacgtcttcgtcgaggaagagaac

SEQ ID NO: 24181 - DNA, 212 bp, Emericella nidulans
tcgacacgctggaatacaaagtggatcgcataaggaagatctggagatggtttccgcatcggcgagccatctgtatcggagactccacacagacggatcccgaagcctacgcggagatatacagacgatatcctgagtggatccatgcaatcctcattagaaaagtcatggatgtgcctcacatggaggagcgaaatacatcgaaaaggttt

SEQ ID NO: 24182 - DNA, 1221 bp, Emericella nidulans
tcggatttcgactatgacttgcgcgaggatgaggttagccgaaaagaatcacatcttccccaagaccaagtatctaccactgtgatttcgctctgtcgcattttcgagcgagttctcaccgaagtgtacatgcgacaggtggtctcgattaaccttgccgagaacatctctaatcagcatcgagcttgggtcaggactcttcccacattcctacagttacaaagagaccgattggaatccagaacgctagaggaaagcttggctgcagcgcatgtcttcgggtcgtactactggtcgatcattctcttgacccgcccatttctcatcttctgggtatcacaatatgtgaaaagcaagaaaggctctgccggagcccccgaatccagaaacggtacatcccgcctatcattattcgccgacgcctgcgtctactctgccctgcgcggcctcgacatcgtagagggcctcgcccgatacgaagctctcccgcgccgtcttcctttcctaattaactccgtcttcaactcagcagtcgtgctaggcgccgccttcttcgccgactacgacaacctcctcccgctcggagaaggcatgaacaaggccgagagattccttgaactgtttgtccctcatgacccgcactcttgccgtttccttcagattatcaggtatctccgggctgcagtatccgagtacgtgggccgccgtagtcggcaatggatggaacgccgcagcagacaggtcgaacagctcttcggtcaagtcgggcccgctagtgcagatgaactatcacccacaccagataccataccctctgcccgccggccaggcgaaatcgcagccccgtcccctctatccccgaacaagctaccccaagcagataatcccatcccgtcgcaacatcctgatttaacaaccctcgcgccacatgacagcagcatctgggacgcgctctgtggtactaccaccgccggactcccattcgattcggctatctctactctcaccacaacgggaattcccgtaaacttctccccgggcggctccatgggtatgcccttggctggtgccggagcctcggcgtcagcatcccggagggcaggtgctgagaccggcgacggcgatggtcacacgccgctctccgatatgatcttatctgataacgggcttctctacatggctgaggatctacccgtattcgggctttgggatgagacgtaa

SEQ ID NO: 24183 - DNA, 351 bp, Emericella nidulans
gttgagaatatcaacgggtggacacatgcgcaagaaatcgctgcttttgatggcgtggggacgcttagaccggttattgatgacatcgcaaatcgctactctgcgctgctgacacccagcgtacccgatgaagcgcctgaggggactctgaggacgggcagtgcagcgtttaatgggatgtggacggtacgtacccactgctaagcctccagactacgagactggctaacgtttgttggtgacaaggcgctccacacccccgtcgtgaatatccccggatttcaaggaaccaacggcatgccaattgggttgtcacttgtggcggccaggtttcatgacgagcatcttctt

SEQ ID NO: 24184 - DNA, 1133 bp, Emericella nidulans
atgaacctgtcgtcatccatcattccgacgcgcatggtacggaggagtactattcggtgcgctccattcggacccagcaaccccgactgtatcgcaaactccgacaactcggtcatggtactttcagccaggtatcgttggctgttcgtgtcgaaccggaaggggcggactctgatcatggtcactctgacgccgtatcctcgacccagaagctagttgcaataaagatcattgaacacgggccagcgggtggagccgatgaggagcgactggaggtgtccctgaaacgtgaggtcgaaatcctcaagtctttgaatcatccatcccttgtacaactcaaggcttttggcagcgacgaaaaacgcgctctcctggttcttgactactgcccaggcggcgacttgttcgaagtcgtctcgaacaataccagacccctgactccggggctcatccgacgaatttttgccgagctggtggctgctgtacgctatttgcacgagcattatgtagtgcatcgtgatctcaaactcgagagtaagctccccgcgccttcctgctagaacaaagctgactgatggctaccagacgttctcgtcaatcttcccaaagaagctctgcaaaagattaccgattggcgtacttatgaccgtgcagttgtgaccttgagcgacctgggcctctcacgacgtatacctgaacctcctgagagccctcttctccaaacccgctgcggaagcgaggactacgcagcaccagagattctgatgggccagcagtacgatggccgctccaccgacggctgggcgcttggagttttgctgtatgcgatgatggagagcagacttcctttcgacgccctccctggaacccgaggcgatcctgcgaaactccgagcccgaactcctcaccgtatagcacggtgcgaatggtcctggtaccggtacgcagacagcgacggtgagtgggatcccgagaagggccgtggtcttgaaggcgcgcgggagtgtgttgagtcgctcctgaaacgaaacacaaaacgcaagagccttgaagagatcgcggccatggagtgggtgaaggacgccattgacgtgcctggcgggttgaagcgaggcgataaagaagtgccctga

SEQ ID NO: 24185 - DNA, 1185 bp, Emericella nidulans
atggcgacttatacgcccgtgcagctctcaatttccaccaaatcccatggcgccgctgctgcgccaggacttggccttactccccctgtgactcccaccattgatgaccgggctggcagtcccaatgctactttattgcctctcgtggatacgtgctacggcaacggagccgtagctgtatccaaccctccgcatttcctcggtcagttagagtaccaactcgacgaagaagaccgtcctatcacgtttggaaccggcgcgtggagtgttgtctacaaggcgtttgcctccccccgcacgagtaatgcaacgcgcccatttacgcccccaagctcgcccagcccggccggccgcttggttgctgtcaagtcacccggaagacgagatgcccgccccgtgatgtatgcagaagctcttgcgctcacccgagccagcgctacacccggctcagagcgtcatcttgtgccatttcacggctatatcaccgactccagctccatagtaatgtcagcagttcccttgaccctgtcaagccatatcgaagacaaggcccgcattgcccagcagaacttcagcatacgaaccatgcacgaacccgttctagggatgacgcagtggcatgatcttgccaagaagctcattgagggtctctcctggctccatagtaacgcccatatcgtacacggtgacatcaagccacataacattctccttcgcccacgcaattccctcgacagcgacatcgactcggcagaattcccttatgaaccgctttttgcggacttctcctcctcatattccacttcttcctcaggaactgaaataccgttaaatgcctgcctctcagccgtaacaaccccatttacagcgccagagctgctcaaagcccttcgctcgccggacgttattccggagcccgcgtccgatgtcttctcccttgccgtttcacttcttggcgccgccactggcgatatcttagtttattctgggctccatccgaccctgcgcatacagtgcgcaaaggacggtcatcttattattgaatgggcccgtcagtgtggaactaacggtacacgcgtccccccgaacggacttgttgagaagctcctcaagccggcagttgcgaaagttcctgctgagcgggtcactgctcatgcatggttggacatggccagcactgtctag

SEQ ID NO: 24186 - DNA, 696 bp, Emericella nidulans
gcatacctcctcctcttccgacatgctcaattagtgcttgttcatttagccgaccatccagacttgaaggatgggaaagatgtgagggaagaacggaaggctctaatagcggctgagaaggaggtgaagcagaatctggagatcctggaaaaactgaagccgcggatcaacaagcgatatgagcggcatacacagctgatgcgtgaacgccagtcccgcatgtcctcgtccgctgcggtcagtcccgctgcgtcgagccagccgtcgccacctccggaccccgctctgtctggtgttgccgaacctctagaagctgggaaggataatgagctagctgtcaagctggctcggaccgagattagtcgtagggcaaccgtcaggaacgcgatgcgccaaggtggactcagcggtgaggatgattcgagccgacgcgcggcagggatatggggtgactgggaagaagctctgcagcgaaatgagaggagggatcccgacgatctgagtcgacgcattcaagaagtgcgactgaacctggagggcaggccacagatttcaagcaagtctgtaacgcggccgctgaccaatgtctcatctacgcccacttacaaatatccaactgttcctcggcagaaagcgcttgatgttccctctgttccggtggatattccacagaccaaggcccgcgagctcacctag

SEQ ID NO: 24187 - DNA, 852 bp, Emericella nidulans
atggtcaagaaatacgcccttgtcggcaccggcggccgggccatcttcttctacacggcaatcgtaaaagacttctctcaaacagcccagctcgtcgccttttgcgacactaatcagacgcgcctagactatgccaattcacgcctcgaagcacttggccatgcccggatcccaaccttcctggcctctgactttgaccgcatgatcgcagagacacagcccgacgaagtcattgtcacgacaattgaccgcacgcacaatatctacatcgtgcgcgcgctggaactcggatgcaacgtcatcactgagaagcccatgaccatcgacgcgcctcggtgccggcagatcttcgacgcagtcgagcggacaggcaacagagtgagagtaaccttcaattaccgctacgcgcctcacaacaccaagatctacgaactgttgtcatccggcgtgatcggtcaagtcaactcggtgcatttcgaatggctgctcaatactcagcatggagccgactattaccggcgctggcaccgcgataagcggaacagcgggggcttgctcgtgcacaagtcgactcatcattttgacctggtcaacttctggctgcagtccaggcccgagacagtggtcgcaatgggcgacctcaagttctacggaagggagaatgcagaaagacgtggtgagacaaagttctactctcgtgcgtatgggagcgagaatgcgaaggatgaccactttgcactgcatcttgaccgcaacccgcagctgaagtcaatgtacttggatgcagagaaggaagacgcctacttccaggaccagtctgttatcagcgacggattcagcatcgtggatacg

SEQ ID NO: 24188 - DNA, 1905 bp, Emericella nidulans
atggctgatgtcgaaagcgcaggcgtggacgattcgtttgcgcaatccgaacctcacgatgagcaacaaattcacaacatgactgtcggcacgagacgtcaaccgaatgggacgataggttcagtctactctgggaacaaaatcaggcatttaaaaaaggaggacggtatccctctgtggcgcaaagatatccagtatcagtttcttaagctcgtctttgaagacaagacgccggtcttcactcgttggccagatggacagaaaaatatggattttgcagatatttacatcgatgctatggctaggagcagcaagacgagcaagattctcaaggacaagcttcagagcgataagcaggcggcgatcaatatggccatggtttgcctgttggtcaattttggacggatgaatacgaccctcaactgtatgttgccgatgtctactgcttaattattgattatttggcatgggacttaccttgttcgatgtcagtctttccgaaatgcgtgctcagctgcgaacctaccactcattccttcgtttacaagcgcatcaggacccgaacgcgtacaagcagttacaagacgccccccgccttaagtccatcctcaagggtgcgtctgaggatgtggatcaaccaaatactctggataagataaagcgcgaaaacgttccccgtaccaatccggtaaacctgatattcgtcctcgcacaatatgcgcctaaagtgtctgagatgcatttcttcccgccccgtgatttctttgatctcgtcatgcgatcaaccttaagcagcaaatctcgggcgaaggccttcctttggctcatgtggtggtatctggagagtgacttctcccgcgaggctgccctcaataatcccttcggtccagggttggagggcgagggaaccggaggtctaccgatcaaggttccctcttttgaaatcctcaccgaagagcaggcgaatgaggagaatgttgacactcaatccgagatcgaatacggggaagagaagcgcttggaacgcaaaagtaagccaacatctcaccgtgtgtctccacaacgtagctgacattgtatctagggattctagaggaagaagagccaacccctagagcacccaaacgtcccaaaaagagtatgtttctgccgattcatcaagagctcatactaacggtatatctagtgccgtattgggagttccaatatttgaaacagatggagcctggtatgttgcgcttcgtcaatccacatacatgccatgctgcgtcactaacatatttaggtactaaaatcccttctcgtcaattcagcaacaaaggggatgcatacagggcagcggcggactccgatgatctcatcgagtttcgaaatcctgatggatctatccgctccactctgaagatgcctagggacgaagattacgcctaccaaagtggcagtcttgatggcccatcgccgcgtattgtattgaggacaaaggcagaaaacacccccgatgccgcgtccccagcacctccaggttcaggctatcctattttgaaccggttcgttacagaagcttccccacatcaccaaggttcaagccgacgaccccgcccactcacccaacaccagttggctgtcgaacgaaaccgaagacaacgcattgagtacatattggccaagcggaaaggggaagcgtatcgcttacttcgtgcgaagagactaactgaaataccttttgcacgctacgggcgcttgctgcagaacttacctgatggttatgacacggacgatgataagtcctggggaaagggaggtctgttgcctaatccagaggaagaagaggattttggcgagtgtgcgaattatttcttgtcggtcatccgcaaggcatctaggcgactagaccggtgggactat

SEQ ID NO: 24189 - DNA, 333 bp, Emericella nidulans
ggcataaatgttacctcttattacatgccgacagtcctgacaatgtcagttggattaagccctaacctggcgcgacttctggccgcctgcaacagcgtacaataccttctttggtctttcctcggaatcagactagttgagcgatggggccggcgtaaaacgatgacttttggcgcaaccggacagtgcctctgctatattgtcatcgccgccttaatccggcgtaacgagatgcctggttatccgaacgcccagcaagtcgcgtcggcctctgtagcattcttttccctgtactacgttttcttcggcatcgccatgcaaggcatcccctgg

SEQ ID NO: 24190 - DNA, 440 bp, Emericella nidulans
ccacccccatgcgtgaggctcgcagcgccttccttcaggcgttcatgggctcgactatttccgaaaaggcacaaagccagagcacggcaacgacgcgctttggggtgttggtaaataaactgcaggatcttcttagccggacagagcatttcgaggtgatgactgtcggccacaattcactggaaaacacgcgcaacaatgcggcctacatgcttggaaaacagctccggctgaagttagttgctgatgaagattctgatataccccgctcctacagaaacatcatggtttctattcacgccattgcaactttcaaggccctggatgatttcctccatccccgaattgccctttccgacaggccgaagacatctcgtagccgtgaaacaatcttgtcgcagattgcgaatgcagcgcgtctcagggatcctaagcttggg

SEQ ID NO: 24191 - DNA, 617 bp, Emericella nidulans
atgtttgcgtcaaccctcaggaagacatttgtcttccttggactggcaacctactcggccgcagccctaacgaccacctcaaattcaacccactataccatctccaactcccgcttctcagtcgccgttgcaaaatccaacggccatgttgtcgatgcaaatctcgacgggcaagaccttctcggccccctcagtggcaacagcggaaaaggtccctatctcgactgctcctgcacacccgagggcttctggacccccggtgccgaaccagcgctggtgaacggcacagactcaaccggaacaccctacgtgggagtgattatgaccgacacctacgagacaactaaccagacactatctcaatatctattcctccgcggtgaagaaacaggtctgcatgccttctcacgagtaacatactataacgagagtgattatttcctccgcggcctcggcgagctccggacgctgttcagaccgaatacaaatctctggacacatttttctggcagcgaagggaactacggccctatgccgctatctagcacagagaagatcaccgtccaggacgcatcaacttaccttggcgatacaactgacgacccttacgtgtcgca

SEQ ID NO: 24192 - DNA, 1284 bp, Emericella nidulans
tcttctttcctgctccccaaggtcaagactcagcctccgcatcccaaggttccaattcggagtaagagcgatgtcggccaccacagctcgttcagacccgttcaagcctgcggcgcgggttgcaggtcaacgacaggacgtttggtatggaatctgcaatcaatgcgtgctaaggattattctgactggcttctaggtccattgtcaacgaagccgctgcggcttctcctgtccagcctatcgtgaacatgggacaagggttcttgtgagtgagccggcttctaaaacccagcagagaaatgctaaccgcataattctctagcgggtacaacccgccgcagtttgccctagatgccgcgaaggctgcccttgaccgcgtcgactgcaatcaatactcgccgacgaaggtacatcttatctcagaaccagaaccgtgatgagactccggcttaccgttatatagggccgcccacggctcaagaaagctcttgccgacgcgtactcgcccttttttgggcgccagctaaacccagataccgaagtcacaatcactaccggcgcaaacgagggtgaggttatctacactggttctgggatacgagctgactggataaggcatgttgagtgctttcatggggttcattgagcaaggcgatgaggttatcattttcgaacccttcttcgaccagtgagtttggacgctccgatgcttctgcctatctaacagtctgtaggtatatcagcaacatcgaaatgcccggcggcactattcgatacgtccctctgcagcctccgaaggatggagccaccaagacgttacctgcgtccgaatggagcattaattttgacgagttggaaaggacgataaaccctaagactaagatgattgtgagttcctgattgcaaaccagacgctcagattctaatgcggttcaaggtcctcaattccccgtaagcctccatttccggcagtcaacattaggtgctaatgaactagtcataatcctgttgggaaggttttctcgcgcgatgaactcgaacgcatcggtgaccttgccgtgaagcacaacctcatcatcctctccgacgaggtctacgaccgtctctactatgtcccatttaccagaattgccaccatgaagccagagtactatgagcggacgctcaccgtcggctccgcaggcaaagccttctacgccaccggctggcgcgtcggctacctgatcggacccgagcacttgatcaagtacgttgccggtgctcacacccgcatttgctacagca

SEQ ID NO: 24193 - DNA, 231 bp, Emericella nidulans
agtttttcatacaaccttgaccgtatcaccgatcgtcgagaggagaaggtgctgggtgagaagctttatggcgctgtgcagcgtctttggctacaagagaaagagagcaccgaccttcccacggtccaggccagcatactgatcggtcttctttgctgcacgtttggcatcgacaaactcggcaccagctatattatccatggagcagaattgagcgcgaggtataatatt

SEQ ID NO: 24194 - DNA, 249 bp, Emericella nidulans
accaagcctccatttgaccgacatgactggtacgtgatgcgcgaaacgccgtcaggccccaaggagatccgctatgtgattgactactactctgggcccccagagccgaccggagagcctgttttctaccttgacattcggcctgctttggattcgcccaccgccgctgccgaacgactgctgagatggggatctgacgtctggtatcgcgcaagcggaggcgctgtccgtgacaatgacaaaaaataa

SEQ ID NO: 24195 - DNA, 913 bp, Emericella nidulans
atgcggtttactgctcttttccctattgcgtgcctgctcttgttagcgatgctctcaaccgcatggcagtttgacgggttgttgggtcacggtcaacttttgcctaggcaggatggtgagcattattaccgcgtcggcgtatcaacgtacaatgtgctgacatcgcttagactcggactcaaactcggatactacgaccgcagccgacagtgcgactaccggcgcgacccccacggacgaccaggcggaggaaacggccacgtccacatcatcctctgacagcgacagcgacacaacggaatctgccactacaactgccaaggcgactaagactggcagctcctcgtcgaattcaacgaccactcacgcttcgaactctaccaccacatcagtcgaccctcgtctccctccgggtggtatctccatgttgacgccgagttccgcatcaacgacatactacaagatcggtgatattatcacgtttgtctggaattatacgtcgctatctatcacacccactgctgtcaatgttgtcgcatcatgcagtctcaacagtgctacctacaccatctcgagcaatatgagcgtcgaggagacccaaactgtgacgtgggacacgggaaaattccaagcaaacgccacggctccgttgcttaccgcgacttacaccatgattgtatacgacgagagcaaggacattgatgacactgcctctgccggagagctgagctcgcagaaccgttactactttggaatgtacactccgcagccttacacggacctaccaagtatgttattctcagcccctgcgctctgaggcataactaatgtgttttagactttgtctgtgccacatgcaatggcgctctctccgccaccggccttcttggtctgaaaatggccttgggaatgg

SEQ ID NO: 24196 - DNA, 874 bp, Emericella nidulans
gtaagtgcaatttcccttccccggatttgtcgcttcgccggtgtcggtctacatttctcccccacaatctatctctggttctgcccacaaccttcaccgggcaacgtcacaggccagccttctctcaacgtcaacagacatactgacttcgtcccaaagactctcaacaaccacccaagcctttcgcgcatttacatacacacaatggctgtcgagacctcacccgctactgtacgtgaattacaatctcacgatggccctttaacgcgtgatatcggcaaggaaaaacagcgatcgctaacttctgctacaatagcctgttcctgtcgcggagttgaccaagattgccacagaggtgcgtccctgaaaccattgtgggtgtcagaccggtgcaccgtgtaccctaagttgccacataaaaaactcggactaacgcatgcacaacaaggcttgtgactccgcgcttgacaaagcagatggatacgaccacgcccaggtcggaaaatggaactccgagataatcgtacgcctgaactctacggtccgtagctgccgggacttacactatctaacgtgatttgtgtgacagaactccatcctcaaggccctcattgccgctaccaccccttccacactatccactcctcctccataccgcttcaccgtgaacagcaccattgtgcaacaaggcttgatcgacaagtctgctgctgcagacggctccgccgccaacactgggaagcgcggcatgcactccgcttctggggcgttctgggacgttaaccgcgatggaatgtggacgttcaagtaccccggcgccgatgccaaggggttggacgtggtcgtgagcgtgacatggtttgcacttggctag

SEQ ID NO: 24197 - DNA, 327 bp, Emericella nidulans
atgaagtccacatccgaggttcctggatggggggtctcaggggacaagatcctggatgaccctgcccgttatgactttgacgacgatggcagcaactcctggcaacaggtgttgattcgcgtgccggggatcacggatttcagtggcgtttggggcgagggcgacggcggcagtagcatacggtaccgcagtgggcaggacgatgaggagatgatagcgcagtaccaggagggcgaggagcagtggcgggatttcagcctagcgcagctaagaatccaagcgggtctgtacctgttggatcgcgaggccatatcgagtctggattga

SEQ ID NO: 24198 - DNA, 696 bp, Emericella nidulans
atgcctgctgaaactcaaaatggtgacgaggctacggccgaagatgacacaccgcttgccccggagaagatccaggttcgtttcaaaagtattctgaaccgatacctggaagatgttaaggcgcatgtcatgcgcgatcaaaaggcgctcactgcacagagcaggcgcaatgcggaagcctacgtaaagagtggtgagattttcgaagatcggcaggcaaattttgagaggcagaccaagtcgctggagaagttggttgcgaatacgcaagtcctttgcgagatcctgggtgtagagatgcctgctttagctacacaagaagcttcagatccggcagcaagcggcggtattggtctcgtcaagacctcggagtacctccggggtcaaggagaagggcctggaatttgggaggatgaagaggagagacgcttctacgagaatcttgtcgacttaaaaggcaaagtcccagctgttttgctggatgacggaaagaagaagaagaccgagaccggcgaaccgaccaagaagaaggaaagtgaagctggccacgagtccagtgagaaaaccgagcctcagagccagatttcggaggaaaggactaccgaagctgatgatcagtctatggcgattgcgagcaagaccgttggagcccaggtggatgcgcttttggccaagcttcctgagctgcaaacaaaa

SEQ ID NO: 24199 - DNA, 1104 bp, Emericella nidulans
atggagagcgatgaagaggaagagaagaagcctgccatcgctgcccctcggctgagcaagttggagcgcgtcgaggcgcctgtcgctgttgctggagacgacgatggttttgagaccgttgtccgaggaaagacccttcagtacacgcccgagagtattctgaagcatctgcgtgttatcgtcgagtcgcgaggaaagaagaataccgaccgtctcgagcagattaagaccatggagaagctcctggaggtggcccagacgccttaccagcgcatccgtgtctacctcactctcatctccacacgtttcgacctttctaccacatctaccgctgcgtacatgagcgtcgagcaatggaaggcagctgagcaagaattgtctaccctgctttccgttctcgagaaggagcgcaactatgttgtcagtgaaggtgccgaggaatgggaggacgatgagaagcagcctcaggttgctgctggcgagactttctatatccctggcagtatcgtttcttacgttgagagactggatgatgagctcacgaggtctctacaacatattgacccccacaccgccgagtacattgaacgcctaagtgatgagaaacagctgtataccaaccttgtgcggacccagatctacgttgaaggcctcacaaagctggaaaagacggaactacgccaggatagtcttaaccgagtggtgatgaggagactcgagcatatctacttcaagccttcccaggttattacaattctggaagagggcaccgataaggcccttccctccgagctggagacctctatcacaactcgcggcaacagtgatgcccagaccctcgtgcagacgctttgcaactacctgttcaggaacagcgacggtatccttcgagcgcgtgctatgctcgcccagatctacttccttgctctccacgaccagtactaccgtgctcgcgacctgatgctcatgtcccacttgtccgagaacattgccaatttcgacgtgagctctcagatcctcttcaacaggacgttggttcagattggtttgtgtgctttccgcgctggtctcatttacgaggctcagaacaccctctcggaaatt

SEQ ID NO: 24200 - DNA, 960 bp, Emericella nidulans
aaggcggagaggatttcttccatttgctgacgtgatgaagcttggtgtgctacatcgcgagttggtgaccccacagggcgattaaagggaagagaacaggttcattcttccgtccgcaaagcaaatatggccagcatgcacatgcaacttaagaaattgggcgcgagcattgaaagatatggtgaaaagcatggctataagagacagatgatctggcgacggactttaacaaacaacaatgtctggtggaataaaacaccccttctggaggtcctccgtgatctgggagcttacatccgcattggtccaatgctaggaagagatacgtgagtttttctttttgccgcgaattagatttgagctgctgactggttatcagggtcaagaacagaatggagcggggagatggcatgtcttttgcggagttcacttaccctctcatgcaagcttgggattggtggatgcttttcaagaatggatgtcaagtccaagtaggaggaagtgaccagtatgggaatattctatttggagttggtgccgtgaaaacaatcagcaaaaatactgtcctacaggaggataataatcccttgtcagatgatctagacaagcctattggtttcacgactcccttactcacaacctcatcaggtgagaagttcggaaagtccgctggtaacgcaatctggttggacaaggatatgacttctacctttgaattataccaggtaggttcagcacatcttgcaaagattagcatcttattaacataaatagtttttcgttcgcactcctgatgatgctgttgagcggtatctcaagatgttcaccttcttgcctatacctgaaatctcaaagattatggaagagcaaaaccaagatccgtcaagacgggtagcccaacatgctcttgcttatgaatttgtcgaactcattcatggcaaagatgaggcggatgcagtg

SEQ ID NO: 24201 - DNA, 1616 bp, Emericella nidulans
atggcgccgaagaagaagggaaacaggaagcaggaggaggattgggaagccgaacttggagagagcattcctcctgcgggcggtgacagcccagctcaggaggaagctcccggcgccgatggtgacgatggggaggctggtggtggtggcttgctcgccgctttgagaaagaacaagaacaagaaggccaagaaggggaagccgacaaacgacttcgtcgagggcgaggaccctattcaagaagccaacggtgatgcagactttactagcaagcaacctgaagaaggcacgttcgacgaggatgatgtattcgctgggaagaagagcaagccgatcaaggctgcgcctccgccaccagcacctgtggatgaggattctggccctcgcgtgaaaactaagaaggagaaggagagggagaagaaagagagggaaaagcagcgaaagagggaacaggtatgcctttttttccccgctagtaggcctcggttgttttttgttgactgacatgcgttatccaggccgcgaagaagaaaactaccgaacccaaacaggctgaacaaaagaaaccagaaccgaagaaagaggaacctgttgctgcaccctccacgcctgcccctgcccctgcccctgagcctgagcctgccgccggtggcaagaagaagaagatccccgctcacctggctgcaatccagaagcagcaggaagctcttagaaagcagcgcgaggaggaagaacgccgtctagcagaagagaaggctgcagaagaggcgcggcgactccaagaggaggaagaggcgaggaagaaggaggaagctcgccaaaggaggaaggaaaaggagagggaaaagaaggaacaattgaggagggaaggaaagctgctcaccaaagctcagaaggaagccagggagcgtaatgagctccgcatgaagcagatgcttgctgcaggtgttggtacggttgctgggttgcagaaggatcaacctgagaagaagaaacccgtttacgagaacaaaaagaagaagggtccgaagaagcaggatgaagaccttgaggctgctgctgctcgtgctaaggctcagcgcgaggcagaagacgagcgacgacgaaaagaggaggaggagcggaaagcaaaggctgaagctgaagctgccgctgccgctgccgctgctggtgatgaggagagcgagctcgacgattgggagaaggctgctgatgccgaggaggtgaaggatagctgggacgcacctagtgatgatgagccagagaagcccgccgctacaaacgatgaagagataactctaccagagcgacctgcagctaagcccgccaaagaggaagcaaatgaggagtcttcagaagaggattcggacgaatctgactctgatgaagaagaaaaatccgccgcgcaaaaagcaatcgcccaacggaaggcggaggctgctgagcggaggaagaagcaacacgaggaagctttagctgctcgttcaaaggacaacttgcgatctcctatttgttgtattcttgggcacgtcgacactggtaagactaagctgctagataagattcgacagacaaacgtccaagaaggtgaagcaggtggtatacccaacagattg

SEQ ID NO: 24202 - DNA, 440 bp, Emericella nidulans
tggtatcttcggctacatcaactacctcgtcgagagagaccgtaaatatattctcgacactttgctcaatggtatgaacttttttctatagaattcccggccaaattctcaatttcggactacgtgtctttggaccgtcggtccttattgccatacgctatttccttatcccgtggtattgccattactcacatctatttcttccaggcctctcacgtctcgaatatcgaggatatgactctgcaggtctcgcagttgatggtgacaagaagaatgaagtctgtgcctttaaagaagttgggaaggttgccaagttgaaacaactcatcgaggaatccaaacctgatcttaccaagacatttgagtcccatgctggtatctctcacacacgttgggctacgcacggaacgccctcccgtcttaactgccacccacacagg

SEQ ID NO: 24203 - DNA, 407 bp, Emericella nidulans
gcgaaggctgtacgaaaagattcgcgaggaagtccgcgagtcccctctcttccgctttgattggttcttcctcagccggactcctgtggaaattggccgccgctgtacgacgctcctcaacacaatcgccaaagagttcgaaccggacggcaagaatggtgatggaaagggacgcggccgcgaccgagaggacgacgaacttgacaatgaagacgacgttccagctaagaagaagaccaagggcgccgtggtaagtgatgtttgtctaaagttgtttcgctcatgttcaactaataaacaaatagaacaagcaagtcaaagccgtcaagggcagcaaaggaaactccgcctccacgtctcgagcctcttcagccaaccctcccaagtcgcgcgggcgaaagaagtga

SEQ ID NO: 24204 - DNA, 906 bp, Emericella nidulans
gctagcatgcagcagaacaatgccccccgtcccaacatggcaatgcaagcgtcgccggataacgctcgggtgatccgagaggctaatcgcctccaagagcaacagcggatcctacaatctagacagcagccttcccagcatccgcttcagcagcaacaaccgccgcaggcacagaaccagcagcagcaactccctcaacagcctcagcaagctcagcaacaatttcatgcccagcctcagtttgtacctcagggatccaactctcccaatctgaacatgcctactgtgaacggtaccccaaacaatccggccatgattgcagcactccaagcgggaggcggaatgcagagtccgcccttccacaactctgcacctcaaggcgtctctacaccttctccacgtatgggtcaaccgaacaccctatctagtggagctgttccaacaacgattagcacgatccagagccagatccaaaggagcaatcccaacatgccgctcgaacaagtcaaacaactaaccacggaacgactccatcagtaccagcagcaacagcagcaacggatgtctcaggttgctatgaatgcagcggcgggtaatttgggcgtgcagcccaattatcaggtctcacatgatgggaattttcaacctcaaagtggcatgagtggtggtccgaacatgcaagttccccaggcgcagggcttttctccaatgatgcgtgtaccccaaccttcccagcaaaaccggatcggtgctggaggctcccctgctatgggcgtagctgtaccgcaacaaagccggagcgcgaccccgcaaacacaacgcagtggcagcattcagactggtacaatcgcaggagcgagtaagagccctaacactcattctcaaactcaatctatgggtgcctga

SEQ ID NO: 24205 - DNA, 835 bp, Emericella nidulans
  unsure (1)..(835): unsure at all n locations
tccgatacatttacctcaagggcgccatcgttggtccagcttggaagctcccgtttatgggaccgttcctccagtctgtcaaccccaaattccacgagtacaaggccaaatgggacagcggcgagctgagctgtgtgtctgttttccacaagtatgtgaccaatacgatctccttccaatccgcaatgtctctaatatgtcgacctttttagggttgtttgtcatcgcattcacttgtgatatggtccgcaagatcttcaactcgnctacttatgtcaagccctgtgtcgtcgatgctgcgcataaactgcttggcaagactaactgggtattcttggatggcaaggaacatgttgacttccgcaagggcttgaacaaccttttcacccgtcaggcgctttcttgctatcttcctcgcatggaggaggtttacaatgactactacgcgcgcttcctcaaaaagtctaagaacaacaactataagccaacgccgtggatgcccgaattccgtgacctgatgtgcgccgtctcttgccgtaccttcgtaggccactacatttccgatgaggccattgataagatttccgtcgactactacaacatcaccgctgcgctggaattggtcaacttcccgatcatcctccctttcaccaagacctggtacggaaagaaggctgcggacatggttcttgacgaatttgccaagtgtgctgccaaaagcagagctcgtatggctgcgggcggagagattagctgcattatggacgcttggatcaaggctcagttggactctgccaaataccgggaaaagattgccaagggtattgaggttgac

SEQ ID NO: 24206 - DNA, 354 bp, Emericella nidulans
caactcatcgcgtctatatgggttctctacggttcgagcacacccacaccaaaggctctcattctcagccttcctggcatgaccgaggaacgggtagcaagcactgaagctgccctcgtgcgctccacatccgcccgccaacaacgcgctttagttcttgacctcttggagggactaagaggtgtcagcattgccgaacaaggcaaaatattgggatcacgcgaagagcgccgcaaggcgcgcagtgctctccaggaaagatatatgagcaatgaaatggagggtcaacaaacccacaaggtcgatataaatgatgggcctgatctttccggtgttgcggacatgtttggttaa

SEQ ID NO: 24207 - DNA, 387 bp, Emericella nidulans
aacctcgagacatgggaacacaaggtcagtgacaagatcgcccgcctggtcaagcactttgacagtgtctgcaccgcgcctctccctgccggccaggaagagcccgaccccgccgacctgacggtcgacttccgggcatggaccaacttcttcagtctcgacgcgattgtcgacattgggctgagcgagaaactcggcttcctagatcagggacacgatatgtgcacggccgaacgcaaagatggcacgacctaccgcgcctccctccgcgacgccctgtaccctaacgcccgcaaacaatctctcctcctctggaactacgactggtacccgatcatcaatcgctgggtgaacatcattccttacttcgccaagatgcagaaatcc

SEQ ID NO: 24208 - DNA, 321 bp, Emericella nidulans
atgtctgtcgctagaactgctggttttgccctcgcctccgcggccatcgtcgccggtcacggttatgtcacgggaatcgtcgctgacggcacatactacggcggttacctcgttaaccagtacccttacagcaacgacccccctgcagttgttggatgggctgaggatgctaccgacctgggtttcgttgatggctccggctacacctctggcgatatcatctgccacaaggacgctaccaacgcccaggcttctgccaccgtcgctgctggtggcaccgttgagctgcagtggactgagtggcctgaatcccaccacggt

SEQ ID NO: 24209 - DNA, 459 bp, Emericella nidulans
tatagagatgtcgccgatgcgttcccagccgctagagttactgggttggatctttcgcccattcaacccacatttgtccctccgacctgctcgttcgaaatagatgacgtaaccatgccatggacgtatgatacggaacaatttgacttgatctacgtccgcgagatgttcggctcgatacctgattgggatgcgtttctccggcaatgttgggcctctctacgaccaggtggctacatagaagttgttgagcattcgattacgcccatatgggacgctgataccagcctgggacctatctacgcattatgggagcagacaatggcgcaggttgagcaggtatctggcaggagtttctcgatctggcgtgaaagcgcacaggtgctggagggtagtggcttccaagatattaccaaaagatcttacaaatggcctattagcgggtgcgtcacctactga

SEQ ID NO: 24210 - DNA, 226 bp, Emericella nidulans
ttcaacaaagttcgcaactacggctcattagaagcacggtgtctctggggaatcaataacgccattttccatgttgccgtggacacaggtgcagaactagattccgctgcaggagacaagagaatcgtaggcgtgtcatgctggcttgcaccccatcccctatcaaaaccagaatcatggtacagctggtcccaatcctggctcctctggttccggcaggggctaa

SEQ ID NO: 24211 - DNA, 637 bp, Emericella nidulans
gcctatttgaaccttgagagctctggtcgtgagcttgaatcaattgtggtaggcgaaatccagaaggcttacaacgcctatgccggtattatgaagcgggaggcagaccacacgctcgacacggtagacaagcttcgcgcgggcccaatctcaatgccgcatgatcatgaatggaacgcatttgtcgcaaatacggacgaaatggtggacccgcgtatccgaatccgtgacgttgaaagcattacgtatcccggcaaggatcatccggctgctgcagaagtcaggtcagggatgctggaacgcaagagcaagtatctgaagagctatgctcctggatggttcgtctgcttacccgttggactgctcgatgtgctaatcctgctgcaggtatgttttgtcaccgactcacctccatgagtttaagtcggcggatagggttgcatggcagacaccagtaatgtcattataccttccagaacagaaacttggatcgcattcgcaaccggactcgacatcgcacaagttcatgctgaaaggacggcaaacgggaacgatgcacgagggtcactcctgggtatttagagcggagtcccacaaaagaatgataacctggtacgaggatattgatggaatgatc

SEQ ID NO: 24212 - DNA, 705 bp, Emericella nidulans
atgaacctcaagtccttgttccgaatcgaagcccgacctcttctccaatttagacgcctcagcaccacccgttcctccaagatgcgccttccctacgccccctctgagccgccgactgcggaccccgaaacagccgagatctacgcccgcatcgccgcccgccggcgccctcgacccctcatccccctcgatctctccctgctgcactccccgcccgtcgcagacggctggaacagcttccttggtgccattcgtacgcagactgtagtcgaccagggcctccttgaactcgctgtctcgagagtggccgtgatcacgcaagccgtatacgagtggaatgcgcatgccccgctagctttgaaggggggaatcaaaccggaggaattgcacgccgtgcgaacgctgccctctacagcaaccggagatgtggacgcggccgtaaaggctctcgggcagagtgcgttgacgccgcagcagagggcgattgtgaggtacgcggacgaaatgacccagacggtcaaagtgcaagacgagacgtttgcgcagttgcagaaggaggggttctcggatcgcgagattgtggagttgactacggggattgcgtgctacaactgtgtgagccgggtactggttgccttgcacgtgggagagaacaatgcgcgagagatgaagagcgtggatgagctagttgcgggtttgaaatga

SEQ ID NO: 24213 - DNA, 933 bp, Emericella nidulans
tgcagtatcgacggtgacaaactccagtgcagcagtgccaggggtgagagccggataaacattcccatagcggacatactctgtatactctcagatgggaatgtttcacggggatacatagtcgtctttcttaaggagaccggatcacccagtaccccaccagaacttgaaagaatataccttcagaccgcgctaccaacagtgttatccgaccatttacttactgaagtaccagaccatctcaactacgactgtcatataatcgtttccactgcatctgggacaggaagggccaaagtactatctggtatacttcaacaacttctcgcgtggatcggcctcaatcggtttacggttcacgagacacagtcagctcagacaataactgagttgtgtcattctttgttcatcccgcaggccgaagcgggtatccaacaaaccatcgttctactgtctggagatggtggactctgcgatattattgatgcattccatagtacgccgaaaagcatccaagcgataccgaacatagcccttatccctgccggcactggcaatgccatggcgaattccattgggctgatggttcttcctaaaaacccactaatggcactgctgcgcggaaaacctattcctctacccgttttcgttgctacgttctccgacggagcgcgctatgtccagggagacagttcccgcgtttcgaggatatatggatgtgttgttgccagttgggggatacatgcctcgctagttgcagatagcgacacagtcgaatatcgcaagtttggagccgacagattcaaaatggctgcaaaagagctccttttcccatcggacggtagcgaggcccacaaatacagtggcactataaccttgctcaagagagatggccaacaatgtctcgagcatgaactggttttagagcattaa

SEQ ID NO: 24214 - DNA, 666 bp, Emericella nidulans
ggctggaaacctcacccatcttcacactttgcccttcctccgatttccaaagaagaatactctgttccgagcacaacggccaaggtcagagtattgcgcgcggacgatgttcaacgctgcatgtgcagccctagcattcttgagaaagagagcgaggtcctgctggcggtctcgttgcgatccactggtccaaaagtagcaatagttccagacttcgatcattacctatggcactgggcgagggaggaattctactcccagaagctctttcccggcagagatatccccacggcaaagggcgccggcgatgatgctgccaaagtgtattgtgcctggaataggacgtttggcaacaccccagaggagaacaccttgtacattctcagatgggtatacaacgagccctcctctgaagaggaaaccgagacaaccattaaagcgatggctgcaatactcaggcgagcgcagctagaagcccaagagtggaatatggctcatgtcaagttttggaatccaacacctctccttgaaagggctgtagcactgttggaccccactgccgagataattcaccgcgagaaagacagcatcgcggctctcaggtggagcgggaatccggaagaaaatgtggaatggctcctgaacgagaagtatgcatggtgttaa

SEQ ID NO: 24215 - DNA, 384 bp, Emericella nidulans
ctggaaacgctggatcgattcgaagacaccattcttgatgtcattcccagtccggattcgcccttcaagcggccttgggtcgattcaaagcaagctcctcctttatcacagtcagtggtcaaaacggtagagtttccagaagaggacgagtcttatggcgaactagagattcggtttctgggtccagattgcaccgaccctgtacaaagtaagtcctcgaaagttttgcaatgctccaagcaagttatctgacagctccatagccggtgcggttaatgttaccctactttacctggcaggttcgtctgcgtctcttttggataatattcttgtcgagaaggagcagcttgcaagcgctgtttattacgctacagaagaccgtcc

SEQ ID NO: 24216 - DNA, 635 bp, Emericella nidulans
tgcctcctccgctgtcatcgtccgtatcccctttgtcaagactttcgctgatcctgactttctctgtacgtctatacgccaatctctgtgccctccttttcgaactaacattgcttttttttgcagatgccacaattgaaatagcaatctggtccaacatcgaaattggcctcggtatcaccgccggttcgcttgcaaccctccgcccgctcctgcgtcactggatgggctctacgaacgatccctcttatccactgggcacaccttccccattcccgggtcgctccggatcgcgtctccctggtgcctcaggtcgagaccgagcatatccgctcggctcgatggacgacagcaaccgattacggccagacaaactcgcccttacggttacgactgtgcagacacagcacgatcccgaggatcgctggcctgtcctgcctgatggaaatagtagtgaagagcggttgaccaatgagcatcagcggaatggcaaggggaatgggaataggacgccgacgagatcgagtgcagagcgaaacgtgatgggatctggttttggggggattcaccaggtcattgaggttacgcaaacgtcgacagatttgaggtcaacgagtgtgaaggagcatgtttag

SEQ ID NO: 24217 - DNA, 609 bp, Emericella nidulans
atgtcgacctctaaatccagatgggccgacgaagatcccgagacagaagcgctcattgcccagcgcaagcgcgaaaaggaggagaagcgacgggctaaggccgagaagcagcgactcgaagagcaagctaaggctcaagctgcagcggaacgccaagccggtgattccaggctcaatggcgaccccagtgaagcgcctccgaagaagcgtcgacggctctcaaatgagcagcagccgggatccagcggtgagcaggctgcgaaacaagggaaaccaacgacactgttacaattccccgcgttggaatggggaccctgtcgccatgtggacaacttcgagcgcctgaaccatattgaagaaggctcatacggctgggttagccgcgcaaaggagctcacaaccggcgaagtcgttgccctgaagaagctcaagctagacaattcccccgacgggttccccgtaactggacttcgggagatccagactcttcttgaagcgcgccatcaaaacgttgtttacctccgcgaggtcgtcatgggaaacaaaatggacgagtaagcctgattaccaacccctatgattcatagcccggcctattcatgccccata

SEQ ID NO: 24218 - DNA, 528 bp, Emericella nidulans
tggcgcattgtgagaaatccattgaccacgcagctcaacgatgttctgcaaaacgcccaggtagtagtcaacgatgggcacacccttgataggaaggcggtttggcacgtaattgagacagttcagcaaaccgaacccaggtcagaagcagaattcctgggcctaagcttactaaagcagaagtctagccttcttcttttcggcgatcttcttttcatggatcccacagctaggaatgatgaggttatcgacacgacagagaaagcactcatcgtcggagacttggatccacgcatagccatgatacttattcctcttttacgtactgagactctgcaaagccctcaaggagtatgggttcatgcagggctggcggaaacggcggaggcttacttgcgaaaaaccgacgaagcgggaatgtcgatcacagggttcttcgatgctaggattctggacatgatgaaacgattcctgctctcatggcagcagacgcgcggttatggcagtatatcagacgaaacctactag

SEQ ID NO: 24219 - DNA, 675 bp, Emericella nidulans
atgcgttttaccaacattcttctgctcttagccgggtccgcctgggttggagcgagtcctgttgcttctggtgagaccgagatcgttgcgagacagtcgtcgtcggagtactgggtgggcactatagagaaccgtggggcggtgccatttggggacgacgccgactaccaagtacaccgcaatgtgaaggatttcggtgctgttggtgagtctttccaggctcatgtacttgtatgagtgacttgagtgactaatagagtaggtgacggtacaacggacgataccgatgccatcaataaggccatctcttctggcaaccgctgcggtcagggctgcgactcgtccaccacgaagcccgccgtggtttacttccctgccggcacatacctcgtctccaaacccattgttcagtactactacacccaaatggttggtgatgccaacaaccttcctgttctcaaagcgtctgccgacttctctggtatggccgtcgtcgacgcagacccatacaccgatgacggttccaactggtacactaaccagaacaatttcttccgttcgatccgtaacttcgtcgttgacctgactgccatgccccaatcctctggagctggtattcattggcaggtcggccaggctactagcctgcagaacattcgctttaaagatcaaagc

SEQ ID NO: 24220 - DNA, 1011 bp, Emericella nidulans
atgctgaagaagaagtcttcacaccctcctctactcttctggcacagttcccccacttctactccagaactctccccgacctcgtcatcttcggataccgagtcggacgaggacatggacgcctctggttcacgcccgcttagtctggctgttcctcagggcaccttctgtccgatgcgtccgactcttgatgaggtgctcgcgaatacggcacctgctccttacacgctcggtgctttcatggcctatctctcgcagaatcattgcctcgagactttagaattcacattggatgcaaagcggtatcgggaaacatataatgagctcagccgtcaactgggacagtttccgatcgaggctgattgttcggagagccgacatctgcgtatgctctggcaacgacttttatcagcgtacattctccctggatccccgcgcgaaatcaacgtttcgagtgaggtccgtgatgatattcttcgacatgccaactcttctatcccccctcctccttcgatgcttgacgcggcggttaaacttgttcacgacttgatggaggagtcgatcttcatgccgtttctgaacgcccactcatcctcggcccatgtttacccactctcggaacctctgttttctcaggacgatggtggtgtcacaattgtctccaacccgagtctcgacgagcacgcagtcaagcgagtccgatcgaaaggggggcgcctatcgccccggcaatcgcgggagttgggatcccccatttcttcgagcccgccttctagcctttctcgttccaatttctcccttaatgcggtcacttcgcttggcaaatcgtctcatcgatcgtcaaaccagccgtcaagtgcaagtggggaatctgggtcagctggtttgtctgacgactctggcagtatgcagtcgagcgctggggagccaatgacccccccgacgaccccgccctctagcgagcccagcatgcagacaggcagtccgaagaaccgcatggataacccctga

SEQ ID NO: 24221 - DNA, 880 bp, Emericella nidulans
gcgtcggagtcggtaatgccaacgcctccccaacctccgctctcctcctgcacatcttgcaggatacatccggccggatcgcgacaatcctcttcgcccaccgtgtgggtacagcccttgagcccgagtgcaagatgtaccgctttgcggcggatatcttcaacgatctcgctatgttgctggactgtttctccccgatggtcccggccgggttcaatcgagtcactgtccttagtgctgctggtgtgctaagagcgctttgcggtgttgcagggggcagttccaaagcgagtttaagcgcacattttgcgcgatggggaaatctggccgaggtgaatgcggtacgttggtctccagctctcactgcgctatgctcccggtatcaggcactgcaggaaggctaatcattctcgtcgagttgtgggcggatagaaagactcatcccaggaaacggttatctccctcatcggcatgctcgtcggctccttcgtcgtctctcatatcaccagcttcacggcaacatggcttaccctggtcttccttctatccatgcacctgtcactcaattacgccgccgtccgctctgtccagatgacgacactgaacagacaacgagccaatattgttttttcgactcttctctcctcagacccggaccttgcggatttcgtttcgagccctagccgaaaagacgagcgacgagcttcgctcaagcagcaggaacatactcaccagaatccaaaccatatcagacccataaccccagaacaagtcgccaaagaagaacggatatttgctgccggcgctgcactaaagtggcactctcccccctcccaattttcctcttcatcaaggctattacctgaagtacaacttctag

SEQ ID NO: 24222 - DNA, 1610 bp, Emericella nidulans
ggtgtgccagcagcatgtttcccctgcgctactgccctgggagcaacctgggacactgaattactgcacaaggtagggcatttgatgggggaagaggccattgccaagggcgcgcacgtcatattgggtcccacaatcaatacgcaacgatcgccgctgggcggccgagggttcgagtctttcgccgaagatggtgttcttgccggccacttggctggctactgttccaagggaatccaggaaaagggcgttgccgcgtgcctgaagcactttgtgtgcaatgaccaggagcatgagcgtttggcggtcgattcgattgttaccgaccgggctacacgcgagatatacctcttgccgttccagattgcgatgaggatttgcaaaacggccacagttatgacggcttataacaagattaacggtacccatgtgagtgagaataagaagtacatcacagacattttgcgcaaggagtggggatgggacggactagttatgagtgactggtaggttcttgaatcagtcctaccggaatcatgtctaagctgttgcaggtttgggacatacagtacgtcagaatcaataattgccggtctcgacatagagatgccaggtaagacacgctggcggggagacgccctggcacacgccgtatcatccaacaaagtccacgagtttgtcctggatgaacgtgtacgcaacgttctgaaccttgtaaattacgttgagccactgggtatccccgaaaacgcagaggaaaaggttcttaaccgccccgaagaccaagccctactccgacgggctgcggccgagtctatcgtgctcttgaagaacgaggataacatcctacctttcaacaaggagaagtccatcgccgtgatcggaccaaacgccaagatcgccgcttactgtggaggtggctctgcatccttggatgcgtactacacaatcacacccttcgaaggcgtatcagcacagagcaagggtgaggttcacttcgcccaaggttcatactcatacaaggaccttccgttgatcggccacctcctgaagaccgacgacggcaaaacgggcttcaagttccgcgtttacgacgagcccgcatccagtagcaaccgcgaactcctccacgagctacaccttgtctcatcccagggcttcctcatggactatcgccaccctaagatcaagtcttacctttactaggtgaacatggagggctatttcactcccgaagagtccggtgtctacgacttcggcgttgttgtcgtcggaacggggaaactcctcgtggatgatgaagtcgtcgttgataacaccaagaaccagcgtctcggctctgccttctttggaaacggcaccgttgaagaaaagggctccaaggaactcatggctggccagaaatacaaaattaccttccagttcgggacagcacccacctcggacatcgacacccgcggggtggtcatcttcgggcctgcaggcttccgcttcggcgctgcccggcgccagacgcaggaagagctcatttccaaagctgtcgaagtcgcctcaaaagcagaccaggttgtcgtcttcgatggtctaacaagcgaatgggaaacagaagg

SEQ ID NO: 24223 - DNA, 594 bp, Emericella nidulans
aaagaccatagcaatggccagctcaagtacaccgtactacgtccacgatgacccccgtgacgacgagtcgattctggatgatggagtgattgaggccgatgaaggtgagttgcgttcctaagtcaattgtcttctggcttttgactaacattatgcttcctgtcctcagcaattgaggccgacgaccctctccacgagacagaccgaacccccctccgcggtaacatcgaaccagactcgtcgacttcgcgcggcggcaatggcaccagtggcatttccggcggctatctgacctcccgcattcctggcgaagaccgccgcgcacctcagaacaccatcgacgagagtgtatggcagacgctttcgcgcgatctcctcgccgtgtgggagaagatgcgccaggtcctctaccccaagtacctggtcggcggtatgttgcagcgcggtgggggcggtattggggccgcggagcgcggggaagcgtcaggtttcggaggcggcgtgaggaatttacttgggcgctggccccatgctgacgttgtgttgcagggagggatgagcgaggggctaagagattgggatttatggtgagtt

SEQ ID NO: 24224 - DNA, 907 bp, Emericella nidulans
cgatgaaacagacgatgatctatctggattaaaatcggacgctactggtaaagggcagcaggagcagaaagcatcgaccctgatgaacggtattgggttaaaacgtcctcttgaacttggtccggatggcttcccgattctcaaaaagcgaaagcgtgcaccgaaggcagcaccgaaagctccattaaatgagataccatgggagggtttcgattccgacgacgaggataaggaagaagagatcggacctggtatcgacgcaaaaagcgaagaagagggcacgggctccgatgattcttctgaatcagagagtgaagttgacgacaacggcgatagtggtagtgatgaagatgaagacagaaaagatgaggaggatgaagacgaagacgaagacgaagacgtagatgatgatgaggacgaggatgaagacgacgagaaagaggatgatgatgacgaagacgaagacgaaaataacactgatggacgaattaagccccgacaatcagccttcaaatcatgggccagacaacaaatcaatgaagttgtaggctttaagcccacatccggtccaataacgactgagccacaagtcatccccaaatccgcacttccagtcagagctgtggaggaagagccactacctctagaactccaagtcacaaagggcaacccgtaccggaaagccttcagtgttcaagtcgaccgtcccgaacatattcaagaagcccgtctcaaactccccgttgttggcgaagagcaaaagatcatggaagcaatccataacaactctgccatcgtgatatggggagccacaggaagcggtaaaacaacacacgttccgcaatttctgtttgagtctggctatgggaatcctgagagcgggaatcctggtatgattggagtcact

SEQ ID NO: 24225 - DNA, 566 bp, Emericella nidulans
tttatgatcttccccaggaacttcttgcatcgatcgccctcaaaggcgaggatcagcccataaccgttgaggatgccgagcctacccgcaaagagtcctcggacgacgtacaagaacatgcgattgcaacctcaacaagctgcgccatttgcaaagtgtccttcgccaacgtacaggaacagcgcgagcatgtgcgctccgaccatcataaatacaacgtgcgagctcagcttagaggcaatgccgttctggatgaagtacaattcacgaaggcgattggcgagcttgatgagtcgatatcggggtccgagtcgtcggaagaggaagacggagatgctggggaccagctctcagctttgctgaaaaggcaggctaaaatctcccaagcggctgaagagggcaaagagagcgccacaccgaggggtgtcgggaaacatccgctattgtggtttacgcatcctgctctcccaccgaatacgtcgctgggtgtgtaccgggcgctgtttaccaatgaggagcaggaggagcggaaatgtcctgtcgtatccctgaagaagaagcactag

SEQ ID NO: 24226 - DNA, 766 bp, Emericella nidulans
tgaggtgctcaagggtggctcttttggtacagtcctgggtctcatcggtggctatgcaggtgtcttggccgcatcccgccgctatcacactatccgcaacctcacacttcccatgaaagcatttctcgtcacatcttccggaaccttcggtgggattatcggagccgaccgctcctcccgcagcttctaagctgcgcaaaaccagaaccgacaatggtacgaaaaccgcgaggagcgactgcgcgcccaggaacttcgcggtatgagctttagcgatcgcgccctcgcctgggctagggaggaacgctacacaatcgttttctcgacatgggttgcttcgatgattggtagctttgcccttgtcgggcggaacccttatctttcgggccctcagaagctcgtccaggctcgtgtctatgcgcagggtgctacgcttgccgttcttatcgccagtgctgcattcgagatttccgagaggaggagggtcagacgggagcttgatgcgaagtctgcgagtgctaaggcggactctaagttgagtaacaacactggtgaagataccgagctatggaaggacatggtcgctgctgaggagcagcggttgaagaacaagcaccagtcgctctatgaaaagcatcagaatgacgccggttctgaccctgatgctgggtctaccccgcctcaacaaaaggctgaggctgagaagctgcctagtgagcaggagcaggagcagaagagtgaggagaagaaggagaagcagaagtaa

SEQ ID NO: 24227 - DNA, 442 bp, Emericella nidulans
atgtggacccatacaacccctctgccggattgggcttataagcaagccgagattaacggtaacaaaaacgtcttgcagagcagcaacatttggtatgtggaggctattgagtctttagaagaggatagccctcgtctcaagaaggaagagcgcaaggtcaagcatttgccgttctggaggaagtacattgagcttcagcgtgccatgttcttccacaacaacgccctcaccagcagccacccatacgcgagcgagccgttccagtggccgttccttctccgcggtgtcagcttctggacaaagagtgacacccgcgagcagatctacttcctgggtaaccctgttggatggtggatctccagcagtcttttagctgtgttcgccggtgtcatcggcgctgaccagctctctctccgccgcggtgtcgatgctgtcgaagaaa

SEQ ID NO: 24228 - DNA, 681 bp, Emericella nidulans
atgcctcccctctcaaccatgaaagccatcgtcactgagaaaaccggcggccctgaggtccttgaagtccgaacccaccacccggtccccaccgcatcagaaggccagctgctcgtgaagaaccagattattggaatcaattatatcgacacctacttccgcactggcctctacccatcctccaagcctgaaatcctaggccgggaggccgtcggcgaagtcgtggccgtcggtcccggtgccaatccttacaacttccagattggcgatcgcgtggcttggctatccaccggctcgtacgcagagtacactgctgtcccgcaggcgttcgcagtcaaggttcctgaggggatatcgaatgaggatgtcatgggttcctttttgagcgggctgacagtgttgacgctcgcgaaggagacgtatcccgtccagagaggggattgggtgctgcttcatgctgctgcaggtggtgctggatttctcatgacgcaggttctgaagagcattggtgctattgtcattgggacggcaggaggaccggagaaggttgagcttgttaagagcttaggtgcggattatgtgattgattatcgtagtgaagagggcaaagattgggttaagaaggtcaaggagattacgaatggcaggggtgttgatgttgtctatgattcagttggcaag

SEQ ID NO: 24229 - DNA, 423 bp, Emericella nidulans
atgccctgccagtcaaaatgcgaaggctgcgcttgcggctcggctagcagccagagcgcaagcgcggtcaatattgaagacctcgacaaggagctcgaagcgctcaggaagcgaaccatcgagctggagaaagtgcgcgcatcggccaaaaaggtgtcgtccctatccagtacactcggcgccggtcgtaagctgcgatcgacaacatggttcaactcgggcgatgcagggatgaccgccctgtacatcgagcggtacctcaactatggcgttacgagggaggagctcatggcgggcaagccaattattggcatcgcacagactgggtctgatatctcgccgtgcaatcgataccatattgagcttgcgaagcgggtgcgagagggaatcagaacggccggtggcatcgcgtttgaattcccc

SEQ ID NO: 24230 - DNA, 1578 bp, Emericella nidulans
atggctgacatgctccctctgtcgcatcagttctcgatccggattaccttacgaagcgcatcgtactcgacgatgtaagtcactttgcctacggccagcacaatgacggtgaggttgggatttggattgccggtcgggctggctggttctccatctcccccgcgaaggggtaccggccgatgttcaatgaggttgtggaggcgattgacctgctctactttctgaccgatcgacataagccgaaaaggagcagtagaaggaggaggaaaagttggggcgtccccgagcctggagcacctgtgtgatgaatatgtgcttcatacacatgggatctgtgaagacggcgacgattcattgggagtcttctacaagcatcataatttcttgatgtcacgcatgattagaggtgaagaagacgtgaactgggccgaaacgagtatatttgcgcatctttgcgaaaaattcccggtatgttttgcaagatctccaaggcctacgttagctctgacgggtatctaggaggactatgaggagctacgtgctcaaaaggaatcgaaggatgctgaaacagaagaagaagataatggggaggacgagcctgaggatgaagatgtagagatggaaaccagggcaactacgccagacgcgacagccatctccaaggcacaggcagacgccatttaccagatcatccttgatcttaaagaggcagggtatctcgcgaaacggcaactgaacctagagttggtaacttcgactttaatggcgcgcttcgaaatcgacgaactggagtatgcgcagaaccttatatcaacaaccgcagctatcattcttgagtctttaaacaaggccaagacgaatacttttgactggaccaaaaaggccacccacagggagctaaaagctgcaccgaaaaagaataccccggcaaacgcgacaaacaccccgatacggctgcgcaacaccgaggacgatagcacccccgacgaagaaagtgaacatgaacagccgaagcagcgaagacctcgccatcggaaatctgtactacgaccaaagagtcaaatcgctagtaagaggactggaaagcgggctcgaagcacaacagccgactacgatctctcagatgacaaccaagatgcgacggacgagtttgagactcctaccaaggtccgcggtcatgacctcgtcagggatccattgtcgacaactagggcaaaacgccgtactcgatcgattctgtcggaccctgagtcaactcctttcattgaaaggacgcctctacaggaaaccctccagagtcggaatacctccgtctcagctgctgagcctgggctcgacacaggatcttgtcatgatactaatcttccagctgacacttgggtatgcaaagtacccggctgtgacaaagtcatcaccaaatgtacctccaagcgcggcaaggaacagatccaagatcattcccttgcgcatgcagatgatacgaaggcgaacgttgagctagttgaagcggagaaaagactaaacgtcaacttccgcgttgacaacctgctcagtcgcattcgggatatgggactctag

SEQ ID NO: 24231 - DNA, 469 bp, Emericella nidulans
ccgccagtacctccaaggttcaactataaatcagtggttttcgaatttacatcacctctaactccgtacggaagcagcacgtcaggccatgcaggatcaggagatcggtacctgttcccagaaaacactatcctggagtggctccctggcggaaccactgtcatcgcttctttcttgctggtcaggaaagtggatccaaacgctccattccccattgagacatccgcagacactgctccatctcgagctaagggcaagactggtccaaaatcgaaaaaggcggacaaaaacaaagataaggccggcgacgtccagaatgggaaagacaaggtcaaagaaagtgaagccggtgcgataaatggagacaatccacaatcagagaataaggactcgtccgcctcagacactaaacaaaacatccaagatagccaaggcgaccaaaaggccacacaggccgcggaacccttta

SEQ ID NO: 24232 - DNA, 1082 bp, Emericella nidulans
atgccgccaaatttcgccggcttgtcgggcaggaaactgtccttgacggtttcgaccgttgcgaccatgggcttcttgctctttggatatgaccgtaagtgcctggtcttgagtcggctggaaagtcgactggaaatgggtcgctagctaacaatgctcaagagggcgtcatgtctggtattatcagtgatgtagccttcaacgatgtattcacagccaccaaggacgatgcgacgatgcaggcgctcgtgacggccgtctacgaactcggatgcctggcgggtgccgtctacgctctcatgtttggtgatcgcatgggccgacgttggatgatcctgtctggcgctgctgttatgatccttggcgtgatcatccaggtcacatccttcccaggccatatccccctgctgcagttcttcatcggtcgtgtcatcaccggtattggcaacggtatgaatacgtaagttgcgattcccagttatcgagcctctattgggctggttctaacatttgtctacagttccaccatccctacttaccaggccgaatgttccaagaccagcaaccgtggtctactcatttgtatcgaaggtggtatcatcgccattggtactgcgattgcctactggattgactttggatctcactatggcccgcccgacttggtctggcgcttccccattgcgttccagattatcttcggtattatcatcgtcgtcggcatgtggttcctcccagactccccccgccacctcatcgccaaaggccgcattgaagaaggcgaatatgtcctcgctgctctcaatggctgtgaggttcacgatcacgaaacccagattcagaaacagctcaccctcgactctctccgtgcctctggcgcgctgggtaagaagactagcttccgcgatctcttgactggcggacctagccagcacttgcgccgcatgcttgttggctcctcgtcccaggtcttccagcagctcggcggctgcaacgccggcatctactaccttcccgtgctgcttaagtccaatttgcaccaagacaacgaccaggctctcctgaacggcggaatcaaatga

SEQ ID NO: 24233 - DNA, 1703 bp, Emericella nidulans
ggcacagaactttttgagacggtcgataattcttatatcaaacgcaaccctgccgccagtgacttctgctcggctggaattggaacggaataccagttggggaatgttaactctaaggcttatgtgcctggaggaagctcaactgcagcaaacggccgtaagtatcattcgctagagccccgaaggacagggaaaactaatataaaacctcatattcagagcagattgccctagcgtcatacatacaccccctagcagaccccgccgcctggaaccgcataattggctatccctcaaacattgtcagtgttcttatcgctaacgtccttaatggccccgacacaacggtgaatgaagcctgggcagatgtcatcaacagagcctctgcttccggaaaacgaattattggatatgtcagaacaggatatctaggtcaaagtcagcaaagattcgagacccgccttggttcgaccgaaattgccgattgggtcgcgcagatcgaagcagatgttgatctgtggtacgcattgtaccctgggaagatcggtggtatcttctttgacgaggcattgaacatttgcgggtctaataacgaatatgcggatctgtatcggtttctcagtgataatacgaagcggaaatattcaaatgctttcacggtgctgaatccgggggcgacaataccgcagtgttttgagaataggtgcgtttcttacgggtcttcttggacaataactgacatcttgcagtgctgatacgctcatgacctttgaacaaagcttcgacgtatacataaacagctatgtcccaaacccgggctggacgcccacagacccacggaagctgtggcatattatctacggcgtcccgcaagcagaagcagccagggtcgccaacttagctcacgagcgtggggcaggttttattcatataaccgacgacacccttccaaacccctacgacaccctgcccaacgaagcctacatgtcagctctcatgaacgctgtccagggtggtacgctggcaattgctagtccgtccccgtttgacaacaacgcccgcgctgcattcccgcttaatgcacttacagttacggattctgactattcatctgtgaaactaaggtggaatatatctagtcgacgtcgaccctatgcatacgcggtcttctgtgatggaagggaagtggcccgtctccctggtacaatggaccacgtcacaattggcaacattagtcccggatctcgctcctcgttcaccgtgcgcgtaattggagaaaacggcatcatgacaggaaattcgccctctgtctcagcccaaacagacagtctaccgggtgaccaagcggtgacaaacattagagccactaccctagccggctcgacaacgatctccgcagattttcttgttcctcacgctttaatgcacgtctacctaactgacccagacacgaattgcattatgcccgcgtggcccatcaactttaacatagacgacttcgtctgcgcgcactacatggttgagaaccaagtcctatacagatacagcggtcctgagcccgcagaaggtgaagtgaattacccttgggcgtggactgctattggtgcggcgccggccacgcgcaatggatatacgtggacctggacacttcccgtgagcacagatatgacggactcgagctacttcgttgtacagtcagaggg

SEQ ID NO: 24234 - DNA, 582 bp, Emericella nidulans
  unsure (1)..(582): unsure at all n locations
atgtctgaccgggttactaccatcttcggcgccagggggaagctgctgcattccctccaggtcttgctaattggagcgccggccttcgtcatcttcggttataaccaggccggcttgggccctctcgcgactctcaacagctgggtggcaacattccctgatatcgataccgtccacaccacgggcgtggagaagagcgaaaactcgaccaagaagggtgctgtcattgccgccttccagctcggagctcttatcggagccctttccaccacattcttctctgaccgatttggtcgccgaatgtccatcttcattggtgcgattctcactatcatcggacaggtcctgcaggtggcatcatacagcctgcctcagtttgttgtcggccgtattatccttggtattggcactggtcaagtcaacgttgctgttccagtctggcagagtgaatcgtccgcggccaagaaccgcggccagcatgttatcattgatggaaatgtcatgtgtctccgttatgcccttngcaactggatcgattntggtctgagcccgatcgaagagagcacgacgcattggcgcgtg

SEQ ID NO: 24235 - DNA, 993 bp, Emericella nidulans
atgttctcccttcgcaccgctgtgcggagagcttccaccaccaagtccttccgagcgctctccgcaccgcacaccgtcgcgtttgccagactctgctcgcccacagcccgtgcctcgttgagggcgtctgcagtgccgctgctgcaaagccgtcactactctcgcgcctccgacacccaactctcttctacccggtccaccgtcgttcagctgttgagcaacatcggctcgaagcgtgaggtccagcaatacctttcgcactttacttcggtctcgtcccagcagtttgccgttatcaaggttggtggtgctattatcactgagcacctcgaaaccctctcctctgcgctcgccttcctgaaccatgtcggtctgtacccgatcgtcgtgcacggcgccggccctcagctgaaccgcatgctcgaggctgctggtgtcgagccccagtttgaggatgggatccgcgtcacagatggcaagacactggctttggcccgcaagctcttcttggaggagaacctgaagctggtcgaggagctggagcgcatgggtgtgcgggctcgccctctcaccgctggtgtcttccaggccgactaccttgacaaggagaagtacaacctggtcggcaagatcaacggtgtcaacaagaagccgattgagtctgcaattgaggctggctgccttcccattctgacttccatggccgaaacccccgatggccaagtgctcaacgtcaatgccgatgtcgcagctggagagctggcgcgcgcgcttcagcccctgaagatcgtctatctcgctgagaagggaggtctgttcaacggtgacactggcgagaaaatctcgagcatcaaccttgatgaggagtacgaccacctcatgacacagtggtgggtgcgtcatggtactcgtctgaagatcaaggaaatgaaggagttgctcaacgatcttccccgtacttctagcgttgctatcatccaccctgccgacctg

SEQ ID NO: 24236 - DNA, 606 bp, Emericella nidulans
aggaggcacttcaagatggcggaaagagcctcagcagaaatgaagccaaagtgcacccccgcggagtgcatgttgaaggtcatcctgatgggcacactgagccattacgagacccggggtatgattgacgacaaacgcttggaccatatgctctctgctggaaagcagattctatataagacgcatcaagaaagcgatgtcaggtaagaatctactccgtcagggcgtatgtcggcagaccactaaactttccttcacactagacatggcttaggattgtctcccgacatttggcagggccttacagacgtatttacgaaggcaattccggttctagaatcacagtcgttcatctggaaaagcccgccggctgccaattacgaacactcgtcttcgaacttgatagcctacaattacttttcgctggtgaaggacatcgaacgcctgaatgatctttgtacgatcgcccggaaccttcttgctacgacgaagaaagcgcagaatatggctgctgagaaaggattcgaccagagggttctggcgttggtggatacttgtgttcgggtgacggcgcggggtttcgcggggagacgacgcaaggaatga

SEQ ID NO: 24237 - DNA, 564 bp, Emericella nidulans
aaaatggagttcttcgactttaatgaggctgcttccggctcccacgtgccggacgacgatgtcgcctctgatcacattgagatggacgagaacgatgtcgtggaaacatatcagtctcttttgcaagatcggtcggagattcccgacttcctacctggccaaagcgcttctgaggaagtcatgtctgagactcccgatccggaaggcatctaccccatgggccgtgccaaagaaccttgcgacttctgcaggaacatggggctggactgctttatcgccaaacgaggcgtgatgcagaaaagtggctgcacttgctgtatttcgctgtatcgcgaatgcagtttcacccaaacaatgcctcagggcagattcgccggcgtggacacattgcatcctatctccgagaacatttatatccccacaggagggctgaccggcaagaaggcgcttaagtctttctctggcattgcagaggatgttgacgctcgtgcaaggaaaagcagctctcgtctcttacgagaggctgggaccggatcctttaggggtggcttaaatgacccatag

SEQ ID NO: 24238 - DNA, 474 bp, Emericella nidulans
aacgtggtgctgaattctcggatcgagccctggctcacggccgccttgaaacgagtaaaccgggtgaagcgacctttgaataacgtcgcgcagcatacgaggtgtctgaccgagactctttcgtcggcgaacgccatctggaatctctgctcgatgatgctgcccaaagctccggagtccgatctgcgcaaggacgagaaccctctcgtagaggccatattcaactaccagatgattcatattgaagcatacgtggtacatgttgatatggtatctcagaacgaggtcgcgttcaaactcacgccagagacgatcgaggcgcttgtcgaacatcacaaggaggtctactcgattgacgccgccgctaatacatgggactgggctgagaaggacaatcagctgaagaagctgcaggaggaatttatccaggcagccaacaagtttgtttaccgcaccagcgctcaagctttttga

SEQ ID NO: 24239 - DNA, 426 bp, Emericella nidulans
ttcactgagagaatgttccactcgcttatcctgggcagccacaaatgggcagagaagggcaagccgtccgaggagcagaccgtgcgggcgacaatggagcccggcgatgttctggtcatgcaccagggaatggtgcacgcaggatcgtctcacctgggagagggtgctcggcgcctgcttttcacccaaatggcgtcctgccagctcactccaactgagacgtttatgtctgtgccccgcccactggttgaaagcatgacgcccttggctcaaaaaatgattggctggagaactatccgccctctgccgaccaatattaacgggcttatgaacgtgaagctgggccgccttgaagatgccctggagttgaagtcagaaaaaccccttgaccagaaggagacttcgagcaacgccttcacttgttga

SEQ ID NO: 24240 - DNA, 517 bp, Emericella nidulans
taccaaacctcaaaggcgaggaccctgatgacgccttttctaccataccatacgagaaaggattcaacttcctgttccatctggaaaaccttgtcgggaaggaaaaattcgaccgcttcatcccccatgtgagttatcatcatgctcattattcgtaatgctgtatcttgacctctcatagtactttactacatttaaagggaagtcgttggactcttacgacttcaaagctactcttttagatttcttcaaatctgatgctgaagcctcccgactgttgcaggagctggattgggattcctggttctacaagcctggcctgcctcctaaaccagaatttgacacctcgctggctgatgttgtgtatgagctggcgggcaagtggagatcccttcccgaatctccatttcagcctcagccgagcgacattcagggtttgacggcaaatcaaatagtggtctttcaggaacagatcctgctttttgagcggccacataccgccgaactctctgactga

SEQ ID NO: 24241 - DNA, 1710 bp, Emericella nidulans
aataccactgtggacctactggcgctggaaccagtcgccatgtacggtggtcgtgcaggccgcatcgtcgaagagattatcaaggcaaagatagagggaagattctccgaaaccgaaagagagagtggcaaatggtcgctccgaagcccaagtggtactgttggcaatctcgggattctagcctgcgtgttcgaggacgaacaaggcgtatagatgagccgtcccgccgcgtcaaagatcagggtcgtctttgacacaccaagagcgctgtgcagcaaagcgctaagcgactcatatctcgaagtagtcatctcggtgtctctggtagccgagggccaatatcgagtgaacgtcgactcgatagtaggtacctcttcctcggatatcgtgacggtggatagcttcgttccggtgctctcaaaacgccgtaagtaaagacccctatggattcagcaggacttgcgatttctgactgataaagtgttaaatgtcctccaacctttacacgatacaagaaataggcacatggcagaatcattggttcactccaattttgctatcatcaaatacctcgctggccatcttgtagcgcaattcaagactacccgtggtttccgccctccttcaccgacaaagctgattgcaaacctactgggtggtcattcaagggagagtagcacgtcaagttccaaggcacctggttcagcaacgttactgggtgaatttcccaagatgccccctcctcgcgccggacatgcacggtccaacacactaccgtcatcgtttcccggcaaggaagagaccccggtcaaggcgtccgcggtcgggacgatcccgtcaaaagtgtcgaatagtcctttcgctgtgttagagcaaacatttgctgcctacgtccttgcgctgcactgccgcagtgggaatattgtgggccgcactcttcggacaagggacaatgtggatcgttcatcggtcaatgagttatacaatgtgcttttggaagaccctgccaagcttcaggcggcggcagaagtagcggttgacacgctttttgtggcctttgagacgttcatgaaaaatgcgtggaaggaacacatgggaccagtacttgacccttcgggcctacaattactccagagtcaatttgataccatgtatccccgtgaattcgaggaatgctttcggaaattccttgcggatatgagtcctcagaaccgccgtgctctcgcttcgcttattcgcctgctcgccgaccttctggatgcgtctggtagtgacggtgatcgtggcgctttgacagctgcgtttgcagaggtcttgacggttgaaggcgatccaatgcaacacatttctttgctggacagattagtggatgactttgaccatcttttcgatgagttcatctcaggcggctcgacactggaaggtatactgaccagcgagctcaccagaacgacctcgcaaacgccgggctctgtcggttctaatgcatcatctttccgtaagcgcttcggctttggtatgcatcgagaaaactccggcgagagcaaggttgcttcgattctgcggactctcagcaagaacaaagggcccaacgaatctgaagcagggacacaaaggggctcgatgctagtacgctcaaaatcaatagatgtcgacacaagtttgagctctcttctgcgccctggttctcgcgatcgttctggtgcttct

SEQ ID NO: 24242 - DNA, 1781 bp, Emericella nidulans
acccgcaatgttaagatgcccatgcttattcgaagcttgggtatttcttacctactgcaccagtctccacatattttattacattgaccttaatccgttcaccttttctacttgattgataaccgtcgagatggctgcgagtcctaccgattccggtcaattccaggtagaggaaaagtcatcaagccagacttgcgacaacataaagccaaataccagccatcaggagcatgccgagacgtatgctgacgagactgggctatctcaagatgaacaggaatctaccaaggtatgaagcactcgtgctggatcaggctcctcaagaatgcagttattaattcagttattgattcatattgaagatgacattccgccgattcatgggcttcacagccatggcctttctctggactggtagtcagatccccgtctaccttttcggtggtatccctcccattatctatggtgatatcggcggagtggacagatgggtctggtttgtatgtactttcccttatttcgggtcagtttgaggactgaagaagttaacctatatacttaataggttctagggaatctcctggctctagccggtgtttgtcctttcgttggttccctctctgatctcatcgggcgccgttatgttgctcttattggggcttcgctggtcactgtcggaatgattatttgctcaacggcacacgcaatgaatacctttattggtacgaatcaatgccattgctcatttctcgtccggtcagattgaatctaatataagcagccggaatggccatcgccggcgcaggtgctggagtcaacgagctcacggcactggctgccacagccgaaatggcacctactcgccaacgaggcaaatatgtcgctgtcttgatctttaccattgccccattcgcgccatcagtgctctgggcccagctgatagcagatgcaggcagttggcgtcacgtcggagctttctgcgccgcgtggagtgggcttggtttgatcattacagcaatcttctatttccctccgcctcgagttaattcggaaggccttactcgagcagaaatcatcggcaggattgatttcgtcggcggctctctgagcatcgtgggtttgattcttttcatggctggaatgcaatggggcggttaccaagtacattttctcgctctgtgtaactgtctatccatgttgactaactgactactatagtatgactgggattctgcacacgttctcgcccctcttatcctcggggtagtcctactaatcgccttcgccatctgggaaatttacggcgcaaagtttcccatcttcccaagccgcctgaagcaggagccccgtacactaattctaactctcgtcattacatttatctctggtgccaatttcttctcggtgctcatgttttggcctacacaggcattcaacgtttacggccatgacccagtcgatatcggtatccgcagccttcccatcggctttgggatcatgggtggcgcctgtattgttttgtggctccttagcgtccttcgtggccacaacaaggaactcctaattgctagcagtgttttgatgacggcaggttcgtacactcgacaaacaagcaagttgatggacattcaataatctgactctaaccaggatgcggcgctatggccgtagcggacgtcgacaacatgcatcaactctggggcattcttatcgtcgcaggcctaggtattggcgggatagtcgttccagcatccataatcaccaccataatctgcccagat

SEQ ID NO: 24243 - DNA, 1510 bp, Emericella nidulans
gctttggctgaggcagctaatgtggactacaattactttattcggacgacggaacctgcgcataaagaggccgttcaatacttttgggtaagtcacagggactacttggcgagatcgttacttacgcggagcaggaaatgctacaacatcgaggctacatttacacatctaaacatgaaggatggtattctgttagcgacgagacattctatccccagtcacaagtcaatctctcgttggaccctgccaccgggcggaagagaatggtacgactcttggctttcaccgtgatacaagctgaccagactaggtttctacggagacgggcaaagaagtcgagtggtcttccgaaacgaactatcactttcgtctgtctgcgttccaggaccgcttattagaattgtacaagacggatttcatcacgccaacccactatactgagcaagtggtcaaatcggttgcatccgggctgtcagacttatccatctcccggccggtggagcggttgacatggggcatccctgttccaaatgacaatacgcagacgatctatgtctggctggacgcgcttgtcaactatctcacgaaagcaggatacccttttccgcctggcgagggaagccgcctcgggtggcctgcggatgtccacgttgttggcaaggacattgtcaggtaggtgttatcccagaacgcaagtggacagtacttacgcgttcagattccactgtgtttactggccagcgtttctcatggctctggatcttcccctccctcggaatgtccttgttcacgctcattggacgatgaaccgtgagaaaatgtcaaagtcgaccggaaacgtggtcaaaccctttcttcgcaattgaccgattcggaatggacacaatgcgcttcttcctagctcaccgtggcggccttgcatccgactctgactacgacaacagatacatcatccgcgattataagaaatacctccaacagggacttggcaacattgcccaccgcacaattggttgtgcgaaaggaaaattgcgggactatatcatcaatgctacatctggcaattcccccgcaaccgctgacgatcaggcataccagaagactctggagcagctctcccacaaggtagcaaagtgtatggaggcacttgacccacgtgcggcactagaggagatcgtggaagtaatccttctggtaaaatccctcaccgagtcgtagaagctcagtctactgacgcccttcttagacaaacaagtattttcacaactcggagccatggcagaatccggaggagaagcaacgcgtgattttcaatgctgcggagtcaatgcgtatcatgggcatcttactgcagcctttcatgccgaacaaagccaaaaagctccttgacatattgaaggtcgatccttcaaagcgggatctctctgatgctggctatgcacgagactcgacctacggcgaggatgttaagaaaaaaatcctcttccctccccttgccctcgagaactaa

SEQ ID NO: 24244 - DNA, 378 bp, Emericella nidulans
tttcaacaccttaaccaccaaggccaagcaatcgtggagaaagataccatgattatgcctttcaactccctaaccggatacttacaccttgtccgccacctctctcctgatacagtctatgtgcaagagtcactgtcaggtcaagacggtagcgcggtgaatcacatcgccggctgggttaggcaggtcgttgttgtggttggcgatgaaggtggccgaggcggcctcatcgatagcgacgatgaatcagtgctggcgaacaaggaagagaaatggtggcgcaaagagggtgttactggcattggtaaacgcatcgacgtggtcgatgtgcttcgtgttggggatgattggcgacgcaggatcagtggcaatgactag

SEQ ID NO: 24245 - DNA, 1196 bp, Emericella nidulans
ggactgctggggtctatgtatgggcttgcgcgattgcgggaccacgttatggggggtgcttttacggataacggggcgttgacgtggaggtggtgcttctatatcaatctgccgctgggggcagtaccatcgcttgtgattttgtttttgatcccggcttttgcggggagtgagaaccgcgagtccgggatcgggaatcagatccgccaaatggatgttcctggctcgctgtgtttactgcccggtgtcatctgtctgcttcttgcgctgcagtggggagggacaaagtacaactgggggaatgaacgtatcattgcgctctttttccttgcaggcgtgctacttagcggcttcacgatcatccagtacttcagcggagaccgcgcaacggtgccgccgagagtcttcgggaacaggaatgtctggggcgcggccctgtttggttcgggtgttactgctggcttcttcttaatgctgtactatgtacgtgccgactctttttgcaagacgaaatccactgacaactctcctagatccccatctggttccaagccgtgaaaggcgcatctgcagttcgctctggcgtgatgaatctgcccatggtcctcgcctacgtgaccttctcgctctctggaggcttcctcacctcgctgctaggctactacgtccccttcgcctatctcacagttattttcatgtcagtcggttccggtctgctttccacatttaccgtctcctctggatcgccagaatggataggctaccaattcctctttggcgcgggcgttggtcttggtcttcagacggcgtttgcggcgccccagtgcactctcccgattgaagatatcgcaatcgggacggcgattgttatgtttcttgagaatttgagtgcggctatctttgtgtctgtcgggcagaatgttttctcgaatcagctcaagaccaatgtccagatttatgcaccgagcgttgacacagcgcggttgatcgatgggggtgcgacggaggtaagaaatttggtgactgatgagacggtctaccaggcagttttgagggcgtacaacaaggctctgacggggacgttctatgtcggcgtgggcttgtcctgcatcgggatctttggagtggtgtttatgcagtgggttaatgtgaaaaaaagtggaaaaaagaccgagcaggacaataaagatgtttaa

SEQ ID NO: 24246 - DNA, 1735 bp, Emericella nidulans
gttccttattcactctggcagcgctatacttcggaatgcctcggtaagccgtctaccaaatccacggaaagagaacagtcaaagagatcagcgcgtgtactctacagagactctgcagcaatcttcagacgagtcacttgccggtgtcgacaacagagctcactgcatcgttcggttgggaatcaaggcaaattttcgaacagcaagatgtccaagagctatcacgaaaactgatgcagagacttgaggagaaaatgaaaggaactccagcggaaaaggcccttcccgaatgattagtagggaaatcaaaaacatacatttcatgtgtcaatgttgactatgagtcttcacgggtgcaagatttctgggatatccagctcaacgtgaggaacaacaagactcttgatgacagtttccgcgactatattcaggtggaaagacttgaaggagacaacaaatatgatgcaggggcgccgtacggcttgcaggatgccgacaagggcgaaatattcgagagcttcccgcccgtgctgcacttacacctgaaacgttttgaatacgacattcagcgagacgccatgatgaagattaatgatcgccacgcattcccaatggagtttgatgccgctccctatctgtccaaggacgccgatagatccgaatcgtgggtctatcaattacatggtgttttggtccacagcggtgatctgaacgcgggccactactttgccttcttgaaacctacgaaagatgggttctggtaccgttttgatgacgaccgagtaacccgagcgacagagaaggaagtgctcgaagagaactatggtggtgagtatgagttgcccaacggtgcagtcggagtaagacaaccctacacccgaggactgtcaaccaaacggtcgacgaacgcatacatgttggtctatgtccgcaaatccagggtggatgatgttcttgttcccataacaaaagacgatgtgccatcccacattggtatgcacaagctcctgtgtctttagtatttgctgttaatgtgcctatagaaaaacgccttgtggaggagcgtgccgagatcgcccgtcggagaaaggagaaagaggaggcgcacttgtacacgacggttggggtgctgtctgaggagaccttcaggtgccatcatggttttgacctgactagctacgatccaccggttgtggaggaggcacttccaaaacagtaccggattttgaagactacgactgttggcgaatttgccgaaaagatcgcggaagagaaagggctcaacccgctccaacttcgattctgggtcatggtcaatcgccagaataagacaatgcggccggatcaggtcatccaggatcccgaaatgaccatggatgaggcgtacagcagatatgccaccaagggacacgtgttccgagtatggctagaggtcgcacaaccatctcccgatggaaccgtttcatggccggatagctcaacctcggtgcttattttcttgaagaactttgacgtaccaacccaaaccctgacaggagtcggtgcaacatacgtgcgcaagagtcagaaggttggggagctcgggtcgacaatactcgatctgatgaactggccggcccggaccgagtttgtcctttatgaggagattaaacacaccatgatcgatctcatgaagccccagcaaacgtttcagcagtcagagatccaagatggggacattatcacatccaaaagg

SEQ ID NO: 24247 - DNA, 555 bp, Emericella nidulans
aaaaagtgggcacaagaaacgttagagaccatgtcgcagcggtcgccgacctccctcaaggttgctctgcgccaaatgcgtgtgggccaggcatggggcatccgcgagacgttccagcgtgagtacgagattgctgcacgattcatgcagcaccccgacttcgtcgagggcgtcaaggcacgtctcatgtcgaagccgccccgccaggcgtcgtggcagcctgcaactcttgccgaggtctctgagaaggacgtggatgagtttttcaagatcccgcaaggcaaggagcgtatccaacttttgagccaggagaactggcgctcttacccacactcctatggtctcccttctgaaaaggccatcgagaaattcattcgggaagccgacccgaagtcaagggcttcgaagggcgaggttatcgagcatttcgtgaaggagtttgaacacaaggaaggcgtcaaggagaaggttgccgaggtgctggctagaaagaccactaaatccgccgagggcctcatttggcaaggtgagggtgctgagacggatggtcagtag

SEQ ID NO: 24248 - DNA, 687 bp, Emericella nidulans
ctaaaatgcaacttatgcttatatacagcctgctccgagtgcagcggaaatccacagcatgcttacgaacgctggttggatctaccacgcaccgtaccactcgatttcgtcagttctctccggtctatcttgccaggtagactagctgtacgtggtatcacgcccgacagctacaaagagctaaagtctaactcctacatacctgctaaatgctggtcagaattcttggacgccgtatttagggctgttggcgacgagctccgcttttcggacatcaaccgaagtgagtgttggactgtgacctacgacggcaaatattccgttttgaaattggttattgagccttttggtagtatcacttggctcttttttgcaaagccgcgcgaaacagaccctgctttatgtttgattcgcgaggttctctcgaaacccgtagctcgaatgaccctgccggtgccttcacatcaagcagggtcaacttctagctctatcttggaaggtgggacttgggaaatatgtgccccgctgtcttcaagctgttcattgaaattttttggaacaggaagcaaggttgactcctacgaagcaagatgcggcttacaattgcccgcgtaccaaaattcgcaggtttggagccatattattgtccacggtgctgataaagacatcaaagacttggaagttgat

SEQ ID NO: 24249 - DNA, 707 bp, Emericella nidulans
atggcccctcaactctttccctcgaacccggacgaggtcatggtgatccgcaacgttacttcagatgtcataaccatgagcttgccctttgcgcgatttggacgcttcaaattcggtggacgagggacgctgggttagtcgatgctcatcagtagcaatctgcatcttaactgatgaacaacagtccggatgacttccggctccatagccgtcttttccccagttaacctaactcccgcggtccgcgaaacgatttccggcctcggcggacgagtcaagtacattgcagccctcgaccttgaacaccacatccatttaacggcatggaaaaaagccttccccgacgcggacatcattgctcccgagggcctatgggagaagcgccaatccgtacctgagcacaaagacaccccgatcaagtacatcttgcgacaatccaactcgaacaaggaacacacatggcccatatccgatgaattcaacaaggagtttgatatcgagtacgtctacggtcatgggtcgaaggaaatcgtatttttgcataagccgtcgtgcacccttatcgaagcggacttgttgtttaacttgcctgcgcgcgagcagtactcgaaaactggagaaagtgcgacgtcgggactctggacgaagattgttcggccgctcttgtcaacggcgcagccggcgacctggcagaagagattcgcgtg

SEQ ID NO: 24250 - DNA, 380 bp, Emericella nidulans
caaaggtcacggaaacgcctactcgctcgacatcgatagcgcctggagcagcatgagcacgattgaaggcgacggtgttgagttgaagaacgtgacaattcgcaactggaagggaaccgaagcagacggatcccagcgaggcccgatcaaggtgaagtgtgcatccggagcaccttgcactgacgttacggttgaggactttgcaatgtggaccgagtcaggagatgaacagacgtatgtctgtgagaacgcgttcggcgacggattctgtctcgcagacggtgacggcacctcgaccttcaccacgactctgaccgcctcggcgcgccctgctggttactccgcacccagcatggacgccgacctcgagaccgcctttg

SEQ ID NO: 24251 - DNA, 630 bp, Emericella nidulans
atgacatctgcctcgtttgactttctcattatcggggcagggatatccggaatcaatgctgcgtaccgtctgcagagtgcgttcccgcaccgtcgcttcgccatcctggaggcacgaaatagcatcggaggcacatgggatctttttcgctacccaggtattcgatctgactcggatctatatacatttggccttgaatggttccactggaatcagtcaaaccccatagcggagggaggggacatcctcagatacctcaatgatgcggctgcagcagcggccaacatcacgcagcatattcgcttcaacacccccgtcaaatccgcccactgggacggccatcagtggacactcgatatagaaagcaatggtacggctgagaaactgcgtgcccagtttgtcattttcgcaaccggctactatgactaccacaagcctctggaagcgactatccctggcctgcaggatttccagggcgaagtgattcacccccaatattggcccgagaagtttgatgcccttggaaagaagatagtaataatcggcagtggggcgacagctgtgacgttggtcccatccctcgctgaggatgcctgttcggtgacgatgttacagcgaagcccgacatat

SEQ ID NO: 24252 - DNA, 420 bp, Emericella nidulans
agttttgtcatgccggctatctacgactccttcgtccacgaccgcggcctaaccccgcacaaagcctggcgagtctcctacatcgtccctttcatcatcattgtctccatcgccttagccatgctcttcacctgtcctgacacacccacgggcaaatgggcggaccgcgagaaaaccagcgggcaaagcattgtcgacctcagttcaacgcccaatgcatccagcgccaacagtatcaacatctccagcgacgagaaaaaggctgtccatccagaagtcaccgattcagaggctcaagtccatgtgcgcgcgggacagattgagagttccgacgctgtgatcgaagcccccacgataaaacgctacctctccatcgcactagacccgtccgcccttgccgtcgcagttccttacgcctga

SEQ ID NO: 24253 - DNA, 733 bp, Emericella nidulans
atggatattgatatggatttggacctcggtcctctacctgaacccgagccaatcgagatggtaagctacagagaaagatgacaaaccattgagagctcaaactaatgttttgcgtataggagcaaacacttcaagcaaccacagccgttccagtagacggagcaatcatcgaccctcaaacagccgaggcacaatctgaaaaggtgcacatacgtggtgttgacgaattaacgacagacgatatcaaacaattcgcgtcgacacatttcccgctagaacaaccagcgcgtattgagtggattgacgatacctccgcaaacatagcctattcgacgcccgagattggattacaagctctgtctgctttaacacatgacggcgaactggaaggtggcatttctggggatgggacagccccaaccgcgccaggagagattcccgcactccggctgcggtcggcgaaggtgctggcctcgcatccagactctgttctacaggtgcgctcggcggtgaagacagataagaagaagcctcgcgcgcacgaggcgagtcggttctacatgatgcatccggaacatgacccgcgggagcgcttgcgacgtgaattggcttctgatcggcgtcgcggcgggggaggggacagtgatggggactatcggaggaggcgttttgacggacgagaactgcgtcgccgtcgggagcgcgataatgaggacggcattacggcgaacat

SEQ ID NO: 24254 - DNA, 1764 bp, Emericella nidulans
ctgctggtcgcccaattcggacctttcttcgctgctaccgccatgccgacgacttcaaacaacgcgtcccccgttaagcgcccgggcctgggccgccgtgctgtctcctctcacgccgttgtcacgcgctcctcgtcctcgtctacccagggagagctctctcactcgcatacctcccacacctctcagccccaacagaaaacaccagggcatcgaccccatcgagcacatctcgtcggtggcggccatcgcagtcacggccgtaatccatcgtttggaaagaacttggctaaattacagcggcacctaacatctcaccacgccggtccagagtaccggctgcatcagcaccagcgcaagaagtcggccccggtgacgcccgttgcgagccccccgcgccagcacgttcactgggatgcactggacgatgcctcccctcgtaccactagctctataaaaaaaaactattctagcccggctttgcgacggagcaactcgagcgtcttaccaaagaaggccttagtcaccgaccgccctcataccagctcgggaaagaagaagacggtcggatttgaactggcggactcgacggacgagggcgagtgggaggatacaactcaatcgcctgagagtaccaggcgaagttctgtggcgcagtccaaagacggcgacgagaatccggtcgtgctggtcgatccgcttacatttgtgaagcggccgtatccccagtttccccgagcgaccagtcttccggaacctacgagcagaagctttcacgacgatcaatcatcaggtgaagacgacgagcacgctcagcgcacaagggagcaatcttcagacacggaggaagctccggaggactctacgcgcccgcctgatcagggcgatattgcatcacggcttcttagcccgtcacattccgctaaggcgccgcccgccatgtcttcaatatctgccaccgcgacaccggcgccggtggatacgatatcacgaaccgcatctctcacgaacctggcatctggtcaggatggactgcgaagaccggtgtccaccgcaaatattgcacaggccagtaccccatcacaagcgcctgggtcttcatctatagaagggggcgtatcaaggtttatcaacaacaagatcgcaacgtcccgtaccgactcagatcccaacactccatcatcattccttcctcactaccatccgcaaaccccgccctctcccaaaggtacgaagaagacgcgcagctcccctacttcgcggcaacctggaacggaaccgccctcccgcactcaacagaaactttggctgcagcgtacggcagccctgaatgactctcctcctgattcccacggtgcgtcggccactgtgtcgccgtccaccatgggccccgcttacattagtggaacagcccgggcgggattgggaccatatgatccagcgcgggcccttgacaatggctcgtctaggaatggcgggtcactgcatgaagccaagcatatcctcatagcatacgagaggactgccatggaactaacggttgttcgggagattcagtctcccacccagtgcagcttcacccgtgtgaacgcaattctgagggcgcgaagacggacaagactgacagctgagtccaggagccccaaactggtcttgacaagcctgtcaggtcagcgcctgctttggttctgctacaacggaatgccaaacagcaagatctccgtgacagcagtagcgccacaagcgcagactcaagacagctaa

SEQ ID NO: 24255 - DNA, 1611 bp, Emericella nidulans
attagcaccgactctgttgattgcgctgtgtgtcatagtacatatcacatgtattgtgttcgaccagcgttgacaaaaaagcccgctcgaggattcgcctgggcgtgcgccgcctgtagccgggcgcaggagcggaaactggaggccagacatacccccatgcttggtgatggtccgtcagaattgccggacgcagacgaggaaatgatcgaagaagaagaggaggaccagccgaacggagctcccaatggcactacaggcagcacaccagcgccgatcgaggaagtaccggttcgaccagccacggaggagcaaatagcgcaggcgaggatgtggccgtatcgctacttgggaatccattgccgagtggaagatgctttagactacgatgaccgcatctatcctcgggcgagttcgcgattgggacctcgacaccaggctgtggtgaacccctggcccgggcgtccggtcgaatacgtcaaacctattgaaatcaagaagaaatacatgaagagctccggcggacgcaaggacaacaggctcacaaaggacactgttgctgccattgaagctgcgaagaaggagagggctgcccgaccgagctgggtacaggatgaacctgctggtttcattcgcagaggcgaagatgagccagtcacaataggcggaaagcaggtccgcactgcagagatgctttttaagatgcccactccagagcaattgccgactagaggagcggacgacgggcctggtgcgggcctcagcacaacggaccgggaaaaatttattgatgagtatatggaacgggcgaaacagttggctcccgacattggtgttgagaagtattcgaccaacttcctcgataaagcgttggagcttctatacgcgcacagcttcaacgctgacgcggcgctcacaaaactaaagcaagtgaataaatacaaggatctgaaggaacctcacctgaagcctgaagaggttaaggcttttgagcaagcagtctccaagttcgggtccgagtggcgcaacatcaccaagcatgtcggcagcgtaccgcattaccaaatcgtgcggtattactacatgtggaagaaaacgcccagaggtcggcaagtatggggcaactatggcgccagaaagggtaagaaagaagcgaagcgaaacagcaccgcaaagctcgtggatgatgtcgcggacgatcatgacgactcggcatttgataacgataaagccgctgagaagaagcgtgggttccaatgcaaattctgttcaacacggtcgtcgcgacaatggcggcgcgcacccggagtagctcccggtaccacaatccctagtgagcctggatcgagaaaagataagggcccgcagctcaacgtcgccctctgcttgcgttgtgctcttctctggagaaagtatggaatccagtgggagagtgtggacgaagtagcaaagaagattggccagagtgggaacaagtcatggcgccgccgtatcgacgaggaacttttgacgcaactccttgcttccgaggaagctggcaccactagtgtcaacaactcgaccgcagccaccgcagcttcgcttggtgtttccgtgaacgcgaatgcccag

SEQ ID NO: 24256 - DNA, 510 bp, Emericella nidulans
gagaccattcggagacggctggttcattttctctacgctgattttaccaagcacttgaatgaagaacattacgatgctatatttaaccagtcggtcatattgctccaacgcctttttcacagtgctggtactccctgggaaggagactcaaccactttgcgggctgacatgattcgggccatacagaactggccgaattttatcacagaagactctttggagcatgacaaaaggatatgcactaagcctcctctcgagtatccagacacagttattcatgacactatccatgtggatacgcaacagagagcagctgatactgtgatggaacaaacgcgtaatgttcttggtgtggacatattgggttgggtgcctaatgatgaatatgaagctgcgaaagaaatggctcgtgagataaagatcaaaatgcttgaagcagctgaaacatgtggcgatatcacagggattcaaaaccattttccgttcgaagacttcgatgaaaagtcctga

SEQ ID NO: 24257 - DNA, 393 bp, Emericella nidulans
atgttcgtgacattactcatgtcatcaattatgattaccccaataactcagaagactatgttcaccgtattggtcgaactggtcgtgcgggtgctaagggtaccgccattacctttttcaccactgacagtaagtctcactgcatttgttttcataagacgttgctaacgttgttttacagatgctaagcaggctcgtgacttggtcactatcctctctgaggccaagcagcagattgacccccgtctcgctgagatggtccgctacagcggtggcggcggccacggtggtggttatggccgttggggtggtcgtggcggcggtcgtggtcgcggtggtaacttcactgcctccaacgcagcgcctcttggtaacaaccgtcgctggtagacc

SEQ ID NO: 24258 - DNA, 455 bp, Emericella nidulans
gaggcaagattcatgtccaaggttcctcttcgaatgtcacgcacacaatcaacgaagatgaaaggaccgaatttacgagacatatcaatgctgtcctagcaggtgatccagacattggccatcttctacctttccctaccgatacattcgagatgttcgataagtgcaaggacggtctggttctcgcaaaacttatcaacgacagcgtccccgatactattgatgagcgcgttctgaacaaacctggcaggaaactcaaagagcttaacgcattccacatgactgaaaacaataatatagtcatcaactcagccaaaggaattgggtgctcagtcgtaaatattggaagcggcgacattatagaagtgcgggagcatcttatcctgggtctcatttggcaaattattcgccgtggcctattagggaagatcgatatcaaacttcatcccgagctt

SEQ ID NO: 24259 - DNA, 1230 bp, Emericella nidulans
cgagaaccaccctactctgccttttcagaacctagaaaacgcttctatctcgccatcgtcacagcagccggcttcttcggcccgctctgcggtgccgtgtatctcccctcgttgaatctctacgaggatgttttccatgccccagggacagtcattaatgcaactgtgtcagtgtatatggccgtttttgccgttgcagtgagtgatcacttccctggctatcccgcttaccttacccaatgccctagccctgcagagaactatactgatgctgtgcgggacagcccttactcggtgcagcactatcagacctcggcggccgcaaaacaatctacatcgtcacgctcgctagtttcctgatcgccaatatcctcctttccacacttccgcccaatatcggcgcattatttatcctccgcatcttccaagccttcggcgcctgcatcgtgacatccattggcgcaggaacaataagcgatatattcgagcccgcgcgacgtgcctccgttcttgctatctttctgctcgggccacagctaggccccatcctcgggcccttaattggcggccaattcgcaacagaagacaaatggcgctgggcatttgggttcctggccctcgcctgcttgcccgtctacctcgctatcctgttctgcctccccgagacattgagatgtctagttgggaatggggaagtcttcagaaccagaccgctttttacgctgccccgtctgcgtcagaaaccgctcgtagaccaaggcaaattccctaagccaccgaaaccgagtctgaggaactggatcaacctcttgattcaaccaacgcagtgcattgtttttgtgaacggagccctctccttcgctgggttgtaccttatgtatgtttccttcccagatgtctggggcgagaagtacgggtttagtaccgcggaggttgggtatgcatatttgagccctggtatgcttctagcttttgtcccctttctcaagaaaagcagctaatgtgctcaaggaatcgccctcttcattgcctccctcctaacgggccggttctccgactggcatcgcgcacgcctggtaaaggccactcccgacataaagatcaaagcggaaacacgcctcccaattcaaattatgggttttgtcatctccgccgccggaaaagtcatgttcggctggttcacgcagcataagctccatcctgttgctgggcttgttgcatctgccttag

SEQ ID NO: 24260 - DNA, 545 bp, Emericella nidulans
gatactcaattggttgagtggtacaacagcctcccatatatccttaaagaccatgaaccatgcccggaaggaatcgcaaacacccgcgaagtcacgaaatggcgatatcatgtccaacgcatactcctctaccgtcccacactattgagctatgccatgcggcgggttccgtatattgctctacgatccgaggagcggacggcgatcgaaaggtgcagagaaattgccgaaaccgccatcagagacatctcggcaactgcaaagacccctcagatgtctgggtggaacgccgtgtggttcctcttccaaagcaccatggttccccttctagggctgttcatcaacgacaatacagtgacagatccccgggctactacagaggcgtgccaagcgcaggtccaagacgctttacttgtgttggcgcgtcttcagcaagcaagtccgacggcaagggaaaaccctcgacgcagttttacgggtatttgaggccagtaaacctgggtccccggatagctgccggaaccaaccagatcaacagcggttaa

SEQ ID NO: 24261 - DNA, 1770 bp, Emericella nidulans
atggcagtctccaatacgctagccgcccggggtggcgccctctctccgagccagacaacatcgcaaatggccacgaccacagttagtgtggggggaatgacatgcggcgcatgtacttctgccgttgagggcgctttcaacggcgtcaaaggtgccggtgaagtctccgtgagtttgatgatgagcagggccgccatccaccacgatcccactctcctccctccaggtaaagtcgccgagattattgaagactgcggctttgatgcgactgtgatctccaccgacagttcgtcgattccgtcgcggagcgccagcgatcatggagcatctgaggcgaatgtcgtgacaacaacactggccgttgcaggaatgacttgcggggcctgcacctctgcagtggaaagcgggctggcagagaaccccggtgtacgatccgtcaatgtctcgctgctatcagagcgagcggtgattgagcatgatctgtcgacggtctccgctgagcagcttgccgagatagtggaggatcgtggctttggcgcaagggtcttagaaacctcgacatcccgggctggtcctcgcggatccgagtctacggatccctcgtctcagtcaatgaccactaccgttgctatcgagggtatgacatgcggcgcatgtacgtcaagtgtacaggcggcgtttgacggcgtggaaggtgtgattcaattcaacatcagcttgctcgccgaacgagcaatcatcacccataatcctcaaatacttccatctcggaaaattgtcgagatcatcgaagatgccggcttcgatgccaaggtcgtttctgaggtccaggcgcttggtcagaagggcgggccgactcaggtcacgcttgacgttcatggcttacgagatgctaattctgctgcagccctggaggactccttaatgcaaaagccggggataatctcagcgtcagtaacacttgccacctctcggctggttgtctcgtacgacacctctatggtcgggatccgtacaattgttgccgtcattgaagctgctggctgcaatgctttactagcggattctgatgacaagaacacgcagctagagtctttggcgaagacgaaagaggtcttggagtggagacgcgccttcctgttctcactatcctcgccaatccatgtgttcgtgatagacatgattcttccgatgtacctaccaacgttcaattttggcggtatccgaatcattccgggtctttacctcggcgactccgtgtgtctattactcacaattcctgtgcaattcggtatcggtaaacgcttctacatcacaagctataagtccttacggcaccgtgccccaaccatggatgttctcgttatgcttggcacttcagcagccttcttctacagtgttttcaccatgattgtagccatcgttattgaccctcaccaaagacccaacactgtctttgacacaagtactatgctcatcaccttcataacccttggtcggtggcttgagaacagggccaagggtcaaacgtccgctgctctttctcggcttatgtccctcgcaccatcaatgacgaccatttacgatgacccgatagccgccgagaagatggtagaagaatgggataaagttgacggccaagagcaaaaaacggctacaaacgaaatgtccaccgtctcacaaaaaatcatccccactgaactcattgaagtgggcgacattgtcgttctccatcccggcgacaaggttcctgctgatggagttgtcatt

SEQ ID NO: 24262 - DNA, 429 bp, Emericella nidulans
ttcaccatggctgaatacaatggccgccgtgcgcccaacttctcgcaatatctggacgatttgaatgccattccttcgccctacgatgtcgcgatgcagcagcagcaacagcaggatgggttcaatatcgataacgacctatcgctgttcactaataccgagtttttcgacttcgatctgaacctcccgccattcgaacccgtcgaggagaacaagcacaacgttaaccaaaactccgatatggatttcttggatatactgggtggtggtaagtgttggattttctacatggctgccctattcttgtgagatcgagtatcttggatgtgctgtcaaacgtaccatgggagcttatccagaggttctctctggcatgtgcatctatttctcgaaattttcttgcttcttcaaggcgctcggacgtttgtg

SEQ ID NO: 24263 - DNA, 1962 bp, Emericella nidulans
atggccgaaatcccagagcccaaagggctgccattgatcggcaacattggcacaattgaccaggaattccccctgggttccatggtcgctttagcagaagagcatggcgagatttatcgactgcgatttcccggccggacggtcgtcgtcgtttctacccacgcgctggtgaacgaaacctgcgacgagaagcgcttcagaaagtccgtcaattcggccctggcgcacgttcgtgaaggtgttcatgatggactattcactgccaagatgggcgaagtcaactgggagatcgcccatagggtcctgatgccggcctttgggccgctttccatccgaggcatgttcgatgagatgcacgacattgccagccagctggccctgaagtgggcgcggtacgggcccgactgccccatcatggtcacagacgactttacccgtctgacgctggacacgctggcactgtgctcgatgggctacagattcaacagctactactcaccggtgttgcatccgttcatcgaagctatgggcgatttcctcacggaggctggagagaagccgcggcggccacctttgccggccgtgttcttccgcaatcgcgatcagaagttccaagacgacattgctgtgctccgggatacagcgcagggggttctccaggcgcgcaaggaagggaagagtgatcgcaatgatcttctttcggccatgctgcgcggcgtggactcacaaactggacagaaaatgacagacgagagtatcatggataatctaatcacattcctgattgctgaccacgagactacctctggcctcctctcattcgtgttcgatccattgcttacacaccaagattcttacggctcagtgcagcaacaggtgcaatatgtggttggtcatctagtcattgaagtatcgcacttgtctaagcttccctatatcaacagtgttctccgtgaaaccctccgtctcaacgcgacaattcccctgttagcggtggaggcttttgaggatacgctccttgcgggcaagtaccccgtcaaggcgggtgagactattgtcaatctcctagccaagtcgcatctggacccggaggtatacggagaggacgcactggagttcaagccggagcgaatgtcagacgagttgttcaacgcgcgcctgaaacaattcccaagtgcgtggaagccatttggcaacgggatgcgggcttgcattggacgaccttttgcctggcaggaagctctcttggtcatggccatgcttctccaaaactttgacttctcactagctgatcctaattatgacctcaagttcaaacagacattgaccattaaaccaaaagacatgtttatgaaagcacgcttgcgtcacggcctgaccccaacgacgctcgagcgtcgactggcggggctggctgttgagtccgcaacacaggacaagattgtcaccaaccctgcggataattcagtcaccggtacccggttgacgatcctctatggctcaaatagcggaacatgcgaaacgctagcgcggcgtattgcagccgatgccccgtctaagggcttccatgtcatgcggtttgacggtcttgacagtggtcgttccgcgctccctacggaccaccctgtcgtgatcgtaacctcctcatacgaaggacagcctcctgagaacgcgaaacaattcgtttcttggctggaagaacttgagcagcagaatgaatcattacagctcaaaggagtcgactttgctgtattcggctgcggcaacaaggaatgggcccagacgtttcaccgcatccctaagttggtcgacagcctgctggagaagctgggaggcagtcgcctcactgatttggggctggcggatgtatccactgatgagctattctcgacatttgaaacatgggccgacgatgtgctctgggctcgcctagtcgcgcagtatggcgcaaacggaaagacg

SEQ ID NO: 24264 - DNA, 369 bp, Emericella nidulans
ttgggccgcaaaggcaccatgatcgccggcaccctgatcaccggtgtccttcttttctgcttcaccgcgtctacagatccggacatccagctcgtctgctcttctctcgaggccttcttccagaacatcatgtacggcgtcttgtacgcctacacgcccgaggtcttcccggcccccaaccgaggtactggcagcggaatctcgagctgcctgaaccgaatcgccggactgtgtgctcccatcgtggccatctacggcgcgagcgcgaacccggatgctccgatctatgcatctggcgcgctgatccttgccgccttcgtggctatgattttcctccccattgaaaccagggggagacagacgctgtaa

SEQ ID NO: 24265 - DNA, 1111 bp, Emericella nidulans
actcgaggagacatgcctttctcaacttcctgctgatgttcttcagtatcggaggacaagactggcagttctccaatgtcagcgcagaaaacacctaccaatttgttgggccctggacgaccggggtcaatctgacagagtccaatgccgggcgaatgtttgaactgagaggtaccgacccataaacgctcttctgatacggtgctaattccagcagtgacaaattgggcctacggatatgttcactagccggtcctttctttcccagctaacccagtaaacagtccaattatcaagtgtatccgtcaactctgcggcgtcgatttacaatatcaagccgtttccaaaaatggtcgaagttattggtgactcgtacgtgctgtccacagtcaagggcgttgtctaacgagtgtagcctgagctctggagacttcgcaacgtacgaaggcctttcgtcctgggcatacctttttgccgccggactggggaatgtggaatatcaccttacggtacggtgtgacagggcttcatatgtcgcaactaactgtagcaggcctacccaggtatctgcctacatgatcaagaatgctggggcaaccccaggggccaggtatgccgctcctccaccgtatccgccgttgcttagtgagtaggtttatcaatggtaccgaactaccgacacctctgcccgggcgatgaaaatctacggtgacgagccccctaaatgggacttcaaatcgcagcagccggccgacctggtggtcatcaacatcggcacaaacgacaataacccagcgaacaacgttcctagcgaggactactttaatgattacgtgaagctgatagctgatattcacgggatatggccgcatgcgcagatcgtcctcatggtatgttcactgtacaaagccatatttcccgactaacaggacagtctctatggggtggtttcggtgcatcgggagatacgtacgtccagggcccgctttttgtcgacgagatcaagagggtatatgaagtgtttcaaaagctatggaacttcgttcactacttcgacaccacgggtatcctgcagcacaacgatatcgcgccgcagtggcgagtcgactga

SEQ ID NO: 24266 - DNA, 828 bp, Emericella nidulans
atggagagcatgcggacacacagtgcaaacctagtggagcaggctgatcttgtaagtcatgagctgattagggtcgctgttctgtggcacgaactctggcacgaaggactggaagaggcgtcacgtctctatttcggtgaccataacgtggatgggatgtttgcaactctcgcaccgcttcatgaaatgcttgataaaggtgctgaaaccctgcgcgaagtatcgtttgcccaagctttcggacgtgacctggctgaggccaagcattactgcatgctctatcgcgagacggaagaaatcggtgacctaaaccaagcgtgggatttgtattacacagtgttccgcaaaatcagccgacagctaccacagttatcaaccctagatctcaaatacgtctcgcccaaactcaaggattgcgtggaccttgatctcgctgttcctggtacctaccaaagtggcaggcccattatccgaatcatcagtttcgatccaatcctacatgttcttcaaacgaagaagcgaccacggaggatgactttgaagggcagtgacggcagctcctacatgtatgtggtgaagggccacgaagatatccgacaagatgagagagtcatgcagttattcggcctggtcaacactcttctcgataacgatagtgaaagcttcaagcggcatctaacggtgcagcgcttcccggccattcctctgtctcagaactctggtatcatcggctgggtcaccaatagtgacaccctccatgctttgataaaagaataccgggaaacgcggcgtattctcctaaacatcgagcataggatcatgttacag

SEQ ID NO: 24267 - DNA, 429 bp, Emericella nidulans
ttgtgggctgcaatcccaatgtacaatgcaagcctattgttcaccaaaatatccctacttttgcagtacctgcgcatcttcccaagttacaagtttcgtatcatatgttacattgtaatgggaattgtggctgcatactcggcgtgggccattgtcagtgggtttgtcaactgcgtgcctgtggccaagttctgggaccgagaactacctggtcactgtctttcgttcgaagtgctctggttcttcaatgcctccatgaatatcgctaccgatcttactctcctcattctaccgatgcctctcatcacacaactacagctccccaagaggcagaaatttgctctcatgggcgtcttcgcgctcggtggactgttagttttccatgttttgcaaagaaacgttaccttggattggaggcagctaacatgc

SEQ ID NO: 24268 - DNA, 2230 bp, Emericella nidulans
attagcacccacagtctgcattcatcgccatcctctgggaggccgcaacttcgaatcgttcagtgaagatcctttccttgcaggaaagctcgcggcgcagtatattaaaggccttcagggcaacggcgtcgctgcaaccatcaagcactatgccgcgaacgagcaagagacctgccgattcacagtcaacgaacatatcacagaacgagcactccgagaaatctacctgaaaccattcgagatcgccatcaaagagtcgaacccgctggcagttatgaccgcctacaacattgtgaatggaacccacgctgactcgaacaattttctcttgcgagatgtgctcaggggagaatggggatggaagggtcttgttatgagtgattggggcggtaccaactccacggccgacgctctgaatgctggtcttgacctagaaatgcccggtcctacaaggtggcgcaaggtagacgaagtgcttgcagtcgtaaagtctggtgccgtgttggaggagactatcgacgagcgcgcgcgcaacgttctggagcttcttgctaagctgaattgtttcgaaaatcctactattccagaagagaaggccatcaatcgtcctgaacaccagaaattaatccgctccgtgggaagtcaaggcctcgtcctcctcaaaaacgagggcgatgttcttcctctgagaaaagagatattgaccaacaagaaggtagctcttctgggctttgcgcgagaagctctcattcacggcggtggcagtgcttcagtcaatgcacattatcgagtcactccagaagagggtctccgcgccgctttaggcgacactgttgagtttgaatatgccaagggtgcacacactttccgccagctgcccttaatgagcgacaacgttgttaacctagaaggccaacctggttggaccctagacttttttgcggacgaggagcccaacggcgagccaggctcatcgatctcgtccgagcaacccagctatataccgctctttgtcaaggaatcatggggaagtgtccgagccagcgcccatttcacacccacgcaaagcgggaaacactattttggcatgtctgggttgggccggtccaaactcttgatcgacggcgaggtcatctacgaacagaagctgaattgtccggactccatgggattcttactcggcggcgtggaagagccagaaatccagtattcattcgaagctggaaagacctatgcggtcgaagtggtttcggtgaaacccaccagcaagggcggtctcgctctgctggacggcttcattggtttccgtctcgggttcatgaccgaggaagagcacaatagagatttgctgtctgaagccgtcgatgtagccaaacgtagtgatatcgcaattgtcttcactggccatactccagattgggagacggaagggcaggaccagataagcttccacctaccgtccaacggttcccaggaccggctcgtggcagctgttggagccgccaaccctaacaccgttgtcgtgaactgcactggcgtagcggttgctatgccttggttggacaaggtcaaggcggttgttcaagcgtggttcccaggacaggaagccggcaatgcaattgctgacgtactcaccggcgctgtgaacccttctggacgtctacctgtgtccttccctcgggcgatcgaggatgcccctgcacacggtaacttccccggtgactacacagacgggaaggacaaccggcgccatctcgaagttacatacaaggaaggtgtcttcgtgggctaccggcactatgatctctctgaagccaaccgcgccaaggtcctgttcccgttcggctacggtctatcctacaccacttttacacatgcgaatcacaaagcaagtgctacgagcaggaacaccgtcgaagtggccgtggatgtcactaacgtcggcacctgtgctggagctgatgttgttcaagtctacgctggtgcaaaactggcagtcccagagaacccagtcaaagagctagttggtttcgccaaggtacacctcaagccgggggagaccaagactgccaatatcacattcgaagtgcgccaactgactcacttcacggagaggagcggcaagtgggagctggaatcaggcgactatgaaatatcaatcggtcagtccgtgagggatatcactggcaaggtggagattggtctggaagcccagaattataaaccttga

SEQ ID NO: 24269 - DNA, 758 bp, Emericella nidulans
atggacaaaggcagcgtcgacatggttgagcaagccgacaagcagcagctcggctacctcgccgattcggaagaccagaagctgagcaaatgggacagccttaaaaagtacccatggaccttcttctggtgtctctatgccgtctggtgtgttctcctggtcagcttcgagaaccaggcagctggagtcgtcatctcaatcccgcaattccgccaggatttcggcagcttgtacgaagatagctatgtcctcgatagcaagtggcaatcggccttcagcggcggtcccgtcgcttctgccgtcgtgggcgccctctcctctggtcaaattgcagataccttcggtcgtaaatggacaatcctcggcgccctgttgatctccgtggccgccgtagcccttgagttcgtatctaccacgaacgagatgttcttcggcggaaagttcctcaacggcttcgctctgggtgctctcgcctccatccccgtcacctacgttggcgaaatctcccctatagcgcttcgcggaacgctcacttgtctaaccgcattggcttactgtattggccccttcaccgtcgccctcattacaaacaccacaggcacctacaccacccgctgggcctatcgctctgttttcgccgcccaatggggcttcgcagccatcgccctctcacttgtacttttcatgcccgagtccccttggtggctcgtctccaggggccgggagtcagacgccctctccagccttttccgtctggg

SEQ ID NO: 24270 - DNA, 1754 bp, Emericella nidulans
atctcaactgttcataacatggtcgcaacctacctgcaaagttctcgaaccattatactcgcagttgtgcaagcaaccaacgattttgccaaccaggaaattatcagactggcacgcaagtatgatcacgatggccagcggacagtgggcatcatcaccaagcctgatttaatcaacaagggcactgaggctaaggttgcacgcatcgcgaagaaccaggatactatcaagctcaagctcggatactttctcctgaagaatccaagcccagcagaacttgatgaatgtaccactatggctgcaaggtccgctcttgagctatgcttctttactggccctgtatgggccagccagcatctggacatggatcgagttggggtagataacctacgccgtttcctgcaaagacttcttgacgcccatatcgagagagagcttccgaaagttcgagccgagataaaaaagcgttttgctgaagccgaggcggagctgaaatcaatgggtaaggctcggccaaccgttggtgatatccgcatgttcctcacaagcctcagcatgacattttatgagttacttcaggcagccctagagggaaattaccacagcagcaggcacaatatcttcgtagggaatggagataccaggttgcgggctcttattcaagaagctaatacaagccttcgcgactcagatgcatgaaagaggaaaacgccgggttgtgcgcgatgaggatgataatgaagacgacgccaaggataacgaccaacacagcgtcgaaaatgacactgatagcatcaacaacctcattgatgatgatgatgatgatgatgatgttgatgctccactactttatgtaaacaatgagcaaatgatggattgggtccgacaggtatagaggccacaacttcctctttaatatgtctttctaatattatcataggtgcactcaagaacacgagggaaagagctgccgggtaactataactcgaccctccttgcagagctattccatgagcagtcccgccggtggttcaacattgctcaatcacatgtccgccatgtccgaggcattgcatcacagtggaaagaccaggttcttcacgccataatttctgaggagaagcttcgtacagaggttcgaaacattctacaggaatggcttgacaacgccgagcggcttgcaatggaggagcttgataagcttattcaagatgaacagcgcgatcccctgacatacaaccactattatacagacaatatccagaaggctaggcttgatgcgcagaggaaagaggttaggaatgcagttactcgtgtggcgaacgaggattggaatggaaatcttcacatcagtaacacctcttacgaccttgacaggtttttgcgagggctcggacaaaggatcacaattgatatggacaaacaagcgtgtgacgaagcattaacccagcttaatgcctactataaagtaagtatctgtataactccctaatatttaagattttcttactgatccatagcaggttgccttgaagacgtttattgacaacatggctcgacaagtcatagaacgccatctgatatcacctttgcccaaagctttctgtccaacctctgtcgctaagcttgatgatgaagcacttctccgtatcggatcggagcctgcccatgaggctgcacggcggacaagacttacgagtatggctcatggactaaggcagagcctgctcgagctccagaggcctgcctcataa

SEQ ID NO: 24271 - DNA, 608 bp, Emericella nidulans
ggaatacaatcttcctcggcctcggcgcctcaaaccaaccctccaacaaaccctggggctggctgaaatcgctcgtctctatagtagcgttcttcatcggtgcagctctcttctccagctacggacgacacgtcggctctaagaagaggattactctgttctcttctttcctcttccaagctatcctcgtgttcatcgctgtcgcgctcctagaagcagacttgatcccgcacacacctgaggaatctgaaggactcacaggcggtcgtctgttcctcgaactcatccccattgcgctccttgcattccagtctgcggggtctatgactgctgcaaggggcctgggcttcaatgaaatcccgacggtggtgctgacgagtgtttactttgatgttgcgagtgatccgaagcttgtcagggatgttaggggaaatgtgaagcgaaatagacgcattggggcggtagtgtttttgttgctgggtgctattgtgggaggttggttgagtaagagtaagggggggatggagagtgcattgtgggttagtgcgggattgaaagtgatcatcgcggttacttggatggtctggtttggggaggatgcgaaataa

SEQ ID NO: 24272 - DNA, 528 bp, Emericella nidulans
gttatacgtcaaacacaacgtgctcagcgaagatattcccatcgttatccttctcaaagccatgggcatccataccgacaaggaaatgatgctcctggttgctggcgtcgacaaggtctaccaggaggacttcgctattaactttgagaaagctatcaaggttggcgtatttacgcagcagcaagcacttgattggattggttctcggatcaagatcaatcgaaagcagatgtcttaccgccggacacacgttcagaggccgtcgaggctattgcgtccgtcatcatttcccacattgaagtcaaagacatgaacttccggcctaaggccatttacgttgctaacatggcccgccgtgtgctcatggcgaagaatgacgcggcgctggtcgacgaccgtgattaccttgggaataagagactagagttggccggacagctattagccttgctctttgaagatctcttcaagaagttctgctttgatattaaaatgaacattgataaggtcctaaacaagcgcaatcga

SEQ ID NO: 24273 - DNA, 444 bp, Emericella nidulans
atgccgctctaccacggcacgtcggcaatagcactgattaccagcctgtcatcgggaatctcaattgccataagccgcaagttcagtgtgcgccagttctgggcagatatccgggactcggacgcgaccgcattcgtctatgtcggcgaggcggcgcggtatctgctcgctgcgccgccatcgccgcaagacaaagagcaccgtgtgcgtctgatgtacggaaatggcctgcgccctgacatctgggatcgattcagagagcgctttggtgtcgccgaggtcggcgagttcttcaacagcaccgagggaatcttcgcgttgtttaactataacaaggggcccttcacggctgggagcgtgggccaccacggcttattgttgcggttgcttatgaataacacatatgtgcctgtggctattgaccccaatacaggagacgtgctt

SEQ ID NO: 24274 - DNA, 773 bp, Emericella nidulans
gcggcaacggcggagaacgacaaccccgatgtccgtgaccgagcctatgtctactggcgcttattatcaaataccagtgacccagatgctgctaggaacattgtgctctccaaaaagcctccaattgttaccactatccattcccttcctcctgctcttctcgagcaacttcttactgagctttccacattggcttctgtttaccacatgcctcccgagcagttcgttggccagggccgttttggtgcggacgctgttcagaaggctgccattgagtacgtctacgtatgcctctcactgtagtatgtatgctaatgcacctatctagggaacaactccagaatgcgcgcgaaaacccgctggctgctgccgcggcggcggcagttgatggcacggccgctccgcagcagcagaacaatgtggagaaccttctggatatcgatttcgatggcactgcgcctgcatctgctcacaaggaaccaggcggtggtgtgtctggtctggatggtttagctggcacccccgtccgtgttgactctcctgcaggtggtgcaccttcagggagcaataacctggacgacctccttggcgtttttggggacaatgtccagtcctctacaggcgcacatgcgcctcccactggtggtgcgggcgctgaccttctcaatggcttttctgggttggatctttccggcaacatgtcttcaccgccacctgcgtcacagtccagccagccgaagaaaactaatgaggacatcttatcattgttctaa

SEQ ID NO: 24275 - DNA, 504 bp, Emericella nidulans
atgacttccattcggcggatgtccccaacggacctcttctccctcaacctcaccaacctcgacccactgaccgagaactacgatctgggcttctacctgaactatctcatgcgatggccgtcgctctttagcagcgtgaaggaccgcagggaaggaattgccggatacagtatgctttcattttgccctttttcctgttctcccattctttaatgatacccctgtttcattatcccctaccgaatcgagccccgctaatccccgcaatccagtaatgggcaaactcgaagagcaacacccctccctcaaagcctcagagcattacactccctggcatggacacatcactgtcctaactgttgcgccggcatggcggagacttgggcacgcgcgtcgactcaccgagcgtctggagcggggttccgatatcaacaatgcctggtttgtggatttgtatgtgcgggcagggaacaaggtcgctgtggatatgtataagggcatggg

SEQ ID NO: 24276 - DNA, 527 bp, Emericella nidulans
ccccgatgccggcctctgcggcccacgagggtccagcatcgcattctcgagtcaattgaagagtggaggcagacaatctgtcagacatcgcggtataaagatgatctggggcatatccgtgatatgcaccggttactactgtacaaaggctatgtatttccggaaattcggcgcgaggatgcggctgttttgaaccctagcgatgtatgttggcctacggatgcatgtcagaactgtgttgacctgggttgcagaatctgcgttcggctgaggagatggaggaggaggagcgagaagcgcagtcggcgaagctgcaggagctgattcggagaggaacgccggcagatctacaggaagcaaaccggttgatgaaggttatggcgggatacgacacccggcataagaccgactaccgggctaaggcggcagaggaggtggccaaagttcaggagaaagccaagattttggaagaaatgctgcagagccaggcgccgggtgatcggatcgcggagggcgatgtgtttaag

SEQ ID NO: 24277 - DNA, 449 bp, Emericella nidulans
cacatacactgctccattagggacattcgcgagccagagtctcgcgcttcccatggtgctaagggcgactctcctaaggattctaatgtctccgcaatgaaggtaagctttcgtccatgatacacgatcgagtgaatgcgaacatcgtgcagtccattatcgaccaggacacagacaagcaagcagacatcgaaaagtccagggccaacctgccattaccagaccagccccctgtcgctagtgactggaatcccgccgatcagcgagctgtcaatgttggttcggacggtatcgaaggacccatctcaggcgagagcaactctgctctccgaggtccagccacagcctcaagcagtgctcacgaggtcggagaggagacgcacaggaacacacagccagctagcaatgttggtcggggagacctccctgccgatgctcaggctcggtaa

SEQ ID NO: 24278 - DNA, 713 bp, Emericella nidulans
cctcgtttacatctccaattgatgcgctttacctcgccgccatcttcgatccgattttcacggcgtcatacccaaccaccagggaagtggaggagatctcgctctttgaagcgatcctgcgcgccttcgactcacctgagactcactacgctcctcggcggaacgcgaagaccacctccctttcccaattgcagcgcaaatatcccggtcgccctattgtcacttttgccgaatgtaccaccaccaacggccgcggtattctcccgctctctccctcgttgacgaagatcggatctacgtcgaagatcttccccgtttccatacgctaccagactgaggatattgtcaccccaataccgggccattatattggcttcctttggtccctgctcagtaaaccaactcattgcatccgcgtccgcatcgcggaatctgtcacgatggccggtagtggcaacggcatgaccgagaaaatgaagaagtctaactacgatactaactactttgatcttttagacgaggtaagtgcatccaaaggaggagtggcttcttcgagggatagggtggaaattgaccttaggcctaccgagaagaaccttctggatacgggaggggatgcgcttgcgaggtttggccgggtgaagcgggttggcttaggggttgctgacaagattgatttcttggaggagtggaggaagatgcatccggcgtga

SEQ ID NO: 24279 - DNA, 540 bp, Emericella nidulans
atggcggacgcccaatttgatagtgcgctgtaagtccttcacttgaaaactgtcttcgcaatataccccgcccattccaaacatgtctaccccaaaccaaccccgcctgcaccctgcacactccgctgacacggacgccatggctgcaccagcgacctcctccggcgcctgaacccccgtgacacaaagcagaacctccaggcaattacctctattgtgcccgaccttaccgaagaccttctatcatccgtcgaccagccgctcgagatccgtcgatgtcccaagacaaagcgcgactacttactctgcgactataaccgcgacggcgacagctacagatccccctggagcaatgagtttgatcctcctcttgacgatggcacagtaccgagcgagcgagtgagaaggctggaagttgccgcaaatgaggcgtttgatgtctatcgcgagctgtactacgagggcggtgttgggagtgtgtacttctgggatctggacgatgggtttgcaggtgttatacttctgaaaaagggtgcgtcg

SEQ ID NO: 24280 - DNA, 608 bp, Emericella nidulans
gtggtgattccctctacaacagcccttctgcaacagacgtcgcagacctgtcgagtatatacaaccttgtatcgtctgccatctccaaagcgacggggacggtcttagctttggcccttctcctatccggtctctctgccggcattgtctgctccatggccggacaaatggtgtccgaggggatgctcaactggagtattcgcccttggctccgtaggctcatcacccgttctatcagcatcatccccagtattgtgattgctggggcggtggggaaggaaggccttaataagacgcttacagctagccaggtcgtgctcagcgttatactaccctttgtcagcgcgccgcttgtttattttacttgccgcaaccggtacatgactgtgcccatggagcgggtacatgatgcagatgcagatatagatacagacgagcagacccagcctcagaacgccgcagaaggtgacgacaacggtggcagtgctaccgacggcgtcaaaatgggcaatggacttcttgtttctgctatagccgtcttggtctgggtcattatcgcggtcatgaatgtggccttgcttgtccttgtagggatgggcaaggcttaa

SEQ ID NO: 24281 - DNA, 1009 bp, Emericella nidulans
catggaacaccgaggctcttagcacaccaaccaagccgtatactctactcgactttgaagatgaagcatccgttgcgagctgcaagaccatggccgaccgtgctgtgggagggttcagtaccgccagcctcgactatatccccgccgattcttcaacaaacactcctgcgcacgcgaggttccatggaactatctcaaccaagctgcccaataactggagggtagaaaggacaggtgaatatcccgcgcatatgaggatgatcagagaatgacaagttctttatcaggatacgccgccttccgcaaccaagaccggggcttctggctttttggccggctatactgggaccttgacccgtacacctacctagcactgcgagtcaaatccgatggccgtcgctatactgtgaacattcagaccgacaccatcgtcgagaccgatatccaccagcatcgattatacacccgccaccaccacgtgcggaactccgaatcctcatcctacgatcccctttcaccatacgcatcacccgaagctgcagagtcgcccgaactcgccgaagccaaatatcccaccggaatcccgcctgctctctccgacgttccaccgccatccactattatgtcgtctatgtccgcgacgacatctggttcgaccggatgggagacaattctgctaccattcaactcctttgtccggactaatcatgggcttgttgtagagcctcagacttcgatcatcagacagcgagtgaagagtgtgggcattggtttaaccgatcgggtcgaaggcccttatgatcttcgcatacatcgtatctgggctacaaacgggatgagtgaagccgagattgaggaggagcgtcgaatttgcggaacagctgccttacctgttgatgagggtgtccgaacggggtgggttgcatcggatgacgccaaacttgagaaacatgggaagcaagagcacaagccaaaggggctgaaggggctacgcgatgagtgggactaa

SEQ ID NO: 24282 - DNA, 813 bp, Emericella nidulans
gaaatgacttcttctattcccaatggcaaacgtcgtcggcttgaccaggcgacaaccactctctccagaccgttcaagtctcctctccgcagacctactcctgcagtgaaagacgaggctgcgtcatcaaaaattgagggaatggcagcatctagttctttcataaagaccattacacctgatgggcaggataacagtactgcgctttctacttccagcacaacaaatgcacctgctacaccaccaccaacccgcaaaagaacgtttcctgggcagcgtcttacgcccgcaaggaagcccgtaccctcagacccagagataatggatctccagaaacgacaacgcgagctacagtcacgcttgtcgagcttgcggtccgacctcgacactgttcagcaagccctgaggatagagtcgtccagtaacgacgaggaattggaggtactgattatgaagtggaagaaagttagccaggatgcagcagaagaggtgttctctggtgctcaggagcgaatttcgcgcatgggaggtgtcaaggcgtggcgggagcgaacgaataataacgatgctcggtgggagcaggaggagatggagacctggttcggcaatgtggatgctgatgcacttgacatggatgaggatgaactgcaggcccgcaaggctgagctgagggaagagatggagaggaagaatgtgaaagggtctagtgatgattctgaggttgcttctctcttcattctctttatggtacatgctaagctgaactctccaggagtttactatggatatgatgctcaagatgctcaacattga

SEQ ID NO: 24283 - DNA, 254 bp, Emericella nidulans
tcaaagagcgccttgaggccgccaaacagggctcaacgaaaggtcttcccggcatggacagcaacggcggcttcagcttcgctggctcccgaatcgctaagcctctccgtggcggcggcggaggcaacgaacctgtcgcggccgtccagtcccaggatacaggcaccaagcgcacaagttggttttttgatagacgatgatccacgaattttcctcttttgttgtctattttatccccttcctgcagatatcta

SEQ ID NO: 24284 - DNA, 220 bp, Emericella nidulans
cactcaaactgccgttgccgccgccaaccgcaaggagtcccgtggtgcccacgcccgtgaggactaccccgaccgtgacgacgagaactggatgaaacacactctcacatggcagaagaagcctcacggcaaggtcgagatcggctaccgcagcgtcgtgcacaacacccttgacgagaacgagtgcaagcctgttcctcccttcaagcgtgtctactaa

SEQ ID NO: 24285 - DNA, 486 bp, Emericella nidulans
ttccaagaaagcttcaagcgcgtcccgacaagcagaatgctgttcaacaatgcctgcaccgatattctcgccattgcatccgccatgctagacggcgaactcgagtatcgccgcggcaattacgactctgcgttcactcacctccgccgctcaattgaactagacgacaatcttccctacgacgaaccctgggggtggatgcagcccacacggcatgcctatggggcgctgttgctcgagcaaggaagagtcgaggaggccgagggtgtgtatagtgctgatctaggcatggatgatactctgcctagggcactgcagcaccccaataacgtctggtcattgcaagggtggcatgaatgtcttgtgagacttggaagactcgcagaggccaagattgtcaagcagcagctaaagtttgtggctgctgcggctgatgttgaggttgatgcttcttgcttttgtcggaggactgtggatgtgctttga

SEQ ID NO: 24286 - DNA, 744 bp, Emericella nidulans
accatgtcgcacttactaggcgtttaccaacgctcaaagcgcattgaagtttcctcgccgatgccatatcgtgaaggccaggtaaaattctcgtccggtacgatcaagagaggcaagatctctgggccggtcgaactattgtcaacgacgaacatgcttgcatataatgcaccagatctccactcggcatcgtcgtcctccacctcgtctttgcagtcacctgatgactcggatcgttcgtttagccagcacagtttttcctcgccgcttactacacctgatgattctcccatcgaaccgaatcctctgtcagggtattttccaaaacggtccgcaactgtgaccagccatccgcgctcttcatcatcgactacgtcttcaaatgatgccccaatggttcccaggcgtgctctttctcacaccaagcggaaccaccaagagctggcgcgccagcgttccttgaagcgcatgtctcctccgccgagctccagtagcaacccagaacggctagcttacgatacttatcatgcggagcctcacccgttcggcaaagagttggagcaggtcaacgaagtggtcgaggaatttggaggcgcccctctgtttgacgaggaagagcagattctgcgcagaaagggactcaagaaattttccgtgaatgattatctagtggagattgaagacctctatggcagcatcttcaatgatcggctgggcccgatagcttccacatcgtggctatga

SEQ ID NO: 24287 - DNA, 520 bp, Emericella nidulans
agcgcgggacaaactatcaagatggtgtcttatggcgtcgccctggttggcctgatcgtcagcggcactctctacctacatgtaagcgttcgaaggaaactgactttctccattctctctaatgcatatcacaatccaccaggtcggtgcaaaatacgtcttcgttcgcatcctcggtaaaacttctcacctccagtccaacagcattatccactggggcacctggctagcttgcacaacattgctcggagcgctggcctttatcctggccgaatcgatcccaatctttaattacctcattgcactcgtcggctcagtctgttttgcgccgcttgcgatgagtcttcccggactgctctggctgtatgaccacgggcactacaggaaggagtcgcttatgcagaaggtcgtgtatttgctgcatatcggcctcgttcttcttggtgtcttcttcctggttggcgcgacgtatggagtcgtcaagcaaatcattgacgcctatgcgactggacagatcggt

SEQ ID NO: 24288 - DNA, 1179 bp, Emericella nidulans
gaaaacaaaccacaaaatgaagcagagatactcttctctggatgttcaggtaagcgcttgctagaaacattcgaaacaatgttccctaattatgacacctgcaggtaatatccaaagaactggcctcagaactagttggccttcgcgtgtcgaacatctatgacctttcaacagtatgttgcataaacaaatctgtccctattgcgaataatgaccccttttcctacctagagaatcttcctgttcaaagtcgccaaacccgaccaccgcaaacaactgatcgttgactctggtttccgctgccatgtgactcaatactcgcgagcaacagcagcaacgccctccggcttcgtgagccgccttcgcaaatacctcaaatcccgccgcatcacttcagtaacccaaatcggcactgaccgcatcatcgacttcagcttcagcgatggcatgtatcacatgttgctcgagttcttcgcaagcgggaacatcattatcaccgaccgagactacacaattatcgcgcttcttcgtcaggtaccaggtggtgagggaatggaggaagcaaaggtcggtttgaagtacaccgtgacgaacaagcagaactacagcggcattccgccgatcacgcgagaccgaattcgagagacgctggagaaagcgaaggctcttttcgcgcaggaaaacgacgcgcccaagaagtcgaagaaaaagagtacagacgttctgcgtagggctctatcccagggattcccagaatacccaccgctcctactggatcatgcctttgcaactcgagccgctgaccccgcaatgccgctcgatcaggtcctgggcgatgcgggtcttattgatgtggtcttaggtgttctagaggaggcacagaacgtaaccaaggatttgtctgcggataaagcacatcctgggtttattgttgcgaaggaagatacacgtccaaagccgccaggaccggagtctgaaaaaaacgactcgccctcgaagcctgctctactctacgaagatttccatccattcaagccgcgacagtttgaaggaaaggacggtttcaccattttggaatacccttctatgaatgcgacggtcgacgaatattactcatccatcgagtcccagaaactagaatcacgattgacggaacgggagagtcgctccaagagagag

SEQ ID NO: 24289 - DNA, 444 bp, Emericella nidulans
atgtcagcgaactcgcgtgaagctgtaaactaccgactaccgcggttagagctccagaatgcctccttccgacgacgagcatctgcacagctctctggctcaaaggcacagagctgtaggtatgcttctggtttcttgccccgacttgcgaaaaagattgtaccgatggcgcaacgccccgggggtgcggccgaacaatatattgcctacggaatgacccagagattattcgaggcttgttccaagcagggggattacacgatcccgcagctgaaagaaaaaggggctcaggttcctaagaccgaagctggggaggatctgggtgttggagagggatggtggtataaaggtctgctttcccctatgcagttatttgacgtcgagccattggcgctgacgtctttaataccagagttgggccttgttccgacattctcgacatgg

SEQ ID NO: 24290 - DNA, 741 bp, Emericella nidulans
cggccgttcgtttcaatcaccggccatgagactcatcaacccggtactgccgctaattgttggcgtactttcgctatttacagacagcgtactaggtaagttttcgggaccattgtacgaatcgcttcgaccatgcttaccagagatgaagccagatcacagacgcctagcgctatccgacgagtttcctcccttgagcagccggcgatcagggctgccggcagaacctaccgcgttgaccatctttcacattttgatatcacctttacgataagagacaagaaacagcggataaaacttgagctagaaccgaactatgatattattgccgacgatgcttatgtgcagtatcttggagcggacggtaaagttcataccgaagagcctatcgcacgagacaaacacaaggtctttaaagggcgaaccttgataggacgaggaaaaggacaagggatgtgggagcctgttgggtggacgaggatatacgtgaaagaagacggacctcggccgctctttgagggtgtcttcaatattcgcggcgacaaccaccatgttcaattgcaatcgacttatcttcagagaaagcgtcctcaggatgttgacattcccagacaggacggagagtatatggtgttctaccgcgactcggacatgctacgagcagaaacccctgcacgtgtggatctcaaacggtccctgtccacggacgactcgcatgaactcgaatcgcgctgggacatg

SEQ ID NO: 24291 - DNA, 663 bp, Emericella nidulans
atgcattcttcaatcggaacaagtctcctggtattcgccagcatcttcttgggattggtacctgctctggctactcctgaaagcggcaatgatgactttcccgcaggcgataatgatattatctcgcgtgatgttgccattatcggcggcggcgcctcggggacgtttgctgcggtccgtctgcgggaacgaggaaagaccgttgttctcattgagcgtgatgatcatctaggcggacatacgcacacatactacgactctgacggcacgcctattgactacggcgtttgggtatacagcgactaccccgtctccaggagtttcttcgctcatttcaacattacattgaccaccgaattccttaacggaaaccctgaagcaacccagcgagttgattttcgcacgggacagcccgttgccccgcctgtcggcaatgtcgttgaggcaatgacgcgctacactcaaatactactccaatacccttatctgatggacggatgggatctcccatatcccgtgcccgaagatctgttgctatcgtttcaggatttcatcgagaagcatgatcttcaagcagccatagagacgctcgcgctgtatatgcagggatttggcgaagatttacaggtccccgccgtttacgtcatgaaagtattccatctg

SEQ ID NO: 24292 - DNA, 965 bp, Emericella nidulans
ccaccgaagccttgaagatcttccaccgtgctgttgcagagggtgttgagcccacatcgttcttgtacaatgctcttattggcaagctgggcaaagcccgtcgtatcgatgattgcctccagtacttcgccgagatgcgtgccaacaatgtccgacctaccagtgtcacctatggaactattgtcaacgcactttgccgtgttagcgatgaacgttttgccgaggagatgtttgaagagatggaatccatgccaaattacaaaccccgtcccgcaccttacaactccatgattcaatatttcctcaacacaaaacgcgaccgcagcaaggttttggcctattacgagcgtatgctcagccgcaacatcaagccgaccatgcatacctacaagctccttatcgacgcgcatgcttctctagaacccgttgatatggaggccgctgaaaaggtactggagactgttagggcatctggacaagaaccggaagccgtgcattatgcgtcgctcattcatgctaagggctgtgtgatgcgggatatggaagctgcccacgacgtgttcaagtctgctgtttcaaaccccaaggttaacgtgcagccttgcctgtaccaggcccttctcgaatccatggttgctaaccgccaggtcgcgcagaccgaaactgttgttgaggacatggtcaaacgtagggtggagatgaccgcttacatcgccaacaccctcatccacggatgggccgccgaaggaaacatccaaaaggcccaggctatttataacagtgtcgggattgaaaaacgggaaccaagtacgtacgaggccatgactcgtgcgttcttggccgccgacgaccatgcgagcgcttctcgcacggtgcaggagatgctctcccgcgggtatcctacggccgtggctcacaagattgccgatcttgtgggcaatggtgcagtcacagccactctctaa

SEQ ID NO: 24293 - DNA, 657 bp, Emericella nidulans
tttcccgactttcgcgccgccaaccctcaatatacacactttgtaggcggcggcctcatcttctcacgcactgcaacaaaggatattcatgaagggactgaaatagaggaacggcctctccgcgtcctcctcctccagcggtcttttgacgactcctacggcggccaatgggaaggacccggcggctcctgtgaccccgaagatgggagcatcttagacggagttacgcgagaggtactcgaagagtgcggtctgcatgtctccaggttcgtcgagctggtggataagaccgagtgggtgaagcagcggcctgactcggtggacttggtcgccaagtttacgtttattgtcgaagtgcatgaggcgaaggctgctacccctgcatctgaggtcataggaaatgacgcggggctaccagctgataagctgaatgatgggactgtttctccatcgctggagagacggtgggaggagatggtgaagctggatccggccgagcatcgggattttgagtgggtgactgagaaggaagtaagggaagccgaggatggaacggggagttttaaatcgtttgcagatatgggcaagaccatactggaggcctttcgaatattgagggagagggaggtgtccagtgaaggtgttgatgttaagtag

SEQ ID NO: 24294 - DNA, 300 bp, Emericella nidulans
atgtcggacacctccatcaacggctggaagctgacatcctcacttggtggtgctattttgcagccagagtcatcagaatcaaagatggacctaggcccgtatcttgcctttgatggcgtgaactatgaatgtactatttgcgaaaggattttcagttctgaaacggctctgtatgcacattgcgaaagtacatcgcgacattcgtggtgcgcaaggtgccgccgggtgttcgtttcgacccaagccagaaattctcatctacaagattccaaccagcattatatctgtccgagtgtcccg

SEQ ID NO: 24295 - DNA, 1154 bp, Emericella nidulans
aaacctcgcagtcaactcagcgagaaccacccaaactggcgagccctgcttcgcaacgcctggctgagctctccaagaacgattcacaccggcctggcaagtcacggttaagaagagccttttcatttggtagcgcctcggaactcctcaaggcctcgcaaaacagtcaccgcaaagatgggctttcggtagacaagtctcgcagggaactcctgaaggaagagctgggtgccgaacaagctgccatagctgaacagcaagaagccagtggccttggagaaagcatatactcccaccaccagggtcgtttcttcaacagctccacggataacctatccatctcctccaccgcttcctccgcatcaatcatgttacggaaaatgggcaaagggatgaaacgatcgaccaggtcactagttggcctattccgaccaaaatcagtcattgcatcttcaccagatgatataacagcggagccaatggcgccacaagtgtcggtcgtgaatatcgaagcagaaaggaaaggcgttgcggcaaatgcagatcctacggatcttcctcatggtggaaccgtatttcccaaggtggattccacggtccttcccgcttctggccaggatgacctgacagaagcgctgcaatcgcgtaaaagcattgtaggaggagatcgggaacgcgcagaggtccttgcagctgtaaggaagggtattctcaagagtaagttttacgttctgaactacgacttttgcagagcaacctgctaatgctgtgccatagaaaccaactctgacatagcactatccgcagccgctaagtccggcaatgttacagagaatggcacggattcgccacaatccagcgcgccaagtacacctgaagatcaacctcggacggggattcgacgcccggacgcggtcaaaattgccggtgaagatgaggtacctgaagcgaaaaatggttcacttggaccaccggcggtgccttcaaagagcctcgtgttcagccctcgaattcagttccacgagacatggcccagcggggagtatgaccgccggggagatatcgcgacttgcaaccgactcactccactactcgctcagcagattaaggaggagctgaattcgttcaagatggttagctattacatggtcctc

SEQ ID NO: 24296 - DNA, 1304 bp, Emericella nidulans
gttcttctccccgtgaatcactgaagaagccggatactggagataaatctgcagttaagggcacaccgttcttacgaatggcgcttgaaatgctctccgccattgagcagatttctccccgagtggccctttcacttctcgacttcgtctctaatgctcaagaacattggccgtgggcaacccccgagctcaggaaacaagccaacttcttcacgagtctcgtgaactatgtctccaagctgaatatattatctctttccagcattgagcaaattttcgccacccggatagctgccgttgttgccgatatttgtgctgtttatttacattcggccaaagaggcgaaggaccagaatttttacaaaacgctgtttccgctggtatcttggtacgcgaaggccgctgttgaagtctctggctataatggctccctacacgccaacctcaagagaaattttgagagcaggtattcggggtgtaaactagacgattttaagaggacgcctctgctgccacggagtcttgggcgagagtattactacgatatccagatgggcaaaaagctcctttcctatgattttgcgtgggaagggtccaagaaccacggatttgctgaggagtttgagcgtgctaatctcaacttgtcgcttgttgaagcccaagtggtatgtacaagactctcgatttactggataagatctaacagagtcccttcgacagagccttttgcacagttggaaattccttgccattgagcattgcgcggacttcatctctgagagcgaaatccaaaagacgatagcatttgttgtcaagagctgcttagaggcaaatatgaatggagtcccgcaggaggccatcttcgagcgaattcagcaaacacgggtcgatttcgcacagaatctcctgcaacgcctcgtagaaaaaggatctaagggcgttgaattctccagccttcttcaggtggtttgggagtcattacgaagtcgccggcccacctatgaagatgcattgatcaacgatgattccgaatactaccggtcgcttttgaacacccttttcttggccttacagttccatcttgatggcggcgcgaaagcagcgcgcgaactctataactccaaggcggacccaacaccggacctggtcattgttgttgaaattgtgaagactgtggtagcacaaggtttcaggtcactgacctcataccttcacgagcagccagagaagtgcacaccaaaagactttgccatcataaccgcaattttgcaaagctcactccaagtgaaggatatcgatcggat

SEQ ID NO: 24297 - DNA, 489 bp, Emericella nidulans
atgccccccctcaagctcaacagcaagaacctcgccgcgatcctgaacgccggcaagggccagattaaggtccctacctaccctcgcaatggcgccgtcaaggaaggtattgtccatatcggcgtcggcggcttccaccgagcccatttggccgtctatatcgaccggctgatgcagaaccacggcgtcactgactatgcgatcgccggtgttggtctgaccccctttgacaagaagatgcgcgatatcctcaggtctcaagaccacctctacaccgtcatcgagcgatcggccaagggcagcttcgccaacgtggtcggctcgatcaactcgttcctctttgctcctgacgaccgcgaggccgtcgtcgccaagatggcccacccggacacacacatcgtctccctgactatcaccgaatccggctactactacaatgagaacacgcacgagctcgtaagcgagcacccggacatccagtttgacctc

SEQ ID NO: 24298 - DNA, 833 bp, Emericella nidulans
atgtcgtacattgcgccaattcatcgcgccagcagcattcggcatgcattgaagctgcatttcttgaacgctgaggacgagtgcctagtagttgcgtacgtacccagaatctcgcgatgagaactctggagccgcagattagaggttctttgctgacactttgatattctacagaaaagcaaatcaactcgaattctactccgtcacacccgatgggctcgccctcgttacatcatgctcgatattcgccagagtaacgatgctagcatgtctccccgcacccgcaaactcgccgacagaccacctcttcgtcggtacggatcgctactcatacttcacactctcctgggatagtgcacggaaccaagtcaggacggagagggattatgtcgatatcgcagatccgtcttcccgcgatgcacgaacggggagccggtgcatgatcgatccaagcggccggttcatgacgctggagatctacgatggcatgatcgtggtaatacctattatacaactgccgagcaagaggagagggcgacaggtcgctttgcctactggtcccgatgctccgcgaattggagagctgggtgaaccgatcattactcggattgatgagcttttcgtgcgctcgtccgctttcttgcatgtgcaagctggttcgccgcggttggcgctattgtacgaggacaaccagaaaaaggtcaaactcaaggtccgtgagttgaagtacagcaccgcggcaggtgctgagtctgaatttacaagcattgcggattatgcgcaggaactggaccttggggcatcccatctcataccagttcctgctccactcg

SEQ ID NO: 24299 - DNA, 482 bp, Emericella nidulans
cagctcgctatcctctccttcctgacctcctcgcagatctgcatgatgatcaaacgtctctacgtgcacgaaaagatctacgacaagttcctgcaaaaatttgtcgcgtttgtctccaacttcaaggtcggcgccggcacgcaggaaggcgtcttcatcggccctgtgcagaacgagatgcagtataagaaggccaaggacctcttctccagcatcgagtccgagaagctctgcgctgtcttgggcggcacaatcaccgcgtctgacggctactacatcgcgccaacgatcatcgacaacccgcccgagagctcgcgcgtcgtgcaggaggaaccgtttgcgcctattctgccggtgctcaagtggtccgacgaggacgacgtgattgcgcgtgccaacggaaccgacagcgctctggcagcgagcgtctggagtgtggatatggagcgggcgcagcgtattgcggggcagctggccggagg

SEQ ID NO: 24300 - DNA, 1038 bp, Emericella nidulans
ccagcttgtccatgctgcagtatatgagctcggtatccataacccattcgcgaagcccaagatgatggcgttgtgcgtctacatggaagaaaaagaaaacgcaccgacccctggccagtccttggaggagcgccgcgcggtcttggcatcgttcctcatcacatcaatgtattctctcctctcctgttccacttctgctgctgatctccagaatctcgactttcgtgcagaaaacggactcgttgcgctggacccctttcatggccgactgcctgcgccaagtggaggaggagcgggaatgcatcaacgatgagatcctggtccaacaggtccggttgcagcaaatcacagataatatcagcatgaccaccgggctcgcctctacctccgactcaattcaagtgccgcccgccttctatctccgctctatgcacaacgagctacagagcatccagccccgcgttgcggaacagccacaagcgcatagtatgttttctctcattctcacttgctggatgtttgccgctaaacatctcagaaatcctccttctccaccatcactatactaccctcacgctccacgaatccgctcttaccaattcccctataaccaccacgacgctcgatttccagcaactggagcaccactacgcttgtctcgaagccgccaaatcatggttcgagctgttcctctccatccctccggtggagtacatcggctttccgttctcgatttttgcgcagatggtccacaatctagtcgttctgtaccaactttccatttttgagaatccctcctgggatgtcgcgaccgtccgcaaaacagtagatgtgctcgcggttctcgagacggtgatccggaacatggatgtggtagctgccgcggccggattagaaggcgagccggagagtgatgttttctccgttgtcgcgaagatgtataaatctgtgcaggttgggtgggaggttaatctggcgccagctctgttcaatggagactttccgttctcaccgagctttgaacagcatgtcgactaa

SEQ ID NO: 24301 - DNA, 935 bp, Emericella nidulans
ggactggagaagcagaaaggcctggacccggacaaagtgatcgataatggcaagccggcagaggaggttcggatgctggtgaccgaacaagacgaagttcctgtcgcgagtttttccggacccgtcggacctgcgcttatgtcatcctcatccagtccacgcttccattcacgcagtgtatactccccaagtaaataatattcccagggaagaacacgccttctctgtccaccgtcatgtcgtcggccgccaatcaacaacggaaggctgagatactcgccaaaaaagctaagttggcagagctaaaacgccagagggagttacgtcaaaaggagttctctcagtctcgggcaagtacaggagatgcttcagaggtaagcactgttgcgccagtctcagtctacgggctgaatattcatactgactgttctaggtcgtgtcgccagtacctagccgttccgacagtagagctgagcttgatgacctgatttcccgtctcgttgaccgtcctggttcggccgcggtgagcggtgcagatggcctttcaaggaaaggaagccggccgaattcggtgctgagtgccagccagctcagcggggacaacacagaagcactaagcccgcccacgcgaccactttcacagtccattgcagtgcagactgttggaactgagcccttcgtcgccatccctgaactccagccggcccctgaagccaaaccagaagtcgtcacctacaacaagggggtacaaacagatgacctgcggcagggagagcaagacgcagcttctgtcgactccgatgctggagagaccccagattttaaatcctcgagcaagaaacagcgggagcgcgatgaggagattcgcaaaaagctccgtgaggagattgaggaggaattacgagccacccaggaaagtgccaagaacgaaagcg

SEQ ID NO: 24302 - DNA, 1201 bp, Emericella nidulans
atgcttgggcgagacggcgagcgtcatgaggggggaatcgagggagagcaccgtgctcccgatgagagaacgcagctcctgccacgcgagcgcgagcagtatctgagtcccgatgatcctgccgtaggctcatacatttctgacttcatgatttacgggtgactgatgtagcttctcgaccaggtctccccctacaacctctggagtgtccgggctctgcgcggcctttcgaccgcattcctcgcagtcagcttcatctggtggacatttctactcgtctccctcttcgtcagtgcaccggcactgcacacgcgcggatcaggttttttcgcatttgcatataccacgttaacggttggatacatcctgttcgggctcctctttttctcggtcccgtcaaagccaatgacggtgtggggtttcgtgcttgctatattcttattcatcgatatgtgtataacagtggccgtaccatctattcgcgttgaagaaggctgggtcggaattgccagtgtagtatgggcattcctcatggcactctacaacatcatccagaaccgctacgttgcttggggtaaacgcgaagaggaagaacgcctgacaggccgcgaggaaacccgctggactttacgggaatggcttgctgtcctgactgagactcttttcatggctcttatagcaatcatatcgatcctgtttatgataacactcgccctccgtgcgcgcgacgcgacccttcatgctcctggccagaaatactgggtcagcgcgcacaactaccaagtccacctcgactgtgttggcaattcatcttacagcaactccccttccacagtcctcctcgaggctggcgaaggccccgtcgagcacactctacaaccctttatcaacgagctctatcaaaagggcgccatcccacgctactgctactgggacagaccgggtatggcttggtccgacaacgcaccatctcccttctctgcaggtatggcctccgacgcactctccgaagcgctggccctggccggtgaagagggccctttcgttctcctctctgcaggcataggaagcatatacagccgtatctttgcaagccgccacctccttgaaaccaagggcatttttctcattgaccccttgcacgaagactacctctccgatattgccagcccaggccgcggtttttggctctggatccgtg

SEQ ID NO: 24303 - DNA, 761 bp, Emericella nidulans
ctgctaaagggagagcagtccgagttggatcacgaagacgaacaggcaatcatttggtcagcagccagtctatacggtgctgcggcggataccacagttattactcttactacgttcaccctagccatgatcctgtttcccgatgtgcagcgcaaggctcaggaagagatcgaccgtgtagtcggaaaccgcctgccaggctttaaagaccgcgaaaagctgccatatatcaacgcgttagtcctagaggcgctgagatggtggccaattgcacccatgggcttccctcacacagctctgagggttttgaatacaacggcctttatatccccagggcgcatacctcctccggcagttgggtggttcctacatgaccatcagtgtatgacaacccggaaatattcgacccagaccgtttccttgagccacgaaacgaacccactcctatgactgaggcctttggttatggtcgaagaatctgccctggccggttcttcgcggactcaagcctcttcttgaatattgcgcaatcattggcagtctttaacttcaagaaggcagtgagcagtgacggcaaagagattgagatcgacgttaagccaaagccaggcctcctcacgtatccgactaagtttgatttccgaatcgagccgagaagcgagaggcacatacagatgatcagagagctggaacgacaagaccctctggcagcgggcgatgctgagcacctggagagtatcgacaatttccagcccttgtag

SEQ ID NO: 24304 - DNA, 708 bp, Emericella nidulans
atggtcaacagcctatctctagacacggactctgttgcccccgccgctcagccttcgcaggctatggttgtcgccacgaacgagaaaggctccgaaaagcatgcaaacgagtatccattcagctggaatgctttctacatgtgcctgctttttggtgccttcatcgcctccaacagtgcttcactcccagctcgctctcttccgcgtctctctgaggaataccgcgcagaatctgcaaatgttctcaaggcagtgctggcttcgtcaccaccagagcttgcgcaatcgtcgtcgaaccagcctcctgtttcttcgtccgttgggttgcttcccacaaccattactggtgctgagatggcgcagatgacagggtcagcaccgacatcgaacctggacgagcttcatgaaactcttgcgatgccgaccaaggagcaagaacaggagcaagcttttgctctcaacgctgagcagtataattcgctcaccacttttgatgaaactggcgccggctacaagtcacagcagccttctaatctacagcaggcattggctgcaatgagaggcaatgctgcgcaggccaggacgcctctcaaggctacctctgatgtctactcccggtcccttctgtgggatcgtgttcctgaaaaggtgattcgcgacttccggcgaatggtccaggaatacggcgcccctgctgcccgagaataa

SEQ ID NO: 24305 - DNA, 573 bp, Emericella nidulans
atgccatctacctacctccagtccctccaaaaagacggctttgtcgttattccctcgctcctcccgccgtcctctaaggaatttgcaaaccttaaacaagccgccataactgcaacaactattacccgaactggtgcctggccttacttccgcaccgttcccaagcagtttccaccgtggccaacaaacgtgccacctcctgcctccgagggcggaatatggggggtgcagcacctcctgcaccccgatatgccgggaagagaggactttgcgaggttctatttcgacgacagaatcttaggagttgttgaggaattgcttggcttggattctgctggcgaagaagcaaagaaggatgataacgagatgctagtaatggagctctttaaccttctcgtcgcaccggagacgcatgacttcgcgctccgttggcaccgtgacgatatacctgagaccgtatcgccagctgaggaggagaagctcctcgcgtctaagagccctggtggtagacagtcacatgcgcaatacaatcttgccctctgcgatgactcgtcgctaatcgtgattccgggc

SEQ ID NO: 24306 - DNA, 374 bp, Emericella nidulans
acatcgcatctatctcaaaggtcgaaggcaagaattggcgccatggagatatcgaggacatgctcaagactatcgccttcatcaagggtcataaatggacctcgaacatggtcaagcgggtgtactttggaaactggttgagagattagtgagtgaatctcagttttcgtttgttcgccaaagtatgggattatgctaatgttttgtgttgcagctctcaggctatggacgtcggtaccctcaagagtcttcccgccgatactatacgcatccttgtctggatcctttcgttcctgtcgtttggctatgcgacggctgagtttgaggttacggctgacaggctcggggtttaccggccagaggagcatattgag

SEQ ID NO: 24307 - DNA, 1267 bp, Emericella nidulans
agaacattggtccccttgtcaagaccctctatgaacagatgcattcagtgcactcgttgtgttcggttcatgaacgacgttgctggcgcccccgaacttggaaccaccggtagagggaacgatatgcaaattggtacctatctagagcagaatttggatacagagctctctggaaacatcattgatctttgccccgttggcgcgctgacctccaaaccgtatgccttccgcgcgcgtccctgggagctgaagcataccgagtcgattgatgtacatgacgctctgggctccaacgtccggatagatacccgtggaatggaagtgatgcgtgtcctgccaagactcaacgatgatatcaacgaggaatggattaacgacaaatctcgttttgcatgcgatggcctcaagactcaacgactcaccactcctttgattcgacaggaagggaagtttgttcctgcaacgtgggagcaagctctgaccgagattgcatcggcataccaaaagcttcaactgaaagagaacgaattcaaagccatttctggtcaccttgtggacgcggaaaccatggttgcgatgaaggacttggctaacaagcttggctctgataatcttgccttggatcagcccggtggtagctcgccaatcgcccacggcgtcgatatccgctcaaattacctcttcaactctaagatctacggcatcgaagaggcggacgccatccttttggtcgcgacgaaccctcgccacgaagcttccgttctcaacgctcgcattcgcaagcagtaccttcgctctgatctcgaaatcggtctcgtcggggaagctttcgaaagcacatttgactttgaacaccttggttcagacgttgctgctctgaaggccgccctgtcagggaactttggcacaaagctggcttccgccaagcgacccatgattattgtcggcagtgctgcggccgaacataaggattcgaaagcaatctttgaggcggttggtagctttgtggagaagcacgccagcaacttcaacacaccagagtggcaaggttataatgttcttcagcgcgcagcatcgcgtgctgcggcatacgaaatcggcttcacgaccccctctcctgaggtagcacaaacaacgcctaagatggtttggctacttggtgcagatgagattaaccaatcggaaattcctcgcaaagcgtttgtcatttaccaagtacatcacggtgatcgtggggctcaaatcgcgcatgttgttctcccaggaa

SEQ ID NO: 24308 - DNA, 1724 bp, Emericella nidulans
gcgcggacatcctccaagcggtcaaccgggtggcgaacctgattgaggctcaacagagagaccaacggcggcagcagcagctgctgctgcaggggatgccatgtgcatcttgtgggtctcgctcgacgcctgcttggggtccgacttcacaatcctggtctccgtcagcttgcagccaaccagacaatgctaataatctagggccaggccacccgtggccacgcgagaccgttcgacctcaaggggtcgaatcggtcctcggctggcaaatattggccttgaatcttccaccgtctcggtgtctctttgcacagccggtggccgaggccgatcagccgtcctcgctgcctgatatgagctattcccagctctcgcgtctggagtcgaagtacattgaagttcttcatacaaagaatccgattctagatctgaatgaactacatcgcatggtgcttcacgtcgcggagaatgggccggattggtccacacgaacctgcttggtagccctggtctgcgccattgccgtcctttctgaggcttatccagggactatcacgagatctgcggcgcagccaacgccttcactggatccggacgatgagagcggcgccgacgtcaagttgtcgctgcagttttggaacattgctctgaaacgtcttggctacgcaatgcgtgagaacagtgttgaggctgttcaaaccctggtgctagcaggaatctggtacatgcatcgaatggaacccctggaagcctggaaacacttcaacctcgccggcgcagcctggaacaccctgaggttaactcgattcccagtggttgatctgatagacaacaccgatacgacgcccaacgagctcactatattacaagcgctctacttcactatctggaagtcggattgcgaactgcgactggagttgccggtgccaggcccccctctcatcaacagcacggaattcccgttggcgtttccccagccgcccaggcttggttcgcaaccgtcgacgcccgatgcgtcagagagtgagagaagttggtattattatctcacagagattgcagcgcgacatctgctcaaccgtttggtgcaaatgaactcggagtgtgccgacacgccgacggagaggcaggtgacccgtctggtcagccatgcggagatgatgcaggctcaaatatccgactggtatacttcgttaccatccatctttcattttgccatcccggatggctatgatgctgatttcccatctgatcctatgatatttgttcttcggcatcggtattttaccctccgggagctcgttgcgagaccttttgtccggctcttggttgatgggctacttgacggaatggatcctttgattcgtgtccgagcgcggtcattcgcgtcagagtgcatgcaattctgtatgctcaaactgtcccaaaccgtggcataccgtcatcaaggaaactggtatctgctgcgatccatgacgacttcgtcattgatcctggccgccgttcacctggcacaatgccgactacgggagggcgaagctgccggcgccaccccaccatcagagaacctgatgccgccagaagcgtggatatcgcgagtcagggatgctgtggagtcagcccagccatttttcgaggaaacgagcggtggcgcttcgaatatgaagcagatgatcttggccgcattaggagctgctcaacaacgttcggcgtggtgcggttag

SEQ ID NO: 24309 - DNA, 1805 bp, Emericella nidulans
caatttaaggctatgattcgaagtgtccagggagtcgacgcgctgcaggaggataccgtggataggggtctcgttattaaggtccaccgtgatctggaggaattggagtcgcgaaacaagtacttatcgataacagcctctgccaacaacttgacattttctttcagctgcacatactcactccttcagctgcgcatcgccatgggatcagatacaccactacactcgccacatgaaatgctcaattttagcatctcgaggtcctcagccgcagtgctctccccgcggctgggaagactgacgatcgcaggccgaaagcccatcttgacgccccactacatccctctgacatcgcgaggggttgtccctcatctagcacatgatgtgatgcgcgataatacctctattggtagtctgtatattggcctagaagattgtacgtgtcctgagattgaggaaaggcgaagcgaggcatactgacaagtcaatgcccgccggggctcagatatcagtcatagagaagcagcacctgcagtataaaaagtcttcactacctgggccggtgggtgcatgtcccaaccgcacctcatgaatcggctttgcgcaagttcatttgtgccgccgatgacctgctcctggctttcggcgcacgccgcgaacctccaattgcttctggaccggcaaatacagacacgtcaattgctgtacttacatcggtgggctatgcgcagctagaggcgaacgagtacgtcggagctattcagcgcctcagcccagacatcggggtcgggctggcagatctgctagtaggccagaagccaggtacaaaacagcgagtgaagatggtcgaccggacgcacgcttttaccacccatgcgacggataacctctacgggccccagctctctgaacacagtcggtcgacagcggcgtattttgccccgatattgcccgttgagaacacccagcagcagctttaccttgaagatctggaaacggacttgcggccatccatttctggcctggcgctctacgaacccacgtcgctctctatcgtccccgagtcgctgggtgacctcccgcgccttcttttcagcgggccaagaactccgcatgatctcctacgcgaagttgagctcggtgcagacctcctcacgatcccgtttctggccgattcgtcggatgcagggatggctttcaccttctcctttccggctccatcagataccgcatcagcatcaaatccatccaccgaaccccttcctctcgctgatgatctttggtcgcgatcaaatactacaaatactggcccactaagtgaatcatgcgcttgctatgcttgtcaaagccatcatcgcgcctacattcaccacctcctctccgctaaggaaatgctcgcatggacccttctccaaattcacaactattatactatggacctcttcttcgctaacgtccgtaagagcattgagcgcggtacattcgaggcagatgtccgcacattccagcaaacatacgtggctgagtttcctgagatcacgggtcaagggccgaggtacgttcttccagagcttgacacaatcatccactgtgtataacgacgtgtactgacagtatttggtctttacagactccgtggctacaaaatccccacctcaggccccgctcaaccgcgccgtaatccaccagcttatggaagactaaacgtcgccgcggagaagtttgtagagtcccagtctgatcttgcaacccctgatacgggggctgaggggttagaagagcacgggttcgcggagaaagcatag

SEQ ID NO: 24310 - DNA, 854 bp, Emericella nidulans
taactggtacactaggctgcttgggtacgtcacttgtcaaaggactatcctactcttgcattccacgcttcgatcaacaactcttttggtaaaggatctcttatccaactcctgaggcaattttcatcactccactccgaccgaaaacagatctcggttggtttgatcggctatcctaacacaggaaagtcttcaataatcaatactctccgcaagaagaaggtgtgcacagttgctcctatcccgggcgagaccaaagtttggcagtacgtcactctgatgaagaggatttacctcatcgactgtcctggtgttgtcccgccgagtcagacggataccccagaggatattctcctccgaggtgttgtccgggttgacaacgttgaaaaccctgagcagtatattccggccatattgaagcgcgtgcaacccaagcatcttgagcgcactcccggtatcaaggaaacaagcgacgccatcgagttcatcagcattctagccaggaagggcggtaggctccttcgtggaggatgaatcaagatctcgatggcgttgctaagatggtgatcaacgatttcctccgaggcaagattccctggtttactccccctcctttcacacctggtgaggagggtgagaagattgaaggccgcgaaggcagactcggtgagatgggcagaaagcgcaagattgaggagacatctcaggatgcgagtgagggtcaagaaggccaagatcagtccgcttctgactccgaggaagagtttgggggattcgatgacgagcaggatgatagcgataatgattctattgcaaatcttgaagtcagcgatgaggaaagcggggaggagtga

SEQ ID NO: 24311 - DNA, 2024 bp, Emericella nidulans
  unsure (1)..(2024): unsure at all n locations
atttaaagaaccagagcccatcatgtcagtacatgcaaacggaaagacccctactcaacctttcagccagtccccttttcgtactcgcaccgacctccaagatgcctgtaaggcgctcctcgatcctcttataccccgcttcacccctgggggcagccgcgtaaagattggatcatcgaccaccaggtttgatgaagggggcgcacagattgagggcttcgctcgtcccttatggggtcttgctgcccttctcggcggtggttgtgattatgcggaagcctctcgatggcgcgatggcttcatacaaggaacagaccctgagagcccagagtactggggggacattgaagacatggaccaacgcatggtggagatgtgcccaatcggtttctcactggccgttgcaccgcatgtattctggaatccattgaccgacaaacagaaggagaacgttgcgaagtggctagcaagcattaatgaacgagagatgccgaacacaaattggtatgtagttccccaagattactttatggccgacggcgctcacagagaacaccgcatataggctatggtttcgagtctttgctaatctgggcctgcgaaagaacggagcaccgtactcacttgctcgtattgaggctgatatggatcacttggataccttccatgtaggcggaggttggagcaatgacggccccaagagccaccaccagatggattattactcgggttcgttcgcaattcagtttctgcagctgctttattccaaattggccgcggactttgacgagcctcgtgcggaacgataccgagcccgcgccaaagaattcgcgctcgatttcgtgtactatttcgaccctgatgggaggtcagtaccctttggacggtccatgacataccgattcgcgatggttggtttttggggtgccctagcttttgcggacgtcactcctcctgcgccgctcacatgggggatggtgaaaggcatcttgcttcggcatttccgctggtgggccacgcaggaagacatattcaataatgatggaactttgaatctcgggtactcgtacgccaacatgtacctaaccgagaactacaactccccgggctccccatactggtgctgcttgtccttcgtgccgcttgtgctgcccgatacgcatcctttctgggcggccgaggaggaagcgtatccgtcactctcagcggtagcagccctcaaatatcccaagcacatcattgtacaccgaggaggacataccttccttctttcatcaggacaagcttgccactatccggtcagagcgattcaggcaaagtatgggaaattcgcatacagtgcctctttcggctattccgtgccaaccgggggctatcagctggagcagcatgctcctgacagcatgctggccctttctgaggatggaggcgacatttggcagacacggagggtcgtggaaaatgcacgcatcgagtaccgcgagaatctgcctgttctgatctcggaatggcggccatggacagatgttgtcgtcgaaacgttcttgattcctcctgctgaaggaagcgagaactggcacatccgcgctcatcgtgttcggaccagtcgtgatctccaaagttcggaaggagcgtttgcaatctatggatgccagagtagcaacggccgtttcctccaacccttcaaggaacccctcaacccgctatctgaagggacttcagctgcaccccacagtgcacttacggtttcctcagcaggagctgtaggtattgtggaactacaaccaagcacagatcgtgcagggagggtggtcttagcggaccccaattcgaaccttcttcactgccgtactctgctggcatccctaggtgctgacctgaaatcaggtacgcagacctggtttgtgacggccgtgcttgctttgccggcgcatgtgaatggctatggcncaatactgaagaatatctgatcgatagatggaataacggtcagatatttcgggttgttaatggaactgtgagag

SEQ ID NO: 24312 - DNA, 481 bp, Emericella nidulans
atgctgctttccatcatctcattcacaacgttggctctcccaagagctgccgcagcgagcccagaaaccgccgcctctcgagccatcaccgcgaccgaagcgctccagacttggtataaccggacgacggggatctgggacacctgtggctggtggaatggagcgaattgtatgacaacactagcggatttggctactctaaagttgaacgactcggtcgacggactcgcgaaagacgtgtttcagaacacattttctgtcgcgccaaattcgaacccttaccccgaaagagggattgatgccgactacacgacagcgaatggaacgtcttattctcaaacgcttgataaaaaggtgccaactggtgccgcgaacgcgtcgctgtggctcgacgggtcgtacgatgatgatgcgtggtggggactggcgtgggttgctgcgtatgatgctaccggtcagacagactacctggatcccttta

SEQ ID NO: 24313 - DNA, 411 bp, Emericella nidulans
tggcaagccgctgtagctgagcgccgcagaatactggatcttctgattcccacagactggaaactgagcggggagttcagagcttcgcttccggcagacggccgtctcctgcaggcagatcctgtgcgaaagagtgggattctctcagaggatgagctggacatcacggagaactattcagcgggccagcttcttcagcgactggcacggggtgacgttagctctttggctgttacgacagcgttttgcaaaagggcggcaattgcgcagcaactggtaggatgatgtgccttgcgtacactgtgctgtttctgactcgtacagacgtcatgtttgacggagcatttcttcgcccaagccattgagcgagcacggtaccttgatgagtatctcaagcgcgaaggcaaggtt

SEQ ID NO: 24314 - DNA, 1059 bp, Emericella nidulans
  unsure (1)..(1059): unsure at all n locations
atggcacaatataccaaaaccctaagccccgactccctgcaagacaaagtcctcgtcgtcacaggtacgcgtccagtgcctgatactgcatcattactaacagggacaggcggagcaaatggcataggagccagcctcgtcgagtatgctgtccagaatggcgcatctgtgtgcttcggggacgtcagcgtacaggccggcgaggagattgcaaggacggtgaaggccaacgccccatcctctcctacccgcgcagtctttgtccccaccgacgtgacaaagtacgactccgttttggctctcttcgacagagcgatggaggtcttcggacgcatcgaccatgcccgcgcaggcgcagggatcgtcgagattgggaacgtctttgatccagcgctggatatgcagtctatccgcgaggcaagtcaacccagtcttcttaatatcggtagaggacaggttataacaaattgaaaatagcctccacccacaaaggtcctcgatgtgaacctcctcggctgtctgtacacagctcgcatcgcgagcgtgtatctgcgccagaaccgctcagagccagaagcagaccgctcgattatcctcatttcctcggaggcgggctttaaggaatccccgggcctgtttgtctaccaagcctccaagcacggggagatcggtctcatgcgcgcactgcgactctacctccacggcccggcatccgcgcacaatatacgcgtaaactgtatttgtccgtggatgacgaccacggagatggtcaagggtatacaggagggatggatcaaagctggcttgccatgaactccccatggatgcagcaggaatacggcagctgactggggagatgtaactcttaatgggaccctcgatgtatgttgagggcgaacgggcatgggagattgaggcgaatatggatcgccttgagcctggctggctatggagaagagcccagtaagtccctatgcataggggcaagcagagaagtgggtataggatggtctgcgcattgtggatattgaggggtaccagcggtactatttccggatn

SEQ ID NO: 24315 - DNA, 321 bp, Emericella nidulans
atgcctcccaggctccaaatactccctctgcatcttcgcagctctcttccccgaccctcaacgataccgcaaccatcccaattgctgctctccgttcagtcccaaacccgcaatgcacacatcttagcttccctctccgataacccgggggcctacaacaagcgcatccgacgaggtcgcggccctgcctcgggcaagggtaagacttctggaagaggtcataagggtcaagggcagcacggaaaggttccggcgggcttcaacggcgggcagacgcctgatattgtggtgcatggggagaggggattcaagaatatgtag

SEQ ID NO: 24316 - DNA, 531 bp, Emericella nidulans
gaccttgaggcgcacccaggagatacgatcaacaaggtgaaagccgcatctgtacactcttaccgctacaagcccaacgtcgttctgatcaatgccgggaccaacgactgccgcctcaacaaccacatctccactgctggagaccggatgaggtctttgatcgaggggttcctgcacgcaggagacaccgacactggaccgctgatcgtcctgtctaccttactaccatcaggacaacgcaggaccgcaaagaacgtcccgcttgtgaacaaccagtaccgcgatctagttcaggcgatgcgcaaggaaggcgtttcgattatcctcgcggagatgaattcagaggactccgacataaagtatccggaagactatatgatcgacggcagggtcgatagcacgcatcccaatgaccggggatacgaaaagatggcgcgcatctggtacgaggctattgtcgatgctgccggacaggacctcattccccggccggttgccattgaagggagctcgacgggcgcatgtaaggaa

SEQ ID NO: 24317 - DNA, 577 bp, Emericella nidulans
acgaaggttggtgtcaagattttcaccgcagacattatctaccacctgttcgacgatttcaccaagcacatggccgaactgacggaacgcaagaaggaagaggccaagctgctcgccgtcttcccctgtgttcttaagactgtcgccgtctttaccaagaaggaccccatagtcatcggtgtccatgttgtcgagggtagcctccgtctacacacgcctatcgccgccatcaaaacaaacgcaacaacgggtgctaaggaagttgtcgaactcggtagagtgtaagttttccattcacttttactttctcaataaacactaaaccatatgcagtgccggtatcgaacgtgaccacaagcctgtcaacgttgtcaagcgaggccaaccctccgtcgccgtcaagatcgaaggcgccaatcagcccatgtacggccgtcagctcgaagagtcggacacactatactcccagatttctcgtgcaagcatcgacaccctcaaggagttctaccggtcggatgtctccatggatgaatgggctcttatcaagaagctcaagcctgttttcgatatcccttga

SEQ ID NO: 24318 - DNA, 696 bp, Emericella nidulans
gaaagtctcgagctgctccgctggctccccaatgcattcaacgactttatcccgtcctctttggcatcgatagacctgtatcctgaacacctgcgtaccgtaatcgacggtctgcactcctggatcctcccacatctctgcacgggcgtctacaaagccggattcgcatctgaccaagatcaatataacaagaacgtgatccccgtgtttggagccctcaacaaactcgagaagattgtctttgccaacggcgggccgttcattctcggctaccagatgaccgaagtagatgtcacagtttacgctaccttggtcagattcgacactgtctatgtccagcacttcaagtgcaatctcggcacagttcggcatgattatcccgtgctgaataactggttgaaggcgatgtattgggatgtccctgcggcgagggagagcacggatttcaggcatatcaaggagaacgtatgccccccgtctgacattgtccgtctgttgcgacagtggtgaggcttatgaggctgatggaagcagtatacaaagagccattatgatatcaaccccaaggccattacgccgcttgggccgtggccggacgtcgaggaaggcgttgagcgggattggacgaagctgacggttggcggtgtcagtcatccagcggttttggagtttgagaaggagttgaatgaggagtaa

SEQ ID NO: 24319 - DNA, 493 bp, Emericella nidulans
cgtaaagtcctcattgttggcatgggcattgccggcgtcgctagtgcactcgctcttgcaaaggaactcggcccccacgaaccgaatcttcagatcactctcttcgagcgtcacgaagtccttccccccttgggtggagcattcactcatactccggtggcccatcggcatctggttaggctaggcgtccttgacgaactagatcgccagggtccagtcggtggagcggaggtctatgccattggactcttctccagtcgatcagcacgctcgctcgggtcagtcgacttcgccgacgggcatgggaacggcgtgaacgggtacaaggggcggcgggtgatgcggatcgttctgtctctggcgatgctggcagtcctcgaacgccagcccaacatcaacatcgtttacggaaagaaggtcggaggcgtatcagaaatggacggtcaaacggtcctgcatttcgaagacaagacttctgctgcgggcgatcttg

SEQ ID NO: 24320 - DNA, 1029 bp, Emericella nidulans
atgttagttgccaatacctttctctcctttcttgtacggtttcaccaacgacctggcgttcgactgcttgtatcgctcttcgctcggtctcagaatcagcacttgtttcctggaagtatcgagaatcttgaaaaacatgtcctcgacgatcgtggactgatcaaatggtggtgccgtgctctcgatccaattcttcgcgagtacgaacctgaatctgcctcccaggagcaagacaagaaacacgaagagccatcgcggagctcagcaacggcatatctcatcgtgcctggttgcgacaggtttgaaactagaggtttcttccctagtagcgccaaagcagacgataaagaccggccccgatggctgaatgcttatcctttacgtcaaatatgcagcaagcctgatgctccgccgcgctctctggttcctcggttccctgatgatccaaagacgcgctttctcattgacctcgatgatgaacttccagaggctgcgggcggagagagctcgagtggccactggaggagtgtgaagtctttggacgagttctgggagatgatgtccttccgccaggagtgctctgcgggaagactggttgggtttctgtggcttgttatcaaccctcctggagtggtgaattcgaagccaatgctgagcagcactgccggttctgcggaggttaggggcaccacctccgcggccggggaaggaccggcaacggatagccaactgctaacgtctaacgccccggccaactcagatcaggcacagtctctggaggtcccgaaaagcagcgaagatgcttcaatcactcattcagtcgatcagacgataaatcagcaggcgaacaacggaagtgcattttactggccacaagcggcgagaggacatgcagtgttgaacgaagatgactataagaaagtcatcaacttccttctcgagcaagacttttacaacgaagaggtctcgtttgccagcacgaaggcgttcaacgacaaggttgcaacacttgcagatgagctgtgggtt

SEQ ID NO: 24321 - DNA, 861 bp, Emericella nidulans
atggaggtatgttctgcttctttaatatgctgattcttatactgactgttagtatagccagagacatgccatgtggtttttgtcaagtctgtcgagatccaaggtgtcgatccggacgcacaaggttcaaacccaccaggacagcaagcttccttacctacgacttccgtacagcgacccggtgtgtcttcgacgtcgccccagcccagcactctagctgcagcgccgctctcgacaaaacctcttgcccctcccacgccatcgttgatcgagctacccacatgccccgtttgcttggaacgaatggacgaaaccacaggtctcctcaccattatatgccaacatgtcttccactgcacctgtctccaaaagtggaagggcagtggctgccctgtatgtcgctacacacaagacgactttcgcaagacgagccaaggctttccgttcgacgacggaaacgttgaatgcagcgtctgccactccgacgtcaacctctgggtctgccttatctgcggcaatgtcggctgcggccggtatgacggcgcccatgcctttgcgcattacagccagacttctcacgccttcgccatggacctctcaacccagcgcgtctgggactacattggagatgcatacgtgcaccgtattatccagagtaaaacggacggcaagctcgtcgagctccccgcagcggacaacagcgcgctcgacccacccgattggaccgatgccgtgccacgcgagaagttagaaaacatgagcgttgagtacacccacctactcaccagccagctagaaagccaacgcgcctatttcgaaggcatactcgagcgcgccgtcgataaagcctcccaggccagt

SEQ ID NO: 24322 - DNA, 337 bp, Emericella nidulans
ctggcttgccgagagtaactcaacggcctccacaggcaacaacgaagagactacatggcgaagcgactcggatcaggacactgcttggatcgaatattcttgggaagaaccacttaatgtgtctcagcttgttatgaagcagcgcagctttcgtaccgagagataccctatcaaagtcagcgtgggtgacacgatcgatttcgagggtacgactcccacttcgcttgggtacgtgacgcttgatcttaatgcgacaataggtgaaagtctgaaggtggccatggatgaaaacgacgacctaggggttattgaagcagagatctacactccggcttaa

SEQ ID NO: 24323 - DNA, 1451 bp, Emericella nidulans
gtctcgaccgtcaccgcgcccgcaagtctgaccggtttgacatcgcgcttcttggatggcagcctgcatatgttcttcgagaagattatccccatgttccctatcttccatcgtccaaccttcgttttccgagactgtgctcccccgcttctcctaaatgccattgcactcggagctctattcctcggtagcgcggatgccgtcgccaaggttcgttcttcaagctgttgcaacacgcaactaacatttccaggctgaagtactttggcgcttgtcacatactgctgtagcaacttcatggcatactatgattacttggcgacgcacgtcagactcctgcgcaggcgtcgagctagtgcagacagttttgctcagccagatttacgccgctatgtccaaagtgtgtacctttattagaaatgctcaatgcttctctgacacgatctagaacaggaccttccgcaccacaagccaggtctttcatggcttgggtatacattgggctagtcattgtggaatgtacgacgcggcaaacatggtgactttgccaatgccaaccgacagtcaaagtgtaaaatgtaaagcatggtatcgatggatcgcacaagagacgatgctacgaacgcttcttggactctatatcgtagacggagtggtctcacagtttagcggcaatccaacctttgctcgacacacggcaaaccctcttgcgctgccaagttgtgatgcagtattcaatgcctcatcggctgacgactggatccatctgatgcagaaatatcccgctacaccaatcaggttctgtgatatctacaacgacctttttcaagaaacccaagctagctcgagcagacctttgctctacgatgtctccctgtttcaccataaggtcgtccttgagggcatcagatgtttggtcactgaaatgaacgggacaaatccccctcccgtcggtgtgccgtcgaggcaagatctgatgtctgccctgcgagagctgcgccaacatatccttaacagtaaacgcctcacgcccactgatcggctcactgcgctgcttcagtggcactccatttgccttgatacagtagtcagcaccgcacgtggaactagacggatgtgccatttgttcggtatagggcagagtatatttggcggcagccaacgcgaggagggccagatcaacccaactcgttgggcgcagagcgccgctgggcgagcgacattgctgcacgcgatcaacatacagaccattgcggcccagttaccccttggtatggcatatgatatcaacatcccaggtgccgttttcgcagctgcgacgacatactcgtcgttcaccctcgcaggggtgtcgaagattgtttatccagccgcgatagactgggacacggttctaacgacgtttccgctggacgtgaggagaccgacaggcagtgagagcaccatgcagt

SEQ ID NO: 24324 - DNA, 693 bp, Emericella nidulans
gctgttctgcccgctgcaacctctgggacggagcaaccgtaatctgtcccaagtgtggcccctactcagaaacccggtactgctcgcgcgcccatctgctacaggatattaaggcacactggacgatatgcggacaggctgttttcacgtatccatgcaaggaatccaccattccgagagacgttagggaggctccgccgttgattccgtgtctgtatggttttgatactcccgagcgccaccggcaggccgtacacttcaatatgaaccaccgtgagggggattacttcattttcagtgactgggtggacatggtgaataagggggcgctgaagaagagtgataacgacaaggagaaggtgaagctaaggtgttcaagtaggattatccatgttgtgcgctttgaggatgcccaggagcgcgatcgctttcggcgagtactcgctgcggtgctttttggtttgtctccctctgcctcctcccataccctctgtttcaaaggcctttataataactggtataaagtgaccatcgagaaccctgctataactgactacctctaccgtctcatccgggaccacatccgctctacaaccaacgactccccagtgaatcctctattgtctctcgaatcctccttgaaataccaaatgaacaaggaattctccatcacaatccagccctgcataactg

SEQ ID NO: 24325 - DNA, 294 bp, Emericella nidulans
atggctccgaaggacaccttcttccgctcgtcggatatgagcttgacgcagctctatatcgcgaacgagatcggtcgtgaggttgttagtgctcttggtgagctaggccaggtgcagtttcgggatgtaagtgctgttcatggttgataatgctggagaggcgctggcaagtgagtcgtcactaactggtactcttttgcttaacagctcaatcccgagacaaacgctttccaaaagacgtttacgaaggagattcggcggttggataatgtggagaggcagcttcgtatgttt

SEQ ID NO: 24326 - DNA, 323 bp, Emericella nidulans
attcttgtcatcgtcatgggagtctcttttggaatcaacgattatattgaaggcggcgttgtcaccgcggtcattcttctcaatattgtcgtggggtaagcatccccgatcaggtttcaatttcctctgacttgtccagtttcgtgcaagactaccgtgcggaaaaggacatcctctcgctacagcgattatctgcccctatatgtaaggtattacgtgacgggcgagttgcccctataaaggctgagtcgcttgtggtcggggatatcgtgctacttgctgttggggacattgttccagctgatttgaggttattcgatggc

SEQ ID NO: 24327 - DNA, 222 bp, Emericella nidulans
ggtgtcgccaagcccctgtctttttacgtggacacctacggcacctctgagaagacctctgaggagctcgtccagatcatccgcaacaactttgacctccgccccggtgtcatcgtccgtgagcttgacctggccaagcccatctactttgagactgctcagaacggccacttcaccaaccagaagttctcctgggagcagcccaaggcccttaagttctaa

SEQ ID NO: 24328 - DNA, 434 bp, Emericella nidulans
cccttgcaactctgctcctcatcgaccgcggccaactgcaccctgacgaccctgtcgccaagtactggcctgcctttgacactccggataaacgcggggtcctcgtccggcactttctcagccatacctcagcccttccagcgtgggacccgccaatccaggcatctgagttgttcacaaacactgctcttgcgacggagaagctcgtcgcccaagagccttggtgggagcccggcaccgcatcgggataccacctcgtctctcagggcctgttactcggcgagctagtgcaccgcatctccggaaaaccactcccgcaatttatcgccgacgagctggccggtccactcaatgcagacttccacctgggcttgcagaacgagagcgaatggggccgcatcgccataatggagcctccacctccatttccggct

SEQ ID NO: 24329 - DNA, 1420 bp, Emericella nidulans
  unsure (1)..(1420): unsure at all n locations
aaggttatggcatacactagtcgtgtctacatgaaaaaagtatctctcacgtccattggcgtcaactcgcaactatgcccccacgtctccagaagtgggtaatagccgagctggtcgctcataaaacgctataacggcttcctcccctgtgatcattcctttccaaatcacccaccatcttctcancctcaacaggatgccactcaaactgaaagccgtttactccagacaaaacnncccgacttgcacctttcgcaagtcggaggagtacaggtacacagcacaaaaggcattgtcancatgtactcanacctctcgcggctgcagcaggacagaagatcctgagtcagggtggaaatgctgcagtatgttgccctctagacctttcatagtacatttgatagctaatgaacgcaggatgcagcggttgcagttggtatgcatacctaatgtagcgtaagctcgtagctaacgagtgcagccgcggccctgaacgttacggagccctcatccacaggaatcggcggagacatgttctgcctctattatgacgcggcgaccaaaaagatccattctctcaatggctctggccggtaccccggcgccgcaactcttgagaagattagagcagacctgcaagctaagccggatgaagcgggtggaattcccatgcatagcccgctcgccgtcacggtccccggcgcagcagcaggatgggtagacaccgtcgagaagttcggcagcggcaagctttcccttgagcagattctcagtccggccattgagctggcagaggaggggtttgcagtctccgagcttgcgtcttactttgtgagtacaaggtattcactgcttacgaatactaacggacccagtggcacgaaagcgagagcctcttgcgcaaagcgtctcccaactcacatgagatgcttaaagcagaccccgaagcacaagacggctaccgcagccctctccctggagagattctcaagaacccaaccatggcgcagacgttccggtctcttgcagccaacggcaaaaagggcttttacgagggccgcgtcgcgcaggagattgtcaacgtcatccagtctctcggcgggtacatgacactggacgacctcaaagcgcacgcagaaacaggctcgcaggagactgaagccatctcgctcaagttcagcgggcaaaacataacggacaaacaaacagccggctcagacggcgaaactaaccaaggcgtcgagatctgggagcacccaccgaacggtcaggggattgtagcactcatggcgctgggcattctccaggaacttgagaagaccggcaaaatcccgtacttcactgagaaacatcataacagcgccgagttcttccatgccatcatcgagtccttgcccatcgtctttgcagacgccttctg

SEQ ID NO: 24330 - DNA, 354 bp, Emericella nidulans
cttcaacgcaccattgccaatgtccttggcccgaaaagctattctgccgaagatgctgcagctggagctgcagccgatggtgccgtcattgtcgaggagatcggcgatgttgacgctgttgaggaagttgcgcaagcctacgctgctctgaaaagcgtacatgtgctggatgtttcacccacaggaacccagaactggattacagcagagattgcctataatgagcgcacgtcccgggtggagaattccattattgcccgcctgcgtgaccgtcttgctacggcaaagaatgctaatgagatgctccgggccttctccaacttcagtgcactccttgttccgcccaagatcagg

SEQ ID NO: 24331 - DNA, 521 bp, Emericella nidulans
gagccggcggcaaaggcggcccttcacgtaccattgccgttgacgaagtcgccgccaaagcattcatctccgcttcctatgcgcacccgcgcgtcaagaaattcctcctcgtctcgtggatcgggtcgcgacgcacaaaaccttcctggttcactgacgcagattggagccacagccgtaacgtatttgacaatgtccttcccacctacgcaaaggcaaaactcgaagcagacgagttcttgactgcacatgcggctgtgcgggacagactatctgctgctggaaaagcgagtaggcttgacgcgatttgtctaaggccgggtctgttgaccgatgagccggcgacgggaaaggttacgttggggaagacgaagagcgaggggaaggtctcaagggagaacgtggcgagggttgcggatgcgttactggcgaaggaggggagtaagggctgggttgatttgctagatggtgaggaggagataggggacgcggttgagagggttgtgagagaaggggttgat

SEQ ID NO: 24332 - DNA, 1300 bp, Emericella nidulans
aatctcgcatcccgcacgtttgacccgggtgcgacagcagacagttttcgcgaggaatggtcgaatccgtcaaattatgcctttaccattcttctgctcatcggcggggatctaatccatcgcgctctcgcgcagcttgtcggcggaccgattgcgccagttgcattctcatttggtgcgtctcgattccagtcctgcgcaataatacacctgatatttgctggattgctaaatgatagcaggatgggtctcctacgcaacctccgctgtgtgctctgccctcggcgagtaccgcctcatgcccgacgcagatacagggtgcagtcttattaacgggaaaaacggctacgtccgcggtaacaacagctgggtccttggccggatgatgcgcgactacgactactggatgcatccggcgattcgcgaaaagacacagaacttgatcgacgcccgctggaaattcgaccaagcacgcgaagatgagaagtaccctgattctggcattaaggtgccacggccgtcgcaggcaggattggtcgtcagtgtatataaaccaagcaagacgcttcaggcgggcgtcccgggcaaggacctgctctactggtctggcatactgtgtacggtgctacagctggggattgctagtatccccgctggaatcaatggggactggggtgtgctgatgatcactggcgcggcgacggtgttatgctatggaaccggggccttgacacagtggaaggtcgagaagtgggcttgccgacggctggataatcgaaacaagaagaattttgtgctgacgagggggaatggagcgcagcatgctatcgcgatcgtgtcggatggcgtcgggctcgatctcgaggatttggcgacggggttcagcatgatagactacccgactattactgttgtggcacagcttctgacgatcgtgctgggtattgcctgggttgcgttgctgatcacggctagcggaatcgataccgggagctggtatcttatcgccgtcgggggaattggaatgctgcagaatatctttgttgctgggtggaagaggaccccggccgcgtatggtgttccactggagtttgtggaggtcgtaggggaggtcaaggttatggggacgctgatggagctggagaggagatacgaaaagctggggaagagtctgttgggtactttctttccgggcgatctgagggataacgaagtcaaacagtgggaggagatcaaggaggagtggaagaggaagaaggagaggggagagggagctggagacgacaggaaggggaagtag

SEQ ID NO: 24333 - DNA, 1044 bp, Emericella nidulans
atgaaagctgcgaagaaatttaaaagccttcttggcccgactcgagcttctacacccatacaaagtatcctcggccaagaatacgagacgcactttgtggaacctcctacgcaaatggatcctgaggagagcgtatccttgcctagtcctttaccatacaaaaaaacccaaagtttgaacacttataaccggagagcttgggagcgtgacgatgttgttaaaggatatcacccgcagcggcgggaagctctcccttgtcctgcgccagagagcggcgaatcgggttctgcgtacagctctattttaaacagaccaacaaggaaagattccggctcaatacgaagtgtcaaaattagggacgacccaatcgacgatttgcagtcacagtcatcgcagatcccgctctcacgcactagctcgacgaccaccaaacgcagcatagaaggcacacgaggacacgcacgagatcccctggaagaagactgcccattcttattcatcggaccttccactttcactggttcagccccgatagacatcaacagcaccgacgtatcccccaagcccctaaattcaaacgtcccaatggttggggccgagacagatcccacagaacctgactatcctgtcgtgagcgaatcaccaggcgccgccgacttcgatatatacgaaacggcgtaccgacaggaaattgagcgcattcgagcagatacccttccaggaaaagaaggcaagggcagcgtacccatggtttacttgactcgccgtgtagatgggaaagacgagttgatgaaactagtaagagagaccaccatgagcgagccggcccttggaattggggctaaagtcgctgtccctcaagacagcggcttccgctctgcagttagcattatcaggactcagttggagcagggaagacatgagaggcagcaacagcaaagccgggagctgggggtccctaaacgtgtcggaaacttcagacgtcgagacttcatcttcgacccaagagggagctacagcgttcaccgccgcaactggcactga

SEQ ID NO: 24334 - DNA, 1175 bp, Emericella nidulans
gcatatcaacaatcgcgggccccgaaaacacggttcaggactcggggtgtatcacgccgaattcgatgtggagttgtgcgctgccgaaggagcagcaggacgctaatgaaccttatgcaaccaatcagccgaatttccgtgttgagatccggtttcagaatgggacgtacgatcatagtacgacattggcatcacggtcgatccatcgcagaagcgcgtaccagctgtttaaccctaacccggatccaccaagtgtagaagaacaagcgttcctgggccagtatacggataagacgtctagcccgtatgcaggcgaagagacgcccttctacatcactgttctttcggcggaatatctatcctcttcgtcatcttcccaatatagcaaacgcgacaacgacacatcaacaacgaacaacacatccaccttcccagacgtaacctcgctaatcccttctccatcaaaagccagcgacggtaccgctgcccccgcaaccctctacccgcttccctcttcgcaaccagtccgtctctataaccgcggcaagaaagacgagcactacggcttctacacatactttgacagatccatctttctgtcctcctcagccgctctcacaggaataaaagagaataacaataacgacacagatggcggatccaccaaggaagatgcttccgtgcgctgtacatgggcacaaacgcgttttctcgttcagatctggacaaagggtgacgaattagggcgaagtgtgtttgcacgctctgtcaacagcaccaccagtacaagcgccaactcaacgtcttcatctccatcaaccgcggtctcctccgcgacagacttcacccgccccggctccttcccctacccaataagcataacactcgatcgacacggcgggaatgtcgaaaagaagaatctctactgctacggtctggaagaaaatgcacggtataacgcctcggcagtcaaactgcaactggaggaccgtgcgtggaacgggaaaattgtgaatcgagcgcctgggatctttaatttagggtcggcgaattcaactaatgacgaggcatatcagaataaggattatggtggttatgatggtgggatgggtgggtgtaagtgtcagtgggttaattgggttggggctgtttaatagggttcagctcttatccgc

SEQ ID NO: 24335 - DNA, 540 bp, Emericella nidulans
atggctgccctggagaagcgacagaatcacaatacaattaatgtcccgtcgaactttaagccgccgcctcgcgttacgctgacggataacaaacgagaagcttggctccgtgacctcgccaatccctctgtgccgttgcgcaggctgagtcgcacgattcctcatggtatccgtggcaagaatcttcttgatcagtgcttaagcaaatggattccggtaaaccgagccgtatggcttgttaaatgtgtcggtgccaacgagattcgagcttgcaagagaaagggtaccggcggcacgttggtggtaggatccgaggtaaaatgggttcgcgactggacgagcggcgtacagcagttccttgaaggagtaataggagcctgcggatctgcagactggaaatcgaaaatgacttacgcgtacgtctcccatgtgtgtagaagacatttctaacatcttgcagaaccagcctgacagctcgcctattctttgagcgtctacttgatcacgaccagtactttgcttggtttctaacctctttgg

SEQ ID NO: 24336 - DNA, 444 bp, Emericella nidulans
atggccgccaacatcaacaacgccgccgcctggctgactgaagccaaggcgcaccctttccaagttaaggaggcgccctcttacacgcctgaggagaacgagatcctggttaagaaccatgctgtggccattaacccagtcgacggcagcctgcaatccaaggcctggtggcctatgaactatccgaccattctgggccaggatgtcgccggcgaggtcgtgcaggtcggcccaaatgtcgcccgcttccagccgggcgaccgcgtggttggccatgccgtgggcatggctaccaagcgccttcaagataatgccttccaagcctacactattctccagacaaacatggccagccagctccccagcgagatctcctacgaagacgcggccgtgctgcctctgggcctctccactgccgccttgggtcttttcaggacgagtttc

SEQ ID NO: 24337 - DNA, 273 bp, Emericella nidulans
atgcaaactagcggtttcacaaatactcctctcaccaaggccctgctcatctacacaatcgcttcctcaatcgcgctctccatcttcgacatcaaacatttcgcctccatttacatctccccccatctctttccctacgggcagttctggcgctgcctggtatggcaggctgccgggttcgcaaactctacggaggccctgttcgccgcgctgctcgtttatcattgccgggttgttgagcgggggtggggtgctcggaaggttgctgtacgt

SEQ ID NO: 24338 - DNA, 429 bp, Emericella nidulans
gatctcgactgggaagagcagcgccataagatattcaaacactttgggttgtcccaaaaggatgagccagccgaaaatgcagggccgtcatttggacgttcgacaaggccatccaatcagtttgggcctgcggcgactcatggtgtttctcgaaggagcgtcttcggtcgatcaggctttgagaagtcagtcattggaaccccgggaaccggaaaatcgagccatcagcttttcgacgacccgatggagcgtaccgacggccctaacactcagagtctggaccttcgattccttcgtgaaaaaatgggttattatgcggacaaagttcagtcgttgaattccgctaggctccaagcacgtagctttccgatcttccatgagttttccgaggttgaaaaacacgctggcggtgatgtaagtaactataca

SEQ ID NO: 24339 - DNA, 429 bp, Emericella nidulans
tttgtcgtcgacggcaactggactaccgataaccgattacctcaagaggacgacggcagcagtaacatcaacaacatcctctatccggatcagatccaagcggattcagtcgcggcactacagaacggtgcgcaagacatggctactgtctctggtgtaacacctaacgcgacaaccgccggattagctggtggtgtctccaaggagagcaacttggcccccggatcgacaacggcggggctggacaaggacgtccctcttgagcagagggctaatgtccctggagagttccctgcagacacgcccttgtctgagtactcggtaaaccctatcccagcctatagcggcattggcaatcccatccatctaaagccgggagagaaagtcccagatcctagcacattcaatgcaaacactgtgcagtcaact

SEQ ID NO: 24340 - DNA, 615 bp, Emericella nidulans
aagaaagtcctagacgtcctcgtaagaccactaggcgaagtcttagacctcaactctcgtttttccggcgtcttccctgagcattacacaaatgcgcttccatacagcactgcccctacaaaatcctccgcaccatcttcgtcttcgccctcgcaacttcaacttgtctcttctcctgccgcagcccgtaccctcctcttcaacctccttaccccatccaccccgcttatcggccacgcaattgacaacgacctcaacgcctgccgcataatccacccaactgtgatcgacaccgcaattctctacccgcatccgggcggcgggttaccgtatcgaatgagcttgcgcacgctcgcgaagaagcatctagaccgcgagatccagactggtggcgcgagtggtaagcagggacatgattcggttgaggatgcgctggctacgggggatctcgtaagggttaaggcgggactggtttggggaaggttgaaggagaaggggtggattgttgaagagggaagacttgtggcgccggactccagctcaaacacggtgtcaatgcagacgaagcttggggagggtgccggggcgaagagggctagggaagggactagttaa

SEQ ID NO: 24341 - DNA, 573 bp, Emericella nidulans
atgcctcgcgaaaaccaaaaacgaggtcgtcgtgcgaccgaaaaagccaaaaaggaagcatccaaacggaagcgcgacgaaggaattgaagaaccaacgcttaagcgattaaagccctcagcggacgaggacaacgcagtcaccgccggcgcagactacgtacctctcgaaggagaggaatacgatgaccaatatgcgacgggagcggcagatgaaatgcctttctacggtctgcttgactccgaagaacaggaatatttcagcagagcgaatgagatgctagagctgaaccaattcggggacgccgaggagcgcagattatttgtagacagtgtgtttcgggaggctagggggaaggaattgaaaatcgcttgcagtcagtcgtgctcgcgactcatggagaagttgatatcagtttcggatattcatcagatctggaggttgtttaacaagttcattggacatttcttgacgctcgtacagcatcggtttgcgagtcattgttgcgagagattgttcatcagcgcggcaccaggtgtgacgcagaaggcgtcgaaaacaaagtcaaaaaaa

SEQ ID NO: 24342 - DNA, 612 bp, Emericella nidulans
gtgctcggcagattcatgctcggtctcgcggtgggtgcaaagtctaccacgacgccggtctatgcatcggagtgcgctcctacagctatccgcggtgctcttgcaatgcagtggcagacatggactgcttttggaatcatgctgggtgagtgctcctcgatgacgttggggtggaattaagatgttgactgtattaggttatatctcgtctgtagcgttcatgaatgtccagagtgacacgctccaaggcctcaattggagattgatgtttggagtcaccgctatcccgtcagtatctctgcagagacccggtttcatctcttctctggtcctaacgttcacaggcccatgcttgtgtgtgcccaggtctacttctgccccgagtcgcccaggtggtatatgatccggaatcgttaccacgctgcatacgatgccctctgcaagctgcgtccatcgaagttccaagcggcgcgggacctctactacatccatgcagcactgcaagttgaggagaaactccgtgagggcaaacagctctggcgggagatgttcaccgtcccgagaaaccgacgtgcagcacagtcttccttcttcgtcatgttcatgcagcag

SEQ ID NO: 24343 - DNA, 780 bp, Emericella nidulans
atggcccgcaagacacttcgggagccagccattgtttctgcccttgccttctgctatgctcgcctggaccagctcgcagaacttgaagatttcctgcggtcaaccaacgttgctgacattgaagcttccggtgacaaagcttatgaggagggctaccaccaggctgccaagatcttctacaccagcatctctaactgggctaaattggccaccactttggtacatctggaagactaccaagcggccgttgagtgtgcccgtaaggccaacagcgtcaaggtttggaagcaggtcaaccaggcatgcgttgacaagaaggagttccgccttgcccagatctgtggtctcaatctcattgtgcacgcggaggagttgcaagaccttgttcgacagtatgagcgcaacgggtactttgatgagctgattgctgtgcttgaagctggtctgggactggagcgggcacacatgggaatgttcaccgaactgggtattgctctatccaaataccaccctgatcgtgtcatggagcatctcaagctcttctggtctcgtatcaacattcccaagatgatccgggcctgcgaggaggctaacctatggccggagcttgttttcctgtactgccactacgacgaatgggacaataccgcccttgcgatgatggagcgtgctgctgatgcttgggagcatcactctttcaaggacatcgtcgttaaggttgctaacctggaaatatacgaccgtgccctcaaaaaaaacctgcaagagcgtccgcggctc

SEQ ID NO: 24344 - DNA, 1047 bp, Emericella nidulans
gccatggctacagtgaatcccaaagactccatgaaatccacatggcgtgatggcaaccgggatgaatggaacttctatcaccatatcatcgacttcctaaatgtctaccacgtcgaccgtgatcgcgaggtgccggtgcactcaaaggacgataagataccctacgtacctcagtggtctctacaccgctttgtgctcatctattcggcggttcctctcctcatacatcaggtcttttcatcttatactggttacaccctcggtcctttcgccgccttcaatttctatctcttcgctttcaatgcgattatcatctatgaagtgcatattctccgcagactgggccacaagtggggctttctggatggcgacaagcacgagcgtgacggtattcccgatgtgggcattgcaaaggttgtccagtctctctacaaaaccactggctcgcgtctagccatgtcgatctacttttcctacagcgccgactgtctgcccgcgcaaatgaactgggcatggctccctctcgagattggtctttatggcattgttcttgacttttggttctactggtatcacagggcgatgcacgatgtggactttctttggaagtttcatcgtacccaccatctgaccaaacaccccaatcccctgctttcggcctacgcggaccatgagcaggagttctttgacatggttggggttccctttttcacctacatgactctaaaggcgtttgggttgccaatggggttttatgaatggtggatctgccatgaatacatcgccttcactgaggtcttgggacacagtggccttcgcatacatgggacggccccttctactctaggatggttgctagacttctttaaggcggacattgtcattgaggaccatgacttgcaccatcgcaagggctacagaaagagctacaactatggcaaacagacacgcctgtgggaccgcttatttggtacctgtcacgatcggatcgagtcggcgaaagagaatatcgacttcgatattacggcgcccatgccgctgtcttag

SEQ ID NO: 24345 - DNA, 259 bp, Emericella nidulans
gtcttccgttacgattgacgaattcgacggcatctatgcgaaccttctcccatttcgcgccttagccccgcacgagattcgcactatgacccagaagcttgccacgaacccggaaaatgatattggcgccctgagtattcgcaatggcacggttagaattcaagaaggcatcaaaccgacacatgcttggatggttcaaagtgcgggcagaatgattgaaaatttctccgagcatcttcctgacatggatttggcttat

SEQ ID NO: 24346 - DNA, 438 bp, Emericella nidulans
atggctcccaacagccaggcacaattcgcatactaccctgccgactcacaaccgaggcctcaatactccagtcatcccgagatgcaatactatggccaggtctcgcccttcacgcatgctcagcagcaatcccaacagccgcactgcattcccgagcactatgctccgacggtcatcaacatgcaccagatggccacggccaacgcattccgcggagctatgaacatgaccccgatcgcctctcctcagccgtcaaacctcaaggcctcgcttgctgtgcaaggttcgcctgctctgatgcccttggacaccaggttcgtcagcaacgactactatgcattcccctccacgcctcctctttccacctccggtagctccgtgagcagcccgccatcgaccaacggtactcttcacaccgcaatgcaagaaaactttttt

SEQ ID NO: 24347 - DNA, 582 bp, Emericella nidulans
atgacaagagcgcagctgagacgtcgacaggggagacgttttaaggagcaccacgcgagcgcccccctcaagtacggcaacctctcatcctggtatttcgctctttaccccggcaacaacgagacgcaagcgagccggtcctggaacgctgcggcaagagatacgtcgcttgtctcgtcctggctgttcccgaaggactgggccaagtctgcatctagcccgttctacacatactactgggaccacgccccacctagccagacccagggtgcgtaccatgaatctgaagttttctacaccatggacacgctgtatgcgaacgcagacgatcacgagtggacgtggtatgattaccatgtcgcggagatcatgtccagttactgggttaactttgtcaagacgggagatcccaacctcggtggaacttatccatggaaaaacctgacgtattgggctcctgtgggcagggggaagaatgagacggtgttccatgtgggtgatggctttgggcaggttccgttggccaagcacgagcaggtggagttgattacagagtacttttcaaggcaggtgccatactag

SEQ ID NO: 24348 - DNA, 692 bp, Emericella nidulans
ggtcaaaaggaccgacagatgctattaggggcacatcaaagcttgcacggcgtgatgcttcccctggacgacgaggacggcaaggcagtctggagggagcaccttctaagggcgctgaaaatggggaacatgaacgaaagaaagatggcaaaggcctaggaattgcgactggtaagctgcgaggccgccgcggtgctggtcacgaaacccccatcggaaaggagacgaacccctcagaagcacccggtgtctgggctttggacacggatctatcgcacatggaaggcatcgttcagccagctgcagatgatggggataagacgaatgaaggaaagacggtacgccatgatgagaagaggctgggggaccagctaggtgccggaaattgggacgctcctgagagctggcatgtcaaacgccaaagaaatgaggttttggccaaagttcccaagatgaccaacgatgctgctcgaacaatagctgaacctgatggtgttccgtattttatccgtgtgttccgcattgatggaacatttgccacactctcgaatgggttacatgctacggttgccgatgtacttctgtcactgggaaagaagtcttttctaactgaccacctcaataactacgaaatagtcatgcgcaaaaatgatatctctcgacagctggatcccaatgaacagcccattctc

SEQ ID NO: 24349 - DNA, 1510 bp, Emericella nidulans
cttgcaggatcactgtcaagatgcctcacaccgaaaataccacgaatgcgtgtgccaatggccatggcaatgggtacaacgagaacggcataacggtcaatgttgaagaactcgcggtgtcacctaacctcccagaccaggtccccggactgctcgacaagattgctgcgttcagtaagcagtatcttggggcagagcctcaggccaggttgaaattgctcgaaacagccaggtcactggtgtacgctcttgagactccccgggaggccattatccgccactgctgggcagaggtacgtgtcgcgctgatcgagatccagttgctgctatatatttatctttctggaggacgtgctaagagatatgccagtcaaccagttacgccgcgctcgaaacagctgttgctcttaacctctttaccgcgttgggaacacacgagtccaaaaccgtcgcggagttggcagaagcaacgggcgcagagccagcactgctgagtcagttagagactggtccgtatgtgatacgactgtgccatcgctgatcatcataatccgtatgcaggtcgtctgatgaaacatctcgctgccatgggcgtgatcaccgagaccggatgcgatgagtaccgcccgactagtttctccaaggtcctgacagtggaaaagtacagtgatgccttcccactcatgtatgcgacggccgaatccaggagcgagtgaattctgcaggctgatcatgcggcaggacatcgcgattcaccatgggtatcctcgccctcccagccttcctcgagaagaccaagtaccgcaacccgacgagcgcgacagatacagcattccagctgggatacaatacagacaagggcttcttcggtcttctccagcaggaacccatcacggcaaagcgtttcaacaatcacatgggagtctatgcgcaaggccgcgctcgctggatggatcccggcttctatcccgtgcgagagcggctcatcgacggtgttgcaatcaatcaagaggatgtactcctggtcgatgtagggggcagctttgggcacgatctacttgacttccgccgaaagtggccggacattcctggccgcctcgtgctccaggacctcccggaggtcatatcagccgtcaaggacctgcatccctcgatcgatatcacagcccacgacttcttcaccgaacagccggtgaaggcagctcgggcctattatctgcactctgtcctacatgattggcccgacgacctctgcagcaagatcctcgcgaatcttgcggcggccatgaaacccaggtacagcaaactgctggtgaatgaaaatgtgatccccgacaagggcgcgtactgggagaccaccagcctggatctgatcatgatgcagctgggctctggggagcgaactgagaggcattggcgttccctgctcgagtcagccgggctgcggattgtcggcttttggactgcccaccgcagcgtagagtcgttgattgaatgtgagctggcttga

SEQ ID NO: 24350 - DNA, 346 bp, Emericella nidulans
atttgagggggcttactcgacagtcaccatagccaaaactccgggaagcagtcacgagcactcgcatgatctcctgtatattgacaagattaagcggccctcaggactcatggagtttgtgagaagggaagcaagtaaaggctacttgccttcttccatttatatgaaattccgagaggagcctgaaaagctcattgaagctggcggccgttttcttcagattactgacgttaggaatgcctcagctcattggagactgcaaaatcccgaggtggatcttgtaccacatgaaggttatgaaaaacaaaagggccgtggcattgtaagggctcgcaatatagcagaa

SEQ ID NO: 24351 - DNA, 1538 bp, Emericella nidulans
aaccgccagctgagcaaacgcgaaagcgtcgtctccgtcgacttatccttgtgtatattacgcagagcagtggccgtttgggcataccttctatgctcccactaccacagtggaccgatgatatccagccgacgccactaaccggcgtgaaaggcaatgaggttgacaaaatgcatgattgttggcttggaatatccaagatcatgtatcaaagcaaccagctcctgttcgcatctaacgaacagacttctgatttgataagaagcggccgttaccgcgaccagattgatcgattccagcctttcctccgagaatggcgacagaacattgattcgactgagtgtaggtgcatatttgcctttcattggacaaatgctaaccatatcagtgcaccctgcaatgagacatatattgatgattgaatatgaatacacacgtacgtttccttctcgaaacttatgaccacctggcttacttctctcaaggtttatacgtcaactctttagcattgcaggctgtggtcgatcggtggacgacaatgtccaacgaggccgctcaggctcagaataagccgtcagcatcaaataacgcgtcgttccatgtgctaatggaattgtaccgcgtcaatgagccttttattcaagaagtcgttgatgcgtcgcgaaggattctgaccacagtgctcgagggcttggtcccaggggaccatttgaaacatgctcctgtccggacgtgctttcggattctgtctggcatgatcttcattcttaaggtaagtctttttctgaatctgaatgttgcgactccgcatctaaacatcttagacgttcaccctcggtgcgaaagaagatgacgtgcgtgtctccctcgaccttcaggaccgcaccgttgaagcactccgaacatgtgttgtcgacgacatccacctcagccacgccatcgcccgcctgctggagctcctcacgactaatatccgcacacgcttcctccgtttcgcccccctggaccgcagtggtgacaacgacagcaccagcgccggccaggatcgcgcctccgccccaacgtctcgagcccactcgcctcgttcacgagaaggcccgcttggccgtcgagatggcctgaacaacagccacacctggccgtctgcgcaatcaacacataacaatcaaataggcggctatgcagacgcccatcctccatcgtcgacacccctaacctcggtccacgaccctctagctggaattcccgcccaacccatcaactcctccaacatcaacgtcaattttatgccacccccgccatctgtctattacaacttctaccaaccccgctccccgccgccctcaggcgagatgaacccttccaatccaaattctggttcagcgtcttccaatctcccctcgcactcgatgaatgagcagccaggtgtctcggattggttcgcccttccgctagaccagttcttcaactcctcgactgcggtcgtggatcaagggcttggtgggacaggcccgatggtgggtgagttcgatatgctg

SEQ ID NO: 24352 - DNA, 666 bp, Emericella nidulans
actactgtttcccccatgaccgcgagggttatcaagcgcatcaatagacccgacggtggcctcactcgactgcgtggtaatgtgcagactctgccaaatggcaacaccttcgtcggctggagtgagcgcggctaccacagcgagcatgacccggacggcaagcttctgatggaggctaaattcgtctccacgcgcctctcatcgtaccgatcctacaaatacccttttaccggacgcccaaatacaccaccagatgttgttgcatctgtgtacggcacggaacccgcggacctgaccactatcttccatgtcagctggaacggggcgacggacattgcttcatggcagttttacgcacggtcttcagaagacggcctaccagtgccggttggtagcacggtcaagactgactttgagacaatgtacattgccgatggatacctggactgggtgtccgtggaagctttggacaaggaggggaacattctaggcaaatctgaggttcagcggacacagacacccagtaattggcgactcgccgggttccagggcgaggagcagccaactccagatgatcctgcaatcctgtattcgacaaaagaagaaaaaccggatgtgggagaggaagaaggaagatggaaggcgaaaggaggaagacatggctga

SEQ ID NO: 24353 - DNA, 2082 bp, Emericella nidulans
tctgttctcttctgtccttctggtcgtgtccttccacttgcgccatgagctctcttgccagtggcccagccgggttccttctgagcggcttcgaccgtcactatgcgtccattgcgggcgctgctttcttcgtctgcgcgcttgtcgcagttgtcctcgtcgtggcgtcgcagaagcgcaacaaggtcgataacaatagcgggatttccgtctacctcaggttcatctatgccagcttcctgaaaccccatgataaaggtgggagcggccaacaagatgcgttggagagcttctattctactcaagtatgagctcatcttctgttcactggctttcaggatgtcaattgactgctccccaggctactgtttacgacgctacccggaagcgccttctacgtggtcgggaggatatgcttggtcttgttgccgctcagctcaagtacaaggtcgagaacaaggagcttcggaaaggcaaggcgatctgggtcgatgtaaggttctcgtgttcccgctggccccgaaaaactaacgaatggtgcagattggtggcggtaccgggtaagcatcaagatgagcacagcgttcctctgtcgttttctgacagctctagatacaatatcgaggctatggccgagttcgtgcccgttcccgaattcttctctcatgtctaccttgtcgatctttctccttctctgcttgaggtagctcgccagcggttcgaacgactaggatggaagaatgtcactgtcgtttgccaggacgcacgcgccttccaattgccagaggaccatattgatcctctaaagagcgtaggagccggtgctgatctggtcacaatgagttatagcctgtcaatgattccaggtaaggactcgttttatgcaattctcgaacagccactgacagtaatagattattacagcgtggtggactcactaagcaaattggtgaagccgtctggtctcttgggtgtttgtgatttctacggtagggtccaggtttgcagctagcaatgagaagaaacactaatgctcgaaaagtccaaagcattgtcgatgtctcctccaggaactatattggcggtgtctttaaccgacatgttaactggctgggtcgtgcgttctggcgcgcttggtttgaggcagaccgtgtgaacctcgatgccgctcgccgagactatttggaatatcggtttggaactgtcatttctgctagtgagcgtaactacttactcggaggcatcccttactacatcttcattggccgccagaaagacatctacccgaatcaggccagccgtgaggccatagaaaagttggacgcttctttcacagaatcgccttatctctctccagcaaaccatcgcgaggagatgaataacgcaatcatccagagcacacaagagattcactctaaagcgtatgagtcggccgtcgtcaacctgagcgccaaccttcccctgcctgctgccttctatcaaaaccaccattaccgcatcttctataatgatctcctcccgaaacacactcaattcaagaatgagtacatctatgccttcaactgggaggaccctcgggttgaccacagactactcaacataaagcgcgacgacgttatactggctatcacaagtgctggtgacaacatcctagactatctgcagaagagcccgcgccgcgtgcacgccgttgacttgaaccccaaccagaaccacctcatcgagctcaaggttgcaagcttcatcgccctcggtcaccgtgatgtttggaaaatcttcggcgaaggaaagcatcccgagttccggaaccttttgatttcccgtctgagccctcacctatcaagtcaggctttccagtattggcttgaacacagtcatgtcttcacctcatcttctggccgaggactctatgagaccggcggttctcgccacgccatcaagatgatccgctacatcttcaaagtcttcggtctggagggccaggtgaaaaagctctgcgaggcccagaccctagctgaacagcgtcagatctggccgcggatcagggccgttctgttgagcaagccccttcactgggcggtg

SEQ ID NO: 24354 - DNA, 1354 bp, Emericella nidulans
acggcgggaaccagcagtttagtgcccatcgaatgacctttatcggttgtgcaaccgctgtgcagattatatgggactggacctgggtctggaaatcacttgatattcagggcgccgaagttgggcttcgtctggtcagcaacgacggcagtggtaatgttggttcagtcgccttgatcgattccaaactcaccagtgtgaacactgctatcatcatagcccctgcgtcttcaactccagggaccggtacgactgggttggttctagataataccagaatcgacggccccattgtggataccgctggtaaggtttatttaggagcaggctactatgataactgggtgcttggccctacatacaggggtaccacccgaacctggtcttcagcgcccttctcatcgtatccgcgggagcagtcactacttggaaatagggttgatggcctcaacaatgcgccgtattttgagcgcaaaaaaaatcaatatgcggataggcctgtcggagattttgtccagctcaagtcactaggtgccagaggtgagaacattttcgttgcgccattagtcggctagctaacccagctcaggggacggagttactgatgatactgccgccgtccaacgggcgtttaacgagcacgggagcggaaacaagattatcttcgtggattctggcacgtacatcctgactgacacggtggtggtccctaaagatgccaaaatccatggggaagcatggtcacaattcgctgcttctggcagcgcattctctgatgcaaagtacgtagtagctacccactcgcgataggctttgctaatgctgcgctcttagtaaccctcgtgtcatgcttcagatcggaaacagggcagatgttggatccgttaagctacaatacttgatagtggcatcaaaagcaggcacagctggggcggtcctgatgcagtggaatgtcaaggcagctagccctggtgaggctgccctctggggtatgttgagtcagacctttggcattctaaaggcgtatacttacagatgtctcttatcatagacgtccatgcccggattggtggcgctattgggacggccttgacgcagacagaatgtccaccactgactactggcactaagccgacctcctgtcaggcagcaagcctcatgctgcatctaacaccggaggcttcaggctattttgaaaatatgtggctttgggtagctgatcatttgatagagtaggttcattttccattgccgtatctttcaggtggtctggtatttattttttgctcgatttggatcaagtactaaaactcagctcagtgacctcgatctgaatgatgcttacaatgatatg

SEQ ID NO: 24355 - DNA, 713 bp, Emericella nidulans
gccgagcgcgagaggcgatggccgccctggaggcagacgaggatctcgatgagatgggcaatatcgcggacgagcaggcagggcactcgccccatgtggcagcgatggtgtatgggcgcaagagcagcaagctcgctggcagcacgacgacgcgccggctgcggtttcgagcgtcgagcactgactggcatcgctttctggggtttccagacccgctaccagtcaacacggtgctgggcaagcgcgctaacccgtgggaggagcaggctgtcgaccatcaggagcaacagcaacagcagctggcccagacagacatggcgcaggcattgcagcgcatgacaggacggcccgcgctgcagttgcgcggggtgcaggcaccagcgctgaaggcgatccaggacggtgccagccctgtagttgcaatcatgcccacaggcagtggcaagagcatgctgttcatgttgcctgcgtatgcggccccagggggatgcacaatcatggtggtgcccctgctgtcgctgcgcgcggacctgatgatgcgctgtcaggccctgggcatctcgtgcgtgtcgtgggagagccgccggccccctgacgaggcagcgatcgtgcttgtgacgcctgagtcgactgagaacccggatttccacacgttcctgaaccgccaacggcagatgcgacggctcgaccgcattgtcatcgacgagtgccat

SEQ ID NO: 24356 - DNA, 510 bp, Emericella nidulans
gagccaggctacgacttttcggtcttgatcgacttgaagagccttcccgatgatcatacagcgcgagaggacctcatcacacgactagctttgctgaagcgcaacgcaatggccgctccgttcgagaaggcgttcgatgagttcgcgcagctggcggaggaagcttcaaagtacacttcggaggctgcgccagcgggtgttgcggagggagtcgaagtcatggcgattcattatcgggaagaagaggcaatttatatcaaggctagtcatgatcgagtgactgtgatctttagcacggtcttagaggaggagacagaccgtattttcggcaaggtcttcctacaagagttcgtcgatgcccgacgacgtgtagcgaccttgcaaaatgcgcctcaagtccttttccgcaacgaccctccgctcgaactggctggcgttcctggtctacaggacgctggtgacggcaagatcagttacatcacatttggtatgagctctctcaacgtctga

SEQ ID NO: 24357 - DNA, 690 bp, Emericella nidulans
atgcttcagcatgcattcacgatacccgagctggaggagtggaagttaacgcccggcgagctccagacatttttgctggcttgtcgcgcgtcctataactcatttgtcctctaccacaatttccgacacgcgatagatgtcctacaatccgtcttctgctttttgctacatatcggcgctctgcccagctatggatcgattggcgccaacgctgataaaaactgcccgatcgcgtctatgctcaagccgtttgatgctttgacattactgatagcagcgatcggccacgacgtcggccatcctggtgtgaacaatttcttcttggtcaagctcaacgcgcctctggctcagctctacaatgacaactcggtgctggaagccttccactgtgctgccttctcgcagatcctgcgccgctactggcccgcagcattcaaagacaaggcactgcgcaagctgcttatcagttctatcttggccacagacatgggtgttcaccagaagttcatggaacgactgggggctttgcaggaaaaatactcggaaaataaccggacaacagatggctggaagcctcaagatatcgatatgtacaagactttggtttgtggattgttgatcaaatgtgctgatatcagtaacgtggcgcgtccatgggaggtggctgagaagtggaccaagatcctgaga

SEQ ID NO: 24358 - DNA, 240 bp, Emericella nidulans
acaagaataggactcatccgcgacaactccattcacgtcggaattcgcggccccgtcatccgtcctaaaggcgacatcagaaacgatatccgctgcggcttctcgattatcaaagcccgggatctagatcgtctcggtgtagccggtgtagtggaggagatcaagacccgcgttggtaacagcaaggtctacatctcggtggacattgatgttttggatcctgcttttgcaccaggtacc

SEQ ID NO: 24359 - DNA, 860 bp, Emericella nidulans
atgggtcacgaagatgctgtttacctggccaagctcgccgagcaggctgaacgctatgagggttcgttctccttgtttctaggtcgttgctggaactcgtggcctcgatattgacggagttccatctagaaatggttgagaacatgaaggttgtcgccgcctctgacgtagagctcactgtggaagagcggaatctgctttctgttgcctacaagaacgtcatcggcgcccgccgtgcgtcctggagaattgttacctccatcgaacaaaaagaggagtccaagggcaacgagtcccaagttgctctcattaaggagtaccgccagaagattgagggcgagctcgccaaaatctgccaggacatcctggacgttctcgaccagcacctgatcaagtccgctcagagcggcgagtccaaggtcttctaccacaagatgtatgtttctgtagttgttcatctatgccacccatcttaacatatctctacgccaacaggaagggtgactaccaccgttaccttgccgagttcgctgttggcgacaaccgcaaggctgcggccgacgcctccctggaggcctacaagtctgccaccgaagtcgctcagaccgaccttgcccctactcaccccatccgtctcggcttggcccttaacttctctgtcttctactacgagattctcaactctcccgaccaggcttgccacctcgccaagcttgctttcgacgatgctattgccggtatgtagcgcattaatgtcagatctaggcgctcgactaactttcgttgcagagcttgacaccctgagcgaagagagctacaaggactccactcttattatgcagcttctcagggataacctg

SEQ ID NO: 24360 - DNA, 302 bp, Emericella nidulans
gtctgaacctgtctgtgttccttgtcggtcttgataacaccattctctccagcgctattcccaaaatcaccgaccgattccacgctctaggcgatgtcggctggtacgccagtgcttaccttctcacaaactgcgcctttcagcttttctggggcaagctatacacattctacaccgtgaaatgggtctaccttgtggctttgtttctgttcgagcttggctcgttggtttgtgccgttgcgccttcttcaacggccttgattggtggaggcgggcagtggctggtgttggcgctgggggcg

SEQ ID NO: 24361 - DNA, 575 bp, Emericella nidulans
cacatcgtgtaaggacattcacttcgcaacgtgacgttgacccgaaacctgagaggagagtaccacctactgaaaacgatggcaaacaagacgacggcggcaactcgcagcctcctcaaaagcctgaggggcccaaggattcagaggaacccaataagccagaggaggacaagaagcctgagcagcctccctcgaagttaaccgcggaggaggaggagcaggtcaagcagttcttcgaacacatgacacaattttttccggcctcgcaaatcaacgacctgcgaatattcgtgagaatattacaaaagaatggcatgactccggagacacggcagtttatcgaaaagtatatcgtcacggggaaggagccgtcgatgatggagtacatgcggatttctacgcatgtacaatatacggtaaggaagaatgccagccaagaaaatgagcagaaggatggccagaaggaagaacagaagcagagtgggcagaatgggcagaagcaacagggcaagagccagccggattttccagatttaaaaccctgggatttcaaattcgaccctgatcgagcctga

SEQ ID NO: 24362 - DNA, 201 bp, Emericella nidulans
atgcctcgttccaagcgtgccaggatcgtccatgagtccaagaccgccaaaaaatcgcacaaggaacagaccagacgcctgtacgccaatattcgcgaatgcgtcgagaaatatgaccatctcttcgtcttctccgtcgacaacatgcgaaacacatacctgaaggatgtgcgcacagagttcgctgatagtcggtaagtg

SEQ ID NO: 24363 - DNA, 1174 bp, Emericella nidulans
atgcttaaggccaccgctggcggtggcggaatgggattacttacctgcaacaccgagaaggaagtacgggaatcgtttcagactgtacaatccaggggtgaagctctcttcaagaacgctggactcttcatcgagcgttactatccgtctagccatcacattgaggtccaagtttttggaaatgggcaaggtaaggctatttccattggggaaagagagtgctccatccaaaggagacaccagaaagtgattgaagaatgtccaagcccctttgtaaccaggaatccggagctcaggaaaggcctgtgcgacgccgctgtccgcctcgctgaatcaattgactatggctccgctggaacaattgagtatctcgtggatgacgaatcggggaagtttttcttcttggagatgaacacacgtcttcaagttgagcatggaattaccgagctatgctacggcgttgatttggtggaactcatgcttcgacaagcggatgcccagttgtcaggcagaaaaggtctcgaagcagagtttctctcgagcattccggtaggcgctccacaagggtttgccattgaggctcgagtgtatgcggagaacccagtcagggactttgctccttgccctgggatactccaggacgtggattggaaggaaaccacaggatcaagaattgatacgtgggtgtacaggggaatcaaagtgtccgcgaactacggtaagactttgtgcaaatcctgtacctgcaagagaatcctgacaaggaatagatcctcttcttgcaaaggtcatgtatcatgcatcgagcaggcaaaaagcgattgagggactgagagacatcctaactgggtcacggatctgtggccctccaactaacctcgggtttctggctgaaatccttgccaacaaggactttaacgctggaaacaccttgactaagttcttgaataatttcgaatacaatctagctgctattgatgtcatctccggtggcgcttatacgctgattcaagactggcccggtcgtccaacagtaggccgaggcttctgtcactccgggccgatggattctgttgcgttccgcattgcgaatgctctggtgggcaacccagtcggtcttgagggcttagagatcacgctgagcgggccagagctacgtttccttggaccagcg

SEQ ID NO: 24364 - DNA, 378 bp, Emericella nidulans
atggcagacacagcagtgatcgatacatcacctgcagcggccacagcagagccgtcagtcgatacaacgccgcaagatggcgaaagagaagaaataacaccaaatggagagaacgctcttgtccagcaacaatcagaaaccgccgaaacaggtatcacagacgcgaacagcacacagaagaaaacgaagaagatcattcggcggaaacgacgacctgcacggccacaggttgaccctgcgacgttaaagtccgagcctcccccacaaacaggaacggtgttcaacatctggtacaataagtggtctggcggcgatcgcgaggacaagtatctttcgaaaactgcggccccgtcacggatgcaacatcgcaagagatag

SEQ ID NO: 24365 - DNA, 448 bp, Emericella nidulans
aagcccaacgatgcggaacagacaccgggcggaaagctgactccgcaggcggccgaggcactattggaaaacaatccctccctgaagaacgagctcggtgggttagataaggacaaggctttggaagcattgcgcaagatggatatatctgaacttctgaccgggctttctttgaccgggaagaacaagaaggatatggccgcgtttaagttctggcagacgcaacccgtaccgccgcttcgacgaagccgccagcaatgctgccggtgggccgattaagatgatcgaccctgagaaggtatcgaaggagccggatgcgttgattgagggcttcgagtggaccaccctggacttgacgaacgaggaggaacttcgggagctctgggacctactcacataccactatgttgaggacgataatgctatgtttcggttcagatactccaag

SEQ ID NO: 24366 - DNA, 1155 bp, Emericella nidulans
cgagcaacttctctgacctcggagagtttacggagccataatctcgcattggaacaagtcaagaaacagcaccaacctgagaaagtacagcctccatctataccagtggactctcctagcctcgatcagcatgatgcgtcagatatcctcaagactcagtccatcgtaattggcgtagaagatatgagctatttgcggccaccgtcagtgcctttcacgcctcattcagtcccatcgtcatcacctggtccgttcgagattagcgaagtgaggagagtggccatcttcccgcataacaatgagtctctattacttgtcaatccacatggacaaagcaaccttcgagcacagctacaacaagctgaacagccccagacccccgataacacccaacagactactgatgtggattctccattgcggaaccctcggccaccgccaaaaccgccagtctctgcagctgctgataacttcgtcgattttgaccagctacccggagaagtgactaatggaaaagacccaaccaatggtattgatcgtcgtccaagctccaagagacggccgtggattgcccgacctcggtctgagtccttcaactcgttcgtgcggacactttcactcaattcagccaggaaccctaaagctggcgaagacattgacgggcgatcgcagcccttctggcgtccgcgccgattctgggatgactctccggactccctgtcacctgaagaaggcaactccagaccgcggaacctcaaacagccagacgagatcattagcaactcattaggaatgccgcagaagcgggttgtattcgatggcccacctgtctcggctgcccgcccaggcgcagtacggcgaaccgacggtcaccgagccaacagaacaatgctcattggaagcggcatcttttcaccggaggccttgtactcccaaacctcgctccaccagcgccgattcccagccgtgccgaggtggcgactacgattccggtctggcattgcgcggtctctccgttggcgccttcgacgctcaatacaacaacgagtcgagggaaggcgcgaagtccggcgcgagaagctcaagcagagtattggcgaggctgtcttgatggactcgagcacacaagtcagaaaaagccatacaatgaaatga

SEQ ID NO: 24367 - DNA, 494 bp, Emericella nidulans
acacaatgggttccaacaagatctggctgcgcgctgagaccaagcctgccgaggacggtctgcttgtatgtgacttttcatgcattcaagcggccgtttgttaatctgctgagcagtgacaccgaccacttgcaaggctcttattgatgctggatatgaggtgacggttgagcgatctactcagcgtatcttcgatggtaagatttgtctaatggactccaagctcatgttgggtgcggtcgtgttcgcattgactagtatcctggcttctgattttgtactggacttcgctgacctttttccttcgatagatgacgaattcgcaaaggttcgaacgcctcacctccaaatgcaacgtgcctagattttgaccacgcattgtacaggttggcgctcctcttgttgaggaaggttcttgggtcaaggatgcacccaaggacgcttacattctaggtctgaaggaacttcctgaggatgactttcctctcgagcac

SEQ ID NO: 24368 - DNA, 915 bp, Emericella nidulans
atgcgcagggcagtcggcgccagctcggtgctgtccctcctttgcgtgctgacccttgtcggccatgggtctgcacaaatcccgtatacaccatccagtcttttatacgattcgcagcataatacttcatttgcctatctgctgcgggcaaccgaaggccgaacggaatttatctcgctagacgtttctcggaaagtggacacaaacaagtccgcgtatactatactgctcgacgacgtcccattcaacaagaacgtcggccagtccgcatacgtacctgttattgaccaggatggggtgctgaagatctacgcgggtgactgttgggactcggggaacgcaccaaaactatggtcttttcgtccggattctggcagttcatcaggcagcgggaaatgggaggagttctcgattgagggaccaggacaagttgatattaccaatcgaccgggccatctgtcagcaggcttcgcatactctgcttcaaacactacccaaagctcggtcttcgcgtttgcgggaatgtgcccgtacgaaagcgatgacagcacttcttgggtctctgccgcgaactactcccaaacgatgacagtactggctccatgcgagaacgggaagtgctaccaggcgtcgattactggggacagggcgcctccgatcccagaagcggggttcacgttcactcccctccaggccacatatggctatacggacggtgtactccggtaacaacaggacttccttctcattggcgggcatactcagcaagcattcattaacatgtccgagttggctatcttctctgcgccacagaatagctggagctttgtaagcgtgggatacgccgcagacacgtcaagggctgatctctccctccgcaacacagccctaattgagccccgatccggccacacc

SEQ ID NO: 24369 - DNA, 813 bp, Emericella nidulans
cgagagaaatacgcagaccagatcaaaatcctgattggctttgaatgcgactggattttgccagagtcgcggactttggttgagacatcaatgcgtgctttcccgttcgagttcttcatgggctcgatccaccacaccaagaccatacccatcgactacgaccgggagatgtacgagaaagctcgggatctagcaggcgggtcggacgagaagctcttcgaagccttctttgacgaacagctggacatgctgaagcagttgaagcctgtcgtggtcggccacttcgatctcatccggctgaagagcgacgatcccgagcgcagcttcaagcagtggccgggtgtttgggagcgaattctgcggaatctggactacgtggctgggtacgggggcattctggagctgaactctgcagcgctgcgaaaggggatgagcgagccttatcctaaagctgagatttgccaggtcagtttatctgctctttatgactgtctggatagtggtcatgtcagctggaataccgcagcggatatatgcgagataatgttctaattgagtggacaggagtttttggcgcgtggtggtcggttctgtttctcggatgatagccacgggctagatcagattggattgaattacgccaggatgctggagttcatcgagacgaatacggacatcaaaacattgtattatctcgatctcggaaacgaacccgaaactcaaaccccggtggatagccggtttccccggacggtggtcaaatccatctctatggaagaggtgaagaagatggctttttggcagacgaactaa

SEQ ID NO: 24370 - DNA, 1226 bp, Emericella nidulans
ccgacaaccgtcagccttgaagccgagacagaggggttgtctcaccagtcttccgccctttaaataacctctgccgtcacgaccgagccaacaacttgtcgaacatctaccaccgtcaccgccaaaacaatgtatttcactccacctcctatcgagattcccttatcctatgagtcctttccaacacaacacatcaaactctcacattatcctgtgggctcagcgaatgcaacacctgtcgttatcgttacgctcaacagacccgaaaagcgcaatgcctttacgatggccatggccgaggacctagagagggtcttcggcctgttcgaccgcgacgagcgcgtgagggttgtcgttttaacgggcgctggcaatacgttctgcgctggcgcggatctggagattgggtttaaggcattggaggagaggtcgagggagcatagggacaggttggtcctcgcccatgaaaggattgtagtaaggtaactgcctcggactgacttggtaattatacagtggtggtcgcgtagcaatcgcaatccacagatgtcgtaagcccactatcgctgctatgcaaggctcagctgttggagttggtatgaccatggttctcccagctgcaatcaggtacacaccctgtcacttactttaccctacagtcgcaactccctacggctaaaaggaacctaacgttgaacaggatcgcacacgaatcaagcaagtacggcttcgtctttgctcgccgtggcattactatggagtcttgctcctcgtattttctcccccggctaatcggccactcgcgtgccaactacctcgtctcaacgggcgccgtttacccgtccacatctcctcatttcgggggcctctttgcagagacgatgccggagcagagtcaggtccttccgcgcgctttggccctcgctactgagatcgcagaaaatgtgagtcctcaggcagcagcgctaaatcgggagcttatgtggaggggacctgagagtgcggaggaggctcatttgttggagtccgaggttatctatcatcggtttacgtcgccgtatgtttgcctttcgtcattaactgcttttgtgtatgtttgaatatggctgacaattcatttctttatgtagggaccagaaagaaggtgttacggcgttctttgagaagagaaagccgaactttgttggggatgtgaataagagcttgtcggcgacttatctcgggtg

SEQ ID NO: 24371 - DNA, 309 bp, Emericella nidulans
attgctgacttctattagtattctgaccctgaaggtggctacttcgtgctggctaacatggcctccgtcaaactcccagagggctaccctttccctcctcacgttgctagccggccgcgtgactttaagctctgctggttccttatccacgaagtcggtgtggctgccattcctccgacggaattttataccgatgccaacgcacatatcgctgaggactacctccgctttgcagtttgcaaggaggatgacgtcctcgagacggcgaaggaaagacttcgtgggctgaagaagtatatcgtgcggtaa

SEQ ID NO: 24372 - DNA, 220 bp, Emericella nidulans
aaaactctgaaaaatctatcttgcaggctgttcacgatagggaggccggtggccgctcgacagtggcggcaaatgtgactaggacctacgactatggctacatatacccgttcgaagccagcactaatcgccatggaaaccttgctgaaggtctatttgtggctggaggcattggcggttcctcaaaagatcccaggaagcatcatactctgccggcaag

SEQ ID NO: 24373 - DNA, 1548 bp, Emericella nidulans
atgactcagtacctggcatatcagtttgccggggattcgcccagtgcggcatcgtacatgtttggtcagttaagctatcggtctgtttttcggccgggggaagagcgccctcagtttaacattgcgtaccgatggtgggaggatgaagcaacaactattctttggacttttgacgtcgaggtgatcaagagagttatacgtttcaagcttttctctgacgaacagtttccacggatggcgcttcatcgtcgaccaacttccacagtggacgatctcctcaagggactttttgactctcaggaaagagtattctatgctaacctaccgcacgctcaaaaagtggacgccattctacagcgatgcaagcctactgctccgcccatgatttcgtggggctggctcccagcccggatggagataggccggacgggcgataacttggaatctttagccgtcgccaaggccattgatgccgaaagtcatcttcatttcacccgtataacatttgaggagctggtccggtattcgctgggttacccgtctggccaagtggaatggttcttgcggcagcatacatgtttctatgcccacctgttggatcacctgcatgcatttcccgagcaggttgagagatacgcggaggttgagaaggtttgtggctttttaaaggtgattgtgacattcttgtgcagactgactgagcttcccatagcaccttcagactcgaagcccctttgcccatcgcgctgtgattagtgctctacaagatgcaggttacgcgctcgaactgccatgcatgacacccgggttcggattctttgctggagcaattcaacgtcttttcaatgaacttctgaacttgaagttgattttgaaggtgctcaatgtcttaggagttcgatttgcgcggtggtacttgcacgcccaggaaatggactggtcgcggccgttcagcatcgtcttctcttttcttgaggacatggacagctcggattcgccagtgagctttgctcgtaatctgaccagatctgtcgagcgggattttgccttactgattgaagggggtactttggacaaaagtgtggctaatcgtctgtcggaacgttggcagcttctctctgtagaagtttgggaatgttgcaaggcgcttccagaaacgatccggtttatccaagaatgtttagaggtaagtcatcgccacccaggatgattgtctggttggctaacaccctgcagcctctattgactttgcggaactaccattccctgactgccattctcagtgggcttcacaagtaccgcgtttccgaatcttcgctcgtccgccttgaaaacggaacaactgccctgaatctgaaccaactgcttccttctgagatgttatacctcctcaatccgtcacagaactacgcgctatatcggcagcaatatcagcaggcgccacggattcccttcctcattcctcacttgtatgagtatcatcagcttggtgagcctattcttcaaaacctctatgagcaaatgagcgctgtcattcctcagctctaa

SEQ ID NO: 24374 - DNA, 456 bp, Emericella nidulans
agacacgcgacgctccgcagcttaccaaaacccaggatcggcggctggttagctccaatcttcgacctgcagggattcatcgtcggccagataccattatcccctgcgccggaggagctggaagtccaggcaacttccttcgccctcgcctatcagctggcgaatgtttacgggcttatggcgctccttggcgccggcgtgctctacgccacctcggagccgaaggtgctgcgcaactacttggtcgctctggccattggtgatgtagggcatatctacgtgacctaccttgccatgggcccagcgcttttctttgatgtcggtgggtggaatgcgctcacctggggcaatgttggggttacggcctttctgtttgtgaatcggcttttgtactgcctgggtgtttttgggtatgctgaaggtggctccgtgaaggagccgaagaagcgggtctga

SEQ ID NO: 24375 - DNA, 1099 bp, Emericella nidulans
acacatcaatttcacagtctaagaagtgggtcgacattcacttacgtctccaatgatatctacgccgcatccagcgcaagtagacctttagttatctttattcacggctttcctgacagctggggagtatggcgccatatcctcagcgagtaatccctgcaaagttcagcgacgctggtcgcggttgatctgcctggttatggaggctctgagagcttagatagatattcggctgccgccgttcttgagatccttaccgagttcatcattgctatgagaaagaagtatggtattgatggtcctatagctactcgtcagcagaggaccattatcatcgggcatgactgggactgtgtacttgctatgcgactggcagctgatgctcctcaactagctgataggttcatcctgacaaacgggccgctagtacgtgttatccaccaacatcacccagtcgctaggctcgactgacacatgtccctagatccccctggcagtttctaacatcagtatacggctgtcatccttagtgtacatgctcaggtgcttcctgctctcacccgttcgagagcggtcattattgttcaatgccgccaagtcactaaagcccatattatttcaattgtggcgttcgggatacatattcgcctttcaacttcctccgctattgattgcctacattggcaatggagcaaatcaagcaaccctaaagcacattcataaaatgtcgtacggcaaccggaactacactcctactgacgccgcagagtgcatggcaagcacacttggtccatctattcacgaacgcatgacacaaaccgctgatggccaggcatatgcggaatccgcggtgaccagaccggcgatctcaaagttcgtcgaaatgtgcagctactaccgagacggcactgctaccgccccctggaagaagtctactgagacggtaacaagcctctgtggcattgcggaagagaacggagctcggtgcatcgatagtgacgcgagaatactcgacgacggaccgccaggcgccttgaaagccagtacgacccgtggtctggggccagaaggaccatgcactactcggagctgtgcctag

SEQ ID NO: 24376 - DNA, 614 bp, Emericella nidulans
acagtggttttgttgaaatctcggtgtcgctgctggatccgccagtgaaaaccgacccagattctgccgttgcacacttgcgcttcactgataccgggtgtggaatgtctcaggaattcctgaggaataagctgtattcgcctttcgcgcaagaggacgccctagccgaaggtgctggccttggtctgagcattgtgaagcaacttgtctcttttttcaaggggtcaatagacgtgaagagcgagattgatgttggaactcaagttgatatccaaatccccgtccaactggcccccgatgatttcgctacaggtgcatttggtccggaattaggcatgggtttgcgggaaaccacattctctctcatcggccttgatgcgtaccctgaactttgcgaagagcctactggaagcttgagctcagaagcgaagcgaagaatttgcttacagagcttctttaccaacctactttccgggaagcccaattggaagatctcctcgacagccacgttggccgaggcagacggcgagattgcaattgtcagcgaagcctctctgaaacaactgttcgtagacgaggcactgcgtcgtcgtgcggagaaaaatcagacctag

SEQ ID NO: 24377 - DNA, 1573 bp, Emericella nidulans
  unsure (1)..(1573): unsure at all n locations
ctcgatcaaaaagcaaaggctatgttcacttgcgttncgcttctcccacgggctctgaaagcggcatttgcggcagggctacctaaagaccgtatttatttgattgatgtgttgcccggtagcgggaagatcccgccggaatttaagacactctcacagatcgtcgaggaaggaaagtctcttccgaagttggagaagctcaaatggggggcaggcgagggcgcgcgtcgaactgcctatctatgctattctagcggaacgtcagggttacctgtaagtaaccaccctccagataaggggcatttcttgagcgctgacagagcattagaaaggagtaatgattgcgcaccgcaatgttattgcaaatgttctgcagatgacggctttagagaaatcatggcgtgatacccgcaagaatgcggacggcagctactatagtgacgtcttgctgggcctgctcccccagagccatatttacggactggttgttatctgccatgctgggaccttccggggagatcaagtcatagttcttcccaagttcgagttgaggtcgtgtttggccgccgtccaaagattcaagatctctgttttgtttgtggtaagtcttatcctgtccggaagcgaacctatctaacgagctgcaaggttcctccgatcattatcactatgcttcggagcccagaaatatgcgctgagtatgaccttaactcggcggtggcgctcgtgactgggcgcgcaccactgggtcaagagaccgctctcgactttcaaaagagatatccgaaggttgctattcggcaggcatatggtaggtcatcagcttcatgagtatgaccgatagattactgatttcgattcacaggccttaccgagacatcaacggtcgtcacggccacacactttgatgacatcgtgcctgggtcttccggttggcttatccccggcgtagaggcacgtatcgtgaccccagaaggggaggatattaccaagtatgacacccctggtgagctctgggtccgagctcccagcgtcgttcttggctatctcaacaatgagaaagctaccaaagagacgtttggcgatggatggatgcataccggtgatgaagccgtgattcggaagagccccaagggcaatgaacatgtgttcattgtcgaccgaatcaaggagctgatcaaagtcaaggttcgtagcaatgtacaggaaagcatgaccccccgataactaacctgcgtgctagggtcaccaagtcgctccagccgagcttgaagcgcatctcctcacccacccagcggtggcagattgcgctgtcatcgccatccccgatgacgctgccggtgaggtacctaaagcaattgtatctaagtcacctgaggcgggaccagatgacgaggctacagtcaagtcgatcgtcaaatatgtgcaggatcataaagcgcgacacaaatggcttaagggtggtgtgagattcatcgacactgttcccaagagccctagcggaaagatcttgcgacggctacttcgtgaccaggaggcggctatgcgcagacaagcaggctctaagctatag

SEQ ID NO: 24378 - DNA, 372 bp, Emericella nidulans
ggtcgcctccagttttaccgcacaaacaaaatccgcacttccctcaacccctcaaccacatcctccgcaaaacgcaaaagagaagacgggacagccatgccagcccctagttctggcctccgcgtcacgttcaagcagtcaagaccgaaccccagcaatcaccaccccagcaccccctccgccaaaaccccagggccaagttcaggtcttggaactcccttgcaacaaagacagcccacgaagctacatattccgaacttcgctgcagcgcaggttcaccgtcagccgccgtcacacacccccgcgactccgtctacgcctggtggcgggctcaagctgaaattgaaacttgggtcccagcctaagcaataa

SEQ ID NO: 24379 - DNA, 453 bp, Emericella nidulans
gatgtatcgaaactaatccactcggctggactcgcgattcaagcccttacaaacgcaagatctaacgactctacaactctcgcgtctgcggacaactcgctcgattctcataaggctcgattcaaggaagctacgtcacagtactttgcgcttctttcgtcaatcgatgttcgattgcggcgccaggtctatgctctggaggaagcttcaattcttgcgccggactcgtcttctagaacgggtgattctggttcaggtgcggctgcgggaggcgcatcgaacccgttggatgttagctggctgaatagtaggaaggatactgtgggcaaggagaaggaggcagagctctgggcggctgcgagacagtttgttcagcagattcaccaggccaactctgaagataaggctacagtgaaggtggaaggagaacaggagaccatggaagtggactaa

SEQ ID NO: 24380 - DNA, 675 bp, Emericella nidulans
atcggaatcgcgatgatctaagtgaggctgacgtccgtacgatactccagaagtacgacgaactgcgtaagtcttcttgtcaagaaacgcctggttgattgatctgacaattttgcagaggccaagtactccaaggtaaaacggtactattttgaacgggatgcccaggtccagcagctacaaaacaccgttgctcaccagcgtatggccgtttcccgaaccgttctcgacgacaacgagtacgccaaccggtttggccgtctggacggcgccatcaaggaccttgcattttccatccgcaaagactggaaaacacttcccacttggctttccgggtttgtcaacgaggatgctccagccacgggcacaaaggaaatgacggccattggccgctctgtaatgagccgctggctggtagacgagatctttgagcgttactttcatccggcccttgagccaagcttcagtcagcaactgaaatctattgaaatgaccttgcgcagacaacatacaaatattgcaacagacgaagataaagagaactccatcgcccgaatctccaactggcgccgcacaacgctcgacggtctaggcgactcccttcaaggccccgcagcagacgaataccggtctggactcattaattgtctagtggataacctcgtcgcaaccctt

SEQ ID NO: 24381 - DNA, 955 bp, Emericella nidulans
gcaggtgcaatgtatccctggagcgaaccgggtattatagtcgcgatcacccttggcggagtcctcttcattgtgttcggaatccaacagacatactgcatcctcacgacggaggagacccgactcttccctgtggaacttgtttcgtggcgccaacctcttctctcgctgcttttcgtctgcggctgctgtactggtgtttgcgtgacggttccgacatatgtgatcccactgtactttcagttcactgaaggcgacgaatcgcttcaatccggcgtccgactccttccgttcgtctgtcttctggtcttcagctgcgtctctggtggctatcttgcaggccgtctgggttactatattccgtggtacatcatgggcggtgggttctgcctgatagggtccgctctcatgtataccatcaagcccagcagcggtcctggagccacctatgggtacagctcgctgattgggttggggtctggcatgtaccttcaactaggccatgcggtagcgcaagccaaagtcaagccggagaaagtcccggcagccgtggcatttaccacaacggcgcagctgaacggactaacgtttgcgcttgtactgtcgcaatgtgtcttcgtaaacgaggcagcgaagcgtgagtatctcctactgctgaattccttcagccattaccgtagtcgtggcaattataagctaatatcctttaactataggcatcggctggatcctccctcatgaaccacgttcgacgattgtggacgcgatctcaggaaccgggtcaacttttgtgcaggagttgccaacagctacacaaaatgaagttctcggtgcaattgtaaccgccattgatcggacatatatcctctgcatagttgcagctgctgtgaccttgctcgcgactttaggaatgaaatgggagcgtctattcatcgaggctgccgctgcagcctag

SEQ ID NO: 24382 - DNA, 204 bp, Emericella nidulans
atgtgctccaatcaggacccctcccagccaaagaagaaagagactcgtgctggcacacgtagagtaacatcgctcaccgcagagcaactggagagaaagcgcgccaacgatcgtgaggcccagagaactattcgacaacgaacaagagagcatattgagcgactcgaacttcaagtggcggagctgaaagccaagggcgattaa

SEQ ID NO: 24383 - DNA, 660 bp, Emericella nidulans
atggctgaaagcaagagactcagcagcagctcccgcccaggccaggacgagagcgagaagatccaggaagtgcagtaccagacccgcagccgacagaattcgaggatagatcaagatgacaccacattctttgacgaaatcaaccctggaggaagggctgagttgactcgtattgcctcgaactttgccaggcggacctctacagcggcatccactactaccgggaagggcattgagcgaatggacactgtcgacgagatgacccttgaggatccggcatttgatcccacaagcgatcagttcaatcattacaagtgggcccgtaagattatgaaactcatggacgaggaaggtgcccctcgacctccgtcgaccgggatcacttttcaaaatctcaatgtattcggctcggggtcagctttacagtaccaggataccgtggtctctctgttgactgcgccattgcgcctccacgagctccttttcaagcgagctcctgaaagacacattctgcacgatttcaacggtctgatcggtagcggtgaactcttgattgtcctaggacgaccaggtagtggctgttcaacctttttgaagtcactatgtggcgaactcaatggtctgaaactaggcgaagggtcgcacatccagtatggaggg

SEQ ID NO: 24384 - DNA, 758 bp, Emericella nidulans
gatacggttgaagggcaactcctctgtctcgatacccttggggttttgttttattatttccatgcattgtaatagttctcattttactacttttcgtccgacatccgtcatccccaggaggtatattaatacccgcgggcacaccgccgtctataaggttcgtgatatttctcaagaatttcggttcgtgcacctcacgtgtctaactatcccattttacaggaaaataagtgagaaatacgacaaagttttcgcgacgggctgtcagcccatcaacaccgatacaccccgagcgaacgcggctttcgtcgtgctcgcaagaaataaggaaatcgatggcgttatccagtcaatgaagtcgatcgagcgacacttcaaccgctggtaccgctacccttatgtttttctaaacgacgccgagttcgacgataacttcataaatactgtgaagaactatacaagtgcgcccgttgagtttgggaagatcgatgagacaatgtggggttaccctagttgggtcgaccacgaggttgctaaagaaggcatccggaaacaaggagatgccgcaatcatgtatggaggtatggagagctaccatcacatgtgccgcttctactctgggtaagccaccttcggacagcgcttgccgtcaaatactcatcctgcccaggttcttctacaagcacccgctcctcctgaagtacgagtggtattggcgtttggagcccgagatcaagtacttctgcgacatcacctag

SEQ ID NO: 24385 - DNA, 423 bp, Emericella nidulans
aaattacaagtgcgaaggcccttttggtcattgacgaccaagtcggccttgccaccgtcgttcgcgcctacagcaccaacgacttccgtaacaacatggtcgcccacgctgctatcggcaaggcgtttgacatccccgtgctgacgacctcctcggacgaaggccccaacgggcagatgcttaaggagattctcgatatgtacccgaacaccacggctgtccgccgccagggcgaggtcaatgcatgggataacgaggagttccgcaacgcctcaaggcgacggggaaaaaagcagttgattgtaggtgggattgtgacagaagtttgtaagtctctatagttatttccgcgcttaactcgatcttacactgactggattttgcaggcactgcgttcctcaccctctccattgtcgatgaagg

SEQ ID NO: 24386 - DNA, 335 bp, Emericella nidulans
gatgaaaccgtggtaaacggtgcgcagatcttctacaagcatcaatttggcatagcagacgagaacatctccagacacaattggatttcaggattggtcaatgccgctccttatctatgttgcgctatcgttggttgctggctgacggtcccattcaattcttggtttggccgacgaggaaccatttttataacttgcatcttctcggccacgacatgtctctggcaaggatgttgcagtacctggtggtctttatttattgcgcgcttcgcccttgggtttgggataggcccaaagtccgctactgtaccagtatacgcagccgaaacaggtga

SEQ ID NO: 24387 - DNA, 1162 bp, Emericella nidulans
cgagaaaaatgcgatgacagaagaagcgcataaactcatcaatgcgattcaacaaatggaggagtccctggttgacgagaaagccaatggccagtacagtctcgacaacgatgatcttcaggttacttatcccctcaatcgctgcgtcgccttcctccgagaacaacacagcgcaatcggcaaactacataggcagcgctttgaacaagtgaagagtacgcggttccctaatgctccgttattaaagttgctaacaacatacagaactggtcgaagccctcgagtcatattcgtcccacctcgaaccctccttcgttacactcgagcttcctcccacagctcctggatcttcggttgctccgagcttcgatctctctccaacgtacgtcacggccctcgataacgagtttactagagtgtacgaagaataccaccgccgtcttgagctcgtgaccacaacatgcgaagaaatcatcaagctctgggccgagcttgggacacctcaggcacaaactgattccagtattgttcagcactatcgcgagtcgcccgaacaactaggacttcatgaatcggacttggcaaacttgctcgcgcgtagggagaaactgctggatgaaaagagagggcgcgagcgcaagttgaaagatctcaaacacgccgttgaagggctttgggaacgctttggcgtcgaggaatgtgacagaaaggctttcctcgctgcgaaccgtggctgcggccttcgtactatcaatgagtttgaagaggaactttcccgtctaaacgagttgaagaggcagaacctacaccttttcgtggaggacgcacggtgccggctgcaggagctgtgggacgggttgtattattcggaagaagagatgttggactttacacccgccttctctgatgtttacagcgatgcactcttggaggctcatgaggcggagattgcacgcctagaagctttgaaagaacagcgcgctccgattctgaatttaatcgacaaacatcgaagccttcttgcagaacgagaggctttggctgtttccagccaggacgcgtctcggttgatggctcgcggaaacaagggagaacggcgtgatcccggaaagctactcagagaggagaagatgagaaaaagaatcgccaaggagttgccgag

SEQ ID NO: 24388 - DNA, 551 bp, Emericella nidulans
aagaattcggttctcctcacaattgacctaaccaaggccgttgccgacgaagcaatcgctcgcaaagactctgtcgttgtagcatatcgtacgcaatccgtgaacaatggctataacacagaccaagctcaccaatctatcgttcagatcccattatcttccgcggcctcaaatccctcactttcaatgacccccaacaacagtcactcctccgcctcgccgcggagggcataagcgtctattctccgcacacggccgttgacgcaacccctggtggtatgggcgactggctctgcgacgttgtcacgggcgcaaccactccatcctcgtcgtcctccgtcgccgacctagaatcccccccctccgccctctactccgcccccacataccccaaacctgggcccgtttcaccttgcacctcatccaaaataatcccccacacccgaagcacaatccacccctccccggctcccgtcccctcaggcccggaagacccagggatgggccgcctagtcacatccgcggagccccacccttggcctccgcattga

SEQ ID NO: 24389 - DNA, 732 bp, Emericella nidulans
atgcttcgagagcggaaggatgttaaactcagagatggacatctcgcttacctgcttcagcgactcacggctgatatcgaggagccagaccgccagggtgtcactttcaacttcattagggcggtcatggctcgcaagtttgtggtgcctgagctttacgagctcattgacaacgttgccatgatgatggtcacgaatcaaactcggtccgcgcgtgatcttgcccgtggtgtgtacatccattttctcattgagtatccgcaggccaaaaacaggtggacgaaacaactcgctttcttggctaaaaatcttgagtacaaacatcaagacggtcgtcaatccgttatggaggcgattcacatgctgctctctaaaacagggcaagagttggcccaggacatcgttggtacattcttccttccgattgtcattgtcatggcgaacgacgatgcggctgagtgcagggagatggctggtgcgttactcggtgaattctacaggagggcggaccgagagacgatgaaaactatccttgagccacttcggtcctggattgagcagatagagaatcctccgctcgcgagcactggattacaagctatgagaatctacttcgaggtggaggagaccgacaaggataaggaggcaggctttgttgctcagacccttccaacgatcatacagcccattatcagagatacagagacgaccaactggcaaactctgtatttt

SEQ ID NO: 24390 - DNA, 540 bp, Emericella nidulans
atgcgaaagcttggctattggatcgagctcgcgaagctgctggaacggggaggtattaatgccgtcttcctggccgatacttacggcggttatgatacctacgagggcaagctcgatgaatgtatccggcgcgcagcccaatggcccgtcacagacccaaccattgtatgtcacttgtgccgtaaattgagccaaacaggactgatatgagtccagcccatctctgcaatggcagccgtgaccaaaaacctcgccttcgcaatcactgcgtcgacatcatttgagcctcctttcctcctcgcaaaacgattttcgacattggatcatatgacggacggccggatcggttggaacatcgtcacttcatggaagaaggctgccttcaaggctattggcttggactctccaattgagcacgacgagcggtaccgtcaagcagacgaataccttcgcgtgctatacaagtatggcatcacctgcattccaagttggtgactgacgcttatccatggcaggctctgggagggatcataggctccg

SEQ ID NO: 24391 - DNA, 226 bp, Emericella nidulans
gcaggaaacgacgaatcttcaacttcagcatgaagttcctgctggatgggacggttggtgggatcattaatattgtcctcttcgtggccctgatcaacctgctcaagggggagagttgcggaagggtgtgggaacttgttttcgaggtatgtgtttttctcacttcaaaattcactggtcgagttcgcgatgatttgaataatgaatctgcaaggttggacagtaa

SEQ ID NO: 24392 - DNA, 229 bp, Emericella nidulans
gttcgcctacgcgaaggcgtacaaagccgtaagggcgaaaataccagaaccggcgcagcaggtttctcttcgtgtccagccagtatatgcgcggatcacgccccaacaacccgtcaatcgagctgctgccatccgtcaagcccgcagccgctacttctccacccgcgcgtcaggcccgtttgcttcatacttcaaagcggcagtccagggcgacaagactgccttatag

SEQ ID NO: 24393 - DNA, 279 bp, Emericella nidulans
cgcgaggatgccttacctcctgcggggaccacaacagaagaacagacctgggttgtggcggaaccaggcaaagttcatctccgatcatgttcggctccatattccgtttcgaagctcaagaacggtgggccgcaacaaccgcccccgaaagtgtccaacggccgtgccaaaacagtgccggtacgtcgtgtagaagccggagaacttcgtctcgagttatgggtggaagaggcacggcagaagttcaatgaaccggtggattctgagcatccgccataa

SEQ ID NO: 24394 - DNA, 709 bp, Emericella nidulans
atcaaccgcgtcttgcggcctctctcccgcaccgtaccctctctccgccctttcgttatccgacccttggccagtcgtccccttgagaggggtgtttgcccttaagccttaaagcgctgggaagttgctatcagtcatgacaatgacatttattataactgattgctaatctgtcacttcaacagcacttatgcattctctactacatgtcgccggcgggaagccgatctgaccggcctcacgccgacgccaatcacacacctttccgaaaccgagtcaatgatggccgagacagtgtccaaatttgctgaggagcagattggcccgaaagtgcgggagatggatgaagcagagactatggaccccgctctggtagagcacctattcgagcaaggtatcatgggcattgagatccccgaagaattcggtggtgcaggcatgaacttcacagcggcgattgtggctattgaggaacttgctcgtgtcgaccctagcgtcagtgtcctggttgatgttcacaacactcttgtcaacactgcattcatcaagtggggtgacgcccaggtccaacggacgtggctgccaaagctggctaccggcacggttggctccttctgtctctccgagcctgtctctggctcagatgcctttgccctccagacaaaggccgagaagacggcagaacggtttaaattgaacggatcaagat

SEQ ID NO: 24395 - DNA, 546 bp, Emericella nidulans
atgtctgccaaagaactcactttcaaggaggttgccgagcacaacaccaagaaggacctgtacatggtcattcacgacaaggtctacgactgcagttctttcgtcgatgagcacccgtacgtctcacgtatcttccagctttttgatgttcaccgcattggacatgccatggactgatttggtataattatagtggtggtgaggaagtcctcctcgacgtgggtggtcaggacgccacagaggcctttgaggatgttgggcacagcgacgaggctcgcgagatcctgcagggtctccttgttggtgacctgaagcgtctggtgcgttccccctgtcatgtcgcttggaaacgatcttttaacaatatttgtctattagcccggcgaccccactcctaaagttcacggttcatcctccagcgagtcttcctcctctagctccagtaccggcttcggcttcggtctctacgcgatccttctgatcggtggcgctgctgcctacgctgcctaccagtacctccaggcctctgctggcgctgagcagtag

SEQ ID NO: 24396 - DNA, 785 bp, Emericella nidulans
atgaatcggtctttgactaacgtcctgtttggtggaattgctgcccctcaacaagcccagaagaagattgagggcaaggtcacccagaccagcgtggaagagacagtggactctctagcaaacgcagaaagcgtcattattgtaagtatcaatccttggcacaaggcctctgctcataccggtaggttgtcggatatggcatggctgtcgcgaaggcccagtatgcgctcgccgaaatcacccacatgctgcgcgccaaaggcattaacgtccggtttgctatccatcctgtcgctggccgtatgcctggccaatgcaatgttctactcgcggaagcttccgtgccttatgacagttagttacctggccacccaaccctttcttcgtgctgactagtacagttgtcttggaatggacgagattaacgatgactttgcggacaccgacgtgactcttgtcattggagccaatgataccgtcaaccccatcgcactggaaccagactccccaatttctggtatgcccgtgttgcaggcgtggaagagcaaggaggttattgtgatgaagcgtggcatgtctagtggatacggtaggccttcgccttcccttcttggtttcaccatactgacttaagatagccgatgttcccaacccgatgttctacatgcccggcaccaggatgcttttcggagatgcaaaggccacgtgcgacggtaagtgtatttcttgttcggtattgagtcctattctaacttctgcagccatcaaagcaaacctcgaggctc

SEQ ID NO: 24397 - DNA, 283 bp, Emericella nidulans
aacttcgcctttgcagaccgcgatatcggcgtcacgcacgccacgtccgcgtctacggagccgtcgcgccgcagaaagttgcctctcgcacaggcagccagcgctcattccagctcagctacaagcgtgaagagacgctgccttcgtacaactcgtcaagtcctgtccgacgcgtctcaacggcgagcatttcccggttccccgtcaaaatctctccgccgctgaatccgatgccgatgcctatgtcggtgcctacaaattcgaactacgccccgtcgtctaa

SEQ ID NO: 24398 - DNA, 324 bp, Emericella nidulans
atgggtgttatttaccccctgtactttgtcgcaaccaaatgccgaaactcccaagtccgccaggaggctatcgaggtattatcaaccataccctatccagatggcgtctgggaaggccgtattcttgaagtgatagcgcagcgggctaaagttgtcgaagaattcggacttaatgctgatcagctagttcctgaatttaagaggatccatgtccttgggctggcagtccatcctgagtcccgcaaagtctgcgtcgaatttcggaggaggcctaatggtatggacggcgaatgggaggagtgggaggagtggattagttattag

SEQ ID NO: 24399 - DNA, 1124 bp, Emericella nidulans
atgtacgacgccagctttgcggcgccggtcttgttttcagtgttgttcggccttacgacgatcatccatattgttcaggcaatcatgtttaagaaggtacgtccacattgtactgaagacaaataaaagagaaaaacaaaaaagaagagataaggaaaaagacaatgaaggaaagctaacggattcagcgctatgcttgggttgtaatcatgagctcactatgggaactcatcgccttcattatgcggtccctcttcgcaaaaaaccaaagcagcgacgcctacaacactcccttcacaattttctttctcctcgctccaatctgggttaacgccttcctctacatgacgctcggccgcctcatctacttcttcctccccagcggccgtctcggcggcatcggtgcaaaacgcttcggacacatattcgtctggctggagatcctggccttcatcatccagcttgttggcgcggcattcacgacggacacagaggcatcgcaggagacgatcatgcgcggggtgcatatctacatgggtggtattggcgtgcaggagctattcatcttgattttcaccgggctgttcatccacctgcagcggaagatgggcgagatggagcggcatggaactttagatgccgagaaggtcggtagagggtcgatgccgtggcggtggctgttttacgccatttatgcctcgctgttcctgatcacggtgcgtatcatctttcggttggcgcagtatgcggacggaacgaatatcgataacccagcgcttcggaacgagtggtttgagtatgtatgggatgcggcacccatttttatttgcttggctatattgaacgtggcgcatccggggagagtgttggtggggcccgatagcgagttcccaagggtgagtcggaaggagaagaagcaaaggaagagagagaagaaggaggccaagattgcagagaaagaggcgaagaaggagaggaagaggaggagaaagcatggaagcattggcgttgatctgctagatgcgcaggagaggggctccgctccgacttcgcggccggctcctggagggcatggatatcagggagagaaccagaggacgtggtatgacaatcgtgggaatgag

SEQ ID NO: 24400 - DNA, 582 bp, Emericella nidulans
aggtataacctaccgggcgtgcatcagccgcaggtttgcggagatagtcttttgcgccatttcttctgatcagcaggttaagggatatggtgcgcatctgatgtcccatctgaaagtaagcaagcaaattgaaagcgtgctcacctctgcgagtatcattacttactgaaagctctttaggactacgtcaaggccacttcggacattatgcactttctgacctatgccgataattatgcgatcgggtatttcaagaaacaaggattcacaaaagagattcaactggaccgatctatatggatgggctacatcaaagattatgaaggaggaaccatcatgcagtgcacaatgctcccgaaaatccggtatctcgaatccgggcgcatgttgctcaaacagaaagaggcggtccacgcaaagattcgtgccttcagcaaatcgcatatcatccatccgccgccgaaggagtggaagaacggacctgtcaagattgacccgttgagcattcccgccattaaagagtccggctggtcgccggatatggacgaactcgttcgtcagccacgacacgggccgaattga

SEQ ID NO: 24401 - DNA, 965 bp, Emericella nidulans
caatcgtcgcacaagctgcagattatggacaatccaaactctaaaactatattaacaccggacaatttccataatgtacatacgatttcacgagccacatccccgggtggtggacctgacggcgtcaacggagacggcgagcctaaagcacgagtccgaccacgcacatatccttacttcaagtacctgccatatcagacagaggatgaggcccagcgggcacgatatcttcgagacatactgacccagctctatattgcggtggaatcgggcgatttcagtcctggtgcggtgcactggacacgggagctgagagcatggctatcgctcaagtttgacccgacccgcagtgaccggatcaagcttgttaagctgtactatgagctctctctagctcccggcatcgaccccaacgtcgccgagcgtttttcgagcatgttcatgcttctcacaaagtgagtgcaactctatcttgcaggtattttacgcatgccaatgctgacatagtcccagacgcaagcattacctaaggccaattaaggacctgacgttggactggagacctctgtacagagaactcaaagcattcgttctcccaacagaatctggcctcgtacattcttcgaacctcaagcggaatgtcaagactttgacaaagctctgcgcatttatccagctctacgttgatccttgtgagcttccagccatgctggaggagttccttccgcattacagcacctctttctcagaaggcgcgtttgtcgtagtcggactaatcaatttgcttgctcccacaaccccaccaccggagtcaagagaggatttactaccgcagcattatatgccaacatacttccatctttggtccttggttagccggtcaaaaacttttgatcagacgttcctcgacttcttcaacaacggcgcggaactcattgcctgctggacatattccgttttcggaa

SEQ ID NO: 24402 - DNA, 303 bp, Emericella nidulans
cgaagatgtttactgaccggacagcttaacgtgcaaatcatggacgaggaggaccagttgcgctttggcttcgaccttttcgaccctaccaagattgtccctgaggaatacgtcccattgaccccgctgggcaagatgaccctcaaccgcaacccccgcaactactttgccgagactgagcaggtcatggtaggcttcctcctcccccttctgtatccctctctttgccgtttctaacagtaacagttccaacccggccacgtcgtgcgtggtgttgacttcaccgaggatccccttcttcag

SEQ ID NO: 24403 - DNA, 838 bp, Emericella nidulans
tatgattcagaaccctcaaatttcccgaaagtggctcactagcggtgcagaaaccagtttatcctacagcgccattcttggattacgggaagaccttgtacgacctcctcgctcgatacgaagctccaagttaatagcaatctagaatctccatggacaagagttcagctgggcttctggtatcttctacattgggtatctagctgcctcgtaccctatatcacttggattcgtcaggtttcctctgggacgttatctcagcgctctcatgtaagttgtctcctgtctattggcgctctacttggttgaccatgcccagttttctttggggcgtagtcctcactctccacgcctgtgcccagaactatgccggtctcatggtgctacgagcactgcttggtatatttgagagtgctatcagccctggcttttcactaatcaccggaatgtggtatacacccaaagaacatgtctctcggcactctttttggtttgccgaaaacgccaccgccagtcttatcgggtcaggcatcgcgtacggcatcctaaaatacacagggggattcagcaaatggaaggtcagtctgttgctagttattcctggataaacattctaatatcgactgtagatgctctttctcatatttggactcatcacagttgcgtggtctgtctttttatggttcttcctccccgacgacccttcgtcggcgcgtttccttaaccccacagaaagagaattcgcatctttgcggccaaagaagttccagcgcactactcagaccaaaaagtgggataagtgccaatttatcgagaccatgaaggacgtcaagacatg

SEQ ID NO: 24404 - DNA, 1117 bp, Emericella nidulans
gttccgctcacccacaagaacctgacaactaccatgagtgagtgtcgcggtatcgcttctgacataggactaattccgttctagggaacattcaagcaacgtacaagctcacccctcaggatcggacttacctggtgatgcccttgttccacgtccatggcctcttagccgccttccttgctccccttgcctctggcggttcagtaattgtacccaccaagttctctgctcaccagttctggtcggactttatcgaatacaaggcgaactggtactctgccgtgccaaccatccaccaaattctgctcaagtcgccgctgcccaaccctattcctcaaatccgcttcatccgctcctgctcctcgccgctgtcaccaaaaaccttccaggatctagaaaaaaccctcaatgccccagtacttgaggcctacgccatgacggaagcggctcatcaaatgacgagcaaccccctgccccctgcaaagcgacagcccggtagcgtgggtattggtcaaggcgtcgagattaagattcttgatcaatccggaaacgaagttccacagggacatgaggcagaaatctgcgttcgaggagaggaatgcacgaaaggataccttacaatccagctgccaataagtcatctttcaccaaagacggctttttccgcacaggtgaccaaggcaagaaggaccctgacggctatgtaattatcaccggccgcatcaaggaacttatcaacaagggcggagaaaaaatcagcccaatcgaactggacaacacgcttttgcaaaaccccaacgtcggcgaagcggtctgcttcgccattcctgaccccggtcactacggcgaagacataggggccgcggttgttttgaagagcggtcagaatgctactgaagatgaattgaagtcgtgggttcaagagaaactggctaaattcaagaccccaaaacaggtaagccagctatctctctgcccctgaccgggctgttgcatctttactcacatcaatgccttgaagatctggatagtacagcaaattcccaagacggcaaccggcaagattcaacgacgcaaggttgcagaggcgatgctgaagcccaaggctaagctgtaa

SEQ ID NO: 24405 - DNA, 240 bp, Emericella nidulans
gatctctcaaaccgcttccgcctcatcgccacctatgcgctcgccggtttcgccaatatcggctctctaggtaaccagatcggtgtgcttgctcagctagcacccagccgtggcggcgatgtttcccgcgttgctgtgagcgccatgcttacgggtgcgatcagcaccttcacgtctgcggcgattgcgggactgttgatccagaatcaggagcagtatatgaccactgctacttcgtaa

SEQ ID NO: 24406 - DNA, 598 bp, Emericella nidulans
gatcatgggaaaacatcgttgacagacagccttattgccacaaatggcatcatctcgcccaagctggcgggcaaaatccgctacctggactcgcgtccagacgagcagctacgcggaattaccatggagtcttctgcgatctctctcttcttctccatgatgcgccgctctgctccagatgcccaacctgaagcaaaggagtacctaatcaatctgattgactccccaggacacatcgacttcagcagtgaagtatcaacagcttcgcgactatgtgatggagcagtcgtcctagttgatgctgtggagggtgtctgtagtcaaacggtcaccgttctacgtcaaacctgggtcgaacagctgaaaccgatcctggtcatcaacaagatggacagactgattactgaattgcaaatgacctctgcggaagcctattctcacctaagcagactcttagaacaggtaaacgccgtcatcggtagcttctaccagggagaacgaatggaggaggatctccagtggcgagagcgtatggaggaacgcgtcaatgccgctgcccaacagaagcaagcacaagatggagaacctgctgaaggag

SEQ ID NO: 24407 - DNA, 254 bp, Emericella nidulans
cggaatatgagttttaccagttcgcaacacccaatcgcaatgcctcgtccacggcatccttcttgaaagagaacccggtcgaggcgctcccgtcgatcacagacgggatgttcggatacagtttgacgcgtccgattcataaccaagactactactacggcatctttgatgcctgcgagcaatttaactgtgagatcgaggggtggcacaccgagagcggaccgggcgtttatgaagcggtgggtgactactga

SEQ ID NO: 24408 - DNA, 932 bp, Emericella nidulans
agggtacgattcgctacgtgggtatctccgggtacccagttgatgtgctgtgtgacctgaccgaattggtgttgcgcgagaccggcgacccgcttgatgtagtcatgtcttacgccaactttaccctgcaaaacacacgacttctgacgcagggtctaccccgtcttgtcgcagctggtgtggacgttgtcccgaacgcatcccctctcggcatgggtctattgcgaagaaagggcgtgccaattggcagtatgggcgatttccacccagcaccaaatggccttcggacagccatccgcaacgccgcagagtgggcagatacccaaggcgaaaagattgaagttattgcaatccgcttcgcgctcgagtcttggctgcgcgacggtgcaaaggcaggcgctctcggtccccctctcgcgcgcagccctgactcagacccgagcttcctctccgctgcaaacatgggcacaggcgaacgtttgggcgtgagtgtcatgggcgtcagtaacattgaggaattaaccgagactcttcgtgtttggcatagtattgtcgacggcctcgagaacaaagacgacgacgctgaggatcttgaactggtggcaaatgcatccactgtcccctctgcacccagcgcaccagccatcctcacaccctccgatggtatcatcacagaccgcgtgtggtcccgcgagcgccgcagccgtatcctatatcttgcaaaggagatccagtctatcctctcccctatgtgggtggattatacatggcccagccctggtccagacttcgtaaataccttaccagccgaccatattgccgcactgaatgagcaaccagagaaaccggacaaaaacaatgctatgatgacccctcccttggatgcgcaacgggagatcgagatacccgcggacaatgttccgtcactatga

SEQ ID NO: 24409 - DNA, 386 bp, Emericella nidulans
atggatgcaaatgagaatgttggcctcaaaaaggtaggcatatgccttgtggaacggagaaagtgactcactggttcgtagcgcttgaaatccgccctctggctatccattggaaagattgtggatgaggagacaatcaagctcggtgtgaacgccacacctcagttcattggtgcactgaccgagcttgtctgggttcagataggtacatcctcccagttttaaacctcccatatagatatggaatggagcgcagaaatggcatctggctttaatttgggcctggggctgtttattgccattctctgccctttctacgttggaaagtggctgacagaggtcatccgtatagaaacggcgagtcaagatcttgaaagcttcgcgaa

SEQ ID NO: 24410 - DNA, 538 bp, Emericella nidulans
atgaaagtccgtgacatccttaacaagtcactagaatccatcgttcacaaccggaaaaaggaccaggaaactacgaccggtaaatggttctcagccctggtcagcgagaacccctggtacaaagacgttgtccctgatgtacgcttatacctcatatgcacacatatggcttactaacaattcagttcaaaaaccttccaaaagaccaattggcgcccggtgttgacaacgcgcaggtcttcacctcagtctgcatcaacactgcggtatatctaccctggctagtcggccaatgccgtaagaacggcgcagtgttcaagcgggcagtgttcaagcatgtctcagacgcagcgaatgctcaccattccgggcaacccgccgatattgtcgtgaactgtaccggcctagcatctaaaaagcttggcggtgtccgcgacgacaagctctacccaggtcgtggacagatcgtcattgtccgcaacgatcctggtaaaatggtttccatgtcaagcacttatgacggtgaggatgaacttat

SEQ ID NO: 24411 - DNA, 2179 bp, Emericella nidulans
  unsure (1)..(2179): unsure at all n locations
gagatgatggcagacatggggatgatgagcagcctcatcgggaagccttcatcacccaattcagggaacacaacagctacaggtaaggctctagttattccctcttaattctcgggcttcaattctaacatcgcagtagaagatgcccacagtagcattgactcagctgtcgataagagtagccaaagtacaccgccactcacgaataccagctactcaccgaccaccacagccaccaccaccaccaccaccaccactgcttcctctagtttatccagatcagcgagtcagaaacgaaagtctgtcggtccggagttcgactttgaggagacgcaggtatctttccagcgctctcccgcgcttgaagaggattccgatgacgattccgacgatgggttatttgcgatcccgctagcaaacacgaagaattccgtcaagcctgggtcccctgacactcaagcaagaccacggaaaccgtctctcactgtcgacaccgaagctaagccccgtacaggtttgagtgttagtttcaagtcacccagcgctacacgcgagacgtttgcgagctccggtggcgatgcgagtaactcgactgcgccttacttcattgcgagcaattctcccgaggaagagaaaacaccgattagacgcaactcgttacgcaactcattcgcaaccggcgatgtttgggcgagccgtcctcccgtcgagggtgtcattgatcagctcgacgacttcttcccagatatcgatttagatgctccttatttagatgagcagggtacgtcgccaccctcttcgcctgccagcaaggtcgcgatcgacaacgagctcaaccgtaaagacaagcaagaaaactctcaccacggaatgcagccacctccagctccggaagataatacacttggctcttcggagcccaccatgacatcgcacggacagggcatcgtcgcacgtcggaatgtcagtcgttctggtggaggtcttacgcgaatgaagtccattcgagaagttgccaaaggtgcaaatcaagcaactagacaacgcagcgtggcagcttccagtggaaataagaggagtggggatgttcatcgtcgcaaaagcacaaaaatgttcggagccaagattatgcagattagccccaggcgcggcagtcaactcagtcagcttgacccgattcctcaaaatagcatatcgtcgagctcgaaacctcagagacaaccaactttccgcatcatccgtggtcaacttattggcaaaggtacttatggtagggtatatctgggaatgaacgccgacaacggtgaggtcttggcagttaaacaagttgaaatcaatcctagacttgccggacaagataccgataagatcaaagagatggtagctgcgctggaccaagagatcgacacaatgcaacatcttgagcatccgaatattgtacagtatcttggttgtgagcgcggcgaattatcaatctctatctaccttgaatatatctctggtgggtctatcggcagctgtcttcgaaagcacggcaaattcgaggagagcgtggttaagtctcttacgcgacaaaccttggaagggctatcctacctgcataaccaaggtatcctccaccgtgatctcaaggcagacaatatactgctcgatctagatggaacctgcaagatttccgactttggcatatccaaaaaatcaaacgacatctacggaaacgactcctcaaactccatgcaaggatccgtattctggatggcgcccgaagtcatccagtctcaaggccagggctatagcgcgaaagtcgacatctggtccctgggctgcgtggtgcttgagatgttcgctggacgacgacnctaagcaaagaggaagctatcggcgctattttcaaacttggaagcctgagtcaggcgcctcccattccggacgacgagtctatgaatgtcacaccgcctgcgctcgctttcatgtgggattgctttactgtgtatgtctcatgcttccctctttactttcaagagacaagtaactaacctgtttcctgtgcaatagagacacatctgaacgtccgacagctcaaacccttcttactcatcctttctgcgagcccgatccgaagtataatttccttgacactgagctctacgccaaaatccgtcctgtgcttgagaattaa

SEQ ID NO: 24412 - DNA, 1109 bp, Emericella nidulans
gtattccaccggaaaccgtttctcccaagtccttgatggctcaaaatccgttcgctgaggcctatgccactcctccgtctatgacttcggtgggtcagcagcccatgctgggggcacactcgcagagcagtatgttttcatcctccatggcaacaagcggagattctcctaatcctttcaacctacctttcgcgaatagtgccctacgaactcaccataccccagcctcaaccgatacctttaccgactccactcgacgggctttattagccagcatggcgcagcccgcatgtttcagtcaccgcaaatactctcaacctgcaaccggaatgattcaatgtcgcgatctctactcccgctcttcttccagccccacctccaccaaccaactgcctagcaccgcagatatgcagcgattcatctccgcctacatcacctatttccaccctcacctgccattccttcatatccctagtcttaatttccaagcacccgagtatacgaacaatttacgcaccccgagcggccaccttaatctcagctccaccggtgttgttggtggtgggggttgcttgatcttgtccatggcagcaattggagcattatacgaacttgacacagccgcctcaaaggatctctttgaagcctcgaagaagatgatccagctttatctcgaggaacgtcgtaaggctgacatgtcaaccgcggtttctcggtcctccaagccgggtgataattccgttcacaacactccgctttggcttgtgcaggcaatgctcctcaatgtcatttatggtcatacttgcggtgacaaaacctcggcggatattgcaagctctcactgcgcaggattggtcagtcttgcgcgggcggccgagttgactgccacatcgatgcaaggaccttcccaggatacctcacgctgttttgcagaaaaggccttccaggcagttctccgaaatccagaggcacatcggccgcaaagaaagagcctgctggttgaatatgcgggaggaagacctttgcatttgccgcctgtcctatccggcatctccctgttactatggaccccgctccccgaagagttggctggtgccccgaaacaaggg

SEQ ID NO: 24413 - DNA, 395 bp, Emericella nidulans
agttgcaagtcctgaccgacctcccctcatacccgtggaaccacagcatcagacactggtctgagtctcgccgcaatgccgcgtaccgtaagcgcacgcaggagccgcatgagctgctgggcgtgctggaaccgggcacgaacccggacgctgcctcgtggaggcatatcatcaagctctccgaggcgccgtggctgcgcgaccacgttgtccaggggaacatcctctaccccggtgcaggattcgtgtgtctcgccattgaggcaatcaagatgcagtctgccatgagcgggacgaatgatgtgaccggtttcaggctgcgcgatgtcgagatccatcaggcgctcgtgattgcggacagtgcagacggcgtcgaagtgcagacgaccctccgg

SEQ ID NO: 24414 - DNA, 931 bp, Emericella nidulans
acaccaccgaagaaggtccctgcagctgcgacaaagaagagcggcttcaaaccgctcgccgatgtcgaaaatgaatcgatcccaattgacgatgtggatgcatccgaggaagtaaaagcgtctagcaaataccaaaaggtaaggagtcgtgctgaaggccctaaggagccgtgcactgacggttctacctagttgaatctccgtgaacatatcacaatccgcccagactcttatatcggctcagttgagcggaccacacaggaaatgtgggtgtacaattccgagattgacgggatggagtttcgggaagtctcctacgttcccggtttatacaaaatcttcgacgaaattgttgtcaacgcggccgataacaagcagaatgacgataacatggacgagattagagtaacttacagccgggagaccaatgaaatcagtgtttggaacaacggtaaaggcattccggtggaaatgcacgaagagcacggaatgtacatccctcagttgattttcggtaatcttttgacgtcctccaactacgatgatgccaaggagaagatcactgggggtcgaaacggtttcggtgctaagctttgtaacgtcttttctaccgagttcacagtcgaaactcaggattcgaaaaagaagaaacgatacctccagacttggacagacaatatgcaaactgtgggcaaacctaagatcaccgctgctaagggatccgtcttcacaagggtaacattcaaggccgactttcccaggtttggcatggatggcatcgatgacgattttgaggcgcttatcaagcgacgagtctacgacctggctggtaccacgggcgtgacagtcaagctaaatggaacccgtttgcccgtccgaaatttcaaaaagtacatggaaatgtacacgaaagccatccgtcgagagcacg

SEQ ID NO: 24415 - DNA, 432 bp, Emericella nidulans
cgccaggatggcgcatcccaccattaaaattgatacaagcgtccaagccaacaagcgctcgcacccggataatgaggatggagtcggcgttgtggatggatcagatgatgacaacccggagatggagctgggggataatgaacatgttccccccttccttcgccagtcggttcttggttggtttgccttgatcacaatttctgccacgataaagtcatgggctcattatttctctacatctagatatccgtcataagttcgaagagctggaatacatgcaaggaactcgaatcttggaggggtcccgggcgaacgacccctcgcaccgttgggcgctcgacgcggatcccgaagtcagggctaggaatcgatatgcgaatgtacaagcgtgggcgaattctcgcatacacctacgggttcctgaaggcgaat

SEQ ID NO: 24416 - DNA, 397 bp, Emericella nidulans
ctcaagggcgtgttgtggcccggaatggatatctttgactctgccacggagcaaatgaaacgaaagatccacctgagtaagcgcgagagcgtcctaaagatgatggagagaacgtcgatggggtggagcctactgaactggtattttctcctaccggcatcctgcggaagcagcgcgtgatctcgggcaacgttgaagatagcagtcctctgaaaggtgagacgccgattccaaagaagcgagccacccgccccaagcgagtttttgctcagatggacccaaacactcaacgcgggccggacgggaaaagagctaggaagaacgtcaagcaagactgcgacccccatgaggccgatatagatcaacgtttatatactcctcaacgagctgtccaagc

SEQ ID NO: 24417 - DNA, 683 bp, Emericella nidulans
atgttcgagaacgaccccgtctccgccaggttcctgaaagagcaggaatctctctggaagaatacactgaagctggaggaggtgcgcccccgcgcggagaagggagagttcgatgccattttctatgtcggagggcatgggcgtatgattccccactagccttcaagaatcaggggttgaaatgctaacgactgtcggtgaacagcaatgttcgatctcgtgactgacaaaacctccattgcgctaatccagtcctttgctaaggccaagaagccagtcagcgctgtctgccacggtccctgcgttttcgtgaatgtcactacaccctccggcaaaccgctcgtcgcagatgcggaagtcaccgggttctcgaatgtggaggaggaccaggtcgatctgtccaaggtgatgccgtttatgctggaggatgagctgaacaagaaatcgggcggcaagtatgtcaaggctgatcagccatggggagagaggtttgtggtcagtcaggtgaaggagtgggggcggtccgctcatcacgggacagaatccggcatgtgcgacgggagatggtaaggcacttctggaagctctgggcgcgtgaggggcctatgacaacggatgatgcgctgagtaatatgggggaggctgaccgactgccaccgacctatgcagatgtcacccactaa

SEQ ID NO: 24418 - DNA, 374 bp, Emericella nidulans
atgtcttcaaaatcgttcgtcattcggaccccctgctcgtccgcaaatattggccctggattcgatgtcatcggtcttgcattgtccctctacctcgagctacaggtgaccatcgactcttccaggacgtcgtcgcagcagccactcaattgtgtcatcacgtacgatgatcaaagcaacagctccgagaagatcagcctggacccggaggttaatctgatcacacgcgtagcctgtacgtacttagatgccatgaccaaagagctttccccgttgagacccgggttcatattgtaaatcccatcccgctgggtcggggactaggttcgtcaggaaccgctgtggttgccggtgttatgctggggaatgaagta

SEQ ID NO: 24419 - DNA, 936 bp, Emericella nidulans
tggacctcgcccgaggcaccgcggatctttgaagaaagcgccaagtacgcggacattgtcaagatgatcgcgatggtggatagcgtggaggcaaactatgagcttgagtactttcgctccgcgattaagcagacgcatgggacatatccgctgttatcggccgtcaatatgggccagctaggacagctatcgcgtgcactaaacacggtgttctcgcctattacacatccgctgcttcctatgattgcagcgccgggccagttgaccgcagcggagattaatgaagcgctgcatatcatgggccagctgccgaagcgggatttgtacgcgatcggctcgttccgagcgacgccccagtcgatgttcatggagaagtgcttcaacgagcttagcctaccgcacactttgacctctatggaccgcgggcccgccggctcgctcgaacgggtattctcacagcccagtttcggcggcgcggcattacacccaccactgagcagcacgtcacatctccccgccatcagcgacgcagcccgcgcaatcggtctggtagacacgattgtggttacgagcccaggatccctggtcggcgaaaacgccacgtggaaaggcatccgcgcgaccctgacccgcgactacgtcccatcggcataccgcggccgagcggccattattctggccggctccgaaagcgaagcgtcagcgagcattttcgccctacgcagtctcggcgtgggcgccatctataccgtcggcttccgggcaacagggccgctggccgagggtctcgagccgtttacgtcgatccagtctgtgaagctagtagaacagccgtttgtgatagtttcggcactgccgcccgagaaatcgctccttgtgcaagccgctgctgcgtcactaccggagtacgggccgggcgtcgccgccgtccactag

SEQ ID NO: 24420 - DNA, 4252 bp, Emericella nidulans
atggttctaacgggaagtatggacctcccgcgcaagcaaccaggccttcagtgtccctttagcagcaaaccaagacctgtcttaagcaagagtccaatctgggaactgcgcatttcaacaaacggaaggactttggagaaccagctcaaaaaagtgaaccaacagcaggagaagggtcaaatcggtgagaagcttcgtcggaaactggccgatttggagcgtaattcccgcgaaataggccagaagacggcgcaagcgttccttgcaccaaagcgccttgctggtggagatgatggtcacctaggcacaccctctatggaccagaaggtttgctttagccgcgcacaagcgattaacgccccagaaacagattgctaattctccgactctagtcgccgctccattcagcactattcgccggccaagctaccaattcgcctagcaaagtgagcgtcccgtcgcgcaaatcgcgaaaccagtcgaaccgcgtccatgatatcgagtttgccaccgaaatctcgacgtcgctacttgcacaagtacgccagctgcagtcattgctcgccgaacgcgaagagacactgaaaaccgtgaacctggagaagtcgcgactggagctagaggcggagggttatgcacaacgaatccgcgctttggacgagagcgaggaacggtataaggacgagaactgggcgctagaaaccaagatccatgagctgatggctgccgtgaaagatgtcacagaccgtgagacgaaactaactagcagtctgggggcggccactgcggagaaaagcgccatggagcgggagctggaggacctgaaacaagcgaacgcgaaactcattgaggaccatactgcggctcagaaggccaacgatgctgagattaatactttacgccggaacctcagtgccggtgatgcggagaggctcacacttcagcggaagcttgaggatatgaacactcagaatcaagagctcgcaaaagcagttgccatgcgattgcggcacgaagaagccgagtctacgagggaagttgtccgcccacacgattccgaagacgaagagcaagccacgccagagaactctcctccaccgtcgccgaacaaattcacccctcgtcataaccaccttgagactgagaccttgcggagctcgcttggccacgctcatcggatgatccagaacctgcgaagtacaatccaccgtgagaagactgagaagatcgagctgaagcgcatgctccaagaagctcgagatgaggtggagcagcgcgccgtgactcggttgctgccaatggacctaccaacaagcgacaaaagacaaaggccgagacgcgcaaacctgcacgtccggacctgttgggtgccggtagacagatggcggatgtcgatattcacgactcggactgggaatccaatgctggcgacatcagcccgactcataaagcgtctaatgattcccgcgatcgccgtggagaccagccgattgatgaccgtagtgatgcctaccatactgcgacagaggctgatgatcccttcgagaccgccaatgaaagggagaccacaaccgaaagtgaagccttccagaccggcgtggagagcatggctggcgacagcacggatagtgatgaacttactgagaccgaagatcgtgttcaaaggactcctcgcggacgagtctcctccatgactttggcaaaggcccgtgaccgaacatcttactatagcaccgcatccacttctgccgatgagggtgacagtacagatcctggaacgccgtccattagccagttctccacaccccgttaccgcctgcgaaagaagaggagcgttttgcgcaagattcgcccgtccggcgaggctccgatggccttcaatagccgaccctcaagtgctagggaatccccgtcgactagcttcactcgggatacatccgcggctcctgaaggtcaaagtctctttgcagagcttgccgaagtcgatggggatgaagatgatttcggtccaccgatgcagttcgaggcggcatctccctcaaccccgcgcatgcttccaggatttgattcaaggagaccgtccgcagttaccgtggagcttccctcgaagcccgatatggttgactccggcgtcatgactgacccttgggagcccaaccttcatctcgcttctcagactgacgatgaaacggtcatcagtgttcctgtaacgcctgataagccaacaatgtcggacgccagtactggcatggatgttgtggagtcacccagcttagttcactcttcaacccagtggactccgctgaagcctaatgccgaaacaagtgacgatcatgtcctgagtgtgcctacgccaccaaagatggcatgggacggccagactctcaatgaggaacggaaagtcgacattcccgacagccctacaacgcagagggagttgaatatatcctctgtatcttttgaagagacagaaccggtggctcccagcttcccagagctgagaacagctttcttcgtgggaagcacgacagaacccgttgccgctcccgtccctgtgccgccagaggtagccttgtcgccaatctcgtcacaaaccactcaaccgaccgagcccgtcattcctgctccgcccgagcccgaaccaatatatgtaccggagatggcattttctcagattctcgtggaggatacgctgcccatccttgccaagcttcctgagcctgcgcctgaacgcgtgtttgccgagcaagggacaagtacagatattgcggagctttcagtttcggctatatcatcagaacaaactgagccggttgagccggtttatgagccaaagcaagacgtcgccatcgtggctgaagctgtccctgaaggcccgctatccttcgttgaacaagggacaaatacagacgacgtggagatttcgtttcccgccatctcctcagtcgaaactgaacctgttgcgcccgttcgagagaccaaggatgacgttcctgagccggtgctgtcccttaccgagcaaggaacaagcacggatactgtggaattctcagtttcgagcatttcttcggaagagaccgagcctgttgagcctatccgtgaggcaaaggaagaagcggccgctgtggatgatgtggcctcagaatccactcatcccgtattgagcatcttcctcacccctcccgcatacaccgagccaactgcgccaaagctccaagaagccgttattccgccagcaccgcagttggcgttgtctacggttagctcagttgaaacaccgcctgtccaatatactccggatgtactaatcctgcccacgcccccggctctcgacgagaacactccccctagtgtaatggccagcactgctaaagcaacaaagagtgccccaccgcttgttgtcgtggatgacaacacggacaagggtactgctgatgggttggttacccagcagaacggtgtgacacttcctttgggtgcgatctctggaaatgcggctccccgtcgcgcaaggtcgggctcgtccaaccaggccgaccagggtgctcagaccatcttgtcatccaagcaaatcgatcaactccttattgaccgagcttctgtcagaccactttctcctcctgatagcgacaagctcaacgagatgagcaactcaccattcgccacaccaaaggcgcgatcgcgccctgttccccaggcttccaatgcctctttacacaagaggcctggaagcgccgcgagccaagcatcaagtgtgcagattcatcctccattacctgctgaccataaagaagctatcatggctgcggagaagaaatccatcgatcaacgcccggcgtctgctggtttgatgggcccgccacttgcaccagcctccgcagtacgagcgagctcacagcaacggcctaggacgccgaatgagtccgctcttcaagtcggctctgcgaagacaactacatcacgagccagcgtgagacgcgatagccatatgtctcgacgatcctcagtttcttcatttgcctccgagctggaagagcgtttcaacatgcagcccaatccgccgtttgccccacaaggatactccacgggaactgaccctcgaatgatccaagcaatcacacaaaccatgattggtgaattcctctggaaatacactcgcagagcggtctctggagaaatatccaacaccagacatcgcagatatttctgggtccacccggacaccacgcacgtcatactggagcgagcatga

SEQ ID NO: 24421 - DNA, 1757 bp, Emericella nidulans
ctacgcctttctggtccattcccagaagacgttgactcagaacctcccaccgcgtgtggataacaaattgcttgcacggcagaaacggcgtcggactaggtatgctttgcctttactgctcatgaccaacctagcgttcgatcatttgccgttctgacctgataaacgcgtctatagcccagaagactacgcgattctcgaggcagagtaccaacgaaacccaaaaccggacaagatatcacgggccagcatagtcagccgcgtttcgctgggtgagaaagaagtccaggtataactcccttagcctagttggatatatcccgcgctaatgcagccctccatagatctggtttcagaaccgtcgccagaatgaccgccgaaagtcaaagcctctccagcctcacgaactcttgccctcctcccagtccgacgactcgaaaacgaaatgcgacgacagtatacttgtagagggctccagcaggctggagcaggaccatgaccacgaacgggctcacggttcgcggccgtcgatgcccgagggcgactcctttgcatcagatgcagtggacaaggatgagaggggccaggtggaggagagctcacaaacgagcgttgccatatccgaatccccaaattcgagtcaacaagcggcagacagcagtctggttgagttgaacgcgatgcagagtcctatcgacgcgtccagcaacgcgcttcacccaaactccgccaagagaaagagatctggatcagatcttggagaaacaaacaaagagtcagcaaccccaagcatgctagacagcctaaagtcaccaccgtccctgaggctatcgctttcctttgacggagaagccatggttcgaaagcaaggcgaattgacaccatcaccccctaagggacgaaactcgcttcgaatttcaatgtcggcagacggacaagccgtcatccgtgccaacggcgaaccatccccgtccaaaaaccgcatctccatgttccccactcgcacccctagactcgctggtcttcgcagaagcaatagcgctgttgtattgggtacaccgcgtagcctagaaagagagaaatccttcggtaggtcgcgcgatcccaggaactgggagtctatcttcgatacagacgcgcgaagtgcacttgccacacctttcagttcacaaagcacaccaaaatcggccctactctccggtggcaagcgttctctgacccgaagcctgtccgccaggcacccctccctcctcacaccaaactccgatacccagggtacccctatcacgcaagcaatgcgacagaagaggcagaagctttctcgtactgtctcttccctcggtcggttggaatctggccgcaaagccttgggcgagaaattcccttccacactcaagaactctaaatctgctaaggatgacctcgaacttgaagccggcgactcagacaaggagaattggattcctggaactcgagtatcccaatcgcgtcgacggacggtttccagccatacccaccggcctgtcctcaaggactcgaacggacgagacggccgaccacacgacgcttctacatcaggacgctcgcgatggtcacagccctcgcatcgaaaaacagtcggaccttcaaaatccctgtccatgtctggtctggaaggtgacgtttcagcattcatgggcggcaacgcagcgagtcaggaagaggacctggattgcatccaaggcctgttatctctaagccaaggcgcctggagatga

SEQ ID NO: 24422 - DNA, 360 bp, Emericella nidulans
tactatctctctggtccttcgttcctgcattcaattcacattcaccatgccttctggatctgtccttgtcaccgggtacgttgcatattttaaagcaacaccaataattattgacccttccatagtggaaccggctacattggctccttcactaccctcgccctgctcgaggccgggtacaaggttgtggtcgccgataacctgtacaattcctccgccgaggcccttaaccgcatcgagttgatctcgggcaagaaggccgagttcgcacagctcgatgtcactgacgaagcagccttcgacaaggtgttcgaagctcaccctgacatcgacagtgttatccactttgcggcgttgaag

SEQ ID NO: 24423 - DNA, 312 bp, Emericella nidulans
atgacattagggggcgtgagcgataactcctggggaaaccaatgggtccaagaccacgccgcaatctgcgatactctcgacaagccgtgcctgtttgaggaatacggaatcaagaataaccattgtaccaacgatttggactggcaggatacttctttggccgcaactgggatggcaggtgatttgttctggcagtttggcgacgatcttagcggaggccaaacagctgatgaccagtacactgtatactatggcaccgatgactggacttgtttggtgacagaccatgttgccgagatcaacggagcctag

SEQ ID NO: 24424 - DNA, 1158 bp, Emericella nidulans
cacggtaaaggtcgtttggataagtggtatcgcctggcaaaggaaaagggatacagggcaagagcagcatttaagctggtacagctgaataaaaagtatggcttcttggaaaagagcaaggtgttgctcgatctttgtgctgcaccaggtgtgagtacaccagatatttgcttctttggccgaaattaaactgaccgtccaccaagtcatggtgtcaagtcgccgcagaatgcatgcccgctcaaagtctaatcgtcggtgtcgacttggccccaatcaagcctatcccccgagttatcaccttccaacaagatatcacaactgaaaagtgtcgcgccactattcggtcgcatcttaagcactggaaagcggatactgtcttgcacgatggtgctccgaacgtcggtacggcgtgggttcaggatgctttctcccaagcggaactggtgctcgaatccctaaaactcgctacagagtttcttgttgagggtggtacatttgtcacgaaggtcttcagatccaaagactacaaccctttactttgggttttcaagcagcttttcatgtctgtcgaagcgaccaagcctccgtgcggttttaatgtgttcgccgaaatcttcgttgactgccgtggttacaaggcaccgaagcgcattgaccccaagttccttgattccaaacatgtttttgccgaactggcagatcctactcccaacaatgaggccaaggttttcaaccctgagaagaagaagcggaagagagagggttatgaagagggcgattggacacaatttaaggagatccctgtaacggagttcatcaacaccacagatccgattgcgattctcggttcgtgcaacaagcttagtttccagcaacaacccggaggagaccttgctttagccactttggatcgacttccagaaaccaccgacgagatcaggaattgctgtgaggacctgaaagttctgggtaagaaagaatttaggaaccttctcaggtggcgtctcaaggttcgcgagaagtttggactggtagtaaagaagggacaagccaaggatgatgaagccgaagaggttgccgagattgctcctatggatgatgagcttgcaatccaagaagaacttctccgtcttaaggaaaaggagagtgctagaa

SEQ ID NO: 24425 - DNA, 1970 bp, Emericella nidulans
tttttctcaaccagtgcgaaagtctgtgctctcagggctatcaaaaacatcctactagtggctaattctcaacggcctatgacatcagctggtgtcgaatcgcgaaaccctgttggatccacgtctgggaggaacccactggctccttcaagatccgcagaaggaggtccgatatgcgtacgttgatgcactcctatactggctgaaattggagacgaataaaaacgacctaaagttgaaggatcgatctaccacgactgctttaatatcagcgaggcgtgatttctccaatacttctgagagggctgctaaacgtgcaacgggaactcatcatagagagaaggccctggtcgtggctcagtctaacttcctccgtctactgcatttgacaatctatgacgttgctctgcagagttcaacacaagagaaggagatcaggatactccatttacttttagccagcctcgttgagaacctcggcataaatgcggctaggtttggactgccaatgatcctgaagctacaagatgacatgaccactttagaaaattcaaatacacaagcagctacagctaatattggcagcctgacgcatggatacctttgggtattgtccgagactttcggccatggacacccatagggccggacaggagatctacaccgaaattgagaagcgcaaatcccgcagcatttggctggatagcattggattctctttggaaagcttcgaaagtatcatcaaggatgatcgacatgctctcagccataatactagagagacggataaaatgactcttttcaaagatggcgtcgaggagtttgtccgtcggatcgaggagtcctacaaccggaccgtgcctgctcatgatccgccaacctccccggggcgcaatctgggcaagccggtaataggaggatatctaccacccgcaaaccaacaactaagcgaccttcttccaccagtagttagggaacaaatgttgtccccctggtccaaacagagcgccttggaagctgctgagcgagagaaagctgaagctctctctctcaacggttcgaggacagggaccttacctgtgcgtggccatgcgcacgccaatggtaccggcagttccatctctacaaactcaccttctacagcccatgttgccacagcgggtcttcagacttctcgtcgcatgagtatgccggacaaaacggtgacaccaaaccataactcgagcagagactctcctgttcgcgtgaacgagctgaggcgtgttctctctgtccaggctcccgatagggaccgccgactaagcccattgcggggccggctggatgcctctaatggcagcatcatctcttctagtagtgagagtatggttagcgggttctccaattctgagttcgaaggggatggtgggtcaatcctactgcccacgagggatggacaagagccgcttgatggcgatggtatggaaacaccgagacctctgagcaatgggaataactacgggtacctacaaaccgcgtttcgggcttcgtcctcctccatacccccagtcccaccaattccgcatggcatatctatcccgggcgggtttcccaacgactctcagcgttcgctgcctacacctgaccgcccttcaactgcttcatcacgcaaacagagcttgatcaacggaaagttcggcatcgcagcccctgcggatgacaagactctgcataggcagaaatctcggactggtgtcgggttagtgaacggcgccgaagttcctgaggtagcgatcaacggtaaatccacaggaactcactcgtacggcttgcaggaagtagaagagacttcccagcgacgcgacgtacagaaactcttagaaggagttttatcatcatcagaaccagcttctactcttcaaccgagagttgcttccaactacagtggccgacgtagtgtgactggtggcattggccgcccaccttactag

SEQ ID NO: 24426 - DNA, 336 bp, Emericella nidulans
atgcccttgaacatctccctctcctccgtcttctacctaatccccctctatatcttagtgatctcccccattctgcgccaactgtttccgaacgatccgcaacacggctcatatcaattctacgatgatgaagaggccctcgatgaagatacctcgctggacctcaattcagaagtcctgagccttgatgatggggttaacgtagtatgtcccgacgaaaccgacgcataccgcgtgcatatcctctcgcaggcaccgttggtcatatacatcgagaacttcctctcagctgaagaggcggattacttggttgatgttaggtatgccgcaacatag

SEQ ID NO: 24427 - DNA, 682 bp, Emericella nidulans
acattgcttgattgagtacgtccgcgtgcgccgaatgggctttcagaatggaaacactggtggacagcatttggccaacgctctcaaatatgccagtgcctttccggtcattctacttaccgctaaattgagaaattacagccctttctcattccacggtatcagtgaagtgacgctaaacagactactgtaagttgatccggctatgatccgccgttcggtaaactaaggatgaacagctgcttcttcacctttatcaactcttcgtactctttctactgggacgtcaccaaagactgggatttaaccttattttccgaatcgcgaaacgacaacgaatatccatatggactgcgccgttaccgccattttagtgatcaacagtactatgcggcgattgctgtcgacttcgctatccgcttctcatggatgtcaaaattttttccaggctttggctggctcagtgagacagagttcggactctttgtgctcatgttttctgagatcgctcgtcgatggatgtgggtttttcttcgagcagaagccgagtggagtaagtcttcctgcacaaggctgaggctaatgaatactaatgagaatttgtccagttcgaaacagccgtgggccagcaccgagtgacgtcctacttggggagtacaacgacaaactggacacagattga

SEQ ID NO: 24428 - DNA, 1568 bp, Emericella nidulans
gccgagctgttcgctgccatcaatgagaccaagatcgagagatggagcaagaccagtatccacctatattgtacgtgtcccagagctcgacctcggctgaacaccactgacaggcgcagtctgtatattcgtctccttctgctgtgcctgcgccaatggctatgacggtaagcttctgccattagtacggactgcatgggcactgacaatataggctcgctcatgggcgccgtcttcgccatggaccactaccaggccaccttcaactacgacatgaccggccagaaggtctctgtcgtcacctcgctctacacagtgtacgctcccgtcagaaggccatgtcttttcaaatccagaccagctaacgaattagtggctcaatggttgcaactcccttttcagctgttatttccgacaatttcggccgtcgcaagtgcatgttcgtaggcggatgggtgattatcattggatctatcgtcatcgcaacggcaagcaccctcgctcatttcatcgtcggtcgtttcattctcggtttcggcatccagattatggtcgtgtccgccccggcctacgcggcagagatttcgccccctcactggcgcggtcgtgcagtcggtaagtcgcaaaactttggttacaaggatcccatactcatctgtcctattcaggcttgtataactgcggctggttcggtggctctatccccgccgcgtgcgtgacctacggatgcaactacattgacagcaactggtcatggcgcgtgcctttcttgttgcagtgcttcgcctcagttatcgtcatcatctccgtctggttcatccctgagtccccccgttggctcatcgcccacggcaaggaggaagaggcgatcgccatcctggccaaataccacggcaatggcgaccccaacgctcgactagtgcgtctagaggctgatgagatgcgtgaaggtattcgccaggacggtatcgacaagagatggtgggattgtacgtactttggccctatcttctcgattcctagctgaccgagcaagaccgtcccttcctcctttcccacaacggccgctggcgatttgcccaggtcatcatgatctccatcttcggtcaatggtccggtaacggtctcggatacttcaacccggccatctacgaggccctcggctacacctccagctccatgcagctcttgctcaacctcgtcaactcgatcgtgggtgcaatcggtgctttgacagctgtgtactattgcgacaggatgcccagacgaactgtgcttgtatggggaacactcggtgcgcactccctagcttgactctgtccatagccatcgaaagctaaccaaaggtatctccaggctgcgcagtttgcatggccgtcaacgctggcgtttcccagcctctgatcccgcagcgtaacgcaggcgaaaccctcgacccgaccttcggccgaaccgcgctcgccttctactacctcttccaggttgtcttctccttcacctacactcctctccagggtgttgtccctgccgaagccctggagactacacgcgcgccaagggtctcgctc

SEQ ID NO: 24429 - DNA, 704 bp, Emericella nidulans
atgtcgacatcacttccgcggccgaaacgggccggtgaagactttacgcgcacccattatcaggaagatctcgacgactccggtgcctccaaaaaaccgcgatttgacctgcgaaatccgtccactcttgctccagacgcgctcgaagatgacgcagtactggacgcagacgaaataggacggcgcgggcaacaagttcggcgaaaagccgtcaacctagatggctacgaatcagacagtgacaacgaaggcttcgacgcgcgatcctctaaaaaggcacgccaaaatgaagcaaaacaagaagcagacgatgacgacatgttcgccgagctgcaggaggactttggcgccgagaacattgacggcgacgcagcgctacgaaagaataagaaaaatgtgcggtttctacgagacgacgagattgaaggtcaggttgcgtcgtccaagagcgggcgaacattacgcgtggatctgagccagggtggtaacgatgttaatattgacgaagatgatgagagcgagagcgacgttgccgaggaagaccgtgcgagggttgacagcggcatggacgaagaactaggcgctggggcaaagaaaaagcatgcgccattattggatgcgttcaatatgcgtgctgagcaagaagagggccgatttgatgagcaagggaattatatccggaaagccgcagatcctaagcttgg

SEQ ID NO: 24430 - DNA, 698 bp, Emericella nidulans
atgtctccgcagagaaggttcaacacaccagatgcccagacgctgacccggttctttgatgatgccgcaagcgtgctcggggaggagaatgtttcgcgcactcctgaacatggtgccctcaacggtgttcggaaccaggactcatacggcgaccccttctcgttctctacgctccaccaaccaagcggcgctgttcgcccggggggtgtggaagatgtccagaaactcctgaagcttgcgaacagccacaaagtgcccctgtggactgtctcaagagggaagaatcttgggtacgtggtcacttcatgatacccgtatccggtccagttaacggttagccacaggtacggcggatcaagccctgtcgtcaaagggtccgtgatccttgacctgcaccgaatgaacaggatagtcgagattaacgaagaatacggctatgcaatcgtggagcccggcgtgtcctttttcgatctatatgaagaaatccaacggcgcggcctgggtctctggccctcggtcccggcgatcggatggggatcagtgctgggaaataccatggatcgtggattcggatatacgcctaacggagagcattctcagtcgcagtgcggaatggaggttgtgttgccgaatggggatttgcttcgtacggggatgggggcaatgacggataataagacgtttgtgctgtataaagg

SEQ ID NO: 24431 - DNA, 2012 bp, Emericella nidulans
cgcgaggaccacgcgctagggtactgaataagctacgcgcatcgctgtcggaaaactcgattgagtcgtacaagaagcttctcgaccggacattcgaagagaatcccatcgccaaagaagataacttcaatacaacgcaagatggtatcgtggtatggacaccacaggagaaacgggctttttttgaggttttggatcgaaaagggcgcggtggcattagggaaattgccactgcgattcagtcgaaatcagagcttgaaattctggagtatataaggctcctacaaaagggtgtgcggcgacagcatttcaacgatacccatgccaggacagctatcttgggtgatatcccagccgcagcggagataagcaaagaatgctgtgatgcactagacaattatgccgaattgctctgcttggaagaacagagggatgaagacaggaccggtagagccaagcacggtggtctgtggattattgatgaggagttggcaggtaaactggagacggcgatcgcggaagagcaaaaggatccatcgaaccctagtcttgaaatcgcagtccatgcaaacgaggcgcatcttgaaaaaggcctgtctacaccagatgttaatgatgcagctacatttttcaaactgactaactggatcctgctctcagaacgacttttcatgaattttggaggtcatagattggaagacaattgggtcaatgtagccttcgaaggcgagacaccggcaatgacggctgatgttgtgtctgatttctataaaatcgccctgactgtaactcgccgcctagtccacgcaacgcatttctttgcttcatcaagagtccgaagaaacgggaaggcaagccgtccttctgcaacggttatcaaggcctccgatgtcagaagggcagcacgcactttcgacatgaggaccaatgcctctgagtattggatcggagtagcgcgacggtgcagccttgaagtggaagacagtcgacacaggaagagttggaaccccattcctttagattacgatgaagttgagacccttctgtctcaaacgttgttaccttctgagccatatgaaaggatcacgccaagcccaagttctcgtgagcgctccaaaagtatcatcagtgacgtctctctggattcgctcgccgcggagtcaaatgattctgaagatgagcacgccgaagcactcgaccatcaacatagctcagctgaagaactttcatgctggaccgctctgggtcgaacgcctcgagactcgccaaatccccaactgctgaacgccgaaattcgaattcctcccaaaccacctggaaaacgcaaaacaacagaggaactcgtcgactggcgtgaccgaacgctctatcgtagcgaatgggaagaatatggctacgagacggagaagctggacggcgagttcgcaagccagcgcaagaaacgcctgaccatggcctcattccgcccgctttctgggatcaacattcaggttgccaatgagacttcaaagctggactcagacagccgtgagcacatgagggttgaagcggagactgaagcggaattcgactatcaaactgataactcggatcctgaatttcgcctcaggtctccggatcgactgtcgaggtcgaagtcgcagccgaagccgattgtgtcaaggacaagctctcgcaaacgcacgcctgtttcgtatgccccgccgcagggttttgagtttgatgtggagatggaagttgactcggagacttgcaatggcgatgcagatgaagaattgcgtgaaacgaatgacgaccagggcggcgattacgtctccctgtcggaaaaagacttcaatggcgaacatggcgaagataaagacgaaaaagacgccagcgtgtcttccgtctctgatgatcattatcacccatccagccctcgagatgagagtatttctgtatgggacgagggacataacgagggtgatgataatgataatgccgaaaaaggcaattttctttctggccattaa

SEQ ID NO: 24432 - DNA, 537 bp, Emericella nidulans
atggctgctccccaggccaaaccggctactagccatgtcgagggcccagaggccctcgacctggacccaaaggccgtcactacagacctcatccacacggtgcgcgtccctttaacagaggatgacaataaggccatccgccgcaagacggacaagcgcatcctcaccatcctgatctgggtctactttctccagatccttgacaagaccgtgctcggctacggcgccacatttggcctcaagcaagacgcacatttgaccggcaaccagtactccctagtcggctctatcgcccctatcgcccagttggcctggcagcccttctcgtcgttcctgatcgtgaaagtgccccatcgtatcttgatgcctgctctggtctttggttggggcgttgcgcaggcgtgcatggctgcctgccacagcttcggcgggctgatggcgacccggttcctgctcggcctgttcgaggccggatgcctgccgctgttcagtatcatcacgagccgctggtaccgtcgtgctgagcaaccgcttcga

SEQ ID NO: 24433 - DNA, 431 bp, Emericella nidulans
atgcggcagttcaagctgtcctgggatgcgcagatcaccattgcaccctcggggccaacgactgccctgccaacagacgggcccatagcggcgaacgatatcttcagtacttatgtcgaactctcccaacccgccactcgcaaagtaagttagcaccgttgtctgctcaaacaccaacagataaccaacactttttttaggacttgaggatcatggccgatgcgacgacggacccggacgtacagaagatcctccgaacctacgccaacgaaacctacacagccgaaatcctcaccaagagcatttcagtccttgacatcctcgaacaacatcccgcaattgacctcccattgggaacattcctactaatgcttccatctatgcgcatgcgcaatagtcagtattattcctctcattccttatagcccagt

SEQ ID NO: 24434 - DNA, 297 bp, Emericella nidulans
gcgatcatctatcttctcccaagtctctagcaacacgaactgttggaaagcagattctgaacgctcactactggtatattagcgtttcgtattgctacagtttcggtcaaaatagggcgccggcgcagagacagacaccagcacgccaggcccagatctggtcgtcgccgcatcatgggcaatgaatcgtctacactcgtagacgagaagactcctccgtcggtcttagaagctcgcactgtggaggcagtcgcaaaatatgtcaaggagaagccagtgcggcgggtggttgtaatg

SEQ ID NO: 24435 - DNA, 616 bp, Emericella nidulans
atggtaactggaaactaccgttgttggagggcagatctgagcactgtggacgtggtggctttgggcaggttaccagagaggtgatcgcagccaggcattatcactcagtccacggcccatccatggtatgttcccctggtgtacgacgagtacggcgatggtcgttgtcactgacctgtatttttgtcctacctagtccgaaaaagtcgttgctcgcaaggtattcaaatccattatagactttgagcgtgagcgctgggtcctaaaagagctccgtaaatgtgaagtccagaatgcacgcatcgtcctccccctcgcaacggttgtcgtcggtggccagtccaacatcctctttccaccggcgcgaatggacctggacaagttcctcgccggtggactggtgtcgccagacgagtgtgggatgatggagctactaactgagctaatgggccttgccggtgcgttgtcacacctacacacatcgctgggcttcaacgtctacggttgccacgcggatctcaagtgcgccaatatcctcatataccctagtcgcgagaacagcgggtcctcgaggatcgggagctggatgatcaccgacttcggactctccataatt

SEQ ID NO: 24436 - DNA, 368 bp, Emericella nidulans
agctagattatggcgcggccgttacttctctcacgctccagtttttgagcgaatacgagaccacaagaatagccgctctctcttggctcatcatgctacaccgcaaggcgccgaagaaggttgccgcattcaatgacggaatattcccagcacttcttaagacattgtctgatccatcagagacagttgttacgaaggaccttcaacttctatctcaaatatctaggaacagcgaagacagctatttcaaattatttatggtgaacctgctccagctcttctctactgataggaacctgctggaaaacaacggaaatcttattatccgacaactctgtctaaatctgagtcccgaacgtatatatcga

SEQ ID NO: 24437 - DNA, 621 bp, Emericella nidulans
cacaccgctgccagagagtgcagttgcgccgtacttgacggatctggcgacaaggacggcagccaggggcgtcaaggttgggagttacccgcggtggcagaagaagaggaacacggtcacgctggtggggacggataaggagtttttggactcactagttgccgaggtcgaggagaatgtgcaggggaagaaggtgtcggcggaggatgagttggattcggacactgaggagaagtaggtgggtctgttacatttacctagcaatattgcaatagaatgggataatagatctctgacaatgcggtatattttcccgcctcacctgattatctgggacgccattggtttggctgttgtgatattggatcttgaaggctttagcgatatctaaactgggatccagaacagagtcacccccggggtgaaaccgggagtgaaaagtatgcggccgatagctatttggagataacattcaatttaaacgagctcatcagcatcccagaggccaaggtgagcctggctcacggcgacgtgaggggcgcggaagcaggcaagattatgaagtgtgcaagaggcaaactcaagaaaacagcgtactgtaccagatcaaagtgcaattga

SEQ ID NO: 24438 - DNA, 943 bp, Emericella nidulans
ttcattttatcagcttcatttacgtccaccttcccacgttcagtggagcgaacaaacagtgtcaatatgtccactaccacagccgaaggcagtcctgttgtgaccgtcactggaactcggccaaaggctcgtatggcgctcgatggatcgccaacaaactacggcgacttccgcgatgccttgaaccgagacggatacgccgttatcaagagcgcgattcccctggaccgcgcaaccaagtacgcggatgagttctataactacttggagggtttgtacgtctcctatattctggctgccttgctcggcgtcggacactgagtgtgcaatagtggtctcggctatcgccgcgacgacccatcgacggtgaaaccgtcaaccctgcccgtcatcaatgaaaagggcatgattttggcatatggcgtcacccacgagaagtgggtgtgggatatccgcggtgagccaagtgtcgtagatacctttgccaaggtctatggtgatgacgatctgatcgtttcgtttgacgtggttaatgtccagttttcaaagtatgaagtcactctgtcccacaccgattaacgcatgaactgacatgtcttcgttatagccgaaaggagatgcctgaaaagtatgcccgctaccttgctgataactatgcacaacagcaagaacgatttgctaacccgacatagcaagccatggccccatcaagaccaagacccagctaaaccgggcttccgctgtacggccccttggcaccctcgcctacctagacgctgctaacagttgttattgattcaggtcttcaaggccttgtcaacctcaacccctgcggccccgacgatggcggcctgatcgtctgcccgggggggcacaaaatctccgaacagtttcacagtgaaatggctaatgagccacgtatccccgcgtggacaccagagtg

SEQ ID NO: 24439 - DNA, 1132 bp, Emericella nidulans
atggcctacgaccatggagcgcccaatgggacgtctcccattgaggcgcccgccccgcgaaagatcccgttctggcgcctggtcgtcgaccagggcatcgtcacgcaagaagtcgtcgatcacaaatatgctggatcaggtacagaggaggacccatatgttgtcgtctggatccccaacgaccctcgaaatccgatggagttctcagcgatgatgaaatggttcctgacgggcgttgctgcgattgcgactctggctgttgctttggtctcgtcggcgtatactggtggtgttgcggaaatccaggtcgagttcggcatcggcagtgaggttgcaacgctcggtgtctcgcttttcgtgctcgggttcgcgattgggcctctgctctgggcaccgctgagtgagatgttcggtcgtcagatcgtctacttttttacttatatggctcttacggctttcaactgtggatgcgccggcgcgaagaactcgtggaccctcatcatccttcgtttctttgccggtgcgttcggttcgtcaccactcaccaatgctggcggtgtgattgccgatatgttctctgctaagcagagaggtgtcgccatgagtttgtttgctgcggctccctttttaggtatgttgcttcagcccgtgctgcttggttggctgcttgtttgagtgcttggagctgacgtcgtatgttctaggcccggtcctcggtcctattaccggtggatttctcggaatgaatggcggctggagatgggtcatgggattcctcggcgccttctctggtgcgctctggatcgccgggtctctctttatgccagagacatatgccccggttctccttcgccgccgtgctgagagactttccaagatcactggtaaggtctatcgaagcaagtcggatatcgagcagggcagaatcactctgggggaggctttcaagacagctctttctcgaccctggattctactcttccgcgagcctattgtgttcctgctgtctctgtacatggccattgtctatggaaccctgtacatgctcttcgccgcctaccccatcgtgttccaaaaggttcgcggctggaaccagggtattggtgcgctcccgttcctgggtatcatggtt

SEQ ID NO: 24440 - DNA, 315 bp, Emericella nidulans
gcctctgtctggtctcgcctcggttctgaggtcaccgtcgtcgaattcctcaaccagatcggtggtcccggcatggacgccgacatcgccaagcaggcccagaagatcctgcagaagcagggcattaagttcaagaccggcaccaaggttaccaagggtgacgacagcggtgctactgttgctctcagcgtcgagtctgccaagggcggcaaggaggagactttggatgctgatgttgttcttgtcgccatcgcgcgcagaccatacactgagggtcttggactcgagaacgccggtattgagaaggacgagcgg

SEQ ID NO: 24441 - DNA, 291 bp, Emericella nidulans
tccgcggatacaaccctctcacaccacccaacctcctgcaacatgagattgctctaacagagaaagcgcggcaaacggtccttcaaggccgagccgaggccattgccgtcgcccacggcacagacacagacaagcgccgcctcctcgtcgtcattggaccctgctcaattcacgaccccgaaatggccttagagtactgcgaccggctattgaaattgaaggagaaatacaaggatgagttgctcattgttatgcgctcttatctggagaagccccgaacgaccgtctgtt

SEQ ID NO: 24442 - DNA, 231 bp, Emericella nidulans
cttgaccctgattattccgaggatgctggtgacattgaacgcttccaatcatatgtccgggaaggcctggcagaaaaggccacggagaagtaccaaaacattctgggacaagaggttcccgttgagccagaggaatgggagttggatcatgtcatccggctttgcgacgctatcacgaaacactcagaaaaaatccgcaaacgctatcgaaagaacccagagatcatgggg

SEQ ID NO: 24443 - DNA, 4891 bp, Emericella nidulans
  unsure (1)..(4891): unsure at all n locations
atgctggacgacagcacccagaccgtcctcggggcgatcgtcccagaatccctgtcgtcgacctcgttccaacaatacgcacagctacagcccttttgcggcgatgtcgaaggctggggccctttgagcagactccggtttgatctgacgccctgttttctggacgtcggggtctcggttgttgctctgttcgggttggttttgggaagtggtgcgctgtggttcttgctcaacaagcgcattccccagccggtgtcaaagaattggcatttctacgctaagctggttagtctctgggattatctcatcattgcgccgtattatttgctgatgtgttgtctccggcgtaggttgttctgtccgccttgttgttcaccactgccctacaggcggcccttcaagttgagatttatgccagttggtttgccgacttccgattctggagcaccgtccttgttttcgcctcgctatgtgtcatatttgccgttcagtactatgaacattggcgcagccggtatccgaatggcgttgttctcttctactggctctttttcatcattgcctatactgtgaagctgcgatcgcatgtagcgcggaagacctacgatgatcgcctgccgtcctttgtctgcctcaatgtcagtctgggacttgcgattttggagttcttactggagtacttggttccgaagaagcagagtgcttacgatgccttgggcgacgaggatgaatgtccatatgaatatgcggatgtgttctcggtccttaccttcagttggatgacacctatgatgaaatttgggtacaagaacttcctcactcaggatgatctgtggaaccttcgccgaagggataccacgcgcgctaccggagctacgttggaggagaattgggagtatgaattgcagaaagacaagccgtctctatggacagctttgtttaagtcatatggtggcccttatgtccgcggagcaattatcaagtgcggaagcgatattctggcctttgtccagccacaactcctgcggcttctgattaacttcatcgattcataccggactactgagcctcagccagtcattagaggagttgctatatcactagctatgtttgttgtctccgtgtctcaaacatcattccttcaccagtatttccagcgcgcattcgataccggtatgcgtgtcaagtccggcctcactgccatgatctatgctaagtccctgagactttcgagcgaaggtcgcgcatcgaaaacgaccggggatattgttaaccacatggccgtggatcagcagcggctgtctgatctaacccaatttggtacgcagctttggtctgcgccattccaaattaccctctgtatgatttcgctctaccagttagttggagtcagcatgtttgctggtattggtgtcatgatcctcatgattccgcttaatggcgtcatagcccggatgatgaagaagctccaacttgtccagatgaagaacaaggatgcgagatcaagactcatgaccgagattctgaacaatatcaagagtatcaagctctacgcctggaacactgcatttatgaacaagctcagccatatccgtaatgatttggaattaaatactcttcgcaagatcggagctacgcagtccgttgcgaacttcacctggcagtccaccccgttcctggtttcttgctcaacgttcaccgtgtttgttctgacggaagatncgcctctaaccacgtcgatcgtgtttccggctctgacgctcttcaacctcctcactttcccgctttcgattctttcgatggttattactttcgtaatcgaagcctctgtggctgtcaggcggttgactgattatttcgctgccgaagagctttcaactgatgcagtcaaaaatgaagacccagtatcccaccttggagtcgagtctgtccgaatccgtgtagcgtccttctcttgggctcgatataaggatgatacagtgctggagaatatcgatttgagctgtcgcaaaggggagcttaattgcattgtcggacgtgttggttccggaaagtcgtcgctcctccaggcacttcttggcgacttgtggaagactgagggtgaagtcgtcgtccgcggacgcatcgcatacgtcgcgcaagccgcttgggtcatgaatgcaagcgtacgggaaaacatcgtcttcggtcaccgctgggatcctcagttttatgagctaaccgtggaagcatgcgctctgctggacgactttaaaaatctgcctgatggtgaccagacggaggttggagaaagaggtatctcactatctggtggacaaaaggccagattgactcttgccagagctgtgtacgcccgtgccgatatttatcttctcgacgacgttctgtcagcagttgaccagcacgttggtcgccatctgattaaccgcgtacttggacggaatggaatcctcaacagcaagacaagaattctagccacgaatgctattcctgttctgaaagaggctgactttatcggtttgcttcgcgacaagaccttgatagagaaaggtacatatgagcaactgatggctatgaagggtgaagtcgccaacctcgtccgtacaactctgaacgagtcgggtgatgaagactcaagcgccgaaagcggcggactcgctagccttgaaagctccgagactactaccataatcgaggggcccgactctgacttttcagatactgacgaggctgaacagcagattggctctcttgctccgatcaaggccgccggtccacgcaggaccagcacagtcacattacgtcgtgcgagtaccgtaagctggcaaggtcctcggcgcaagctaggcgatgaagagaatgtcttgaagagcaagcagacccaggaaacatcgcagcagggtaaagtgaagtggagcgtatatggagagtacgccaagaacagcaatctgattgccgttgccttctacctcgtcaccctggttggcgcgcaaacagcgcaagttggtggtagttactggcttaagcactggactgaagtgagcgagaggcagtcagcaccaaacgccggcaagtttattggaatttacctggccctgggacttgggtcgtcctttttggttatcctccagaatcttatcctttggatcttctgctcgatcgaagcgtccaggaagctccacgagcgtatggcgttctccatcttccgttccccaatgcgcttttttgagacgacaccgtctggtcgagtcctgaaccgtttctcaaggtaagcgcgctatcaagaattgatcgaattactctaacgtgaatagtgatatctaccgcatcgatgaggttcttgcccggacatttaacatgctttttggaaactcagccaaggcaatcttcaccttgcttgttattgctaattctacccctccgttcctgattgcggttattccattgggatatatctatttcagctaccaaaaatactaccttcgcacatcgcgcgagttaaaacgcctcgacagcgtcacgcgcagccccatctatgcccatttccaggagtcacttggaggaatctctacgatccgcgcttaccggcaagaggaaaggttcagcctggaaaatgagtggcgcatggatgcgaacctccgtgcttatttcccttccatcagtgccaaccggtggcttgctgttcgccttgagtttattggctcggtcatcattttggtgtctgcattgctttcgatcgtgtctgttgcgactggcagcaaattgtccgcaggaatggtcggcttggccatgtcctacgctctccagattacccagtccctcaactggattgtccgacagaccgtcgaagttgagactaacatcgtgtccgtcgagcgtgtccttgagtacgccagtcttccgagcgaagcacccgaggtcattttcaagaaccgcccgcccaccggatggcctgcgcagggtgcggtatcgttccataattacagcactcgctaccgcgaaggactcgacctcgtgctcaaggacgtcaacctcgacatcaagcctcgtgagaagattggcgtggttgggcgtacgggtgctggaaagagttcactgactctggcgcttttccgcataatcgaacctaccaacggtggaatcagtatcgacaatctggacatttcgacaatagggctccgtgatctacgcgggcggcttgccatcatcccccaggacccagccatgttcgaaggcacggtgcgggacaacctggaccctcgccatgtacatgacgataccgaactgtggagcgttcttggtacgtgggcctgcacatgacggtgaatcagtggtttaatggtattgactgtatgcagagcacgcccgactgaaggagcatgtatctcaaatgcagggtcaactggacgcgcacattcaagaaggaggtatgtacagcacatgcagctagtatatccctagcatcgcgcttaattaaccaccaacaggatccaacttgagccaaggccagcgccaactaatctcccttgcccgagctctcttaacgcctagcaacatcctcgttctagacgaagcaacggtgagtggcattgctcaccggtttttgggctctggagaaaactaacaacactaggccgccgtcgacgtcgaaacggatgccctgcttcaacgcaccctgcgtagtagcatcttccaagaccgcacgattatcacgatcgcgcaccgtatcaacacaattattgactcggaccgcatcgtcgtcctggacaagggccgcgttgcggagttcgattccccggcggcactgatcaagcagcgcgggaaattctacgaccttgtcaaggaggctgggctgcttgacagtgacgggaacgcaatcactgtgcattga

SEQ ID NO: 24444 - DNA, 1129 bp, Emericella nidulans
tccgccaaacgctagaatttgctgccgcagcacgcacgcctgcgcaccgtttccagaacatgtcccgcgacgagttcgcttcatacgcagcctcagttgtcatggccatattcgggctctcccacacacacaacacaaaagtcggcaatgatttcgtgcgcggtgtgtcaggcggcgagcggaagcgcgtctccattgctgagatggcgctacgatgacaccattcgcagcatgggataactcgagcagaggccttgactcggctacggcactgaagtttgtccaagctctaaggctgagtgcagaccttgcgggtgctgcgcatgccgtcgctatctaccaagccagtcagagtatctatgaggttttcgacaaggtcactgtgctttacgaggggaggatgatatttttcgggcccacaggcactgctaaagaatacttcgagcggatgggctgggtttgccctgccagacagacaacaggcgatttcttgacctctatcaccaatccgctggagaggaaggcgagagcaggaatggaagacgtcgtgcccaagacaccaaaggatttcgagatatactggcgacagtcccccgagtacaagactctgctgggcgaaatgactgagttcgagacccaacaccccaccggcaacgacgagcaggcctcagcagaattgcgagctcgaaaggagaactcgcagagtaggaactcacgcgcagcttcgccatacatcctcagcattcctatgcagatcaagctcaatacgaaacgtgcatatcagcgtatctggaacgacatgtcttcgaccatgagcacagtcgtcgggcagatcgtgatagccctaatcaccggctcagtattctacgactcgcccaacacaacggccggtttccagagcaggggcgggacactcttctatgctgtgctgctcaatgcattgacagccatgtccgagatcacgagcctctactcgcaacggcccatcgtcgagaaacaagcgtcatacgcgttctaccacccggccaccgaggcgattgccggcgtggttagcgatgtacccgtcaagtttctgctcgctgtcgccttcaacgtaatcatgtacttcctcgcgaacctgcgcccgtga

SEQ ID NO: 24445 - DNA, 657 bp, Emericella nidulans
attcaccggaagaaaatccagatactattggcattgaaggcgccatgcgctacctaggggatattgaggtcgagctagatgaggttacttgtctcgccattgctgagcttctccaatcaccgtccatgggtgaatttacccgcgaaggcttcctaaacggctggagatccgtccagtaaggaccagtactcgcagcactcaggaagaagccaatctaacaatatcagatgcgactccatcgccaaaatggccgcccatgcggcaaacctccgtacacgcatcccatcggaacccgacctcttccgccgagtttaccgctacacatttcccctctgcctagtgcagggccagcgcaacctgcaattcgaaatcgccgttgaacagtggaatcttttcttcacgacgccaaagggcgggattgcctggaacacgacgacaactccctggttggactggtgggttgagttccttgaagaacgcggcaaaaagcccgtcaacaaggatttgtggcaacaggtcgaagtttttatgcgcaaaacccacgaggacgaggcttttgggtggtggagtgaggacggggcttggcctggaacgctggatgacttcgttgcttgggttaggaagaagaggggggatgagggagctatggaggaatga

SEQ ID NO: 24446 - DNA, 587 bp, Emericella nidulans
aagctgacgcgctcgtctcgcacgaggcccgcgacaaaaaccaagctgagactctcaagctcgtctttggcatctacttccgcatcctgaaactccgcgtcccgaatctcatgggtcctgttctcgaaggtctcgccaagtacgcccacatgatcaaccaggacttcttcggagatctcctggaagccctcaaggatctcatcggacatgccgaggacgacgagctcaacgaggtcgacgataacgaagatgatgaacacatcaactccgcctcttcgacaactcgcgactccacccgcgaatccctcctctgcaccgttacagccttcgctcttttggaaggccaagacgccagcaaagccgccgcagctttgcacctcgacctcagcttcttcattaaacacctctaccgctccctgtacactctctccacaaatcccgacgtcgaattcaaccccaatgcctctaacgccctccgcctccctgacccttcttcctcgcaacaacagcaacagaacgcgcaagaccgcaagaaaaaagtaaatttccaaacgcccatcgtcctcctcctccgctgcctcaatgcc

SEQ ID NO: 24447 - DNA, 1675 bp, Emericella nidulans
cggcccgatctttattctccgatatttaccctcgaacgtcgtgttccccaaagtttataccccggctacattttcctgggaccatacgaggcagccaactcaggtccttacatttacgataatgatggggtatgattatggaataagcatgcatccacgctaaagctgatgaatgtaggacttagtttggagcggttggggcaattccggccctgggaatgctcatggtatgcatgtatgccagtacaaaggaaaagaccatctatgtttcttccaggggattcagcaaaacggatattgtcgaggccatggtgtcatcatggacaatcattatcacatcgttaagaccgtagtccccggcggtggtatggcagcgagcgacatgcacgagttcaagcttatcaacaatgggaagacggccctgatgacagtttaccagcagcgacaattcgatatgagtatatggaacatcaaaggtggcatgggctggttgatggaaagcgtatttcaggaaattgatgtggaaagcggcagggtgcttttcgaatggagatcgcttgaccatgtcgacccatcagtcagctatacgtaccctggccacacggatacctcgggcaccgggctggaacctcgctccccgtgggattactttcatattaactcagtcgacaagaacgctgatggggactatatcatctcctcgcgccacacgtgcgcgatctacaagatctcgggtcgcgacgggtctataatttggacgttacacggtgcgaacccgacttttgagaacatcaactttagtttctcacagcagcatgatgctcgttggctaagcgagaattcaacccatacgttgttgtcgctgtacaacaacggttacaacggtttcaaccgcacgcacgagtactcttctggcatggttattctaatagatcatgtcaacaagactgccacgcagcttcgggagtatgcgccacaaaaccacgatatgatcagctctagccaaggcaacatgcaggtgctgccgaacgggaacgttttcataggctggggaaacaatgcctatgtctctgagcacgatgaggaaggcaacattctgctttggggttatatcgacaagggcaacatcatgaactacagggcccaaaaattccagtgggatggtaatcccacggacattccagctctatggacatattctaagacgagtgatattactgcctcaaccaccttctacgtcagctggaatggcgccacccgcatcaagcactggcagttttacggcacaaacaactccaccggtaactatacactgcttggaaagacccgaaaggatggattcgaaacaacttatatagttcctggttattaccgctacacatatgccgaagcgcttgacgcgaaaggcaagatcctcggcaagtcacgcgagcagtttaccttcacgccgtcgccagtcctccaggcctactgcgaagagacgaattgcgagaacactgaagcgtatggcgttcccggcgaagaaggcgcacaggctctcatccccgaagctggcctcaataccgttccctgggttgaccctgaccatcccggtgcgcaccatacttggggacttacatggcctcctgttccagaggagaagccggagaatgcgaagactgtttatagtaagtaa

SEQ ID NO: 24448 - DNA, 1094 bp, Emericella nidulans
atgactggatccaatcgccaatcgccgggctcttctgtttcacctaatagcaacagcgtgccctctccgtctatccaaaatcctaagactcggaatgctcgtcactcccgcaacgtctcttgggctaccggtctcgatcaaggcggcgaatcctcttccgacggctacactcaacagcagcggcgtcgcgggtctatcttctcttcatcccatgccccagagggcctttcaggctgcaacgacgatagcgacgaagcaatggcattgaggaacacctcgtttgactggaacgacactgccagaggctatgttcggtcacgatctcagagccaacaattgccggcgcctggaacggtggagatgtcacccccgcggccgggccccgtgacctggatgtctctaccgcagaagaagcagctggcattgcttggtctatgccgggtgtttgactttcttcagatcgcttcattgcaagcgtacatgttctaccagctcaaatacttcgacccgaacctttccgattccgatgtctctacgcaggccggtatcctccaaggtgcctttacggccgcccagtttgcaacggctattccctggggacgggttgctgatgcggagtggggtggacgcaggttcgtcctcctcactgggttgattgggactgcggtctcttgcctaggcgttgcgtttgcaacctcgttcgcgcaggccgtcttctggcggtcgttcggtggtgctatcaatggaactgtgggcataatccgaactatgatcgcggagaatgtcaaggagaagaagtaccactctcgagcgttcttgattctccctattgggttcaacatcgcttctctttttgggcctggtaggttttccatattatgctctgcgagaattgttgattaatttgtctagttatgggtggcatgctttccgatccggtcagagcctacccttcgctcttcggtcctgactcctcgtttggtggtaagcatggggtccagtggcttattcgttatccatatgcactgcccatgctggataatgcgttcttcctcactttctgtgccgtctgcgttggccttggtctcgaggag

SEQ ID NO: 24449 - DNA, 390 bp, Emericella nidulans
ctttctgctttccgccgatccgacattggcgaggtctccttctttgagcgacataaccctcactctaagcttttcactctctgcctgatctatgctgagaagaagaacgacatcgatatggactcaattccccagatcctccgtgactaccgctaccacatctactcagatgatatccccgacgtgcgcgtcccgaacgccacttatgctgcccacgagaagctcggattcgacccagagaagggtggtgttgttgttactcgtcctgacagccacattgcttgcactgtgcagctggccgagggtagcggcacagtggatgctctcaacgcctacttcggttccttctccacgaagcccttgggccaggagcaagctagccgtctgtag

SEQ ID NO: 24450 - DNA, 2457 bp, Emericella nidulans
ttgacgaatgctgaaatcgcggtatgtgtttctgcgctttagttccatggcctccgctccggaccgtcgacgctaccgtctcagctctaattcagctgcgccccttgcttgtctactttactaatgcaacgtccatccatagccggcgtcgattggtttcaatacgtgtgtaagtttagagtcgcgtctgctacagcttattagcggctttggatagacactgacattagtacatcatacagactctagaatcggatcacttcgtctgcgtccgccaaaaactcgatgacgaggataagccccaggttatcatccttaatctaaagaacaacaatgagattatcaagcgacctatcaacgcggacagtgcgattatgcactggtccaagaacatcattgctctcagggcgcagggccggacaatccaaatcttcgacctctcagctaagcagaagctgaaatccgcggtcatgaatgatgacgttgtctactggaagtggttcagtgaaaggagtctgggattggtgacggaatcctcagtctaccactgggatgttttcgatcccacccaggctcagccattgaaggtctttgatagacttccgaaccttagcgtacgtactgccactgaagcaaaagcggaaacctggttaccgggactgatgatatcttattctagaactgccaaatcatcaactatcgagtaaacgacgaggaaaagtggatggttgttgtcggaatcagcagtcagcagggtcgtgtcgttggttcaatgcagctatactccaaggagcgtgggatctcgcagttcatcgaaggacatgcagcctctttcgcttctattcgagttgagggctcgcccctggaacataagctcttcactttcgcggtgcggactcagaccggtgccaagctgcagatcgccgaatcgacctcaggagccttaccccaggtttcaaaagaaagcagtggaggtgtatttcccccagagaggcagtcaacgacttcccagttgcgatgcaggtgtctcgaaagtacgacattgtttacctggtcaccaagtacggtttcattcacctctacgatctagagacgggaacctgcattttcatgaaccggatatctagtgagacaatattcacgaccgctcccgactccgaatctgccggtctcgttggcgtcaaccgcaagggtcaagtattgtctgttagtgtcgacgaaaacaacattattcaatacttgatggaaaatccagccatgtccggtctcgctgtcaagctggcttctaaggcaggccttccgggtgccgatcacctctaccaacagcagttcgacaacctgcttgctcaaggtaactactctgaagcagccaagattgctgcaaattcccctaggggattcctgaggacgccagagacaatcaacaagttcaaaaatgccccacaaactgggcaaatgtctgttatcctccaatacttcggtatgctactggataaggggacacttaacaagtatgagagtctcgagcttgttcgccctgtcctccagcagaaccgaaagcacttgctggagaagtggatgcgtgaaaacaagttggagagctcagaggaactgggtgatattgtccgaccttatgacatgaacctagccttgagcatttacctccaagcgaatgtccctaacaaggtcattgcgggttttgctgaaactggtcaattcgacaagatccttgcatattccaagcaagtcggatatcaaccagattacacacagctcctccaacacatcgttcgtgtgaatccggaaaagggtgctgagtttgcgactcagcttgccaacgaagagtctggcgcactcatcgaccttgaccgcgttgtggatgttttcctttcccagaacatggttcagcaggccacttctttcctcttggatgctcttaaggataacaaacctgaacatggccaccttcagacacgcctcctcgagatgaatcttgtcaacgctccgcaggtcgctgacgccatcctcgggaatgagatttttacacattacgaccgtccccgtgtttcccaactctgcgagaatgctggtcttatccaaagagccttggaaaatactgacgaccctgccgtcatcaagcgcaacattgttcgcacggatcaactcagcaccgagtggctgatgaacttcattggccgtctttctgttgagcagaccctcgactgcatggacacaatgttggaagtcaacatccgcaataacctgcaagctgtcgttcagatctgcacaaagttctccgaccttcttggacctagtcgtttaatcagtcttctagagaaatatcgcaccgtcgaaggtctgtactattaccttggaagtattgtgaatctttctgaggatcccggggtacattttagggtcattgaagctgccactgcgatgaaccagatctcttag

SEQ ID NO: 24451 - DNA, 800 bp, Emericella nidulans
atgcgttcagcgctccttattagctgcctggcggcatgctctgccgctgcccccatctttgagaacttctacaacttctccgatgatatggctgagttcctgggccgagtgagcaaggctatccacagcgaggtcaactcgttgacctgcgacacatcctcaattgctctcccctcttttgcctctggcctcccagcccccaccggccagaagcccctctacgtcgcactcggacgcgggacacaggtgagcacccagctcgattccaaacccatccgaagcagaacctaaccggctagtagaactacacctgcgccgactcaacctcctcctcgacgcccgaggccgtcggcgccgtcgcccgcctttacaatgcaacatgcctcgccgcgagactcccaaaggccatcgagctgctccccgcgattgcctacaagctcaccctcccagcaaacgaatacgacccactccccccatccaattttaacctcctcggccaccacttcttcgagggcaaagtccccgtctttgaccttgacacaacgccggaccgacagctgggaatcgcgaaagtgaagaaagaagccgaccttcccgctctaacgtctgcggtgcgtggcgatgacgacgaaggcgccgttgcctggctttatctttcaagaagcaatggcaccgtaggccggtactcgagcgtttaccgcgttgataccgcaggtggatcgccgcctgagacttgtgaggggatggcgcggagtttcgaggtcgagtatgcggcaaactattatatctatgggcaatag

SEQ ID NO: 24452 - DNA, 1287 bp, Emericella nidulans
tatatatacgccgaattctgcatatgcacggatgcgaacaaggatatgtggttcctcctcgccatagaggtcaacctcgcgatgcgcatgggttaccatcgtgatcccaaccactttcctggaatctcaccttttcgtggtgagatgcggcgccgcgtatgggcaactgtgcttatgagcgatatcatgatctcaaatcaaatggggatgccacggatgatctccgactggaagtgtgatacggccgagccgcggaacctgaacgacgccgatttcgatgaagacaccaaagaactgccgccttcacgaccggaaaccgaacttacaacctcattgggcatcatcgctcgtagacgggtacttaaggccctcggtatcgttgccgatctcacacacagggtaaagctctgctcctacgaagaggttatgcaggtcgaccggatcctgcatgatgctgctgctagcatccctgcacctctgaagtggaagccaatagcagcgagtgtgactgattcgccacaggttattattgctcgactatttatcagacatttgatctacaagggccaaatgatgctacatcagcgattcctgggcgggcagtccccctctaacaatgaggacagctttcgtcactcacagcaagcttgcattgatgcatcaatgggttctctcgagcttcagagtgtgctcgacgaggaaactcgcgctggaggtcaactccacgcgatgcgctggcgattcacctccctcatgaatcaccagttcctcacggcagcaatgatcttgtgctccttgttacaccacgaacaagcaatggagaggaaagatgagactttacgggcgctccagcgtgcgagagcagtctggatacgcaggagatccgcttcgaaagaagcaaagagagctgcagacactgttggtattgtgctttcaaggattggggttagagcgagcggaggcgatcttcccctcggcctcgataaacacgccggcaataatcgcccggtcatgaccatgcccggttcgaccggcgactttgacctagataacacttcaccggacaatatgagtttccatgaccgtgagactcactggccccgatttaaaagatgacgtgcctagctgacccctaccactagctgaccagtttattctgcccggcattctgggaattcaattgtacaagatcaaagtatgagctacgatgtcgatagtaccgcccttccaaacgaatggatgttcgtgaattgggacaactctggaggggatgggatgcccggttga

SEQ ID NO: 24453 - DNA, 363 bp, Emericella nidulans
ccccaaaacccctgcgcaagcggcgccgttgcagcagggacctggtacggctgctacatcacatacaccgatccctccggtgactctcctgaaccagtcccagtcgcaatgggccgcatcatcagcgacggcagctggtactttcacgtcgtcgacatggccgtcctacctgagcatcagaggcaagggctgggagattccattctgaagaatctgctggggtatatcatggacaacaaggccgagggggagccctatgttaacctccttgcggacgagccgggtcggaaactgtataggcggaatgggtttgtagacgctatgccgcatagtctgggcatgttctgggaggggaaccgatag

SEQ ID NO: 24454 - DNA, 1009 bp, Emericella nidulans
tcaagactcttcagcatggcggcccccgtcctcccgttaacgcaggtcaagctgcccgagctgcccgcatcacaattaagccccgagcagctccactggaagaccttcaaaaatcctctcctcattccatcaccagcaaacggccctgtcaacttcatcacacaaccatctgcgccctcttccgcctctgccttcccctcgctcacacagccccccgatgtcttcaccgtcacaacgggcgcccgcgtgcagatttactctattcgcacacgaaaactgctccgaacgatcactcggttcgatgacactgcgcgcggcacagacgttcgtcctgatggcaggattctagtagcgggtgatgataccggtacattacaggtgttcgatgttggttcgcgagcgattttgaagacgtggaaggaccacaagcagccggtttgggtagccaagttctcgcctagcgatccgacgtgtgttctgtccgcaagcgatgaccggactgtgcggttgtgggatctgcccagtgagaacagtatcaaatcattcgtgggtcactccgactatgtgcgtactgcggcgttcatgccgggttcgctggcttcgtctggctcgttagtgtctggtagttacgatcgaacagtgcggttgtgggatccccgtatggagggccggtctgccatgactttcaagatgggcgcgccgctggaaactgttctccccatgccgacgggcacgacagtgctggccgcggcggacaacaagatcgcggtgttggatatcgtggctggaaagccactgcatatgattcagagccatcaaaagacagtcacatcactctccttagcatcggacggaacgcggttactcagcggtgctctcgatggccaccttaagattcacgaaacaactggctggaatgtcgtggctggcttcaaataccagtcgcccatcctctccctctgcgcaatcacctccggcgctgcacgcgaagacaagcatattgccgttg

SEQ ID NO: 24455 - DNA, 1673 bp, Emericella nidulans
agcgcgagcgaaaacgagatctcgaggagcgtgatgcattagcgaagcggctagcgagcaaagacgacaaacggtcgaaaaaaattgtggaggaccgaactaaggatagtgaggctgcaaggcgacgagcattggcagatgacgccaaagccagggatgccgctatgccagaccttagattgcggtcaagacaggagtatctcaagaaacgagagacagaacggctagctctgctgagaagacaggttgcggaagagacgcaggaattgcgcgagaacccgaacctgacgcggagggagaaagaagagtttgcgcgcaatcgtgaggtattgcgcatcgccgaggaacgactacgcattgacgaccatcgtgacggctatatgatgccagaggactatattacggagaaggggaagattgatcggaagaagaaggaagatgctctctacaagcggtatgtggagcgtgatgaactcggccaggagaaattcatcacggagcatgaggaatgggaaatggaacaaactgcgaaggccaaagcccagatcaaccgagctgagtttgtagatgaaggcgattacgagtatgtctttgatgatacgcaaaggatcaattttaccatggacgcacagatgaagggtacgcgcaactgcatgacccaggaacagcgcatgttacaagaaaagctcgaccaggcggagcagaaggcacagactattgaagacacccgcaaaaagctaccaatataccagtttcgtgatcaaatcatccaagcggttcacgatcaccaggtgctgatcatcgttggagaaaccggctctggaaagacgacacaacttccgcagtacctccatgaagcaggatataccaagaacgggatgaaggttggatgcacgcagccacgacgggtcgcagctatgagcgtggccgcacgcgttgcagaagaaatgggtgttaagttaggcaacgaggttgggtactctattcgatttgaagacaacacaagcgacaaaactgtgctcaaatacatgaccgacggcatgctgctgcgtgagctccttacggagccggacttgggacagtattcggccctgatgattgatgaagcacacgaacgtacggttccgacagatattgcttgtggcctcttaaaggatattgcgaaggcacgcccggatttgaagttgctgatctcttctgcaactatggatgcgcagaagttccaaagttattttgacaatgcgccgattttcaatattcccgggcgcatgtataatgtcgatatccactacacgcagcaaccggaagccaattaccttgctgccgctattacgacagtctttcagattcacgtttctcaagggccgggtgacattctcgtcttcctcactggccaggaagaaatcgaggctgccgagcagagcttacaggaaactgcgaggaagctggggaataagataccggaaatgattatatgtccaatctatgccaatctaccgtccgatctgcaagccaaaatctttgagccaactccccccaaggcgcggaaggtggttctggctacgaatattgccgaaactagtctgacgatcgatgggattgtttatgtgattgatccggcttcgtcaaggagaacgtcttcaaccctagaacgggcatggagagtttggtag

SEQ ID NO: 24456 - DNA, 3388 bp, Emericella nidulans
ccacactgcggcttcgcgggctcgcgctccttcggctttgaccgctgattcctattattccgacgcacccagatcggccgctcaattcagcgcttattccaaccgcagtgtctccaggacctcatcgcacgagaccttcaacactcttcctgggaggccaatggcaggattgatggacgtcgaccgcagtcgctcgcggagagagcgcactttcgttggcagcgaatgtgccgtctgtgaagagccgttagaacataccctgcgcggggagcgtgtgctccaattctcgtgcgctcatgtcgcccacgaagcgtgtttttacgaatacctgcgcgagatcgagggtcagtactgccccacatgtgatgcgccattggggcttgactcgacgcgagggggaaacgtgctagatattggtaagcaactgtccgatccacgtgccgacggggctgacggagctatagagaaactgagcaatatagtgcgctccgttaacagtgatgcgatgacgcagcgaacgcgctgacgactcctacaccttgggactcggtcactagccgacagaacccgccaagtgaggtggggggtcggccgtatcctacgagtgacgtgggaagtcggccataccctgctagtgatgcaggaagtcggccgtataaccgcgatagtcgggacacgtacagcaaccgacgggatagcaaagacaccggaatgcagcgtgagcggattgagcgtctggcatcagtgtctcgacatcactcccggaacggtagcgcggctgggtcgtctggcgaatatcatgaaggccgccgtcacgactacgatctccaggctatggaatctgatcttagccctcgcactgcccccacgacgaagaatccaatcccggcccccattgtcactatccgtagtgaattccctaccatcagtcgatctcgtcaacaacagtcgctcacttgcttgatcacggttgaagttccggagggcaattggcgtccagacaccgatgatctgcggactggctcgacgcattcgctgcccaaggatgagccctatccgtcgcggtttccgtccgtgccagagaagcccgctccttttgagccgcaggagaatcttgatgagattgccgaagaactgagggccaaagtagacaactggcatggcctggaatttcaacggtaagcttacttcctcgtgcgtattgtactagctgacgattataggtttggcaaacttcgcttgcatggccatatgcgagtgggcaaggatcgtgaatcttggcaggatttggaatgctatctgtttcacgaaatgcttatttgcgtgaaggagaggcgcgtaccggaacaccactacgatccgcagatggtgaaacctcgaccacgctgcactcttaagggctcaattcttatcaggaagcacctgaaaaccattgaagacgttgctggtatgggtacctcttctgtcatcaaacatgagctaacgtcattagatgagcccgttctcaccttgcacctgtcggtcagcgaacttccgtgtttctatcttcgtttccccaatcgcagtcagctagatatctggcgccgtgctctcctggataacacagccgaatctcttcgaagccctgagcttgactttgaccgccactctggagtagaagaagatgattaccgtaatggcaacatgaaacggcaagcatcgttgaactcttctcatggtgcggcgcgttcgaacaacacggccatcacagactacacgaacatgggggttgaaagtgtgctatcgccgtcgattcacattcccgttgacattgttgttgtgattccggtctcgtcttcgatgcagggattgaagattaccctccttcgcgactctctgaaattccttgttcagaatcttggtccacgtgatcgcatgggattggtgacattcggctcaagtggaggaggcgtgcccctagttgggatgacgacaaagtcttgggggggatggtccaagattctgagctccatccgacctgttggacagaagagcttgcgcgcggatgtggtcgagggagccaacgtcgccatggatctgctgatgcagcggaagtcgtcgaacccggtgtctagtatccttctgattagcgactcgtctacttcggaccctgacagcgtggactttgtcgtttccagggccgaagctgccaagtaggttctctagtcctgtgaagcatagcgattttactaacaatcttagggtgggaattcactcgtttggtctaggattgacgcataagccggacaccatgatcgagctgtcgacgcggaccaagggctcgtacctctatgtgaaggattggatgatgttgcgggaatgcgtggctggctgcctgggagccattcaaacaacatcgcatcagaacgtcaagctgaagctgcgactcccagaaggctccccggccaagttcgtcaagatcagcggtgcgttgcacactaccaagcgagctaccggacgggacgccgaggctgctcttggagacttgcggtttggcgacaagcgcgatgttctcgtgcagcttgtcattccacccgacaacgctacccatgaaaccccaccgcaagatccttgggaaagtctggtatccgggctggaagctctaggcggcggattagacggtgacgatcaacgcgtcttgagtgtagaggaggtgccgctaatccaggccgacctgacttacggcgatttacttcgtgagggtcatctcacacactcaccacgaccgtctcttctagcaatcacgatgcttccaccgagccctcgacacaagggtggtagaccgtcgacgcctccgattcctcctcatccgtctatagtgcaacgccgcatggagctgcttacttcagacatgttgacgcgggctctgacgcttgtgtcgcgctcacagcacgatcgggctcaacacctactgaacgaaacccgaagtattctcaaaggcctaggcaagggtagccttccgcctcttccaccaccggccgcaaaaggcttggccgagccggagtcccgtggcgaaacgcccacctcagactctcccaagtcctccttcgccagccactcgtcggctgcctccgacactgccaccatcaccccagttgcggcagtagacactcagacgatgatggccctcgacggcgaccttcaagccgctctcgagtggatcaatcacccggctgtctttggccgggactcgcgcaaggcggtgctgcaaagcatcggcgtgatttcctcgcagcgggcatacaccttccgctcgccctctgaagagcactgggcacagcgcatctcgggcgtgcgccgtttgatcgagcgttcgaaagaatggcgcgaaactggcgacgacgcatta

SEQ ID NO: 24457 - DNA, 1257 bp, Emericella nidulans
gagcctgttattggtgagctgcggtttattgctcgacttaactcaaacctcctgccgaatgaagagccatttggggatgtatctacgacatccggcgggtcagctatcgagggctccgatgtattcctggtcaacggcgagacccgtagcaaattctactccagcgaacggtttatcgatgaccacaggcactgtaagtgatttcaagctctttctagacccgcctaattgttttcaggcatttcgggaagcgcacaccgtgtctgcatgatcttgaaccaatacgagtcttcctctggtggtcctttcttccggtatgtctagatttatcaaagcgtacaatagctaacaaactcagcgacatcaactccaataacggcggtgattacaatgccctctattggtacatggtacgtctcaatatatcagtcaatcgtcttcctactaattacgttagaactccggccacgtccaaaccgaatcattccgtacgggcctccacggtccctactcgatgtacttcagtcgaagcggaacccccagcaccaacatcgacacatccttcttcgccagccttggtattaagggttatgttgctgccaacggacgtggaactgtcaccggcaaagcttccggcgcagactcgagcatggactgggtggttcactggtatgaccggaatactgagcaaatcataatgtagctgacctgtgtacgtttcaggtacaacaatgatgcccagtactggacctacacagcgtccgacggcagtttcacctctcctgccatgaaacccggcacgtacacgatgaaatactatcaaggcgaattcccagtggcggaaaccaccgtgactgtatcggccggatcatcgaccacgaaaaacatctccggctcggtcaaaacaggcacgacgatcttcaaaattggagaatgggatggccagtgagcactaattatccttcattaccagtaaaggacagccgactgacccaagctttgtcattttccagaccaactggcttccgcaacgcagataaacaactccgcatgcacccctccgactcccggatggactcctggtcttccacctacacagttggctcttcttcgctctctgacttccccatggctgtcttcaagagcgtcaataaccccgtgacgatcaagttcaccgctacttctgcacagacaggtgctgcaactctccgcataggcacaaccctctccttcgctggtggtcggccgcaggcaacg

SEQ ID NO: 24458 - DNA, 1089 bp, Emericella nidulans
atggcgggagcattcgatttcgacctggagaagaaccctccagtagttcagtcaactgcggataacagcagtgacggcgctgtacccggcgagacctttacctacggcgactccacgtacgcgaagattcagcgccttgccgcagagctcaacatcgagcagcgcggtattgaacgcgttcctgctgcggagcagactgatacttctgtctttaatataggcagcatgtggctggcggccaacatggtcgtcagttcctttgccatcggtgttcttgggaaatctgtttacagcctcggttttgtcgacgctattctgacagttttgttcttcaaccttcttggcatcatgaccgtctgcttcttctcctgttttggcccatttggcctgcgtcagatggtgttttcaaggctatggttcggctggtatgtcaccaaaggatgtgagtatcttcaatccaccatggtttataatatggtttataattgcggcgagggctcatatatcatatctcctgcagttgctgttctcaatattcttgcatgcttgggttggtctgctgccaacgccatcgtaggcgctcaaatgctccacgcagtgaactccgatgtacctggcttcgccgcgatcttgatcatttccatttgcacgcttttggtcacatttgcgggatataaagtggtccatttgtatgaatactggagttggattcccactttcatcgtcttcatgatcatcctgggcacctttgcacattcgggggatttccaaaacatccctatgggagtgggaacatccgagatgggcagcgtcctctccttcggctcagctgtctacggcttcgctacgggctggactagttacgcagccgattacactgtgtaccagcctgccaatcgcagcaagcgcaagatcttcctttcgacctggctaggacttatcgttcctcttcttttcgttgaaatgctcggtgttgccgtgatgactgcaacggatattaaaggcagcaagtatgatgtgggctatgccacgtccggaaatggcggcctcattgccgcatccttcaccactgggggctttggcgatttt

SEQ ID NO: 24459 - DNA, 582 bp, Emericella nidulans
actatgtctagcttattcttatatgaagctagcacaccgtgcccaggggccaaaggggcgagagccagcaatgagagcggcaacggaagcgacccgatgagagatctgtgggacgaggacctcggaaattacgacgacacgaggaacatcgagttcacgaccgagatcagagcaccgattctgggagccaaaccgaaacggcgaacgaggacaacaacatccttttccatccacagtgattatgacgagaaaccacaagcaacggttcgttccaaggcgggaaacaaatcagctggaattgcccctgcgaatcgtaagacgtccttgctcgcacaacccgcgcagcggtttcgttcacggcccagggtgagctttgtccctagtccgctcaaacattgtcagcagcacgacaagaccgagcctgagaagagaagcacaagaccggatgtgcagaagaacaacgagcttctgaaacgcatcaatgccacaagtgaagaggtcgtagccaagcatgttctaaaggatgcacggcggactacggcctttttacctacagaggacacgactgcggccagtgttttt

SEQ ID NO: 24460 - DNA, 423 bp, Emericella nidulans
atggagccaacgatccacagcattttcgaaaacaaaaccggctcgtggcagtatatcgtcgccgacccatcaacaggcacggccatcatcatcgacgcagtgctagactatgaccctgcaacgcaagaaatcagcacatcatctgccgatatgcttctctctctgatccggaaagagggctacagcgtatccatgattctagagacccacgcccacgctgaccacctgaccgccgcatcgtatctccaggctcgtctggcgcaagagcagagcgcagaccatagaccagcgattgcgataggcgagcatatcggacaggtgcagcgggtgtttggcgagaaatatgggatctcaccggacgagtatcgaaatgtctttgacaggctgttgagagacaacgagaccttcgcccttgggtcctaa

SEQ ID NO: 24461 - DNA, 1170 bp, Emericella nidulans
ggtccgctttcaaatacccaacgacgcgccaactgtcacagaacgttccgaaggccagatatcgtcgccagctacatctagggagctgggagccgctatggaacggactagccttatatctagcggcaagacgagattatgttacgtaccggggaattcaggagattcccgccgccccggggaacgtaccgacgtcgaacagccggagccatccgatcagccagaagtggaagtggtaaatgggctgcttatcctcagaaactctaaacgggtacttccagcaacatacaaggtcactataattgcagcccgctctatatactatccgaacgaacagggatggagcgatctggaaatcccgggaattccaagaacaaagagtggcaggattggggttctcctcttccttatgcctgctcagcacggacttgagattcggaccacagatgttaatagagcaactattgtcgaagactgcctcattgcggagttcgttagcactggaaacctagtgatcccccttcgccgatgcagcagagagttctgcggcgaaattggtgatttcactgtggaccaggaaatcatttcccagagtatagtcggagtcgcaactacacccggacaaagtgatcagtcagttatccagatgagatgccatgcagcgtgctccgtacgactgtacaaccgctgtttctggagtaagaggtgcatcattcccctttgtgtggatggtggtccaagtggtttcttctattgtgacctgacttcccagcaacgggttacgaagagtatctgcatcaccgccaggaggaccaaaattggagtctcccgtatccgtgtggtctgctcgccaaaagatattgataggctctatctgagatggacgatagagttccccggtcgcagagcagcgtattggattccacgaatatatccagcattgtcgacgtctcatgagctcagtcagcactcgctgcggtacaaattgttggaagtaatgaacgacccgtcatacttgtactccaggattgacgccaccgaagtgaactgcgacagtagtgaaatcgctcaaatatacagggactatgagcaggctcctgacgacgtgagcgaggatgcggaaagtattctttcgcagcctgcggcagcttcaaacgcatcgcggtctaa

SEQ ID NO: 24462 - DNA, 471 bp, Emericella nidulans
catgaccagattgatttgccaatgtttctggctgcgccgtatgaccttgtcaaggaaaggagggagaagaggagcgggtatgtgactattgggcctgctccgacgacagagttgccgcagaggtcgtcatcggcctcagaagctgaggaagaaagggtggacctggaggtcgaggatgatcggccgccacagaacttttggacagacccgcctggttatgtggatgatattgtttggccgcgttatgtgagggatcatgcatggttgttgcttcctgaagacgacggcgccgaggccttgcctactgaggatcaggatgagctgatccgcagagtcgggcagggcgtgaagctgagaatggatgctggcgttactgttgctcctggccagggagccctccctatggcggatctgctaaagtgggcggttgaggagatcttgaaacacctggaaaagagcacaaggccctga

SEQ ID NO: 24463 - DNA, 720 bp, Emericella nidulans
gagcaatgctatgataacctacgtgtctctcggaatgcctgggataccaaccttgttaaggttcgtgactgccgccgctcgtccgttcgccactttcaagccgcctaacaaatccaggcaaatcccaaatatctgtctgtgaactgggaagctggtggtggaggtgctttcgccgttattcccttagaagaacgaggcaaattgcccgagcggatacccctgtttcgtggtcacaccgcggtcgttttggatacggactggtaagcagtgaccatactactcttgtcgcaagtttcagaataagccaacgtatttaggaaccctttcaacgatgatttgatcgcatccggttccgatgatggcagggtatggttgtatagtgaactaattagttacgcgccggccgaactaaatgttctgtaggtcttcctctggcgggtccataaggggttcacgctatcccctgatgtagacgccgatgatatccaagatgttgcgccagttggaaagctcagtggccacccgaagtaagtgtcgatacataagcctgtttgcgatcaacagtctcacatctgtcacaggaaggtcgggcacgtgctcttcaaccccgcggctgaaaacatccttgcgacggcatccggagactatacagtgaagatttgggatattgaggctggtgcatccaagttgacattgaacgttggcgacattgtgcagtag

SEQ ID NO: 24464 - DNA, 923 bp, Emericella nidulans
gacctatcacagaaaccgaagaatcaaaagtggatactgaggaggctgctgctaaaattgatgagaagcttgaaaaggccgaggaggctgaatcggaagctccggctgcggaaaccgctcctcagacaaatggaaccgagcagcctgaacctgcagccgaagttgtagagacccctgcccctgcggctgaagtcgtgcccgagaagcctgcctctccagaaccctctcccgctccgcccgcggagaaggaggctcctaccaaagagccagcacctcctgcaaaggctgttcccaagacctgggcaagcattgcctccaaaactggagctgcggcccctgttgttcctgctattcccgttgctcctgtgaagcctgctcctgcggctgctcccgcctcccagcctgctgctccagctccggctccggcttcggctgcggctgccgcccctgccgctgagagcggccccagccagccatcctctaacgatggatccggctggcaaacggcaggtcatgaccacaagaaatcacaggctcgcgccagtgataaccaggccgttcttggctacatcaagaatgttacggaaaaggtcaatgcggacttgctcaaggaaacccttgagcgatatggaaagcttactcattttgatgtgagccgtcaaaaggtattgtcgtcatcttctcagttccgccggataattcctagtttttactgacccttttttagaactgtgcatttatcgagttcgctgaccgcgctggctacaacgccgctgttgctgcaaatccccaccagattggaaccgaacaggtcaaggttgaagaacgccggcctcgtggcagtgtctacggcggaaataccaactacggccctggacgtggaggtgcaggccggggccgcggtgaccgtgcgggcagccagg

SEQ ID NO: 24465 - DNA, 1149 bp, Emericella nidulans
atgtcctcttcgatcaatattctctcaaccaaactcggccagaacatctacgcccaaactcccccctcccagactctcactctgacaaatcacctcctacaaaagaaccacgacacgctgcacatctttttccgcaatctaaacggccacaaccacctggtccataaccttctcactcggctagtgctgggtgcaaccccagagcaactccaaaccgcctacgacgatgacctccctactcagcgcgccatgccgcctctcgtcccttctatcgtggaaaggttatctgacaactcctacttcgagtcccaaattacacagattgaccagtatacaaacttcctacgtttcttcgaagcggagatcgaccgacgagactcatggaaggacgtcgtgatagagtacgtcttctcgcgctcgcccattgctgagaagatcctcccgcttatgtacgacggcgcctttcactcaattattcatctcgggcttggagtcgagttcgaacagccggggatcatcgctgaggcattggcgcaggcggccgcgcacgactcttttgggaccgattactttttcctcacggccgaaaagcgagctgctgggcgaaacgaagagggagagactctcgtgaaccttttacagaaaatcagggacacacccaaacttgtcgaagccggacgcgtccagggcctcattgggacgatgaagatgagaaagtctattctcgtcaatgcagctgatgaaataatagacattgcgtcgcggtttaaagtcaccgaggaaacgctcgcgagaaagactgccgagatgctaaacctctgtgcttacttggctggtgcgtcgcagaggacgaaggacgggtatgagccaaagattgactttttcttcatgcactgcgtaacaagcagtatcttcttctctattctcgggcgtcaggactggatttccatgcgggatagagtaaggttagtcgagtggaagggccggctggatctgatgtggtatgctctctgcggtgtacccgagcttgatttcgaatttgtgagaacctacaggggggagagaacggggactatgtcctggaaggaattgtttgcgattgttaatgagcagcatgatgatgggcatgtggcgaagtttgtgcgagcg

SEQ ID NO: 24466 - DNA, 1700 bp, Emericella nidulans
ctcatcacccgccgccttcgcgaaatcaatgtctactccgaaatgctcccgtgcacccagaaacttgccgacctaggctggaagccaagggtatcattctttcaggcggcccatactccgtctacgaagagggtgcaccccacgccgacccggcgttcttcgagcttggcgtcccaatcctgggtatctgctacggtctccaagagctcgcccaccgcctgcacgcggataacgtcgttgccggaaccgcgagggaatacggccatgctgatctgaaggccaccaagtttggcggtcacgttgacaagctcttcgagaatattgagggcgatatgaccgtttggatgtcgcacggtgacaagctccgcaacttgcccgagggctttcacaccatcggtactacgcagaactcggagtacgcggccattgcgcacaagtcggatcctatatatggcattcagtttcacccagaggtcacacgtgagtcccatgaaaggctagagtggggcggattctaatagtcgatagacactcctcaaggtggacagctgctgaagaacttcgctgtgggcatctgcggcgctgagcagaagtggacgatggcggaattcattggtcaggagattcagcgcattcgttctctcgttggccctgatggccaggtgctcggtgctgtcagcggcggcgtcgactcgaccgttgccgcgaagctgatgacagaggccattggcgaccgattccacgccgttctcgtcgacaacggctgcatgcgattgaacgagtgcgagaaggtccaggaggttctccaggagcagcttggaatcaacctgacggtcgttgacgccggtgagcaattcctcgctggtttgaagggcgtgcacgaccccgaacagaagcgcaagttcatcggcggcaagttcatcgacgttttcgaggatgaggcgcgcaagattgaggccaagagcaacggaaaggtcgagtggttcctccagggtaccctctatcctggtacgtctactctgattcatcacccaactccttgttcttgctaacaagttccagacgtgattgaaagtatctctttcaagggcccctcccaaactatcaagactcaccacaacgttggcggcattgccgagcgcctcatgcgcggccacggcctcaagcttattgagcccctccgtgaactcttcaaggacgaagtccgcgagctcggccgccaactcggcatctctccggagcttgtcggtcgtcaccctttccctggtacgcacttatcctaaagtccactcattatcaacaccatccacaaaaccaaactaacaaaaaaatacaggcccgggcatcgccatccgtgtccttggcgaagttactcgcgaaaaagttgaaatggctcgccaggccgaccacattttcatctccatgatcgcgaagcgggcatctacgacgagatcggccaggcttatgcggcactcgatccctcccgcgccgtcggcgtcatgggcgacaagcgcgtctacgcgaacattatcctgctccgtgcaatctccacgaaggacttcatgactgccaccccgtacccattctcgtacgagttcttgtccaaggtgtcgacaagaatcgtcaatgaggttgcgggcgtttgccgcgtttgctacgattacacgagtaaaccgcctgggactatcgagatggaatag

SEQ ID NO: 24467 - DNA, 1426 bp, Emericella nidulans
agagacgcaagtacgatatcgtcgtgattggagaagagccgcatattgcctacaaccgtgtaggtctgtcgtcgtacttcgagcaccgcaagatcgaagatctatatctgaacccgaaagaatgggtaagtggtccaggggtagtccgggtggtccgggcataatacgggcgtggcccatggctcggagtgtgctcagctgacaatgtgcttgcagtacggctcattcaaggaccgatcgttcgactactacctcaatacccgagtgaccgatgtttttcctcaacacaaaaccgtcaagacctcaaccggtgacattgtttcgtacgatatccttgttctcgctactgggtcagacgccgtgcttcctactagcacgcctggtcatgatgccaaggggatctttgtttatcgtaccatttccgaccttgaacggctcatggagtttgcggccaatcacaagggccaaaccggtgtcacagtgggaggcggtttactcggccttgaagctgccaaggccatgacagatctcgaagactttggcagtgtcaaattaatagaccgcaacaaatgggtgctggccagacagctggatggcgatgccggttcccttgtgactaagaagatcagagacctcggtttgaaggtgctccacgagaaacgggtggctaagattcatactgatgacgacaacaatgtgactggtattctcttcgaggacggccaggagcttgattgttgctgtatctgttttgctgtatgcttccaagactttcatcctgcttgtatggtgctgacttaaccatagattggcattcgaccgcgagacgagctgggaggaagcaccggtattcaatgcgcaaagcgtggcggcttcgtcattgacgaaagcttgcgaacatcggttaatgacatttacgctattggcgagtgtgctagctgggaaaaccagacttttggtatcattgctcctggtattgagatggccgatgtgctatcatttaacttgacaaacccggacaaggaaccgaagagattcaacaggccggacctaagcaccaaactcaagctgttaggagtcgatgttgccagttttggtgactttttcgccgacagagatggaccgaaattccttccagggcaacgacccgtctgccgaatctattggagctgcagaccctaaccgtgaagaagaacctcaggtcaaggccctcacgtatagagatccttttggcggagtctacaagaagtacctgtttaccatggatggaaaataccttcttggcggtatgatgattggcgataccaaggattatgtcaagctgaaccagatggtgaagtcacagaagcctctggaagtaccacccagtgaattcatcttgggtgcccagagcggtggagaagaaaatgcagacgatctgtaagtt

SEQ ID NO: 24468 - DNA, 719 bp, Emericella nidulans
ttaatctccttccagggtttccgtgtcgaaatccccgtcaagtcttcccgccagcgtggaatgcgtggttcctaccctgttcgcctgttctacacctccaacatgcccattatgctccagtctgccctgtgctccaacattttccttatcagccagatgctgtactcccgtttctccgacaacatccttgttaagctccttggtgtctgggagccccgtgagggttctgcccagctccacgcttcatctggtgtcgcctactacatgtctcctcctctgaacttccgcgaggctcttcttgaccctatccacacagctgtctacatcactttcatgctcgttgcctgtgccctgttctccaagacctggattgaggtctctggctctgctcctcgtgatgtcgctaagcagctcaaggaccagggtctcgtcatggctggtcaccgtgaacagagcatgtacagggagctcaagcgtatcatccccactgctgccgctttcggcggtgcttgcattggcgctctgtccgtcgcttctgaccttctcggtgctctcggtagtggtactggcattctccttgcagtcacgtaagcatgtcgttcttctctcttcttcaaagtctaacaaaatcgcgcagtattatctatggctacttcgagattgccgctcgtgagggcgatatcggtggaggtctcaagggcctcgtcccgggcaactag

SEQ ID NO: 24469 - DNA, 972 bp, Emericella nidulans
atgttccctcgctcttactggctgaacggtggcctgtcggccttatactctctctgcatcttcaacttcgccgccagcattgttctttggtttaccgtcaactcagaccgaaattacatccatcctattctcagccaattgatacccgctgggcattgcgcgtgcgaaacggcggcggttttcgaatgtagcacttgcttgacctgctcgcatcaggaccccatcttacagatcgacgaaaacgaaacggaattgtgggagtttgagtacagccgagacgccttcaatgtcggactgagccgcagccagtgcgccgcttcgttcccgggcctcttcgaggacgttagtcgtgctgcaacttactggcgcacgcagggaggattgtcttctgatgaccttgacgccatccccattaatcagggcatgggccgcgcgagaataacgcagggagagttgtatgtaatatctgtccgagcgcgtggcgaggaccaccggaggaaattacttgctgcattgagtgcgatgcaccgagcccttgtagcagattccaaccgcttggcccggccagaaatagaatttgtcttctcgatcgaggataagctcgtcgacgtcaccagttcggagcacccagtgtgggtactcgcccgaacagcagatgaagaagctgcgtggctaatgcccgattttggatactgggcttgggaccacctgcaggcatcgatcggcccatacgaccaggttgtcgagcaggccgcggagtatgacaatataccttgggaggacaaaaaacaccagcttgtgtggcgggggaaaccgagttttgcaccgaagttacgacgagcacttatggatgcgacgcgtgaccagccatgggcggatgttcaggctgtagactggcaagagcaggacaagtcaaatgttctgaagatggaggaccactgcaaatatatgttcattgcgcatgtagaaggt

SEQ ID NO: 24470 - DNA, 536 bp, Emericella nidulans
tcgtatatggccgtgaaacttgttcaagcgcagactgaaaacccacacagaatatctgactgggatatcttagccactgtcggtgcgaatgtcggagccgggagcgataccacggcgatcagcttgagctcgactctgtaccatctatatcggaaccctggctgtctggcgaaactgcgcgaggaaatcgagtctgccggcattggtacagtgatcccagcattcaagagcacgcaggagatgctatatctccaggctgtgcttaaggaagccctccgcgtccatccggggacgggatttccattgttcagagtcgttcctaagggcggccaggtcctcgctggccaattctttcctggaggagtaagtaccgcgggaatttctaaccatatttccacccccactgaccactttcgaaaactaggtgaacgtaggaatcaacagctgggtcctacactacgacactaatatatacggcgcagacgcatctattttcagacccgagcgatggctcgaagcagatgaagagcagctga

SEQ ID NO: 24471 - DNA, 366 bp, Emericella nidulans
atggctgcagcggatttcgacgctgtccgaaagctccaggctgagcgcaatgcggcagcggccgcgaaaaaaggttctaggacctttgatccgtctaaccagcgcactgacaactcgacaaaggcctccttgaccgaatcattcgatacaaccctctacgatcgtgaaggtgccgataaatatgcgggttatagcacctccatcgctgttgacgatggagatgaagacatggaggacgcggataatggacaccgcttggttgggcagtatactgcaacgcgaagccagattgacgagtttgcccggggaaatggggtcgaagaagaggacattcttcttggacgtgaaaaggctgctaggatctcc

SEQ ID NO: 24472 - DNA, 992 bp, Emericella nidulans
gatatctttctctcaattttgctctaccggatgatccgatgcccaacgttctcgtcctcggcggctccggctacctaggcttagctatatcccaagcgctcctgtcgtctggcaactacaccgtctggggttccgctcgcactcctgaaaaagcgaaactacttctccagaatgaaattagtcccgtccaagtggatataacagatcaggagacgctggcttctaccattgcagaaaacaacattgacattgtcgtcgagactactatggcgttcgggcaggcaggtgacatgctggaaggggtgaaaaaagccgcaggcaggcgtcaagacggattgcgacagcgaggccacctcggtcccaagttggcctttgtctactgctccgggatctggatccatggatcgccgtcctcgcgagtgagcgatctctcccctgtcacgaaggagaaggcagctcgaatcgtcacgtggcgtcccgcgcacgaacaagccattcttgcatctcgagatgtgttggatgtcgccattatcagaccgggaatcgtctatgggcgtggttcctggatctggagcacatggtgggcctccattttgaacgcaaaacgaagcggagctggcactgaagcaatccgcattccggctgatattgacgcacgaccagcgactgtgcacgtcgatgatgttgcagcgggttttcgtgctgccatcgatcgagttgacggactacttggctcctggccggtgtttgacctagtgacggagacggttggtgcgcaggatatcgttgaagcagcaaaagccgccttgggtgttgaagggcctgtggagtacactggtccccagggagatatttttatggaggcgatgagtacagtgagtaattcagacacaggtagggcaagggcagtcttgggatgggtgccaaaacggagcgaatttgtcttaaacatgtccatgtatgtgcgcgcgtgggaggcggcacaggcatag

SEQ ID NO: 24473 - DNA, 491 bp, Emericella nidulans
tgattatccaatccgtcctcgacgtcaaagacgataaccctttgccaaagggcttcagcggctcggttcaatttaatcgctccatcctcattcttacaccccaacgagctcttaagtttacagccaccagcatcgaacgccactatgtctggctaacagccttgtcattcctgagccattcagcgataggcctgcaagacctcgcttcactcccaccagtgccgcgggaagattacactcgcccagcgccaacggcaaccctccgccgcaatcctattcgcgactccatccgaatcgccaagggccgtccgcgacccttcccaagaggcaagggcaaacggcccttcaataatcaaccggaaccggtccctgaactcccctatgacctggacgacgaagttcgagcctcggaggacgcagcggccccaccgacggtgccccggttttcgaaccatgcccgcaagcgcagcaatacggcgccgagaatgccg

SEQ ID NO: 24474 - DNA, 318 bp, Emericella nidulans
gttgtcgtttgcgactccggtgacttcgccaccatcgacaagtacaagccccaggatgccaccaccaacccttctctcatcctggctgcctccaagaagcccgagtacgccagcctgatcgacgccgccgttgagaagggtaagaagcagggcggttctgtggacgaccaggttgacgccaccctcgactacctcctggtcgagtttggcaagaagatcctcgacattattcccggaaaggtctcgactgaggtcgacgcccgcttctcctttgacacaaaggcctcggttgacaaggctcttcacatcatcaaggta

SEQ ID NO: 24475 - DNA, 1179 bp, Emericella nidulans
aacgggcgtctggtgactcgaggttcggaagggatgcaggtcgtcgccactcgagacatctatatcggcgaggaaattacggtttcgtacggtgaagactattttgggattgacaactgcgaatgtctatgcctcagttgtgaacgcgttccccgcaacggatggtcacagaacctagctcctgggccacaaagcaaaccgtctacgccagaaccaaaggctagtgaagaccaccttacgccgaggaaacgcaaggcccaatcagatatcgattcggacagctccccctcttcaactcctaggaagcggggaaagttcacaccacgtggttccaaactgcggtctcagttgtctcttaccgaagatattgctatctcaattgagtccgagcctcgtgttccatcgtcgaatctggccttgtcggcgcaagaggccggcgattccggaaagagcagttcagccggagataatgtggaatcttcggggaccgattctgaatctcttacctccataacccctcaagaatcacagcgatcatcggcatccactgctgcaacttcagtgttcgatgaagccgtatcactcaatacgaggccaaccaaatctgcggtaacaactgcggcgccggcagaaagttcaatagcggccgaggcgcctttatctacgacaatccctgaaactgatatcaaacttgaggtggaaccttcttgcgaacccaccactactgtaacggcacaattagacactacggtgcgcgctgatagctgtgtaagcgatatctcaagttctaccaagttagaagacggatcagaagctctggagcacgtgaagaaacctagaaaacccagaaccaagagggtctatttgaccattgagccggagtcaaaactgaatcgagttcctgcagattacgccaaaacgccaaaactactagcgcactcgtatgcccgctgggtagactgccacacttgcaacgcttggttcgtgcaacaaaactcctatctaacccggagagagtgccctcgctgcgagcgccactccatgctgtatgggttccgctggccgaaggccgagaaagagggcccgaccgatgatgaggagagagtcatggaccatcgcaccatccagcggttcctgtaccccgaggaagaggcccttgtatctagcaggggccgtggg

SEQ ID NO: 24476 - DNA, 599 bp, Emericella nidulans
atggccgctgtcagcgagataaccgagcgaacgggtcaaattgccatagatccttcgtcccaggctccggcaacgaagcctattacgggattctcgggccccttcaagactcgactggaccagatataccaatcattgactacggaaagctcgaatttcagtagggacatccaacgcgatgatcaagacccgaaggacaacaacccactcagctctctagcggcgtttcacgcctacatggctagtccttccgcatctgcgttacgtcctgccggcccgccagatgactctgcaccgattacagattattttatctcctcgagccataacacatacttgacagggaatcaactgtacagtgatgcggcggcgaaagcttataccgatgtgggtcttggtatggttcaggtattcgagaatgaaaccgctaatcagagcaggtacttctaggtggatgcagatgtgttgaaattgacgtctgggatggagagcctgattctgatagcgatgacgacggtacaagtagcagcagctcaagctccgatgacgagaaaagcaaagacaagccgaaggtaccggaaaagaaagaagacggttaa

SEQ ID NO: 24477 - DNA, 639 bp, Emericella nidulans
atggctaagcaaattgctggttctaaggtccttcttcttggctcaggcttcggtactattcaacccccctcaatagcccttccatccctgcgcagaaccccgcaccatcctgaccatgactgactagattttgttatatagtcaccaagcccactgttgaggttctcagcaaggccgacgtcgaagttactgtcggtacgtactcgattgcaattaagcgcttagttgtcctataactgaccgctaccctgaatacagcatgcagaaccctcgagagcgcgaagaaactctgcgaaggattcaagaacaccaaggccatctccctcgacgtcaacgatgacaaggctcttgatgaagccatgagcaaggtcgacctggccatttccttgattccctacaccttccacgcccaggttatcaagtcggctatccgcaccaagaagcatgttgtcaccacatcctacgtttctccggccatgatggagctagaccagcagtgcaaggatgctggcattactgtcatgaacgagatcggtttggacccggtgggtgtggccccgatgctctgcgaggatccttggcttatctcatgtcccttagggtatcgatcacctttacgcggttaagactatctccgag

SEQ ID NO: 24478 - DNA, 926 bp, Emericella nidulans
gctgtctagcccaacccccaatttcatcattgaaaggtcgcggtacttccggcattgagccgtccacagtttcccagttcccgttaggcacctgggctgaaaacattgcagttcgacaaaacggtaatttgctggtcactcttctcacggccccagaagtccatgaaattatcccgtccaattcgtttagctctgcccggctcgcctttgctttcgagggtcattccaatgtcactggaatcactgaagtcaaggcggatgttttcgttgtctgcgtagatggcggatctctctgggaattgaatttcagagagggcgacacccctcatggctctctattaacaaggataccagaagcacagctcaatggacttgctacattgaaccccgcgaatgggattgttatcgccgccgattccaccaacggctgtatctggcgagtagatgtcaagactagagcctatgagtccgttcttaaggacgaaactatgcaaccggtgccggtgaatgacgttcagctggggatcaatgggttacaagtgtttgggaacactgcctactacaccaatacgccaaagaatctcttctgtcgagtccagctccatccagtttctggccgtccgactagccctgttgacatcatcagtgatagtgtcgaagcggacgattttgccataactccggctggaattgcatacttggccaacacataccagaacaagataacaaagttctcgtggaggaatagcgaagttattgccggaagcttgaactctagctctattcccaatccgacgtctgccatttttggacgaacagcgaaggatagaaatgtgctttatgttacaactggaggtggcgaagcagggcccattaacgggacttttgttgagggtggcgcagttctcagtcttaggctgtggtga

SEQ ID NO: 24479 - DNA, 639 bp, Emericella nidulans
atgctccaggaagaaattgagactctgcgtgtggagactcagcagcttacccaagaaatgcgtcgagtcgctgaacttgcggacaaagcatggagggagtccgaaagctactctcaaatccttggtgcactggaaggtaaacggattgaagcgaagagtatccaagccacgatcgacaatcttaaacgacacctagtagaactcgacgagccggatgaatggctcgaatcgaatttggagcagttcgaggcgaggcaacttcagtaccaacagcaagaggagactgaaaaggagaagtacatggagatcaaggaacgaatcgaagaggcacggcacaagctcggcctcaagcaagccgagtatggaaaacatgagaatgacaaggccaactttgagcgccaggtcgaaaggcgtcagcgcatgtccaaaggtcttgcacgaagctacaacatcagcgggtttgatacaattgtggaccagtcagatgtggaggaattcatggcaagaatacggaagattctaaaagatcagacccaggtcttggaccgagctaaaagagaggcacagggtgaattacgtgaagcgcagacatccctgaaccagatcagtgagcgcaagtccgtgttcaagaaagcaaaa

SEQ ID NO: 24480 - DNA, 1208 bp, Emericella nidulans
gcgatccggcttatgagatgtaccgtcaggcaacgttgggcgatgtcgactttataaccggcgattacctggccggtatgtggatcatggacgattcctcaatcagctcgagtctaacaagagtaagaggtcaatcttgcaaacaatgcggaggcatggcgtgccggaaagcatcccggctacgaggagacagcttggaagggcatccagcagactatcgatgtcatagcagaaaagggtatcaaagtcgtgatcaatggcggcgcgcttgaccccaaagccctagccctgaaggtccagggtctagtccgcgagaggaacctcaaccttcgcgtcgcatacctatcgggcgacgacgtatacgaccgcgtcggtccaaacatgcccacaacaaaagaagaactccagcatctcgattcaggcaactcctccgccgctccggccgccctaacatacgccttcctccgaggcacagcagacggcaaacctattcctatggtctcggcgcatgcatacctcggagcgcgcggcattgttcacggtctgcggaacggggcggacatcatcctctgcggccgagttgctgacgccagccccgtcatagccgctgcttggttctggcatgactgggcggagacagattatgatgagctagccggtgcgctgatagcgggccatttgattgagtgctctgcatatgtaacgggaggtaatttctccggctttgacaggtataatttggacgaccttattgaacccgggttcccaatcgccgagatcgacgccgacggggcgtgtattatcaccaagcacccgggtacgaaaggaatggtcaccgtcgatacagtgcggtgccaattcctatacgagctgcaggggacagtctacctgaacagcgacgtgaatgcttacatcggagatgtggctgttgaggaagtagaaaaggaccggcacgatctgcttctctctttccaagacctgaccaaactaataatggtgcacagcatccgcgtttcaggaatcaaaggcaccgcaccacccccaaccaccaaactcgccattttctaccaaggcggctacgaagctgagattcttctcaacgccacaggctacgctacgtcgaagaaatgggacctgcttgagaaacagattcggtattttcttccagactcggtgcaaaaagagcttgagacgctagagttccaacg

SEQ ID NO: 24481 - DNA, 1147 bp, Emericella nidulans
ccttcgagccgctataggaattgccagagatcgcgcaaagcgtgccctgaaggcactctcgttgtctctgcatccgaccctaaggctgacttttcaaccgtccaagccgcagttgagtccctgccgcacgataacagcagccagacgatcctgatcctagcagggacatatacggaacaagtcaatgtcacccgtcccggcccagtcacgctgctcggccaaacagaccatgtcaccgacgcctccaagaaccaggtgacaatcaactgggcacaagccaaccatgacagcacgggccagagtgttgacaatgttttcggaagcgttttgactgtcgcacctactctgaacgcgagttacactggctctggtcccacgggattccctgtacctgaggatactccctttggctcagtcgactttcgtgcgtacaacattgattttaccaacacctgggcggactattcagacggcccggcacatgcactcagcttcagcagggctaatggcgggttctactattgcgggttctattcctaccaggatactgtaggtctgcctaacctcttgcgaaataatctgacaatcataggtctacgtaggcaaactcggcaacgcatactttcacaggagcataatagccggccaaactgacttcatctacgggttcggcacagcttggattcaatcgtctgatatcctcctccgcaactgcggcggcggcatcacagcctggaagggtaccaacacgaccttcgagaacaaatacggcgtctacatcgtcgactcatccgtgcaagctgccaatgcctcaattgccccggaaatcgtcggtgcttgccccctcggcaggccttggaatgaactacaccgctccatcttcgttcgttcctatgaggatgctagcattgatcctgaagggtacattgattgggtcgttgatggtgtaagccgtctgtcaaacaagactttcatggccgagtatcgcacctttgggccggggttcaacgtctcgagtcgcgcttcgactaatgcatcaattgtcttgtcagccaaggaatatgcgccgtatgattctcctgcgaaggttttcttgaccccggacggaaaggccaacaatatcggctggattgactggcaggcatag

SEQ ID NO: 24482 - DNA, 390 bp, Emericella nidulans
atgcctgagaccgtcggccacgaggagccggctcttccttcgagccctcaggctggaggagccgttgcctacaacgcgatcagcaaggaattgcaaccgcttcccccaacggagactgccaatggcggcattattcctcctgcatcttcaaggatcgagggtagcacagggcgactgtgtgcgctcgagcttgaggatggtacagtctaccagggctacaactttggtgctgagaagagtgtggcaggagaactggttttccagaccggtatggtgggatacccagagtccatcacggatccctcctaccgcggccagatccttgttatcaccttccctctgtcggcaactatggggtcccctcgcgggagaccatggatgagctgctga

SEQ ID NO: 24483 - DNA, 1261 bp, Emericella nidulans
ggtcaattcttcccgtacttcgtcctgaccctgactggtctcgtcacctttcctctgacatacaatctcttgaaaccgcccaaaggtacggcattcaaaacctgcttgaatttagcgagttcaataagttgtctaactgacttcgatagacctagaaaataccgctccccggatacggtccgacttcaagcctgaacatgaagacctcattgaggctcagaagcggaaacgcctccgcaaggagcgccgcatcaagcgcatagtcacagttgtcttgggatacgctattatggcatacatggcttatttgattgtgattaccgctcgggcgtaggcgaagatctgggatccctatgacattctcggtgcgtaaagggtaagctctcagcccaatctcgtggtttttaacttttcgccgcatactgacagcctgtcttcagagcgccaatgaaagggcaattaccaaacactacaagcgtctctcacttctctaccaccccgacaagatccgtcccgacccagcgaagaatgaaaccatcgaactgctcaatgaacgctttgtggaactcaccaaggcatacaaagccctgactgatgaagaagttcgcaacaactacctccagtatggtcatcccgatggcaaacagagcttcagcatcggtatcgctcttccgcagtttattgtcaccgaagggaatggtaaatatgttcttctcgtctatggtggcttgctcggtgtactgcttccgtacattgtcggaaaatggtggtatggttcccaacgatacactaaggaaagagtctacgtcgctagcgcgggtaacatcttccgagaatacaaagatgacatcacggatggtggaatcgtcaacgccctttcctctggcgatgaattcaaggaagccatcccagctcaaaaagcagagacgggtctggcaaagcttgaacaaaaggtactagctgacgataacaaattcttgactgaccaggaacgggaagccattaaaggcatggacgacttgagcagaagaaaggctttggccttgttgtgggcttatttgggccgtgttgagttggacgaccccatcctaaatggaggtaggtcgctcttcctctcattgataagacattcactaagttcagtccagaaaagtacgaagtcgcgccaatcgctctgtctttaaatgaagccttcactgccgtttctcttgcctttggaaatcttcgtcctcttctcggttccttccgcacgtctcagaat

SEQ ID NO: 24484 - DNA, 1737 bp, Emericella nidulans
atggcttctgcacttcagactcccgtcccagccattgacgaatactacaacctgggatcgtttggccacaccattaccaccagcagcgccgacgcccaaacctggttcaatcggggattaacgtgggtatattcgttcaatcatgtagaaggcgcctactgctttgaacaggctattgggcacgacccaggatgcccaatggcatactgggggcttgcatacgcagtcggcccgaactacaacaagccctgggagaaattcgatctgggtgacctgcatcgatcagtgcagcggggttacgaagcttcgcaagctgcaaagagactagcaaccaacgtgaccccccttgagcaagcgctgatcgaggcgatgctgcatcggttcccgactaacgaaccggcaagggactatgcggctctcaacaggagctatgccaacgccatgaagctcgcatatgacgcctttgggcacgatctgaatgttgcagtcttgtatgcggatgccttgatgaacatgaacccctggtcgctatgggatctattcaccggactgccaaatcccaacgcgccgaccctggaggtgaaagccgtccttgagcgtgcgctttcgcaggaaggggacggcgcgaatcagaaccccgggcttctgcatctatatattcatttcattgagatgtcgcccagtcctgagctgggaatcaacgctgccgatcgtcttcgtgacctcgtgccggatgccgggcatatccaccatatgccaacgcacttggacattcttattggcgattggagacgctctattgcgtcaaactacaagtcgacccttgcggacgataaatatttccggagatccggcgccaagaacttctatactttctaccgcatgcacgactaccattccttggtatacgcagccatgttcgccggtcaatccaaggttgcacttgacgctgtgactcgcatggaagcaacagtgcccgaagaggttctccggattgagtccccaccgatggctgactggctggagcagttcatgcctatccgccttcatgtgatggtgcgcttcggtatgtgggaggagctcaagcgcaaagagctgccacacgaccagatcctctatgctgggaccacagcgaccacgcactacgcccgcggaatcgctttcgccgccacaggggatgttgaagcagcccggaaagagcaagatctcttccacaaggcatgggcgcgcgttcctgaaacccgccgcgcctacaacggcaagatggttgacgtgctcggggttgccgcagctatgctagagggtgagattgaataccgagaggccaactatgatcaggcatttgagtcgttgcgtcgcgcaatcgacctcgaggataagctgccgtatagcgagccatggtcgtggatgcagcctgtacgtcacgcctacgcggcgctgatgatggagcagggcaacctggaagaggctgcgcaggtctatcgggctgatctgggtatggacacctctgtaatcaggccgcgcaggcacccgaataatgtctggtcgctgcaagggtaccatgagtgcttggtgagaatggggagactggaggaggctgctgtgattgagcagcctacaaaactagctcttgcggttgctgatgtgccgatcagggcgtcgtgcttttgccgtttggacacgtcacaggcgccagaggttcttgacagctgtgcttccaaggggaaggagaagtgt

SEQ ID NO: 24485 - DNA, 357 bp, Emericella nidulans
ataatggctaccctccaccccttcgaccccattaccccgggggagatcaccctggccaccaagatcctgcaggctgccttccccggcgttaagctacgctataagaagatcgacctgcaggaacccattaaggccgaagtcgttccatatatcgaggctgaacgtctcggcaagccattgcccagcaagccaacccggttactgcaggtgctgttccaccgcatggacacgggtgccttctttaaagggctgctgaatgccgactcgaagagtgctgtgtacgcgaatgagttgccgagggagatccaggtaggacccccccagcggtcggatagcgcattctggacaggccgctaa

SEQ ID NO: 24486 - DNA, 571 bp, Emericella nidulans
ttctacgctttcctaaccctagttgccccgaccccccgagaacccctccccgaagaaacaacctaccgcactatctcgaaagatggatcgatcacagaaccgcagtctctaccatcgtggcaacgtccaggctccaacaaggccgaccctggagaggctgagctgttcatgtctcttgtcgttccggcctataacgaggaggaccgactgggaggtatgctggaggaagctgtgaactacttggagcgaatgtatggaaccttggcgagcagtcgcagcgaagggaaacccctgcggcaacggaagaccgccaacggacacgcaaacggaattgcgaatagcaacacagagactacaccgcacaggaaaggctgggagatcataatcgtatcggacggatcgacggataacacggaagagatggcgttttccttcgcgcgagaccaccaactctcgttacatccaaagggccacgcaggcccttggacgcctgaacctcgagagggcgtgcacatcccgcccggaacaatccgcgttgtagccctggccaagaacaacggcaagggcggcg

SEQ ID NO: 24487 - DNA, 282 bp, Emericella nidulans
gatccaaatgcccgtctggaagcggaagctctggcagagaagcagaaggccgccaactccccacggcccggacagcctccgaacccgcagcagaagccagaagataaggattcgccggagtacaagaagaagttggccctgcaaacgctccctctcctcgagactactgataactcagtcagttatggtataccagagtcattattttcttcactgaaggacatgttcgagtccatcgtggggagtcagtcacgaattgggataatccggccgcagcatttc

SEQ ID NO: 24488 - DNA, 797 bp, Emericella nidulans
cattacaaaacccggccatgatcgacatgatgattcaacagaaccccctgctacgcgataatcccatggcccgtcaaatgctgcaaagtgaggggtttcgccgtatgatgactgaccctaacacgatgcgtcatatgatgcagatgcaacgagcaatgggaggatttggtggcggtagtgctttccctgccccgggagtcaccaatacaacgcccgaggaaaatagaactgcgcaaaccaacaccaacaacaataatagtaatgctgccaatgccctcccaggaggtcttttcaacccttttatgccccagggccttggcgctggcaacccattcgcagctctttttggagggaaccagggaagccaaggaggaaaccagactgatcagactggcgcggcgcaaccagagtcgggaggagcaagtgaaactggtaccgcatctgagcagaatagaccggctcctggcttcttcaacccattcaatcctggtgcgaatcctttcgaccccgagcaaaatcccctcctccgcaaccctgcgttgctagaacagttgatgcagtcaatgggaagccctgcgggcggtgctgctaacccttttgcatcactgttcggtggccctagctttggtagccctgctccccaggacaacaggcctccagaagagagatacgcggaccagctgcgtcagctcaacgatatgggcttctttgaattcgaacgaaacatcgaagctcttcgccgagcagggggcagcgtacaaggtgcggtggaatacctgctgagccatccgtcttag

SEQ ID NO: 24489 - DNA, 227 bp, Emericella nidulans
atatgtgggctgttggtgccatggcagtggagattgcgacgctcaagccccttttccccggcggtaacgaggttgaccaagtttggcgtgtctgtgagatcatgggcagcccagggaactggtacagcaagtctggtgctaagcttggtggtggtgagtggaaagacggctctcgcgtcgcgcagaagctaggctttacgttcccaaaggtatgcttctttctgctc

SEQ ID NO: 24490 - DNA, 338 bp, Emericella nidulans
ctgggagaaccacgactggcgttagcctccagacattgcacctccagcatttcgatcacggaacaatcctcgcccaaactccctcccccggtttcgagatccccaaccctgattcctgcaccgttcctgagctgttggacgttgttgcccctaaaggtgcggaactcttagtgaagggcatccaagagggcttgttcgtcccaccgcacaagaacgccggctggtacacggctgagcagagggacctgatacatgctaccaagatcaaaccggaagaacaacacatcgactgggcgacttggacctggacaactataatcggcgggaacgggtgctag

SEQ ID NO: 24491 - DNA, 1290 bp, Emericella nidulans
tctccgtctcttctccggatgaatcggcacaccctcgtcgtatcaaatcgaaagcctcgctacgaagtacccggagtatcggcagcagcctccttcacgaagacgacggcgacgacgcccaatccgaaaagtctctcatccgcccgaacattctccgccgtctatcacccggcttagctgcacgcgtgaagttactggacggaagctccaaaacagacacatccccccggaaccccggtgcggttggaaggattcccgaggagcagatcaaggagttggatagtctacacaaggtccagtcgatcgaagttgagagaaagggccgcgcttggagcggaatatcgtttgccaaccaaaactcaaaaacaacaggtacagcgagaaccactaccacaatcaggcgtgcctgaaccaccggtcgcggagtcaacccctgggtcgggtcaggacgccacatccgaccgcctggaaacaaaagaagagaaagtggaaaatacgccaactaccatgtctgttgttgagccagccccggcaccgctgggcccggaaataagtgatcctaacattgaagaccagaccgatggcccaacagattacgagaagtacattcaaaaaactagcgagctcgaagcagaagcaaacggcgcgccacgcccgcccccgaaagactcccctcctatccagtcgagcgcgtcatcgaacactcagtcatactttaatcctcacggtcttcaccggacgtcatcgatatactctagtaccaattcgatattctcattctcacgatcctcgttcagcaatcagatttctcagcttacctccatcgcccttccacagccctcatcgcttgaagctagcatcgcttcgatatcgaacgctccggccgcagttaaagccttgaccggtgccgcggaacagattcagatatggatcagaaaggcatcgaacgtgctgaacggacttgatgcggaggatgacgtggtatgggccgcggccgctggacgggaaggccttgatggtgtggacaaggcgatcacaaagtttgaaagcctagttaatgtctatgttaaagctatcgaagatgtgcagctgcgcgaggacatcgctaatgtcagcactgatggcttagagacgattgttacccaaatggacagcatcctacagagttgggccaacatcaagtcgcggctccgggcagtgaaagagcaggtggaattggcaatggagtgggaggaactatggaatactgtgctacgtgatgtgatccatgaattattgggaaagacctga

SEQ ID NO: 24492 - DNA, 657 bp, Emericella nidulans
ctcgaagataaggagaatgcggaagcaggatcaacggtgtcggttgccactgtccgcaagcgcaagcaacgctgggacgtggctcccacggatgagacgcctgctgctcctacttctgacgatgctaaggctaaaaagtcgcgatgggaccaaacacctgctcctggtggtggcgaagcccccaagcgccgttcacgatgggatcaagcaccagcgattgcggcggcaacacctgttggtaaccaaggacttgcaacacctatgcatccttcccaagtaggtgcgcctatgattccaaccagttttggaactgatatctctggccgcaatgcccctctctccgacgaggagcttgacatgatgctcccgtcggaaggctacaagatcctcgagcctcctcctggatatgctccaatccggacgcctgcaaggaagcttatggcgacaccggcaccgattgccagctccactggcgtaggtggctttatgatgcaggaaccggagagtgcccgttccctcggcaagcagcttcctaccgagattcctggggttggcgatctccaatttttcaagccagaggatatggcatacttcggaaagttgatggatactggagatgaatcaacgatgtcagtggaggaactcaaagaacgaaag

SEQ ID NO: 24493 - DNA, 354 bp, Emericella nidulans
ctggaccgacggcaaaggcaacccggacgccaactccctgccagaatgtcagctcgaccgtatccagcgccttgtcgaaggcgtcacctgggaaggccgctacagaatccccgagagcgactacgaatcagacggggtaggtttctggatggatacactctgcatccccgccaatgacaaagcgcgtaaagacaaggcgatcactacaatgcggcgtgtctactcggaggccaaagcagttctcgtcctcgacgactggctgcaggagatccgctccgacgcgccacccctcgaccttatcacgcgtatattccagtcgaactggatcaagaggctttggactcaccaggaagg

SEQ ID NO: 24494 - DNA, 863 bp, Emericella nidulans
cccccccagctcaaacggcggggttctactgctaactacgacatgggggacgggtctgattatcccagtcccagaagcgaaggtgctacgggtccgactgctgttcttgtcgccgcgcaagatcctctagctggtgttccgaagatgaccgatcaattgtccccaagtttcatggaaggggctcgtccaaaactgtcggtgagacgagcgcgcgatccgcccaagaacgccgttggacagattttttgtgaccatgcagaatgtcaaccaaacccgccgacatttcgtcgtccttgcgagtggaagtaagtgcgcctttcgcttgagttgttagtggtgtggcgaggatgaggctaacacgcttttccttacagcaaacacatggacaaacacgaccgcccttacaaatgtctagagcctggatgtgataagatacaggggttcacatattccggtggcctgttgagacatcagcgcgaggttcataagaagaacgtcaatgccaagaagcctctcatgtgcccttaccctgactgcaatcgaagcacggggaacggattcacgcgtcaggagaacttgaaggagcatctccgccggcgccacatgcatacggagaatggacacgcgccagatctgacgatggtgccatcttctgatttagatggcgccacctccatacagaccgtgaagcgaaagcgagaatcgctcgacgtcgatccaaacacagaccccgtcatcgtatttccggaagatgaagagaatggtgtggacatgcgcggtgaactcaaacgactgcggcgggaagttcaagagaaggaccgtcgattacaggaagctgagcgcatcgtaaccggtttgaacat

SEQ ID NO: 24495 - DNA, 1095 bp, Emericella nidulans
cgccgcctcacctttacagatcgaacatcagagcctcctagccaggggctgggactcggcatcacgaagagcccgagcaagaagccatctgccgctaccaacctctctcaggagtcgacacagtctactggaggtgtcccacaaagcacgccgataccaacgagcagcgcacccaccgtcagaaggggatctgtctcgcgaaacgtctcaacaccgacagatctccatacaccggttgataaggcgaagaacctacattcagcactacgaaaggactccctcacaagctccgcccgccgctctgtttctttcgctgaaagcgatgattttcttgtcgcggattcgcaacccgcaccaacatccacccctatcataaccacaaagccctctaccagcacaccggcgtctcagactcctagctcggagaagagacgctctagcgtctcaatggtctttcctcctggagtttctatggaacgcattgctcaatatgaacgggaagccgaggagaaagtcgagcgtcagaagaaggaaagagcggtttttgaagaaaagatcaaggccgctgagaaggacaatgcaaactcggagtacttaaagaaacttaaggccgcgtttaatacctggcagtctcttgtcagcagccgtagcagccaaaggaagggcatcgcagagcgactcgagagactacaagccgagctgaagaagatggaagaatcttcaaccaatgtgtcatctcagggtaaaggaaagaaatctcaggagtcgaagcctgccagatctcagcaggcctcaaagaatgatactccagcgtcaaagacattgacttcgacgcccgtcaccaacggggacagtaaaatgtcagtaacacatagctccggttggaacgcgattaacaataaatctccttcaagcgatcagaagtccgttacccagaccattaacggaaccaatcccaagtctgctactagggctgcgcccaaggaacccgtcgcgcgcaccgaggcaaccagaacgctgtcaaaagcatctcagcctccttcgacacaatcacgaaactccaccgcctcagaagagctcgacttgcctgcatga

SEQ ID NO: 24496 - DNA, 597 bp, Emericella nidulans
  unsure (1)..(597): unsure at all n locations
ccaaccgcagcatcaccggctatccttgagttaaacaaagatctgattgcgtttgatacgaatatttcaacgtatctgggatccgctcagcgccacttcatcacatccggcctcgctcggtttgttgacagggtcttcgtcgccagcacccgctacatctgggctatgaatgagaacggcgcgttacgactccaacttgacgtccttgtcttgcagcanaatctcaagaacgtcatcatcgatcccactcagataccgccaccagatcaggctagaacgcctcaagcagaactatatcgtgaggttgttacccttcctcggagcgccaaattcctggactggttcctcgaaggggcagaaaaggcgctcgattacgccaaagaagaaaaggagcgtatggctgcgcatggcgatcaggctcttgcagacggcgacccttttagttatgaagaactcaaggtcctggttgatttatgtttctcggagaatctcagagggcccaggagcgaggataaccgggaagattttatggcgtcgaagaaggcgagtgcagatgcactcttgaggctgaacgaaatcatgtgggattccaagtaa

SEQ ID NO: 24497 - DNA, 395 bp, Emericella nidulans
cagccaccaggtacaaccgcgattcctacaaagcctggcactcatgggccctggccaactttgaggtcgtgacgacaattgccagccaggcaagtaaggacggcggaaatctggcattggttccagggcatatcgtaacagaacatgtgattcctgcgattcgcggcttttttaggtccattgccctctcttcgacgtcgtctcttcaggatactcttcggttgctcactctctggttcaaccatggtggtgaccaggaggtgaactcggtcgttacagagggtttcacggctgttaatatcgacacgtggctcgccgtcactcctcagcttattgcccgcatcaatcagcccaacttcagggttcgcagcgccgttcatcgcttgcttgctgaa

SEQ ID NO: 24498 - DNA, 1023 bp, Emericella nidulans
atggaagacctcctctcgcgccaccgcaaagaacaaaaagatttacaagcccgcattacccagaagaaaaagtccgcaaccaagaaaacccgccgaggagttaacgatgaatgcgagcggctccaacgagaactctccgagcgccatcaggcagagattgcggaattgaccggcgagacaatacaacatcaaagcgaacctcccgttgacgacttggagaatttaagtttaaatggcgacagtgcgacgaatggagataccaaggacttggggagcacacctaatggcactgcgggagagtcaacgacaccaaattctgcttcagcatcagcatcaatttcatcagggtcatcgtcgccgagcgcaacgagcacaaccactcgtaccaaaaagcccaaccgacaaaaagcgcgcttggccagacgcgccgcagaacaaactgcggccgcagccgcagcctcagaggaagcctctcagctaacgaaccatcgcgggaccgaacaagaggcgatggacgcggccttcaagaaactcaacgtgaaagaaatcgaaataaacccagatggccactgcctcttttccgcagtcgcaactcaactagacgaactgggcctaggactgcgccctgatccctcacgcattgtcataggacccacaactcagacgcggatcgatacagtcgcaagtcccaaacacgacgggtatagggccgtgcgcgcggtgacggcggattttattgctgaacacaaagatgaattcgaaccgttcatggaggagcccctggagtcttacacgcggaagattaagctcacagcggaatggggcgggcagttggagctgcaagctattgcgcgggcttatggggtggatatcaatgtcgtgcagggcgatgggaggattgagaaaattgaggctggggatgttgaagaggaggagcgggcgaaacgggttatctggttggcttattataggcatacgtatggacttggggagcattataatgctttgacggcgaaggcttaa

SEQ ID NO: 24499 - DNA, 945 bp, Emericella nidulans
atgctccctacgccgccgaactcgatctcccctacccttcctcctcacggcttccgggcgcgtgatgccggctctcttctgtcgccccctcttgcgacatcacacgttgactcggatatcgacctcggcgacgctgccgaccacgcgaacccgcatcagcgcgatgcgactgccaccagccttgaggttgccggggcgatcacaccggctatgctggccaagtaccatctccctgagatcttgctccagcacggccccctggcaatccgccatgtgatgggctacctgacgacctcggttcctggcttctcggggatcccccccgcaaaagccaggcgattggtcgtcgccgcgcttgagggtcgaggaagcgacgataagagcgacgtcgtctatgaaaaggtcggatggggtcgttgggatgctcggcgccgcggcgaaccgtcgcgcgattcatcccgtcatgaaatgtcgccaccttccagtctgtcggatactttccagcgaggggtgcagattccgaggcgggatagcctgcacccgtatagctccagcgtgggcggctccgctgtcttctcgtatactgaaatggagtttggtgggcgcgaagacatgctggagcatgaggcagataagatgtctctggacggaatcgaccgcgactactgctcttcttcacctgctccagacgacgagattccggacggagactggggcgaggaagatatcacggacgaagaggactgggcgcagataggcgccgctgagctgcgcgcgcggtctatgaacggtgggggtggatttgtgaacggcagacatacgccgcagttccccggtggaggaccggtttacctgaatcttgcaaagtctagaccgacgcgcttacttctattctacagcttggatatctcggtgcccgacagccagctagcgagctttaggtag

SEQ ID NO: 24500 - DNA, 1138 bp, Emericella nidulans
  unsure (1)..(1138): unsure at all n locations
atgcgccatttcgatgcgtggatcctccgcgatctttactctatcttccattactactcaacgggccaccgctggaaagaaacaatccgggacctgattcaagcccgccagatttgcgcaccgctctcactcaataatgcctcctctacaccgtcttctcccgtcgaccctttctccaaaacccatccaatggacccccaaacagcaagcgccttcatcacgaaactgccccttgaaatccggctcatgatctacgagtacgcctttggcgaccaggttgtccatcttgtccaggtgaaggataagattcggcatgtacgctgcaggaataccacctccagtttggataagaatcgcncgctgttgccccgttacgccggcgagatggcgcacgaacggtcttgctgcttctgcttctttttcttcttctgcagcgtctgcctcatcagcagataatgctagcagcaatatgctctatccacatacccacccgtcgttgccatcaaatctaagcaactcgtccacggccctcctccgtacttgtcggtccatctacgccgaagcatcatcaattctctacaagaactcgaccttcgacgtggacgacctgacgacattcatcgctttcagtctgtccatctcgtccgagcatctcgcgacgatcaagaagttgacgatccaatggacgccagtctggcagcccatggcaggcgaggaacataagagctcgatctactcgcacacacataatgaccgactctggactttgttctggaatcgagttgcagctttagccggattagaggagttggctcttagtgttgatctcgggtcgtttgcggctgccaatgctggtgcgaacactggcccaggcaatggaattggaaatggcggaggagggctgattggagggagcaggcttcgtctctccatcgccgagccctgggtggcgcccttgctgtgcgtcaggggcctggcgtccttcgagctaggaatcacagcgaaatgcgatgccgctgcgaagcactttctcgagggcagtttggttcgcgatgccgtgacactaagggagcatttgcgcgcggttatgtgttcgccacgggaggcagagttgcctcttttacctggggtagaggtg

SEQ ID NO: 24501 - DNA, 744 bp, Emericella nidulans
gtaggcgaagggggtaaattgcttgagaccactaacttccgtccgctgtgttactggggagtgttttcctggttcgtctccatctctcgtcctccaggtctccttctccctaaagggcccaaaacaacacctggttccccgtactaacaggccgctctcagctctccttctccttgctctccttcgctcggccgctcattgaactttctacatcatggcgtcgtttttggaaaacgcgtacagcttggtccacatggacaatgctgctgatcagccctcccagcaggagctgaagttgcagttggaaaagggtaccgatgagaccaagttggacactatgaggaggattatcacaatcatgctcaatggagacccgatgccacagttgctaatgcatattattcgcttcgtcatgccgtccaagagcaaacctcttaagaaactactatacttctactacgagatttgcccgaaacacgactcaaatggcaagctgaagcaggaaatgatcctggtgtggtaaggactgatatggccgctatttatctcttgtccatttctctgattggtcacttttcctacagcaatggcattcgtaacgatcttcagcatcccaacgaatacgtgcggggcaacaccctgcgattcctctgcaagctccgagaaccagaactcattgaacctctcctttcttccgcacgttcatgcttggaccaccgacacgcgtatgtcagaaagagcgcc

SEQ ID NO: 24502 - DNA, 793 bp, Emericella nidulans
acagtgcggcatacttggcccgagccacatgaacccttcaaacaccaacatccgcgccttcaatctcgccgttcaaacccttctaagcacaccatcccagttactgccgcacctaacagtcccaacaatcacccagctccccgagtcaataggtccgctccttgaaacccattacggccgaaaagcaggtcagcaacccgaaaaagggcgagaaataacaatacgcgccctgattcttgataaagacaacacgctctgtcccgcgaagacaacgactttcccatcgaagatctacgcgcacctccatacgctccgcaactcacctacatctccatttaacatttccactgccccaaactccatcctcatcgtttcgaaccgtgcgggatcgcatccgcgttacgaatccgaggctctcgagattgaagagcgtctggcagaactcaaaattccagtgttccggttaccgtcatcaccgaaggagggcgtgaatgttgagaaaaagccgttctgtggaaatgaggtgctagagtggttccgggagcgaggagtagtgcagcgagccgacgagattgctgttgtgggagatcggttggggacggatgtgctcatggctaaggagatgggggcatggagtgtttggtgtcgggacggagtcggggaggaggtgacaaagggaaagaggaatgtgcttgaaaaaatggaagtctgggtagagcgatatttgagggagtccaaagggttgaaggctccggcgccaagggggttcgagtcgagagatgactgcaattag

SEQ ID NO: 24503 - DNA, 856 bp, Emericella nidulans
ctcctctggaggcttccaccaggaatatatcgcctctttgcgctaccgaaatgacctccctcctcccgatatgcccccgaagttcctcgacatcccccacgagggccttgagagattcctcactcccggttttgcttctaatctaggacgacgcgaagagctaaacattgatgttgatgccgaaggtggtatgccaattgacctagtcggtatcccggggttgcacctaggcgacgagagtggtacgtgaacaacgccaggcatttgcgcgaaactctgcggactgacctgttttctgcttcagcaatcatgctaccagagaacccagacccggttgacccggctgacctgccgctactcttgactctcgatcaattgaaaaatccggcgcccaagaacgccaacgtcagttttctgcgtcggacacaatatatctccgccggcattcgcgcccccgatggtccgaaggttaatacgcccatccgtcccaagcgccttgacaaaaagtcccaggatgaccctacatatatcaagaaatatatcatgaaaggatttgatattgcataccctgatagcaaacacgtgggcgaagatacctccagccgtataaaaggtcacgttccaacgaagctcgagatggacgcatgggcccaacccgtccatccagataatccaaagctgaagcccattggattcttcccgcttgttccagatttacaaggatttcccgaccctggaggtttcgtgcagttcaaattcgacaaggcgcctgttcagaactctggcggcaagcgggacgagcgtatggatgttgcagttctgctcccctctgagccagaggacgcgttgcgcagga

SEQ ID NO: 24504 - DNA, 972 bp, Emericella nidulans
agtctattatcagcaaattctccgccctatggattcatgggctatgatccaccgcgctgctaccggctgtctctcgatcttaacaaagtgagtactctgctgatgtcttcttcttacgctaacagcccagccacgacgttaacttcgacgagtgggaaggtgatatgaaatcgcgcgtcttctggaactgcctcatgaacgaaacgatccttgtacaggaactccacctccctcctagcggtctctcccgcttcgaagaagttgtaccaatacccaaattcatcggttttgaaaccctaggctttgtccctgcgcgtttctccccagccgacgagatcgacgattcattcttccagtatcacttcctagcacaggttgcccaccgcatcatccttactcgcatccgacactccctctacttctactccgactccggaacattccctaaacccgccgtcaacgccgaactccaccaccaactcgagcaatggcgcctaaacctcccatctggtctgcagttctccgatatacccccaacagcaaccgcggcaaccgcagcaacaccagcattaaataccacctcaccacaaacaactaccgcctcgccgaacccaaatccgatctctccgcatcccctctcctcaactaccaacacgaccacgaccacccgccccctcacccccgctgtagccgtcgctgaagccatgctccggggccgctacatgattgccaagttccacatcggccgtccatatttatacaaggcgctccgcatcccgtctctcttaacagaagacgacctcgaacagatccgccgaggactacaaaacgccatggattggccgattattcatggcatcttccgcgacatgaagagctgcatacctataaaattcgccttctgctcgcagttcttcggccaaatactccttttctactgtattgcgcagtcccctgatcctcgcgttcgag

SEQ ID NO: 24505 - DNA, 1384 bp, Emericella nidulans
atgttttcgcgctccattcagcgatacctggtttcttcaactcgagcgcgcccatggctcccaccgaggcggcccggtagggtgtgcgcgatgttttctggccagaatttcacacagagcgcaatccctggagctcctgatcctcaggatcagccgaaccaagacgacggtaaaggcaaagacaatgaccaggagcctaatctcaaatcgaccatcctgaaaatgctggagtcagcggcaacgactttcgcgtcaattgctgtcttagggtatatccatcctagaattgagcttgtattggctgttgactaaccagtaatagcattgctgggtactcataccataaatattacaagtatctcattcttcaaaagatggagaacgcttttgaaccaggtgaccctgcgcttgaggttgccggcgtgggtgcgaagcagtataaccatgaggagcactggttggttcgagacgagcaacacaagatcgaccagatcatctccggtgggatcccgggccattacttcctgctcatcggtgagaaaggtactgggaagacttctatgcttctggaggccatgcgcaaaatcaatggagacgggtgcgcaattttcgatgctcatggtgatcaggagattttccggatccggcttgggaaagcgctagacttcgagtttcatgaagagtacgcaggatattttcttgaattgcacgtgaggatctgtactgacgcacctccgcagttacatcggtagcctcttcagcattaaaggaccgagggataccaccgccctcttggatattgagcgtgcattcaacaagttggagaaagtcgcaatgaaaaggaggtctaatgggaaagctccgcttgtactgatcatcaacagcacacacatggtcagggacgaccccgatggccaagaccttcttgagatgatccagcaaagggccgagcagtgggcagccagtaaccttgttacaacaggtttgtatacatgtgaatatccaaatttgaagtagatccgggctgactgcagcatgaatagttttcaacagtgatgactactgggtttatgaaagactaaagcgttacgcaaccaggatggaaaccatcccagtggtggacctccccaaagaaaaagcaatggcagcgttgagaaaataccgcaaagactacttcaacgagcacctatctgatgaagtcctcaaagcagtctacgacaaggttggaggccgcctatcgtacctcagcagggttgcaaaggccccggatttcatgaagctatgcaacgatatctgcgaagctgagaagacttggttcctcaacaaatgctggatccttggagaggagatggatgacgatgtcatggaccagcaaaagtatctt

SEQ ID NO: 24506 - DNA, 778 bp, Emericella nidulans
gcacaatgggcggtaaaaatgagaaagtcaattgagggataccttcaggaaggtgctggcggaaagttctactatcggatggtagatactgttctgtcacgggacaagaactgggttcgctggaaggctgaaggttgccctccgattgagaagcctgcggtctctgttgatgagtatcttggggctcgtgataaagcaatcaagacatatgccaacaagcgccttcgtgcttctcctatgaactcacttaatcttaagttcctgtcagagagcgagtcatcatctggatttgacaggctcaaagagcccgaaaggtgggcatttcctaggtggttaagaagttgtctgacatgagtctaggttcaatgttcctacttcagaatccctgatgcgagtgatagaggacgtcgaattcgacattgatacggcgcaaaccagtgaggataaagaagcggcagtccaagcaaaagctagtaaaacctggctgttgttgcggctttcagccaagagcaagctcgcagcctttgacaagattgaagatggaaagaatctaaagacccttttcgagaccccacaaagcgctgaaagtacaacccaagccgccggaagcacaccgcaagagcctccgacaaagacttctcaggagaccgaagcaattaataatgggccctcacaggatgagaaaatggagaccgaaacaggaagttctgccgctgttgctgaggcgaacaaagtcgaagggagcgatgcagcgactattgatgcgccggggtcatga

SEQ ID NO: 24507 - DNA, 814 bp, Emericella nidulans
cggaccagttaagcgcgcccaccgctacttctaccggatagccttcaagcaagagatgccagtgttgttgttccgagttgacattctcaacctcttttaccgcataatcaaaggacctggtggaatggattccagcaaaccaatatacaaggaatgggaggaattggttagacagcttattcgacggctgataaagaagctggagcagcgacctgctctgattacggagttgctgttcagcaaaatcaactccaccgcattctatcttgaatacggttttgagaagcagacagtaaccacgagtaaaagggcccctgctgaacttgaggttgaccccaaggcagcttcgactccggaggagaagctcagcattgtcgtagctgcattggtcaaggacgaacaaagtgcactagtcaagtggattagtgaagttctggggtcggcagcagacgagagagaggcctgggaactaaattctcatgatgttgacctcgcgggacctagagatacccaaaaccctataatcagtaggtgctcctaatattatggacgctatgtttactaacacggcacagccgtaaaatcgcaagataattcgttcaaaagggccatgtttcaaaatgcgaaacttcgacttctcatgactctgctgaaattcgaccgcctgggacaggaaaatgtggaaggtatttcctggattatcccgtctgaactcaaatcagatgaactacgggaatctaaagcggtgattgataaagcgctgttgattggcaacaccgacgaacgtgatcctaatgacttactgcgcaagaag

SEQ ID NO: 24508 - DNA, 1814 bp, Emericella nidulans
atggcctacttccgcctctacgccgtgttgcttgccgtggcgtcctcggtcgccgccgtcaaggtcaatcctctaccagctccacgccacatttcctggggtcattcaggcccaaaaccgctatcggatgtcagtttgcgcactgaacgagatactgacgatagtatccttacgaatgcgtggaatcgcgcttgggaaactattgtttctctagaatgggtccctgccggaattgaagcacccattccagaattcgatgagttcccaacttcaaccccatctgccagtgccgctgctactagaagcaagcgcgccaatgtgcctattcagttcgtcgatgttgatgtggaagattgggacgccgatctacagcacggggtggacgaatcttacactctagacgccaaggctggttcggacgcgattgatatcactgcgaagacggtctggggcgcccttcacgctttcactacgctccaacaattggtcatctcagacggaaacgggggtctgattcttgagcagcccgtccacatcaaagatgcgcctctctacccatatcgcggacttatggttgatactgggaggaacttcatctctgtccgcaagctacacgagcagctcgatggcatggcactgtcgaagctcaatgtccttcactggcatctggacgatacccaatcatggccggtgcacattgatgcttacccggagatgaccaaggacgcatactccgcgcgcgagacttactcccatgatgacctgcgcaatgttgtggcgtacgcgcgcgcccgtggaatccgtgtgatcccggaaattgatatgcccgcccactctgcctctggttgtgcaacaggtctgaccccgatattgtagcctgcgccaattcctggtggtccaacgacaactggccgttgcatactgcagtccagccgaacccaggacagctcgatatcatcaatcccaagacgtacgaagtcgttcaagacgtgtacgaagagctatcaagcatcttcaccgatgactggttccatgttggtggcgacgagattcagcccaactgctacaacttcagcacctacgtgactgaatggttccaagaggacccctcgcgcacttacaacgacctcatgcagcactgggtcgacaaggccgtgcctatcttccgcagcgtcagcgactcccgccgcctagttatgtgggaagacgtcgtcctcaataccgagcatgctgacgacgtcccgacagacatcgtcatgcaaagctggaacaacggcctcgaaaacatcaacaagctcaccgaacgcggctatgatgtgatcgtctcctccgcggacttcatgtacctcgactgcgaccgcgaaggttccgtcaccaacgacgacagatacaacgagcagaccaacccagaccctgacaccccgagtttcaactatggcggcattgacggctcctggtgcggcccgtacaagacatggcaacgcatctacaactacgattttaccctcaacctcacaaatgcccaagcaaagcacgtcatcggcgcaacagcaccgctctggtccgagcaggttgacgatgtcaacatctccaacctgttttggcctcgggctgcagctctcgctgaactcgtgtggtcaggcaaccgcgatgcaaaggggaacaaacgcaccactctcttcacccaacgaatcctcaacttccgcgagtatcttcttgccaacggcgttatggctgctactgtcgttccgaagtattgcctgcagcacccgcatgcttgtgatttaaattatgaccagacagtccttcactag

SEQ ID NO: 24509 - DNA, 366 bp, Emericella nidulans
ccccccgtttcctcaacgcttcccagcgattcctaccagcttttatcgaccgccgacaaagctggagatgcagaggatgctctttacgaacaacagatcaaagatgttgaagcgtggtggaattccccccgctttgagggcatcaagcggccctactcggctgccgatgtcgttagcaagcggggatcgttgcagcagacgtacccgagctcgttgatggcgcggaagctgtttaatctgttgaacgagagagcggcagagaataagccagttcatacgagtatgctgctgtgcttgtgaaccgtttggaagatatgctaatgcgtacatagtgggcgccattgacccgtacagatgaccagcagg

SEQ ID NO: 24510 - DNA, 879 bp, Emericella nidulans
atcaggaaggcgtatagaaagaaagctcttgaactacatcctgacagaaattttggaaacgttgaagcggcgacaaaccttttcgcggaaatccaaatcgcctacgaggtgctttcagacccccacgagcggtcgtggtatgactcgcaccgtgatgcgtttctaggtggtgacgctgggggcgaggcggctgactactcgcataacgcccgcatgacgagctctgccgatattctgaatttgttttccaagttcagtcctcgaatggactttactgatgcgccctgtggattttatggtggcctccgcgagacgttcgcacagcttgcgcaggaggaggagatggcatgccgctgggaaggtgtagacagtattgactatccatcgtttgggacccgtcatgacgggtctcaagttgtgcgcgatttttacgctgtatggggcagcttctcaactagaaagtcctttgcatggaaggacgtctatcgttactccgaggctccagaccgccgagtccgtcgtttgatggaaaaagaaaacaaacgcttgcgagaagccgctattcgcgagtttaatgaggccgtgagatcccttgtggctttcgccaagaagcgagacccgcgctacaagatttataaggatagcctgtctcaaaaacgcgaagctctccgccaatctgctgcttctcaggcagcaaaatcacgagcagcaaatcaggctacgttacgagagcatgttctacaagattgggcaagatccgaggaaggtcctgaagaagaggaggcagatagtgaagaagttgagacggagcatattgagtgcattgtgtgccgcaaaactttcaaaagtcacaaacagtttcatgctctcgagacgtag

SEQ ID NO: 24511 - DNA, 372 bp, Emericella nidulans
gacctgtcgttcgagtgacacctacactgctccttgtcagcgatcccaccaaactccctgagatctaccatcgcaatgccgacaagactggtcactacataaccggctccttcggcgagaccgagtcgctcttcaatatgaggtcgcacaagacccatgccgcgttccgcaagcacgccgctggaccggtaagatcgatgcaacaagggtcccacaggaaagtaaatgcatgctgagattaagcagtacagtttctcgagcgtgaagcggatggagccgctcatcgatgcccgcattcgtgactggtccaacaaactcaatgagaagtacgtccagacggatgaggcgttcgacttctcatggtgggctgtg

SEQ ID NO: 24512 - DNA, 936 bp, Emericella nidulans
ctgactcttggttagttagcgaaagcatcaactttggccttggttagcatggcagtcattgttattgccgtggtcactcagggctttcgagttccacaagactcgcgcggtgacgtgaaaaacctactcttgttgaataccggcttttttcaagccgtgggggttatttcctttggtatgtccagttgccacccctgcatatttcaaaacctggtactaattatgcttagcatttgtttgccgtacgtggtagtccccggatagcactcagacaactgacttttcaacaagaccacaatagcctcttgatctatggttcactgaaaaagccaacgttggatcggtttgccaaggtcactcactactcgaccgggatatcgctcttaatgtgcctactcatgggtgtctctggcttcctattcttcgggtccgagacacaaggcaacgtgcttaataatttcccgtccgataatattctgataaatatcgcgcgactgtaagagcaagatctacctaaaaataagcccaatattagtgagctgacactcgcatagttgctttggcctcaacatgctcactacgttaccgcttgaagccttcgtgtgtcgtgaggtcatgacgacttactatttccctgacgagcctttcaacatgaatcggcacttaatcttcacatctgccctggtactaacatccgtagcaatggcactgctaacgtgcgacctgggcgccgtgttcgaactgattggggcgacaagcgcagcctcgttggcctatatctttcctccgctgtgctatatcaagctgagtaatggctcgcaaaaagcgaaaatccccgcgtacgcgtgcatcgtcttcggagtcaccgtcatgggcgtcagccttctacaggcagttgggaagatgataaagagtaggtgtccctcctatccataa

SEQ ID NO: 24513 - DNA, 600 bp, Emericella nidulans
atggattccgcgcgtaaacatctggcaccggtgatccagctcctgcaatggctccagtgcttctcatcactaggcgaggacttcgagtctctcgtcaacacactcctccagctacaagacctgacgccagcccagatgcttcatgcggtcaagcactaccggcctgaagtaggagaaaagggccttccgaagtccgccatgaaattcttggtagagctccaacgcgaccccgaactgatatttagggagcagttgaggcttgtccaaataaaagcagattccctggccccaacgtcagcgccaaccgaggaagggcgcccgcaaactccacgccaggaccacgccccttcaacgtccaattcgcccaattctagcgttgcctctccacgaccggggccaagctcacgggtagatgaccgcaacggcgctaccaccgtgttcttagatcctgcattgactcttccgttttcgctgccgactagcacggacatgctcatcagctacggggccggttggggcggaaaccacaaagagcgggcgcgccagtacattccaacggtactgcctgaggtactggagcgctttgaccgtgacgtttga

SEQ ID NO: 24514 - DNA, 1504 bp, Emericella nidulans
ctgcggggtgcgctctggtccgccgcctcgactgcagacatgccctggcggcctctgcctcgaatcgcttttgccgttgccatctaccccttccagccctctactccggccgacctaccgttagaactcggtgatgagctgtatataatagaacaaggcgggaacaatggtgaatggtgtcgcggctacttggttgctccgccgtctttgctggcgggtttaacgagcaccaaaggccagacccttgaggcgcgagtattttcgggtatcttcccccgcaattgcgtggagatccgcgaagtcctgggtgatagcgaaggaaataagaccttgacaaatggggactgctcaattgacgacagggcggaagatgcggaggtggatgtgcggagcagtttagcttcttctcaatacgacgaacaagtttcgggcgagatatctgaagtattggtcgcgcgaaaagagaagccttcacagattttcatccagaagacagacgatgatgaccagtcgactccacgaggggcgcgggccagtccctggggaatgcttccacttacgccggtcaatgtagccccgcgggatcctgatgcacccaagccacgtgcgccagtgcctatgctcaaaataggcgacgaaactcccacctcactttccgagccgttggtcgacgagatcgcatcatgtttgcgtgagtggcattcgactaagctacatgagctgcttctgtcgcagcaatatcaggttgtggaagaaatgtcgactatcgtccaggagcttgattatgccagacgacagctcctatacaacgtgctaacttcaaaagagaaggaggtgctcaggcaagaggttgtttggaaacttgttcggggtaacaagctacttggtggggaagtgattgtgcgggatcctgaacaacgaggtcgactgttgacaggcgaggattctgccgtacatttagcaaagctccagtccgaaatgagcatgctcgagagcagtcccacgcctgcgtcggacaccgcagctcttcatcatttgctcgtggaagtcaatgctgtatcaggaaatgcccctgggccagtagttctcgccgtcagtctgtgcacggtatcggacaccggccctctaaaagcattgtccgagacgtatgttctggatattccttccccagaacaattcgcaagttcagggcagagcaataagctaaagactctcttcactgaattggcggctacggatattggggatggatcagcaagcgggcctaagctctatcttttagtgagcgttcgagcaccggaggttgcttccgcaagcactccagttcagactgcaccttcagcttctcgcgaaggaacaacctcgccaaagcctcctaccgccagcaattccgtcaaggggccaggtctgaaaccccgccgcagcattatgtggtcgtccaaacgtggcattcagagctcagaccaaccaaaggagaccgccaaacctccgcagtcctcaggga

SEQ ID NO: 24515 - DNA, 298 bp, Emericella nidulans
gtttctcgggccaccacctgtctactacaacgccttcgaatccgcctgccgtaagggttgtcttgcgaccgtacagtccaccctatcctctgaaacctgcacatctactcctgcttttctccatcatggtctttgccttgctttgaaagcaggcaaccctgacgttgcgcgctatcttttggcttccggtgctcctattattcggagaacgccggaacatgttctctcctccccgttagaagcgcagatcccactctttgagcttctcttcgagcatgggtgggcaacgaacactcct

SEQ ID NO: 24516 - DNA, 945 bp, Emericella nidulans
tcaatgtttgacgctagtcccgacgataactttctatctgaccttgccgcatccaagggcgcgaagacgaacaaccccttccagattttcaatggtgaagagtccgaagccgacaagaacattactagggcactactcttgggcgacttcgagaaagcgcttgaccacgctctcaaagaggaccgaatgtccgatgcgttcatgattgctattgttggtgggcagaagtgcatcgaaaaagcgcaggagcactacttctccaagcagacggagagccccaactacgtacgcttactggcttccgtcgtcggcaagaacctttgggatgttgtatacaatgctgatctgtccaactggaaggagatcatggttgctctctgcacattcgctgacgaaaaggacttcgccggtctctgcgacgccctcggtgaccgtctcgaggaacacattcgaaacactggcgacaaagcatttcgcaaagacgcctcgctctgctaccttgccggctcaaaattggagaaggtggtctcgatctggattgaggaacagcgcgagaatgagcaggcggccatcgaaacggctgctgaagattccagtttctctattcacgttcgcgctcttcagtcattgatcgagaaagtgacaatcttccgtcaagtcacgaagttcgaggactctgaacgtaccaaggattgcgactggaagctcagcgtgctctacgacaagtacattgagtatgctgatgttgttgcgactcacggacgtctacaggttgctcagaagtacctcgatcttgttcccgagaaacaccctgaggcggagattgcgagaaaccgtatcaagctagcgatgaggcagccaactaccagagctcaacccgcgacctctactgccagggtcgtttcgaacaagcctcttccccagccagctgcatatcaaccccct

SEQ ID NO: 24517 - DNA, 986 bp, Emericella nidulans
taccccaaggcaatgatgtggtctattgtgctctgcaccacaatcgtaatggcagcatacgacaccgcactaatcgccagtttctttacattcccggccttcagggcaaaatatggagcgcctgtcccgtcaaaacccggtacgcatgagatctcgtccacgtggcaggccagcctgacagccggggctgtggtcggcgagattctcggcctgctcgtcaacgggtacctggccgattactttggctaccgtcgcacaatccttggcgccttggctgtgctctctgtctttatattcctcgagttcttcgctgtgagtacgcgaatgttgctggcggcgcaggtcctctgcggtaaacatgagacgcttcgctgttgtcaatggaacgtttgttctgaccatcatcaggaatcccctggggcatcttccagactctgtccacgacatatgctgccgatgtcatcccggtcgcgctccgggcgtactttctgagcagtgtcaacatgtgctggctactcggccagctttcagccgtaggcgtcgctcggcttctggtaaccagcaaatctgaatgggcatatcgcgggccgtttgccattcagtgggtgctggctgtcctcgtttttattggtgtctattttgctcccgaatcaccatgtacaaccaccccccctcccttcctagccgcaactccagcgttttcagggccgagctgattctaaaacagggtggttgatccgcaaagaacggcctcacgaagccagaaaagtgttgcttcaactaacggagtcacggcacggcggcgtcaatgtggacggcacagtctccatgatgcagcatacaaacgaggccgagaaattcctgggcacgagccgaatggcctacctcgactgctttcgaggcatcgacctccgacgcacggaaatcacatgcatgatctggatcacgcaacaggcgtccttctccacgtccgcaacgtatgcggc

SEQ ID NO: 24518 - DNA, 299 bp, Emericella nidulans
cgagtttcgccagcatcgcgaccggtgcctgtcttcgatgttttaccgtcagccttgttcatgccacgattggcccggaaagtcctgcggccttgcgcggcaagcggggattgggcccaaatgatttgatagtcaccactagcgatctatatcagcctatgctcgaagtgccagacaagaacctgagctcggacgaggagaatggggatcaccgtgaagtagtagcgacaatctgccagccttgtaaggaggacgctttggctaaagggaagcagaaatctgcctgaactctgggaccg

SEQ ID NO: 24519 - DNA, 327 bp, Emericella nidulans
aacgaccaatcttgtatcggcccaaacagtctgactcgtcaattggtttctctgccatgcgtggaaactcttgtcaacgcgatgttacaaggcggcaacactttgacagtcggtgttggaattgtaattgaagttatccggaagaacaactctgattatgacccggagcacctgaatggacctgattctattcctaccatgtacgatcctatctatctcggcacactacttcgtgttttcgccaaacatatacccgactttgtggcgttgattagcagctcaaagcatacggttgttgatggagggaagatgaagagcgtggaacgt

SEQ ID NO: 24520 - DNA, 475 bp, Emericella nidulans
cattgcgcatatctggcggcatatctatacagacaattagtgctcttacgtcattctaacaacgccccagtctgcaggatctacactggctcgcagaagcccggcttcggaaacgtctcactgcaagggcctaccgttgccctatctgtcctcgacccatcaggaacgatccatggctatgcagaagtcgaaagacacgcagacaaggaccggatatacctccgcagcgggacgatatgcaatccagggggcatggcgcacctcggctggctgaggatggacgatatgagagccgcctgggacgccggacaccgatgctctcatcctattcaggaggtggacgggaaaccgaccggaatcgtaagggtgagcctgggggcaatgagcacaatagctgatattgagggttttgtcgcttggttaaagaggaactacgtggatcgatacattggcctcccctactcggagaagtcaa

SEQ ID NO: 24521 - DNA, 333 bp, Emericella nidulans
atcatgtcggctgcttcgctggagccaccgacctacctcagctccctccaaaacaacatccgagctcgccctatcccgtgggagggagctgttcgagctggaaacatcacagacgatcacttgaagaagattaaggctgtagacaaggtccgcaaggaacaacggcgtcagacaatcgatggggatatcccgggatacgtgaccttgctggcgggaggttcaagcgggaagagtgtcctcgaatcggccgcaaggagaagcgatattgtacagtatattcttgtcctggcagcagatcttataaacggtatgccactgccaacgcctgactga

SEQ ID NO: 24522 - DNA, 327 bp, Emericella nidulans
atggaaaaggtcagtcacacagaccgccctaaccgtcagggatgggaggaaatggctagtgtctggaaggctcgcgccgaatgggttgacgaatctctcctagagagcgaacatttgacgagcaataatacaggaggcgaagcctcaacgccaacgcagtcgacaataatcaaagaaaggcaggagaaattggtggttggttggggaggcactgtctgggtaattaatgtctaccctgatcggcctaacaagagcaaccgggaccttaggattggctctgtggaagttgctactatgtgggtttctttgctctcttgcaccatctaa

SEQ ID NO: 24523 - DNA, 228 bp, Emericella nidulans
atggtcaagacctccgttctcaacgatgcgctcaacgccatcaacaacgccgagaaagctggcaagcgccaggtccttatccgtccttcctccaaggtcattatcaagttcctgagcgtcatgcagaagcacggtacgttggcactttccgctcttcgacagggaagcgatgtgagaagacgtgaggcaatttgtgagatcaaaaaattcgggttgataactaggcgg

SEQ ID NO: 24524 - DNA, 735 bp, Emericella nidulans
acttctaacgcgacgagtggccccatccggatctcaattctcgatgaagaaggaaacgaggtcgcaacagcgtccggagccactgggacagctaccattccctctgtcaacctctggcagcctggcgctccctacctatactccttcactgtcagcatcctctccgcctcccaacggctgatcgacacatacacactgcccatcggtatccgcactgtggctgtcggcaacggcactatcctggtcaacaatgagccggtctacctgaccgggtttggcaaacacgaggatagtcccatccgcggcaaaggccacgacatcgcgtacctagtccacgacttccagctgctggactggatcggcgcgaactctttccgcaccagccactatccttacgcggaagaggtgatggaatttgcagaccgccagggaattcttgtcattgacgaaacgcccgccgtcggactggcgtacagcattggcgcgggcatctcaacggacacaagcagggtgaccttcgcgccggacgggatcaacaacaatactcgcgcagcccacgcccaggctctccgggaactcattgcacgggacaagaaccaccccagcgttatcatgtggtcgatcgcgaacgaacccgcgtctgatgagccaggtgcgcgagcatactttgagcccctcacgcggctcgcccgctccctcgatcccgcgcaccggcccataactttcgccaacctc

SEQ ID NO: 24525 - DNA, 690 bp, Emericella nidulans
agctcgaccaaaatcgccgtctacaaagacagataaaccacatgcgtcaatatggacgcctttaaactgttgactcgatcaactaaattgaagtctgctaccacccagtcttcgactctcccgtctacgggaaaagcagcaaacccgcaactattccgcggtgctgcagcagagaagctcgagaaggggagtggcaagaagagaaaaagggcccatgctgcagatgatgaagcagtagtcaatgaggatgcgctgaacctggatttcttcagccagggcagaagctctattccgaagagctcggatgccgcaacgacaaagggatctggcgcgccagcaggtcaggagggagcctctgaatcggactcggatgccgatgacgagccaatggatgaagttcagcgccgaacgattttgaatgctcataagatcaaggtcactgatatgcgtgacttagaagagctcgcacccgcccaggttcaaagtgaagagccaaagaagaagaagaagcgcaagcagcaggaggaggcagagaagcagcagcctcagactcttagtaaaaaggagcagaagaaggcgcggcgcttgtttccgcagccccttgtgtcattcatggagctacgcttcgagtacaaaatctcgcgacggctggcggagaatattgccagcatgaatcactgttccacttga

SEQ ID NO: 24526 - DNA, 798 bp, Emericella nidulans
ggatctgtgccggagctctgccgccacaaacccagataccgtgagagcgttggaattggccctacgcgaggtcttagataacatcaaagctgcaacgtacgcctacttcctgggattgtcatgtaatacaactaatttctgtttaggtctcgtatgcgaccgcgcatctctccatttgagttcgacatccaggttcaaacctttccctctctctgtctccaactcctgcctgcgccacctacactattcgcgccgaacccatttccctcgaattcctccttccctctcgaccctccaggaccagaccacctcaacatagtccgccaggccatccgcgcgaagattgaacaatggcagtcggaccagctcgccgcggagtccacgaccaaccttggaaaaaccagtctcggcatggatgcgaccacaattcagcgtaacgcgcaacaacacgaggaactgagcctgcgacaccttgaactcgcctacaagcactggctatcgctcccctacgactcgagaagagacgcttggcagcttgaaatcatgcgcgcattcgcccgcgagtccgagaaacgcaagtctcttgacgagcagctcgcccgcgtccagcaagaggctaaccaacttcgatcccaagtcgagaaacttgggacgtgtcaatggccgcgggaattcgcgctctttccgcccgaaacattgcccctgccgcgcgatgtcgcgcgtgaacttgatgccaaagagagccaaatcagtcccggctccgcacgctgggactacgaaaatgtcgtcgaaaagtag

SEQ ID NO: 24527 - DNA, 397 bp, Emericella nidulans
gcatatcacgcgtccgataagatagtgcagcacaacgggtgcggaacagtcaacgtgagtctttctattcttatatctttattctttatcttctctctcttcttcatagagggatgccgcacttactgaccattatcttaagatcatcaacttctacgccgaggactacggcaaggtctaccgctcctgcggtaactgcagctcccagtgcaagcgcaacgtctacattgagggcgtgaccgcgtacgacggcggcgatatctgcggcatcaactcgaactatggcgatacctgtactctgaacaacgtctgcactgacgccgaccacccctgtgtgctctacgagggatgcgccggcggttgcgagcccgagaaggtcggctactgctccggttaa

SEQ ID NO: 24528 - DNA, 502 bp, Emericella nidulans
accgcataaacaccgacatctcgcaattactacagcggttcgagaatatcatggctactgctacggtgcgctgttctcactctctttattggcatcggaattgcgtaatttggtaattatggccgctgactggttctgcttttgccaggtcgaaagcacaagccacaccacaactgccgtcgagacatatcagctagatgtcgagtctacggcactggtacgtccttattctagcgctatttattggcgctcctactcttaaaccaggccaattcgtctatcactgcatactgataccactcctcgacgaaaacagatccgcgccgcggaagacatcctctcactcacccgtacaatgaaggagacttggctatttggcaagcttgacacactgggcgaagacgaatccgagaccaaacgccgcgagggattggagcaggatgccgctgtcattcagaagatcattgaggatgcgggaatattaaaggcgcccaagaaatga

SEQ ID NO: 24529 - DNA, 346 bp, Emericella nidulans
agttcccgcgcccctgaacatcgctcataagcccctttcggttacgtttcatacattcgacgacggaaagcttgctattctggatgcgacgcggaaagaagagcaggcttcgaaagcggacgttgtgattgggatgaacaatgccggagatgtctgctacctgtctaaattccagggctccccggtggatgccctggtgtttatcacaaagacctcgctcgcacttgagaaggtcaagtacatcaacggcattattgacaaagctctgcaggctgatcttgcgaaacggtctaagggtgggctcgcggagcaagccagagcagagaacgatcggccagtcgcatag

SEQ ID NO: 24530 - DNA, 306 bp, Emericella nidulans
atggccagcggtagggctccaggtcgtcatcccgccgctggccgggatgatgacctgctgcagctggaggagtcgactcccatctacaacacgggacggcctccgccggtaaacgacgaaagcctcttgcgacagtacaacattgacgactctgaaaacgctcagccccgtccgtccgtttcttatgacaattttgtcggtgggagggtgacaccacacgccggcgcccatgcgacaggctccgcgcctccggtgcatgccggagtgtacatgaacgatccctactccggacaggacgtatgccgt

SEQ ID NO: 24531 - DNA, 304 bp, Emericella nidulans
atcacatgcccatcaaattctcactctttacgcactgggggcttcacctgatgagatccaggctgcctatgatcggaacaagacgtatcagcgaaaggctcttccaatgcacgaggatgttgttaacggccttcatcagaaaggcaaattcaaggacgcactaggcaaggagaagaattaccctgatttcctcgagttcttccagcgcgagatcgacaaaaagggtgttgaggctgttctttctgagtacctcttcaaacaggacgagaacgctgaaagtatgatggcaaggttgtttggtggt

SEQ ID NO: 24532 - DNA, 570 bp, Emericella nidulans
gcatcggttgtctggagcacaatgacattatgtcgccatgtgatgaatgtatcaagtggaagccaaccagattatgatctcttagccacctccaaacgactggacgttatagaagccatgatcaccggtgaccacctggactctaatccgcttgcgcaatttccaaccaggcaacccgccgccaatccgccctcattacccgatcaactcatgcagcgccagctagacttctggagtgcaatcggtcactttttgactctacatgacaacgaggccagcgccgcgaaagaaattgatgacacgctcggccgttgccgcacgctcctggatacgtacgaaaatcgagacgtcatctattcaatcgcaatcgcgcgccatctaggccaacggtgggccgacttcccgcacagcttcccgcagcctattaccacgaacgagaaagacgccggggccaagctttatgtcgctcagaaattccttgaacaggaagctgggggcaagggcacgacgcaggtcataaagcgcctgtgcggcatggtcgtccgctcctggtatgtttcgcgggaatga

SEQ ID NO: 24533 - DNA, 1146 bp, Emericella nidulans
cgcccactcaacctggaactcgctctcctccctcgcagacctagtcactcccaaggccacgaaccgcgccgactttattgccgaatgcaaatctggcgctctggacggcgtcgttgtcgcgtaccgcaccttcgactccgtctccatcaccggtctcttcgatgaggaactcgtcaacgctcttccttcttcgctggtatatctagcgcattgcggtaatttcttcccgcttccttctttgggggcagatactgatataggaatgcaggcgccggctatgaccaaatctccacacaagcctgcacagcgcgcaatcctccgttacgagtctccaacgtccctacagcggtcgacgacgcaaccgcagacgtaaacatgttcttgatcatcggcgcactccggaatttcaacgcaggcatgcacgccctccgccagggtcactggcgtggccttacaccgccgcgccttggccacgaccctgagaataaagtcctcggcatcctaggcatgggtggaataggacgcaacctgaagcgcaaggcagagtcgttcggcatgaaagtaatctatcataaccgccgcgaactgagtgctgaactcgcagggggcgcgaaatacgtttcgtttgaggagctcttgaaacaatccgacgtgattagtttgaatttgccgttgaatgtgcgtcccttattccttccctctcgtcatgttgactctggactggtaaactgatgggtgtgcgtagaaaaatacccgccacatcatcagcaccgagcaattcaaccagatgaaggacggtgtcgtgatcgttaacacggctcgtggtgccgttatggacgaagacgcccttgtcaaggccctcgacaatgggaaggtctactcggccggcttggatgtcttcgaggacgaacctaaaattcaccctggtcttgtggagaatccgaatgttttgcttgtgccgcacatgggtacttggactgttgaggtatgttcctctcattcctgccaatatgcatatgcattggtcagaagttaactcgaatgcagacgcaaactgcgatggaggaatgggctattgagaatgtgcgaatggccttggagacgggcaagttgaagacccctgtccccgagcaggctgatttgtag

SEQ ID NO: 24534 - DNA, 1870 bp, Emericella nidulans
ctcgggggagacggcgaccccgtacccatatctgatcacttggcacataacgctttcaaagagattatttgcagaaattgcaaccgtggcgacgacaagatgccttcacgactttcgacacccgtcttgacggtggacacagcaaagattcacaaggtggatacagcaaacacacagagcctccatgggatgtggatgggtaagttggtacgaactttcgcaagagactatactgacctgtgcagtattttccaaatgcgcagacttcatggaagagggccgtcgactagagaacctcagttggaggttgtggactcgcgagactttctgtgtagaaccagaaagttccagcgacacctcggtcttgcccttgcttcgttcggaagccgccgacttaccagaattgtcagccagcgtggaatcggctgcttctgaccaggcggaacggatagaaaagcatatcaagcggcccagagaggactacaagcctgccgttgttcgggaggattcatttagcttagggcgagcaaaggagaagcatttcacatcgttggacttggagcgtatggtgctgaacatcaaggagaagaaaactttggagccaatctccccggtggcaaccctgacccaaccggttgtcgacatcacgccccggacatctacgccgactcctacccctccttcaaacacaacgctcaagcggccgactttcgctctaaacgagcgacagaagcactcgactgagtcgtgctcaacgactgccccagacggtaatgacagcgatgctgctaacgtgaatgttaatggctcggacactagtgtttcatcttcaggcattcttccctcgaagcctcagttgatcaagtcgcccagcattgtccgtggtttctctccttctcagatatcttcatcctaccggtcgcagcctcgactctcgagtgatccggacgcttctaaaactcaagttccggccaaactctcgcctctaaagaaaaagggcaacatgtttacgcttggtggttcctccggggatgaggacgagagttcttttgaagatcgcatgatgcaggctcctcaccgcagctcgctatcagaccagcttgaaaagcggccgggcagtaacctcaatcctaaaaataaggtggcaacattcaaggagcaagtgggaaatctcaagtcaatgaaggagcgacaaagtggcaacgacgaggacgccatcgagaccgatgatgatatctccgagagtgctattgaagatgacgaagactcggactgggaggattcaatcactgaaagcggtcgttctagcgttgatgagagagatatgttccagcgggtggattcgcgaccgaacctggtctcacgccgctcacttttgaccatgatgatgcaccagccccttagaatgggagatgcctctcggtctactccggctttgcagcgatcacgccttacctcacccaacggcccttccattcctgcgtcgccccctgatgacgacgaggagaacctgacaatgaagggacccggtgttccccgatccaggccgatcatcatgaagcctactcctcaatctgtggcgcattccccgcgtactacccgccggaacatgcttgctactgagttgaccgaatcccttcggcgccacctcttgtgggagcggcagcaaaagagcgcgaccgcaaacgcattcaagcggaggcataccactcacgacatgaagaacctgaaggagtatccaggacctcaaaaccagcaggtggcgatgccgagctccaatggggtagctgataaagacgtcgcaaagacggggtccttcaaccactacactgattttgggccttgggaataccacgcaaaggggtggtag

SEQ ID NO: 24535 - DNA, 844 bp, Emericella nidulans
cttccaccccggatacctcacagctgagcgtctggccaaggctaataacctcaagcttgctgtcactgccggtattggctccgaccatgtcgacttggacgctgccaacaagacaaacggtggtattactgttgctgaggtcactggttccaacgttgtctccgtcgctgagcacgttgtcatgaccattctcctcctcgtacgcaatttcgttcccgcccacgaccagatccgtaacggtgactggaatgtcgccgcttgtgctaataacgagttctaccttgagaacaaggttgtcggaaccgctggtgttggccgtatcggtgagcgtgtgctccgccgtctcaagccctgggactgcaaggagctcctctattatgactatcagcccctgcgccctgaggttgaaaaggagattggcgctcgccgcgtggactctctcgaggagatggtctctcagtgtgatgttgttaccattaattgccctttgcacgagaagacccgtggtctcttcaacaaggagctcatttctaagatgaagcctggtaaatctgctcttttatatttgattattccgatgctaatgtatcacaaaggttcatggctcgtcaacactgctcgtggcgctattgttgttaaggaggatgttgctgaggctctcaagtccggccacctccgcggctacggcggtgatgtctggttcccccagcccgctcccaaggagcacccactccgatacgccgagcacccttggggcggtggtaacgctactgttccccacatgtatggtacatccattgacgcccaaatccgttacgccaacggcaccgaggccggtcttaca

SEQ ID NO: 24536 - DNA, 299 bp, Emericella nidulans
tggagatcgccgccgacattgtcaatcagcgcttttcgaatccggaggaacaggcgagattactgcgcgatgtctttttgactggcggcaacactctgtttcaaaattttgatgaacggttccgaaacgacttccgggcatgcctccctctcgaggcacagttgaccgtccgtcgtgcctcggatccaatcttggacgcctggaagggagcagcgcaatgggcctctggatcggggctggccaagtcatctatttcgcgcgaggagtacctggaaaagggcagtgaatatctcaaggta

SEQ ID NO: 24537 - DNA, 950 bp, Emericella nidulans
aatatcggtgcaagatatgcttctttcccgctggtacgtaccggaaaaacggatgcggtatttaggaaccgagatttggaagcgcagaagatgaccgaaatcttccacccccagtccacggatagggaggtacagcatgatcgaaccagtactaaccctgccacctcccatgacctggctgagccgttcaaagatgtacctacgtctgaccgaggtattgcgctcttgtcggtgcgtgagcttccagataactaccggccactgtttaacttccctgttttcaatgccgtacaatcgaagtgcttccatgccatttacaagagcgacgataacgtggtgatagctgcgccaacggggagtggtaagactgtcgtcatggagctggcgatatgtcgtctactcaatattcgcaaagataagaaattcaaagttgtttaccaggctccgacgaaatctctctgttcagaaagattccgtgactggaatcagaagttccacgcacttggtcttcagtgcgcagagctcactggcgatacggaccatagccagctgggaaatgtccagaacaggcagataattgtaaccactccagagaaatgggatagcatgacaaggaagtggaaagaccatattcgactcatgcagcccgtgaagctcttccttattgacgaagtacacacacttaaagaggcccgtggcgcgacgttggaagctgttgtatcgcggatgaaatcgattgggtccaatgttcgcttcgttgcgttgagtgcaacgattccgaattctgaagacattgcgacgtggttggggaggaatgccactagccaacatgtcccggcacacagagaacactttggagaagagtttcgcccggtgaagctgcagaagtttgtctatggctatcatttttctggcaataacttcgcatttgacaagctgcttaactcaaa

SEQ ID NO: 24538 - DNA, 384 bp, Emericella nidulans
cgccacggtctgacatatagccgtactcatcaggatattggtaacagatcacgagagagttccgttttggctcgatcctcgtcgccgccaaattccgtcgacgcctttgcagatcctcgtcgccgagagcgcgcaaatactttggagagccatgggcccccagatttggaggccattcttcagcgcacggtttcaggcggtaccagacgaccgactttcagcaacgccagtgttattcgacctcaaccaggtgacctggattctccagaggatacgtgcgtgccgcacttcgaagaacctggaagaattccagtgatcgactacgaggaattggaggaattcgtagctttgaatcagaagacaaagccttccagcaatcagcgc

SEQ ID NO: 24539 - DNA, 408 bp, Emericella nidulans
atgggtaagaaggatgaggatatcggcgtggaggctccagtccaggactcctaccatatcgagtcgtccaactccagcgacatgggcaagaaggatggcgaggttgcgcgggaatgggcgcacgacatcaagcaaggcgatgaagaggcggccttgaagacgaagctgcataaccccttggctgttttgacgcgcgagcagttgctgaaagatgtcgagcagttcgctagagagaaaggtctcgagcacatcctccccgaccttcggaaaggcgctctggtggcacagaaccccaaaatatttgaagatattccagacttgagcgaggaggacaagaaccatctccgcagggaaaaaacgcaccgttggcatcagccgtttatgatgtactttatgaccagtaagtcc

SEQ ID NO: 24540 - DNA, 234 bp, Emericella nidulans
gggacctatataggatctgtcgtggataatgaggaacttgcaggcaccttcctcaacttgtacaagtcgccgttgtctgatttcagagcccaggtcaaacagtgggtggacactgagacaaaaggtatccagcaactggacgaagcagtcattcatgatcgccgcaatcgcaccattgtggtagtttccgacagggtttgggacttgtggaaaaagataaccaaggactacgag

SEQ ID NO: 24541 - DNA, 358 bp, Emericella nidulans
gaactggcccgtcacccaccagttcacctacccgggcgtcgaagacgggatttactcggtgaatgcgacatacggcctggaggagatggcccaataccttggcagtactgcgacgagcgatctctggaccaactcgatcgtcaatcttgccctgctgatggtgggcgtcgtcgtgaccattttgtcgatcggtctctatcgctggctacggcagctctacgaatctcagcgcaacccggatcaagcagtcgacctgcagatcgagatgcagaccctcctccaccgcattggatggagtttcgcgcgcctcgtgctcgactatttcctccacccgctcatcgccctgtctctcttccag

SEQ ID NO: 24542 - DNA, 837 bp, Emericella nidulans
agagggattgccccaaaggaaatgggtcaactaccttgccatctatgttgcgctggggtttatcgcagtcgagctatccctcttcctcatctgccggccgctatcaaactactgggcagtgcctactcccaaccgttagtctctcccactcgtagccttatccacgctgttaaccacgctgcagcccaatgttccacttttcaatactacgagatcatccaaggatgcgtggctatcactgctgatatcgccatgcttctaatcggactcccactcctaatgcaagttcgtgtcccgctcaagcagaaattgatcctcgtcatcatcttcggaatgggagtctttgtcattgttgccgccatcttgactaaagtctactgcctcgtcccggagttgatttcgtacgtctacatgaactggtatttccgagaaactactgtcgccattctcgtcaccaacctacctctcatctggtcccttctgcgcgacgtcttccccgcgctcaagagctggacagggggctcgaaacgcggtaccaaccgctaccgatctggcccttggaacagcaacccttccggtcttaagcacttcgggaccggcactggcactacccacctacgctcgggcaacgagttcccaatgcacaaatacgatcgaagcgttgtggttacaccgcagaaagatatgtccgaggtcagcctggaacatacctactctcgcggccagagcgatgacggctcagaacgagctctgcaaatccgacaagacgtgacgattgaggtcatgcgcgagtcacgaccaccagcaaactatcacctccacgacccgcaaccttaa

SEQ ID NO: 24543 - DNA, 2996 bp, Emericella nidulans
agtcaatccggcaaagttcgacaaggcagatgatatggctgagcttacacatttgaacgaagcgtccgtggtgcataacctccacactcgatatctggcagatttgatttatgtaaggctttatctttcttccgcttgttgccaaagcctgattgacaatacgttactagacctactcagggctgtttttggtgacagtcaacccttactgtcccctgcctatctattccaatgagtacattaatatgtacaagggacaaagtcgcgaggagactcggccgcatattttcgccatggccgatgaagcatttaggaatcttgtggaagagggcgagaatcagagtatccttgtgacgtgagtctttgcgacgcatccgtgtaaatgcaaattctgacgcccgcacagaggagagtctggggcaggcaagacagataacaccaaaaaagttatccagtaccttgcagccgttgcaacatcagataatatgtactctcgctcaggaagcaagcagatgaacaccctttcgcagcagattttgagggcgaacccgatcctcgaggcatttggtaattcgcagactgtcagaaacaacaactcatctcggttcggcaagttcatcagaattgagttttctcgatcagggcagatttcaggtgcttcgatcgattggtatcttttggagaaatcccgcgtggtgaaacccaatttgcaggagagaaactaccacattttttaccaactactcaggggtgccgagcctaaactaaagcaaaagctgcttctgtcgaacttacagatcgaggacttcgcttacaccagagaagggaacgatacaattgctggagtttctgacgaaaaagaatgggactcgttgctcgaggctttccatatcatgaatttctcggaagaggatcaaatgtgcatccttcgcacagttgcagctgtcctccatctaggaaacattaccatcgtgaaagaaagtctacgggctgatcaagccgcccttagtcgagacgcccttgatagtgttcataaagcatgccagcttttgggaattgagactgagccctttgtcaagggcttattacatcccaaggtaaaggcaggccgcgagtgggtagagaaggtacagactccggagcaggttcggctggcattagatgctttagcaaagggtatctacgaaagaggttttggtgaccttgtcaaccgcatcaacagccgactggaacgaaacactgtcacgggtgaagacagctacttcatcggtgtacttgatatcgctggttttgagatcttccaaaacaacagctttgaacaactctgcatcaactacacaaacgaaaagctgcagcagttcttcaaccaccatatgtttgtcttggagcaggaggaatacgcgcgggaacaaattgaatggcagttcatcgactttggcaaagatttgcagccaacaattgacctcatcgaagtcacaaaccctatcggtattttttcttgcctggatgaggactgcgtcatgcccaaagccacggataaatcgttcaccgagaagcttcattcgctatgggacaccaagtccaccaagtatcgcgcctctcgcctccgacaaggctttatcctcacccactatgcagccgaggtggagtattccactgacggttggttggaaaagaataaagaccccttgaacgataacataaccagactgctcgcatcctcgcaagataatcatattgcagctctgttttcagactgtggaaacgcagatgaggttgaccatcccagaagtcgcgtgaagaaaggcttgtttcgcacagtggcccaaagacataaggaacagttgtcaagtctcatgaatcagcttcactcaactcaccctcattttgttcggtgcattatcccgaaccacaaaaaacgcccgaagatgttgaatgcccccttggttcttgaccaattacgctgcaatggtgtcctggaaggtattagaattgcgcgtaccgggttccccaaccgattgtcctttaatgaattccgccaacggtatgaggttctttgccgggatatgcccaaaagctatatggatggacagtctgccgcccggataatgctgcagaagctggctctagataaagcgtggtttagagtcggccgcaccaaagtgtttttccgagctggcgtcctcgcagagttggaggaaaaacgtgacgagctcatccgtacaatcatgacacgattccagtctgtagcgaggggttttgttcagcgcaggatctcaaacaaaaggctgtatcgtgcagaagcaacccatatcatccagcacaacttccgagcctatttggagatgaaggccaacccgtggtggcgtttgttctcgagaatgaaaccgcttcttggggagacacgtactgctcaagaagtgaagagaagagatgaaaagatcaaacaactcgagacgaaaatgaagcaggaccaatccgaacgccagaaagttgaggaagaaagacggcgagcggagatagagatacaacgaatccagcagaccctggagagcgaacgggcattggcccttgacaaagaagaaatcttcaaaaggctgcaagatcgcgaggtagagctcagcgagaaactagcaggcgctattgccgaccaagaaaacctcgaagatcaactagacgaactaatccttgcgaaaaagaagacggacgaagagctcgacctgcgaaaaacacaactcgagcaggccggagagattatccagcgcctagaggctgagaggaaggagatgcagcagaagttggaggatctggagcagaagctgcttgaggcacagagcagtgcctcagagacggaaaaccatatgagggagcttggacaagaggtcaaaatgctgcaaagtcatctcagtctgaaggagcggaaactgcaggatttggaggcaaaactgctgaagaccgaccaagatctggatgtcaagctggcaaaaacatcaaag

SEQ ID NO: 24544 - DNA, 455 bp, Emericella nidulans
gatgactccagctccacccgcgagaccgttgctgctcgcctcaaggccgttgcagaggaggccggttccacctctggcggttccaccacctactactgcaccgacaccctgggttactgtgagcagaatgtccttgcctacaccctgccttcacaggaccttattgccaactgtgatatctactactccgaactccctgctcttgcagacacctgctatgaccaggatcaggcaactaccactcttcacgagttcactcacgctccgggcgtctactcccccggtactgatgatctgggctatgggtatgatgctgcgacagccttggatactgacgatgcgcttaacaatgctgactcgtatgcgctctatgctaacggtatgttgtgactcctattatagccctttagtctcatgatgctaatattctcatagctgtttaccttggatgctag

SEQ ID NO: 24545 - DNA, 628 bp, Emericella nidulans
aaaatgggacaatgagacacagacagctctagacgaggaggaagttttaggtatgtacaccaaaccttcatcaataatcgacgaacctgacgccgtacagatatcgcgtacgccccgtctggtatcgagactcgagatgtcaagggcgcatcattcaggttcgccaagcttctgagttcaccattcatcggctcaggcatcgttgaactaccccccggcggagtcaagaagccaaagaacgcgaagaaaatgcatatgatattctacgttgtcaacgggcgagttctagtggacatctcaggcgtccaatttagtgctggcaagggatgcgtctttcaggttccccgtggtcagtattagacaatcgcaacccataccactcattttgcaccgcttacccataataggtaactactatagcttcgcaaacacatacaacaaagatgctcgattgttcttcacccagggctgtgtccctagcacggcggagggagatgatgctcctggttctgcgtctaaaaccgatgcgcttgacggcgaatcaaacacccctccagcacgttccaggccacagaaggctacagccggtaaaggcaggcctaaggggaagcagaagcccgctgcttga

SEQ ID NO: 24546 - DNA, 609 bp, Emericella nidulans
atcactctccctcctcactacgatgagggtaccttcgttatcagttctttcctttctgctcggcaccgcgctggccgccgccagcaattttgaagccggccttctgtccagcggcaaaggtatcctctctgcactagggaccagttctttgccagtggctgactcttgacagtgtctctcggtgactggaaatccgcacacgagaaagcctcgcaatttgttgccaagctcaacaccaccgagaagatcaagctcatcaccggcagcagtgtgaccactaccaatggcgagacatttacggctctcgacattctcgacggtgacatgggcgcgcaagcctactattatgtctcggcgtttagtctgtcctccgccttggccatgacttgggacaaggaggccatgtacgagcagggcagggccattgcggctgagttctacggcaagggaatccagatggttgccggtccgacctcgcagcctcttggccgtactccatggggcggccgactggtggaaagctttggacctgatccgtatctgaatggtattgcaaccgggttggaaactagggcctatgcggacgtgggagttatcgccggggctaag

SEQ ID NO: 24547 - DNA, 1311 bp, Emericella nidulans
taccttccttcgacctccaaggtggacgcagagattgttgcagagctcaagaaggacgaagatacctataaaatggttgaatcacgagtcccatcttcccggctaggccgactctggcagtatggtggcctagcaacttctatggctttcggagccgttggtgagagctttcgcagggtaacagggagcgctgaagcggctgctggatcacttatgtttagtgccgggaatatggagcgtcttgtagctaagctatctaaaatgcgtggcgctgctctaaagctaggtcaaatgatcagctttcaaggtatgttttgattctttgcctcttgaattactgcttatgagtttgtagactcaaaaatgctccccgactctattcaacaagttctccaaagagtgcaggatcgcgcagattacatgcccgcgtatcaacgagataaagtcctgacagacaacctggggcccaactggcgtgacctcttttcgtcttttgatgaggtccctatggcagccgcctccattggtcaagtccacggcgctaccctcaaaagtacagggcaggcagtggccgtaaagatccaatatcctggagtcgcagactctattgactcagacctcaacaatctctccatcctcctaacagcgtcgcgcatcctcccccgcgggctttatctcgacaaaacaatcgccaatgcccgcacagaacttgcctgggaatgcgactacacccgcgaagccgaatgcgggaaccgcttccgtgagctcctcaaagatgacccggttttctacgtcccgcaaatcatccccgaggcttccggcagaaacgtccttacaatggagcgcctcaacggcatcgctgtcacaaagatccaaaccttcacccaggcccagcgtgactggatcggaacccagatcctgcgcctgtgtctccgcgaaatcacagagtttaaatacatgcagacagaccctaactggacaaacttcctctacaacgcctccaccaaccgccttgaacttctcgatttcggtgcctcacgagcctacccagactccttcattgacaagtacgtccaagtactctgtgcggcgtcccgtgcagacagggagacatgccacgctctctccatcgacctaggttacctaacaggccgcgagtccagcgctatgatcgacgcccatgtctcctccatcctcaccctcgctgagccgttcatggattcctcacctgacgtctatgacttccgcgaccagacgattacacagcgggtgcgtgatttgatccccgtatatgataggcgaacggcttgc

SEQ ID NO: 24548 - DNA, 918 bp, Emericella nidulans
tcctgcagctcatctagcacgagcgagttcaccggctggtgcggtctctctatgggctcctcgatgaacagtaacctgttgctcgtcgcctacgcgcaggacgacaccgtcttgacctccttccgcttctcctccggttacgctatgccctcagtctacagcggcaacgcgaccctcactcagatctcgtcgaccgtcactgccgacaagttcgaggtcctcttccgttgcgaagagtgtctccgctgggaccacgagggcgtctccggtagcgccacgacaagtgctgggcagctgatcctcgcctgggcgcaggccgaggagtctcccacgaacgcggactgcccggatgacctgagtctggtccagcacgaggcgcaggggatctgggtaggaaagctgagcggcgacgctgcaacctccaactacgagacatcgggtgcgctcgcgaccaacgtcgtcgacgggacttgcggtactgatggtggcggcggtggtgataatgggaacgggacgaccccaggcgtgcctgtccctacaaacgtcacgtacgactacatcatcgtgggctctggtcctgctggaatggtccttgccgaccgactcagcgaagcgggtgcaaagaccctgcttatcgaaaagggcccaccctctatcggactctggaacggcaccatgaagccagactggcttaacggcactgatctgacccgtttcgacgtgcccggtctgtgcaacgagatctggaagaacagcgatggcattgcctgccccgataatgaccagatggccggatgcctcgttggcggcggcacggcagttaactcaggtctctggtggaagccttacagcaaggactttgacgaatcgttcccggagacttggaagtacgacgacgtcagagatgctgtgacgagg

SEQ ID NO: 24549 - DNA, 1305 bp, Emericella nidulans
atgtcgtatggaacaatcgcatcggtggaggatcctcccagcgcggatctcgctcaggagcacgaacaggacgatgaacacgcccaagaggatgaaccgctgctccccgccgtagactggaaacctcccaaagggttcctttggatagaagtcggtatgttctctccttccgctgatgtctctgtgggattcaccttaacatcactagcaattttcgccaatgttttcctctccggcttcgacggcacaatcacagcctcgacctacgcgctcatcagctccgagttcaaggccgcaaacacctcctcctggcttacaacctcatacctgatcaccagcacggcattccagcctctgtacggcaggttctctgacatctttggccggcgagcctgctttttcacgtccaccatcagcttcctcctcggttgcctgggctgcgccgttgcgcaagatgtcgtctttctgaatctcatgagggccctgacgggcgtcggtggagggggtctcatgacgatggctacaatcataaactccgacatgatcccctttcatcgccgcggtatgtaccaagccgcgcagaacgtcctgcacgggttcgggtctatctgcggggcgtcgctcggcgggtctattgcaaatacgatcggttggcggtggtgctttcttttacaggtgcccgtgtccgtttttgcgcttgcgatcggacggatcgttatccctatgccgcagaaacctcctacgggcgttggctggagtgtttggaagcaagttgaccttacgggtgcgctcctcctcattctcggtctgtccgtgcagctggtcggcttgagtctgggtggcaatgagctcccttggagtaacggatgggttgtttctagtctgctcggcagcctggtcctgttgggcgggttcatagtcgtcgaggcaaagacaagtgctatccctgtcatcccgctgcggatgttgaaaggtctcttgccggtttccacgcaaatcgccaatgtttgcgttgggatggcagcttacgctgtaagtctctcttgcctccctatctcttcgctcagcccctccctgcaagtatcaagacgcaactattgacgtcagcagttcctcttcaacctccctctcttcttccaaatcgtgctgctagacagcgcatccaaagcgggtgcccgtcttgtgattccgtccctcgcgacgcccgtcggcggactcctgtctggaatcgtcatgtcccactacggcaaactgagctacctaatgcgtgcaggtgctatgctcatgtttctggggaactgcttg

SEQ ID NO: 24550 - DNA, 516 bp, Emericella nidulans
gttcgcgcggctgttcccggccccctctctgctgcttctaagcaggtccgtacctatgctgctgaggccaaggcctcgcccaccgaggtttcttccatccttgagcagagaattcgtggtgtccaggaggagtctggccttgccgagacaggacgtgtcctttccgtcgggtatgtcgccttcatgggtggaaaaatttggtgtcggcttcaaaagcgcttaagctgtggacaaagaacaccaaaagctacctcgaaactgcttagactatcctagtgctgtgactgactcaattctatcgattagtgacggtattgctcgtgtccatggcatgaccaacgtccaggctgaggagctggtcgagtatggatcccgatattgcttcttcattttgaacgctgcgactaatattgaaataggttcgcctctggtgttaagggtatgtgcatgaaccttgaggctggccaggttggtgttgtgttgttcggttccgaccgtctcgtcaaggagggcgag

SEQ ID NO: 24551 - DNA, 615 bp, Emericella nidulans
gacgagaatttatcagatgcacaagctagttactacaacctcctccatcatagattccttctcttacggtcgattctgaaatgcacgccaccgcccgaagccatatctgcgctcgacgactcgcaccctatcagttttccccgatcatccaaaattgcacagagagagtggagacgcctgataaaagaggttgatcctcaaacagtgcagcttgcgtgcatggatatggacagtgtcctgagagtgttggtgatcgtggcgcggctcatatcggataacgtgcgtaatggagatgcagtcctaattcgacgtatcggtgcctgggcttgggggctcctagcgaagtgccgagatgccgggcagctaggggctcgaaatattggggatattcgtgagttgggaaagcgtgcggtaaggattttaaagaagataagggaagagcgcgaagaaatgcaggacgaggaagacgatgcaaatgattacgaatctgatgcagagaataagattgcggaagggccgtcaggcgacaaagggagtgaagctgtcgatatcagtgcccttcccgactcggagcacttcgatgcggagaagaaatccgatgcggagaagctgtaa

SEQ ID NO: 24552 - DNA, 1339 bp, Emericella nidulans
ctcggtggctcgtggagctacaagggtatagtcaacatcacttcaaaggtctacagtcccacaagggaagtggtgctcaatgcaaaagaaattgaagtgcaccatgcgaaggttctaggattagacggtaagtggtatttttatctcgctaagtcatgatatttacgcgtatggatttaattaatggagatgctacttcaggcgtagagttgaccaaaacgtctgagatcacctacgatcagaaatcggaaagggtgacaattaggttccccaaggaactccctcagtccgaactcgtcgtctccatatcgttcaccggcaccatgaataatgccatggctgggttttaccgctccaaatataagcctgctgtcgagccgacgtctgacacccccaaggaaggagaattttattatatgctgagcactcagtttgagtcctgtgatgcacgcagagcatttccttgttttgatgagccaaacctcaaggcgacatttgacttcgaaattgaagtgcctaagggtcagacggctatcagcaacatgccagtcaagtccgaaagggagggcagcaagcctgagctcaaagtggtttctttcgatacgaccccagtgatgagcacttatgttcgtattcaccctccaccaaaattgacctcacactgaacacattttcctcttctagcttttggcgtgggcaattggtgactttgactacgtcgaggcattgaccgaacgtaaataccagggaaagagtattcctgttcgtgtctatacgacgaagggacttaaagaacaagcccgctttgctcttgaatgtgcacatcggaccgtcgactacttctcggagattttcgagatcgaatatcctctgcctaaggcagatcttctagcggtacatgaatttgtaagttgtctctcgacactgccggaccttcataatgacctttcgtgaaaaatataggcaatgggagctatggaaaactggggtcttgtgacgtatcgcacgactgccgttctgttcgacgaaggcaaatcagatactcgttataagaatcgaattgcttatgttgtcgctcatggtgagtcaagcattaccttaagccgctctccaccctagctaactaggctattatagaacttgcacaccagtggtttggcaatctcgtaacaatggattggtgggatgagctctggctcaatgagggctttgctacatgggtcggatggcttgctgtcgatcacttctatccaggtaaggaatccatggccccctctagcgatcacagctgaaagtatctaataccatggtagaatggaatatctggtcgcagttcgtg

SEQ ID NO: 24553 - DNA, 1263 bp, Emericella nidulans
acacgacctccgtctcactacatatcactccgcgaccaggtatcgaagtcaagccatcctgggcgggggaatccgcgcaatgagacggtcttcattgcagctagcctgctcgacccggatgggagccttgcacggggtcactgggcgtccagcgtccttgaactcatcgacctccttggaggtgacaatgttttcctgagcatctacgaaaatgacagcggagaggaaggggaatcggctctgaaggagctagacgcgcgagtcgaatgcaataagtctatagtgtatgagcacttggatctcgatgagcttttaaaagttactattccgggcggagaaaagcgcgtcaagcggattacctacttggccgagactcgcaaccgcgctcttcgaccactcgaccagtctaccactcggtttgacaaacttctatacttgaatgacatagcttttgatccagtcgacgcgctgcagctcttgttttctaccaacgttgatgacaatggggtagcgcagtaccgtgcggcttgcgctgtggattttattaatcctttcaaattctacgatacatatgccacgcgtgacttggaaggctatagcatgggcctgcctttctttccatggttctcaacctctggcaacggccgaagtcggagagacgtccttgctgggaaagacgcggtacctgtccgcagctgttggggaggaatggcagcgttcgatgctcagttctttcaaaacagcaccgggccgattttcgatatagcaggggaggttacccccgctcgcttccgcgccctacgagatgaagatcttttctgggatgggtccgaatgctgtctgatccacgctgatattcagaaaccactgcataccagtagtgaagatgacgaacctcaggccgagactggtatatacatgaatccttttgtacgcgtttcatacgatgcgaccactctgtcgtggctatggactacgcgtcacttcgagaagctctacactcccattcacaccatcggcaaccacctcgtcggcttgccttggttcaatgcccgactggacgagattcccggggaaattgtgcaggacactatcgttgtatttgacgaaaatggagaaggttctctccagactatcgaacgagtcgctagacacgatgctttttgtggacggcttggacttcaggtggccgttccacggggcgagggcaaaaagggatggcagacgataccacttccgaccgaagacatgtacccaagctaa

SEQ ID NO: 24554 - DNA, 865 bp, Emericella nidulans
catttggacctattggtatcaatgccggtgttgctgctgttttctttggtatggcatgctgcatgggtcccatcctgagcatgtgctgcaagaagttcggtgctgtgttggcggctattgcccacgcgattgctgtgatcatcttgcttgtcatctttgaagtcatgttcttcctcgaacactggtcttggccccggtgcgtcatgggcatgatcgccatggctgccattcaacgtttcgtctacaaacttattatcgcgctcgctcttacccgagagttcaagcatgaccagtcgaacatcgcatggtggactggaaaatggtacaacatgggttggcactctctctctcaaccgggccgagagttcctctgcaagatcacggagttgggctatttctcagcagacttcgtcattggtcatctcctattgttcattatgctgcccgctctttgtgttccttacattgacaagtttcactcagtcattctcttttggctccgcccaaggtaagacccctcatttactcggttgtggattcctaatctctaacactcaaatctagtcggcaaattcgccctccaatctactcgcttaagcagtccaagcttcgtaagcgacgtgtggtccgtttcgctattctgtatttcgccatgcttatcctgttcctcgttctccttattgcacccctcattgccagaaatcaggatctgaacctgaaaatgagtggcatccttcttgagctcatgcagcctctcgacagcaacaacaacgacactatgaccagctataccggctcgggtgtccccaagggcatggagcctattgcgtgcccgtcatcgtaccttacgaacttaaacaactaa

SEQ ID NO: 24555 - DNA, 537 bp, Emericella nidulans
atgctttgtttggcaggctcctcataccacgtcttctacaaatggctggtcctgcggaagatcgacaatgccttctcgccgggcttctcgtcgctcgagcttgcggcgctcgcgcagcacgggtacaccctcggggaagggattgacagtgatgacgagaccaagttccgggtaacaaggccggagcaggctctgatcgataatattgtcagtggaaaggtgaagggacattactacttactcttcggcgagaaggggacgggtaagacaagcatgcttctggagagcatgcaaaaggtccacggggatggagtgggaatgctggaagcacatggcgatatcgaagtattcaggctgaggttgggcaaggcgattgactacgagtaccatgaggactatatcggtgggatgtttagtatccgagggccgcgtgattcgacgccattgctggatatcgaacgtgcgttgaacaagctggagaaggtggcgctgcgtcggaaagagagcgaccggccgctgatctttgatgatcaataa

SEQ ID NO: 24556 - DNA, 444 bp, Emericella nidulans
atctttcagggtgtctctcccatgttcgttggcgactttgcagataaagctggccgtcggcctgcatacatggtctgcttcctgatctatatcgctgccaacatcgggctggcgctgcaggacaatttcgccgcattgttcgtcctgcgatgcctgcaaagtgcagggagcagcacaacaattgccctctctgctggcgttgtctcagatatcgccatcgccgctgagcgcgggtcctatatgggcttcgtaacggcaggttctctcctcggaccagcgatgggcccggtcatcggcggtcttctatcgcagtatctcggctggcgctcggttttctggttcctcaccatttttgccggtgctttcttggttccttttgttctgctatttccagaaactgctcgcgcaatcgtggggaatggatctatcccgccgcccaagtga

SEQ ID NO: 24557 - DNA, 543 bp, Emericella nidulans
atgagcgatatcacagacaaaccgtctgacgagacgattaacctgaaccgcatgaaaaccgcggagagtgtcttcctcccgatttcccgcgaaaccttcgagaagctttacctgacccccaaacacccctccgtgcagacggacctgaggaagaagttcggtaacccgaccccgatctgtctcatggggttcctgatcgcatctacaccccatgcttgtatgctgatggggtggcgcggagccggcgggaatggtagcgcgcttgtcccgacgtatatcttcttcggcggaattgtccaaattctgggtggtattggcgaatggattattggaaatacgttcagttgcgcgatcttctttacatatggtgcggcatcgcagttgatctaactaccactcgtacctggttaacgttgattctagggacgttctggcttgttcagggtggcgggctcatgccattcttcgcttcggggatgaactactcgcctaccggtaattcttttgagggacagcagacaggggaatacgcggcaacaattg

SEQ ID NO: 24558 - DNA, 755 bp, Emericella nidulans
gcgcaagcaccccttcgattttcgctactggttccagcgccaccaagcctggcagcgacaatacttggaaaccaaatacgcccatcaagttttcatctgattctgcaccaggtctaaccttatcagccaaatccgaaaccgcaacggcagcaccagcttctgaatcctctaaccatcatccaacgctctttggggctccgtccgcaggtgctcaacctggcccaagcggtaacgagggaactgctggcttctcattcggtggtccttcccaaccaggatcttcttttttgacaccatctgtgctcacttccgagtcccagagccgtgccacaacaccgggtgtgacttccgatactggagccgaagattccgccgatggagacgctcaaaagccagaacctcaggttgaccttgctagaagtggtgccggcgaagaagacgaagacatcgtaatagaaacacgagcacgtgctttgaagatggtagacggatcctgggctagtcaaggtgtgggtttcttgcgcatcttaaaaaatcgaaccacgtcccgcagtcgcgtcctcgttcgagccgaccctagcggaaatgtggtcctgaacgccagattgatgaaggagattaagtacaccgtgaacggaaacaacatacaattccttgttcccaaggccgaaggcgcaccagagatgtgggctcttcgtctcaaagctggcgaagccctgaaagttgggactgccatggacgagaacaagtcgtaa

SEQ ID NO: 24559 - DNA, 796 bp, Emericella nidulans
gcgccgctgcggccagcaacagcagcaagcgccagtccaaggtgcctcctccgcgcaggccctcttcagacagcgggagcagcgctgagagtgaagacgtccccgctgtctttgagaaatacgcgcaggtgcttcatgcctcctctcgcccaatcccccaccagggcggagaggcagcatatctcgagaaggagcacccttcaggcttgttcaatgatctgaaatctctcggtttcaaggactttgcctcattgaaggacgtgatcaagaccaagatcaatggcgagctcacggatgacaagaccatgatcatggagcgcatcattcaggtgagcagatacacaccttggacgatggttcctgggggattgcgttcggacgtctgaccggatttgcagatcgttagcagccttccctcaaactcgaagatgcgcgtggacctcacgaacatgttcctcgacgagctctggggttctttgcctcaccccccgctctcgtaagttcgcctccacgcacacgaattcgaccatgatcaataacttggttcagatatatgggcaacgactaccagtaccgctctgctgatggttctaacaacaaccccactcttccatggcttggtgccgctaacacagcttacgcacgctccattgagcccttgaccgtgcaacccggcggtcttccggacgctggtttggtctttgatactttgtttgcgcgccagaagtttacgcctcatcccaataaggtgtctagtcttttcttcgactgggcgtctctgatcattcacggttag

SEQ ID NO: 24560 - DNA, 1534 bp, Emericella nidulans
attcgcatcttcgaccgtggggattggtactcagcccacggcaaagaagccgaattcatcgctcgcacagtctacaaaacaacctctgtccttcgtaatctcggccgcagcgaaacgggcggcttgccgtccgtcacaatgagcattactgtcttccgtaattttttacgtgaggctctattccggctaaataagaggattgagatctggggctccgccggcacgggcaaagggcactggaagaaggttaagcaggcgagtcccggaaatctgcaggatgtggaggaggaattaggggcaatgggtatggagggaagtaacggagcgcccattatcatggcagtgaagcttagtgcaaaggccggggaggcgcgaaatgtaggtgtttgttttgcagatgcaagtgtgcgcgagcttggtgtgagtgagttcctggacaatgatgtttactcaaactttgaggcgcttgttatccagctcggtgtgaaagagtgtctcgttgtgcaggatgtcaatcggaaggatgtggaggtggccaagatccgagcaatatgtgataactgcgggatagcgatatcggagcgcccggcatctgattttggggttaaggatattgaacaggaccttacaaggttgctgagggatgagcggtcggctgggacactgccggagacggagctgaagcttgcgatgggcggtgcggcggcgctaattcggtatttgggcgtgatgtcggatgcgacaaatttcgggcagtatcaactctaccagcatgatttggcgcagtacatgaagctcgatgcggcggcattgagagctttgaatcttatgcctgggccgagggatggatcaaaatcgatgagtttatttgggctgttgaatcattgtaaaacgcctgttgggagccggttgctggcacagtggctgaaacagccgttaatggatctggcggagattgaaaagcggcaaaggcttgttgaggcgtttgtcgtgagcacggagcttcggcagatgatgcaggaggagcatctacgatctattccggatctgtatcggcttgcgaaacgattccagcgaaaacaggcgaatctggaagatgtagtgcgtgtgtatcaggttgctattcggctgcctgggtttgtgaactctctggagaatgttatggatgaggagtaccagacgccgcttgagacagagtacacggccaagctacgcaaccattcggcgagcctggcgaaactggaggagatggtcgagacgacggttgatctggatgccctcgagaatcacgagttcatcatcaagcccgaattcgatgatagtctgcgcatcattcgcaaaaagctggatcagttgcgccatgatatgtaccttgagcataaggctgtcgcgagagacctagatcaggaaatggacaagaagctgttcctggagaaccaccgcgtgtacggatggtgtttccgtctgacgcggaatgaggcgggttgcattcgcaacaagaaggcctaccaggagtgctcaacgcagaagaacg

SEQ ID NO: 24561 - DNA, 471 bp, Emericella nidulans
atgcagcagagcaacaaagacagcggtcgtaatgtcgtccccatttgtcgtctacttgaagaccctgaggatcctgccctccctcctcagactgtcgacaatcttgaagggcgccggcgaaagttcgatctcatcctctcacaccttgtcatgcaccacgtccccgacctcaagtcattcttgagtacattgcgagggtgtttgacgcctggcgggagggtcgctcttacggatttcgaggattttggccctgaagcgatcaaattccatccgccgacgaagctggagggcgttgagaggcatgggatccctgcgcggtggatggagaacctgatgaaagaggtcgggtttcaggacgtcaaggtttccgtgggatggacgttgacaaagaaggtcgaggcctgggaagggcacaacccgggggatacgctacaattccctttcctactatgtgaggggtcgagcccgtag

SEQ ID NO: 24562 - DNA, 739 bp, Emericella nidulans
atgggtccctcgctcttcggctacaaccagggtatgatgtctggtatcatcgttggaactgagttcgtcggtgaattcgaggcgctcaagatgcctacggattataccgacgccgagtaccgacacatcaacgtcctgcgtggtgcagtcactgcttgctacgaaatcggttgtttctttggcgcgctcgtttctatgttttatggtgagagagtcggtcgtactcgcgtcatcatcagcggcgcgaccatcctcattataggtgccgtcatctcgtgcgccggcttcggcccgcactggggtctggggcagttcgttgtcggccgtgtcgtctccggaatcggtaacggtctcaacaccgcgaccatccctgtctggcagtccggagtgttccgcctcgcacaaccgtggtcttctcgtctgcttcgagggtgccatgatcgccgtcggtaccctgatcgcttactgggtcgtcttcggtctgtcctacgtcgaccagtcggtgcagtggcggttccccgtcgctctccaggtcctgttcgcgctcatcgtcgtcaccggtgccatcctcctccctgactcccctcgttggttcatcatgcgcggctacgactctgaggccatcgaggtcctcgcgaagctcaagaacgactcgcccgactcggaagccgtgcttgccgactacaacttcatgaaggcggatgtcgagatgaccaagaccagccaggccggtttataa

SEQ ID NO: 24563 - DNA, 444 bp, Emericella nidulans
  unsure (1)..(444): unsure at all n locations
ctcgacgacccggataattttgagacctgggagcggctcgttcgcgctgccgaggccctcgaaggaggcgtcaaccgcaactccaacccgcaagcgataaccacagtgcgcaacgtctacgaccggttcctggccaagttcccgctgctgttcggatactggaagaaatatgccgatctggaattctccatcaccggaaccgaagctgcggatatggtaagtgctcatttttacctaggtacctctgggttatggttcacgctggttgctgatttgaacacaggtctacgaacgaggcgttgctagtatctcgtcttccgtcgacttatggaccaattactgcaccttcaaggccgagacttcccacgacacagacattatccgagagtaagtagactngagctagtttcctttccttccctgtgaccactaccgatgcagcac

SEQ ID NO: 24564 - DNA, 534 bp, Emericella nidulans
cttggatattcctccgtttatgtcctatgcggcatcttatgccctgttcaactacacccttgatgatccgtccaagggcttagtctattccaaccttcgtctagtccgcgcattcgaacgtggccttgaccctcgcagctcagaggctggcttcatacttactcacatcgacatggtgaaagacacacctggtctcatcagtggtgctcttcatattatcgacacccttgaacaaggaggctctcggtctgatgttaatgatgggttccgggagatcttatcctcgatggaaaagattgaggctggcatggaaggtatgtggtagctttcctcttcgttatggatgaatatggggctcacagatggcgttcagacatgtgggccaattccaagccctcggattacctttcttttcgcgtctttattttcggcataacctcgcagtccatgttccctaacggcgttatatacgacggagttgaggacaacaagcccctttactttcgtggcgagagtggtgccaatgatagcata

SEQ ID NO: 24565 - DNA, 315 bp, Emericella nidulans
ttggccaccaagccctcgactccagcaccagatgacacaggcgcagatacgtcgggagacgaaagcgacgcctcgaatgatgaagaatcgccagaggagctcgacgaagagcaactcgagcagcaacgacaggtccagcaatcgcgtgaggagattgcagaattggaagctctcattcgctcggagacagccaaatgggaaacgatgaacaaccaaatcctcaagggcaagcttgccaagcgtattcacgatctgaaaatggaagtgtctctcaagaaggtctcaattggcgagggtgatgacgccgatagctag

SEQ ID NO: 24566 - DNA, 981 bp, Emericella nidulans
atgggctcgtccaaggaagttatcatcattggcgggggcgtatctggcctcggcatggcggtgcagttgaaacgcctgttaggccatgacaactttactatctacgaaaaatccgataatataggagggacctggtggcataataggtatcccggctgtgcttgtgatatcccgagccacttctactctttcagttttgcgctgaagcctgactggactacaatgtaccccggccgtgatgagctgcatgcttgtaagttgccacaaattggtcccaaagtcttccaatatatatgcggctgactaggagcttgcagatttcgtatctgtggctgaaaaatacgatattatcccgcactgccggttcaatgccatgtgtctcggtttggtgtgggataccgcccgttcactgtgggtgtgcactttccaagacaccagcagcggagagatatacaaaagggaagctccagtggtagtcagcgcagttggcacgctggatcgtcccttcgtccctaatatcgagggctctgacactttcgagggcaagaccttccacagcgcacgttgggatgacacattaaaagcctctgggaagcacatcgtcgtcctaggcaacggagcatctgccactcagtttgtgcccgagttagtgaaggaagttggcccaaaaggaagtgtcacccagtttgttcgaagtgcccattggtggacaaaaagggtaggattactgtcgctgtctcggtgttcttgcgctaaatcttcgagtagggaaacccgaagtactcagaagccttcaaaatgctgatgaaacacgtgccatttgcagcacgcatctaccggcttcttctcgcatgggagcttgagagcgtgttcttttcctttcgcatgaatgcgaacggtagcaggatgcgtcagaagattcgggacgccacgtacgcctatatcgaaaaagatctccgccagagtatcgtgaaactctaa

SEQ ID NO: 24567 - DNA, 1188 bp, Emericella nidulans
atgtctcttcaggttgctgcagatagtggagatctagagaccgtgaagttgcttctggaccatggagcagatgccaacatccaggctggtgaacatggaactgctctccaggctgctgcacaccagggatatcaagatattataaagttgcttctggaccatggagcagatgccaacattcagggtggcaattatggaacagctctacaggctgctgcctttagtggagatcaagcgattgtgaagttgcttcttgacagcggagcagatatcaatagccagggtggctattatggaaatgctctccaggctgctgcatataaaggacaccaggagatcgtgaagctgcttctagaccaaggagctgaaatcaatatccagggtggccattatggaaccgctctccaagctgctgcataccaggaacatcaagatattgtggagctgcttctggaccatggagcagatgtcaacattcagggtggcaattatggaacagctctacaggctgcttcttttagtggagatccagcaattatgaagctgcttctagaccggggagctgaaatcaatatccagggtggccattatgggactgccctccaggctgcggctgcttcctttataggacaccaggagattgtgaagctgcttctagaccaaggagctgaaacaatagccaggggggttattatggaaccgccctccaggctgctgcatataaaggatacgaggagatcgtgaagctgcttcttgaccagggagctgaaatcaatagccaaggcggctattatggaactgctctccaggcttctgcctttagtggagatcaagcgattgtgaagctgcttctggaccatggagcagatatcaacatccagggtggcaattatggaacagctctacaggctgcttcctttagtggagatcaaacaattgtgaagctgcttctagaccgacgagcggaaatcaatagccagggtggctattatggaaatgctcttcaggctgcggctgcttcatttataggacaccaggagattgtgaagctacttctagaccggggagctgaaatcaatagccgagggggctattatggaaccgccctccaggctgcggcatatgaaggataccaggagattgtgaagctgcttcttgaccagggagctgaaatcaatatccagggtg

SEQ ID NO: 24568 - DNA, 512 bp, Emericella nidulans
gctggatctacgagagcacccccgaccctaaccaaccgctgcgtctacgcatcgcgctgaaacagcacaatgtcgccggcttcgagcaggcactgctggatatgtccacacccggtcactccagctacgggcagcatttcggctcctaccacgagatgaagcagctgcttctccctaccgaggaggcgtcctcctcggtgcgagactggctctcggcggcgggcgttgagttcgaacaggacgccgactggatcaacttccgcacgaccgtcgaccaggctaacgccctcctcgacgccgatttcctctggtacacaacgaccggctcgacgggcaacccgacgcggatcctccgaaccctctcctacagcgttcccagcgagctcgctggatacgtcaacatgatccagccgactacgcgttttggaggcacgcatgccaactcggccaccgttcgcgcgaagccgaatcttctcgagaccaaccggcggctaatcaacgcattttctttg

SEQ ID NO: 24569 - DNA, 1135 bp, Emericella nidulans
atggctgcggaggaggacgaggttgactacatgtccatggtcatagaggaaccacagcagaaggagactttcacgcaaaagaagcgccggctccaacgagaggtgcgtggtactagacgggcctactctagtgtcctgctgttacggttgctaacccgctcgtctcttccaggccgaagcccgcgctagagttccgtcgaaagccgaacgtgccgcccaggaagctgccaaacgcgatgcagccttggcaactagtacacttaacccctctaacaaggggtttcagatgatggcaaagctgggatttaaaccaggccagacgctgggaaagcctgccggagaggatagagagaaagagggtagcggtcctaatgcacagtcgcgcacggaacctttgaatcttatatttaaggaagaccgtggtgggatcgggctggatagtgagcggaagcgcaagattcgggaggaggccgaggaggccgcgaaaaagatcaaagccgaagagggcgactatcgagatcgtgtacgactcgagcgcgaaacgaagcgcatcgaagcccagattcatgcagcgcagaaggtcgcagagcgattagatgcggatgaaaacggggaagcggatctcttttctgccagtaacgtcgaagataaggataagaatgaggaaaaggacgagaaggagcaagagggcagtgatgaagaagctcccgcaactaagcccaaagcaaaggccaaggtaaagccaacgtctcaaatcaacatcctataccgcggacttgtgcgcgagcgtgaagaaaaggagcgcgccattcagacccggcatatgctgcagacatccttgccgacatcgtttttcccgaacccgcggttaccgggttatgaagacgcgacgttggatcgggacgaccacgaagcccttggcggcggacgtgatctctctaccgtcctcgagcaagaagtagaggaagaagacccggagctggacgaattcaatacccttgagccggctgagcgcttacggcggttggttgagtatctccgcgaaaagcacaactattgcttctggtgcaaatatcgctacgatactgccgagatggagggatgtcccggtgtgacggaggaagaccatgattga

SEQ ID NO: 24570 - DNA, 429 bp, Emericella nidulans
atgatgagcaccacctcaacccttccacctgtttcggctatgcaaccgctgccgccgatgtcctcgattgcaccaccgccaccggttggagttggacttgcgactcaatcatcagtgccttcagcgccctcggggcccccgcttactgccaaggtgccagctggtgctggtacgaagcgcctgcaacctgctcacacggcagagtcaccggcgaagaagcagtcaaagtggtctccggaagaggacgccctgatcatcgagctgcgaggcatcggcatgaagtgggaggacatcagcaaacgactaccgggacggagtgcaatcagctgccgccttcattaccaaaactatctggaacgacgaagcgaatgggacgaggacaagaaaaacaaactcgcaaggctttacgagaggtataccacgctttga

SEQ ID NO: 24571 - DNA, 684 bp, Emericella nidulans
ttgactgtcactatccgcgatgatctcgacatgtcccaaacacaaattgcaaactcaaacatcattgctttactagctacgtaagttccctgcatgcaaggacaagacgcagagccagccctaaccctatatcagactactagttcgacttatctgcggccccctatgcgatcgtttcggacctcgactagtctttatcggcctactgctggtgggctccattcctaccgcgatggccggcctcgttacctcaccccaaggactgattgccctgcgcttcttcatcggcatcctcggcggcacattcgttccctgccaagtctggtgcacagggttttttgacaagagtatagttgggacagccaactccctagctgccggtctaggtaacgctggtggcggtatcacatacttcgtcatgccggccatcttcgactccctcatccgtgaccaaggcctccccgcacacaaggcctggcgcgtcgcctacatcgtcccctttatcttaatcgttgccgccgccctaggcatgctcttcacttgcgatgacaccccgactggaaaatggtccgagcggcacatctggatgaaggaggatacccagacagcatctaaaggcaacattgtcgaccttagctctggtgcacagtcctcccgtcccaccggacccccttccattattgc

SEQ ID NO: 24572 - DNA, 693 bp, Emericella nidulans
aattttgacggactaaatgtgctggccgaagcgtcgcgacaggtgggtgcttctgaccagacaaagcgggggactcctgcatttccccagtccgtcactgttgggggaaagactgttgttgttgatcctgcgctcgaagcggaggtttttcagggccatcctactcaatctgaccaaatggatgaggatgttaagattccgggtaagagttggttctagctagtgtttttacacgctcaacccactaatggatggaatcatctactcgcagtttcccccaaatcgcctacagacgcgaccacaatcccttcgcttcctcctaccggttcgcttgatccttcgtcggcctcgccgcctttaccggagacttcattgactcccgacccaaccgccacttctcggcagtcgcagctgtccatgatcgccgcatctgctagtgaaatggtacctcacggcctcccgttggatcatgatcctagctctggactttctgacggtttgtctaagatgagttctgcatggaaccaacagctttcgactcaggaacaattgctgttcgacagcctccaggagcatgatccgaccctgacagcagcgacccaacgcgctgcctccttttctcgccccatcgcaatgaacccgaacactcaggctaagggctttgtcaacgagttcggcaattcaaccaagcca

SEQ ID NO: 24573 - DNA, 274 bp, Emericella nidulans
atggctgcagcccgcgacatccagggtcttgagatggtccctctgggaccgttgaacggaaaggcttttggtactacagtctcgccctggattgtcaccacggacgctctggctccgttcaaggtagcaggtccagaaccgagggttgaacttgaagagcacctgaaggacgaaaaggaagggaactttgatattgtgatgaaggttgagattatccacccacccgccgggcaaagcacgtcttcagcagcaacgaatagcaatgagggtgctg

SEQ ID NO: 24574 - DNA, 344 bp, Emericella nidulans
gcggcctttccacattctcgccggaactcggctttgcctgcgacagtatcgtaaacatgcaagtggttctcgcctccggcgaaatcgttgacgccaacgagacgcacaacgcgcctctcttttccgcgctcaagggcggacagaataatttcggcgtcgtcacgcgatttgatctggcgacttttccacaggatgaattctggggcggcgcaatccagtacccggcgtccgcgaacgaagcacagctggacgcgttctggaagttcaagaactcgacagtcgatccgtacgcggaagtcgagcagagctttttggataacgcgtctgcgccggctggccgtccg

SEQ ID NO: 24575 - DNA, 1096 bp, Emericella nidulans
atggcgaccaagaacatccagaacgttgccgttgctggggtatatctatatccctccactagacgtactcccacctatatcctctagctaaccactacaggtcaacggtaaccttggcccagccgtacttcacgcgctcatcacttccgggctcttcaagatcaccatcttcactcggctcaaggccgaaaacgacgctgggattcgttctccttcgtcaacctcagcgcccatccaggttccagtcaacagtaacggtaattgcagtgacagcggaaatagtaccggaacccccaagcccaggattcaaactctcccagtcaattatgactctgtcgacgatctgaccacccatctaaccgtccactccatccacgccgtggtctcgctactcccccacacggcgcccgacaaacaaatgaacctgatccaggccgcagtcgcagccggtgtctatcgtttcatcccctctgagtttggttccgacctcgataacccagtaaaccgggctgcgccgacctacaagggcaaggtgaacatacaggagcttctcaaaagactagccgcagagaacaagatcagctatacgatcatctataacggtgctttcctggactggggcctgacacacgcgtttccgatcgatgtagggaagaggaccgcggtgttgtatgatgggggtgagagggtctacagcacgaccacgcaacctacgatcgggcatgcggtcgtgagtgtgctcgccaaccctgaggagactaagaaccgagtcgtgcgaattgccgaggcaaacgtcacgatcaagcagctgctctcactagtacaggaagtcgtcggcgacaaggactggaccgtaaatgaaacggatatagatcaggaagtcgagaaagcgtgggctctgatcaagcagggcgtgttcagcttcgagtccatgatgccattcatttatcgtgctggttggggtaaggatgctggggggcatttcgagacgacggataatattctgcttggggtcgatgagctggatactgaaggggtcaaaagggtaatcgagggtgtagtgaagaagttgcgagacgaagcattctcgcattag

SEQ ID NO: 24576 - DNA, 1854 bp, Emericella nidulans
tccaccatgaacaacgagcaattccgccggctacttctcgacaataaccgatcatccaaatcaactagcgcgagtccgaccggcttctcgcatgcaggaaaacatggcgctgcttcaccgcaaggtgggagcgatagcggtggacagacaccgaaaccagcgcaggcattgctgggctcgcggatgcgctcgagcatccctatgacaccgtatgttttcacacgcttaatatctattgtccttattgtgacatccaagagctgatcttttgattttgttctgtctagacgcactctgacagcccctaacttcgcatcgcagctagccgaataccgacgcgagcgcgacgggaagccaccaccgaacaaaaagttcaagtcttccgctgctcccaagggaacgaagctaccagttgggtatgaagaccgcgccgcggcgcgactacgcgagagcgaggacgccaaatctgctgagcgcgaggcggagttgaaaggactggaagagaagttcaaggagggtcttattgatgaggagacgcttacgaggtcacgcagggagcttggggttggaggggacttgagcagtacgcatatggttaaggggttggattgggatttgctgaggaggatcaaagccggagaggatgttgagcggacgaaggagaagagggatgaagagggagacggaggagcagctgctgatgatgagcccgagaaagaggtagacgtggatgaggagtttgataaagtgctcgagcaaaaggggggtgaatccctgccgtctgcgccgaaaggaaaggagaagaaaaggggaaatatggcgccgccgccagcgcctactcaaactcagagaaagacgcgcgatgagattctacgagaactgaaagcgagcagggcggctgcttctgcccctgcagctgcccaagcgccagaatccgttctcggtgcgcggttcaagaagattggggatacgaagccagagaagaagcggttcatcgagcaggacgagaacggccggcgaagggaagtcctcctgattacggacgcggatggcaagacgaagaggaaaaccagatggctggataaagcggggaccacggcgcctgccacagccacagccaccgctggcgatcccgtctcggagaaggagaaggaatccaagccaaaacctctaggaatggaagtgccggccgacgttgccgccaagatcaaagccgcccagactgcggaagaagaagacgatgatatcttcgaaggcgtgggtgctgactacaatcctctgggcggtgacgggtcagaggattcatccgaatcggatgaggaagaaggcgacgtggcagctgaagtgaagtcacggcaggaactcgggaaggaaaagacaacggaagaaccaaccatggaggcggccagaacagagccggcaagaccgcggaactatttcgcaacgggcagtacagggaaggaagcagagcaagtggagagtgaccgtcatcgcaccaacccgctaaccaaggacccgaccatccttgccgcgctcaagagggccgctgccttacgacaagctgctgaggggtcggatcacattgccgacgacgaagaaggcgtggacaaagaaacgctcctccgacgtaagaggttccttgaggaagcgcagcgccgcgaagcgctcgacgccatggacttggactacggttttggaggcagtaggattgaggatgacgaggatgacgaggggatagtcctagaatcagagcgaggcgggaacaagaggaagcgtggtcccaagaagagaaaggggaataaggacagtgcggcagacgtgctgggggtgctggaaggccggaagaacaagtga

SEQ ID NO: 24577 - DNA, 3005 bp, Emericella nidulans
attcatctaccaactcaacgtgattacccgtccagctttgacctaaacctccataatccccatccacaaggcaccatgggcagcacatcttccgagcccacatacgacagtgagcccatcgagattattggcctttcgtgcaaggccgctgggtccgcagacaggcccgagaaactatgggagatgcttgcggaagggcggaatgcatggtcagagatccctgatttggggtttaaccacaaggccgtgtatcatcctgatagtgagaagctgggacgggacgtctttccttctagacttgagtttcagtggtgaagtggatgggaagcaagaacctggccagactaacgcggaatcttcgcagacgcatgtcaaaggggcacattttctcgagcaagatgtcgggctcttcgacgcggcattcttcaattattcggcggagacagctgctgtacggtccctatgaacgatttcaggatgaatggccaggctaactgagcatgatgtacggatagaccctcgatccgcaattccgcttccagctcgagtccgtctatgaggctcttgaaaatggtaccaccctccccccaacagcccttgcgcaaggctgaacagagagtacagctggcctgacgattccatccatcgccggcaccaacacctccgtctacgccggcgtcttcacgcatgactaccacgaaggtctgattcgcgacgaagacaaactgccccggttcctccccatcggaaccctctccgccatgtcctcgaaccgcatcagccacttcttcgacctcaaaggagcaagcgtgactgtagacaccggctgctcgacggccctggtggccctgcaccaggccgtcctcggcctgcgcacgcgcgaagcagacatgagcatcgtctctggatgcaacatcatgctgtcgccggatatgttcaaggtgttttcaagtttgggaatgctaagccctgatgggaagagctacgcctttgactcaagggcgaatggatacggacgggcccagggcgtagcgacgattatcgtgaagcgactcgcggatgcgctgagggacggggatcccgtgcgcggcgtgatccgcgagagctatctgaatcaggatggaaaaacagagactatcacctcgccgtcacaggaagcgcaggaggcactgatcaaagaatgttatcggcgcgcggggctgtcgccgtcggatacacagtacttcgaagcgcatgggacaggcacccccactggagatccgattgaggcgcgctcaatcgcgtcagtatttggaaagaatcgagagcagccgttgcggattggctctgtcaagacgaatatcgggcatactgaggcggccagtggtcttgccgggctgatcaaggtcgtgctggccatggagaaggggttcatcccgcccagcgtaaactttgagaagccgaatccgaagctgaagctggatgaatggaggctaaaggtggcagatactttggaaaagtggcctgcaccggcggagcggccatggagggcgagcgtgaacaactttgggtatgggggtacgaacagccatgtcattgtggaaggggtgccgaagagattatacacaccggcaaatggaaatgagaccggccagataaagcatgagacagagagcaaagtgctcctcttctctggccgcgacgaacaagcctgccagcgcatggttgccagcacgaaggagtacctgaagaagcgcagggagcaggatcctcccatgacacctgaacaagtcaagaccctcatgcaaaatctcgcctggacattaacgcagcaccgcactcgcttctcctgggtctccgcacacgcggtcaagtactcgacctccctggacaccgtcattgacgccctcgagtctccgccgccggcctcaagacccgttcgcatccctgactctccattccgtattggcatggtcttcacggggcaaggtgcgcagtggcacgccatgggccgcgagctgatcgccgcgtacccggtattcaaggcaaccctagacgaagcggaacagtatttgcgccaactgggggccggctggtccctcatcgaagagctgatgaaggatgcagccacgacaagagtcaacgacaccggcctcagcatccctatctgtgtcgccgtgcagatcgctctcgtccgcctgctcaaggcatgggggatcactgcctcggccgtgacatcccactcgtccggtgagatcgccgccgcgtatacggttggcgctctctcgctgcgccaggccatggccgccgcctactaccgcgctgccatggcagcagacaagacgctgaagagcgcagaggggccccaaggcgcaatggttgccgtgggtgttgacaaggctgccgcgcaggcatacctggaccgcgttgagaaatcggcaggccgcgctgtggtggcatgcatcaacagccccagcagcatcaccattgccggcgacgaggcagccgtcgtcgcggtcgagaagttggccactgaggagggcgtctttgcgcgccgactcagggtcgagacgggatatcactcgcaccatatggagccaattgcgagcccgtaccgggaggcgcttcgcgccgcattggcccaggaagatgctgagtctggtaccaaggaccagactgatgtcccgggctttgcggatgccactaaaccgggcagcctagaccacaccgtcttctcctcccccgtcacgggcggccgtgtcacagatgccaaagtcctctctgacccggagcactgggtccgcagtctgctccagccagtgcggttcgtcgaggccttcactgatatggtgcttggctccacagatagcagcaatattgacctgatcctcgaggtcgggccgcatacagcccttggcggaccgatcaaggagatccttgccctgcctgacttcagcagcaggaatgtcagcctcccctacatgggctacctcgttcgtaaagaagatgcgcgcgactgcatgctc

SEQ ID NO: 24578 - DNA, 865 bp, Emericella nidulans
atggggagattcgctaacatcgacacccgagacccagacgttttcgtgaccacctggttcctggtcgttgttgctgtgctcagtgtcctgattcgggtggcgactaagtgcagggtcttccggcagttgaccagcgatgattatctgataatcgcagctttggtacgtatcccgcactggcaaagggaacccgaggatatctacccagtgatcttcagtatcttacacagtctcgtcacaggctctttgcattgcacagtccggcgcgatctccgctgcagtagcgcacgggtatggggaccgattcacgaccgttgcaagtgcggatttcgtccaggtcatgaaggtatatatacgggccatttcattgctgagtacctgatcgacagtcctaggcctgactatactgagaccgctgccagtgccagtacgctgcctctatcctgtatatcgcaagcctctgcctgtccaagctctcgctctcaacattcatccacaacttgaccccagtgcacagagaccacctgctggcggctgtcctgctggccgtcatcgcccttctcggtgtcactggtatcatcggcactgcgttccaatgccgcttgccacatccatgggattactggtggcagaaatgctttgacttggtgagtaacgcccggcgccaattgagctcgtataacacccatcctgccgatgcactgcaactttcgctgaccgttgcgaatcttgtctacagtgcgcctgggcttatttcctgtccgcggcgaacatcgccaccgatgtcgcgattatcgtgcaggctctcctcctgatctttggcatccaggcggcatggaagaagaagctcatgttcgccagtatt

SEQ ID NO: 24579 - DNA, 280 bp, Emericella nidulans
gcctcatgctgactgcgtgtgttttttctcgcattacagggtcaaccttcgcacccagaagcgcctcgccgcctccgtggttggctgcggcaagcgcaagatttggctcgaccccaacgagatgagcgaaatctccaatgccaactcccgccagaccatccgcaagctcgtcaaggacggcctcatcatccgcaagcccgtcaccatgcactcccgttcccgtgcccgtgagctcaacgccgcccgccggatcggtcgtcaccgcggtctgggtaagcgc

SEQ ID NO: 24580 - DNA, 279 bp, Emericella nidulans
tcttgccggtctgccattcgtcttgccatcatcatgggcctcaatcccaatatccccgaatcccaattgtccgacgcgggcgaacgcgaacaccgcgaacgcatcttcaggacagcgtacacctttgaccgcatgtggacggcaaagcttgattatccttgcaccatttctgacgatgagattgaggttagtctgccgtcagacccatcaggtctgggtgacaaaggggctctggacttcccgaactgaggctactctgtcgcaaggatagggctcgcc

SEQ ID NO: 24581 - DNA, 249 bp, Emericella nidulans
gcagttgcgaaagggcggatgcgcgagttctaccaatgcgactttgatatcgctggttcctacgaccctatgatcccagatgctgaggtcctccgaattgtagtagaggtttttgaggcgctcaacatgcgcgactatatcacgattaagcttaaccaccgaaagattcttgatgggcatgttggagcgcgtggtgctcctggggataagattcgctcaataagttctgcggttgaccagcttgattag

SEQ ID NO: 24582 - DNA, 765 bp, Emericella nidulans
tgtaataaggtcgttgcaacagcaaaaaaacggccacacctcaaggtgatgtgcggattctctcggcgcttcgacaagtcctaccgagccgcctacagaaaggttgaaaacggcctcattggacgcccgtctatcctgcgctcccagacgtgcgacaagcacgacccatccgggttttatgtcgagtacgcctcttggtctggcggcgtctttgtcgacatggccgtgcacgacatcgacctgacactttggttcttcgggtctgatattatccccaagtccatctccgcgtacggaatcacggcggtgacgcctgatctgaagaaatacaatgacttcgacaacgccgtcggcgtcgtcgagttttacggcggaaaaatcgcgtacttctactgttcaaggatgatggcgcacggacaggaagacgtgacggagattattgggacggaagggaaactctccgtgaacttgaacccggccaatgacttggtcaattactaccatgctggtgggattacacgtgaagtccctgcgacctactggggccgcttcgagcaggcatttgtgaaagaaacgaatgaatttgtggccgcttgtctggacgatacgcctcttcccatgaagctgagcaacgcggtcaaggcggtgcagattggtgcttggttgcaggaggcactcgttactgggagacagatcaagtttgatgaggcaggaaggagggtggagagtgccaggatcataggccgtctggggttatggctttga

SEQ ID NO: 24583 - DNA, 300 bp, Emericella nidulans
tgggcaccagcgctaactgttccgttacaggctcacgaggttaccttcgagtccgccgatgctggcgcctcggccacctaccccatgcagtgttccgctctgcgcaagaacggtttcgttgtgatcaagaaccgcccctgcaagatcgtcgacatgtctacctccaagactggtaagcacggtcacgccaaggttcaccttgtcgccatcgacatcttcaccggaaagaagtacgaagatctgtccccctccacccacaacatggatgtccccaacgtcacccgcaaggaataccagctc

SEQ ID NO: 24584 - DNA, 339 bp, Emericella nidulans
aaagggacacgagatcgatcatggcgcgtagcaacgacattcctgtcaattcccgataggaactttgaagacctactgctacatacagcgtctgacgaagaggactatttgaaactgtggaatcgggacaagaagccttcaaaggaaaccagggatgccctgacctatttaataaggctttctacaaaggagtcagagcatgaggacgcgtcgaatagcattttcgactggtacgaactcgagattcgtcggcattttttgcagaatttcaaggaagatctgtccattgtgagctccgcctcgcacccagacggtctcttgagagagaagtttcccgac

SEQ ID NO: 24585 - DNA, 1035 bp, Emericella nidulans
tcgatggatcctcaaatccgtcttcaattagagtctgtctatgaagcgttagaaaacggtgcgggcgcccaattgaccctcacgaaccagttgctgacagcggttcagctggaatcacattgccggacgttgcgggaagcaatactgcagtatatgccgctgtgttttcgagagactaccgcgatggtatcatccgcgacgaggataggctgcctcgcttcctacctaccggtaccggagacgccatgttctccaatcgagtgtcgcacttctttgacttgcgagggcccagtatcactctggacactggctgttctggaggcctggttgcacttcacgagggagttaagagcctgcggaccggagagtccgacatggcgctgatctctggcgtgagtgtcttgctcaatccggatttcttcaaagccatggggtctgttgggtaagtaatatcttgttaccttccaggagggcctgactgacgaaggaaggttcttttcacctgacggtaagtcgtatgcgttcgactcgcgggccaacggatatggccgaggagaaggcattgcaacaatagttatcaagcgtctgtcagacgcgatcatcgccggggaccccatcagagccatcgtgcgtgaatcagggttgaaccaagacggcaagaccgaaacaatcaccacgcctagcgaggaggcgcaggttgccttgatgcgagactgctaccgtcgcgcggggctggattatgcggacactcagtatcttgaggcccatgggacagggacgtcgacgggtgacccgatcgaatgccgtgcgattgctaccgtgttcaaggacagtcggtcatctgaacaaccgctgcgcattggttctgtgaagacgaatgttggccacacagaggcggccagcgggctcgcgagtctcataaaagtggttatggcgctcgagaaaggcaagatccctcccagtatcaactttgagaagccgaatccgaagattgcgctggatgaatggaatctacgcgtggtgactacgttggag

SEQ ID NO: 24586 - DNA, 600 bp, Emericella nidulans
cagatctggtattggcaccgtgcctccgaccccggttcccgcgcgcgcaacatgtatggaggcgagcccgaagaatgggacgtcaccgctgaacaaccggccgacctggtcatcatccaaatgggcggtaacgaccaccggcatccgaacgagatcccaggagagaacttttaccagggatacgttgatctcattgagaatatccatcagcattggcccgacgcgtcgattgtgattatggtgtgcctccttgaacccgaccaaatggaaaaccgtactaatatcgtgatacagacacaatggggcatctggaaccaagaaggcagcgaatatactcagtcagtgatctacgaagaagagatccagcgcgtctacgagcatttcaaagaccgcaaatggcgcttcgtctacctgttccacacggacggcattctcggccacaacgatatcaacccaaagaaccatcccacggatgttggacacatcaagattgcaagccatctgctccaatggacgaatctgatgctggggtgggagttgaatccgcgcggggagatgcagcacggcacgctttattggaatgatatggagggttattaa

SEQ ID NO: 24587 - DNA, 273 bp, Emericella nidulans
atgggtggacagaaccccggtccagtccccatggatacctcttccgacgaagcttccttcaacgagcgtgctaacaaagccattgatgattttgaggctgtccttctggaagactacgaggacaaagactatatcaagggtgttcttaagagcgcacgggctcgggcattaggcgaggcaacagagagttcgttccctggtggcgagccaccggacgaagctgttcttcttgacgcgctgaagaacatgatcaaggggttgaggggggagtaa

SEQ ID NO: 24588 - DNA, 1774 bp, Emericella nidulans
ggattctgcgggacaatagccattcctgctaatgctaacgtcttacattccgagcccaaggcacatttgccttcaatgctgaccctcatttcccgtttgtcttcacgacgagcaggcactcgatttaatgctcgcggtcttgacgacgatggaaatgtggccaacttcgtcgagacagagacaatcttggtttgcggaacatccggggtggccttctcttatgtgcaagtgcgtggctccgtcccaatcttctgggagcaagccacaggatttctccccgggcaacaaaagattgaagtgacccgatcaattgaggctactcaacacgcgtttgacaaacatatccagtttttggagctagaatatggcgctgtccatgtggtcaaccttctatgtgaatcaaaaccgggtgaaattgaactttcaacaaggtttcgcgaacatataaggaggaatctcagcagcaaaaaatcaaatctgccttcagatcatgctctgttacgtactacagagtttgatttccatgcagaagctcggggccccctaggatatggggccggaaatcaaataaagcacgagcttacacaatctctcaatggctttgcgtactttctctctaagcaaaaccgtccgtctgagatacctggaacatccgttgttctacaacaagaaggagtcttccgcaccaattgcctggattgccttgaccggacaaatcttgtgcagaccatcattagcttactggcccttgaatcgttcctgtcgcaagaaaacagtgtgctatactctgaagttcaccatcggcactccatactctgggctgataatggagatgctttatcaaagatctacgcgggcactggtgctctcaaaagctcgtatacacgacatgggaagatgtccattgcaggtgccttggccgatgcgcgtaaaactgccgccagattgtacatcaacaacttctcagacaaagctcgacagaggacaatcgatcttatgttgggtctcctgccagatcagctgccagtgcatctctacgatccaatcaatgacatggtctctgctaagctggatcgaatatcatcagaattcacttccaagaaattagccgatatctggaccggaacgttcaacgtgaatggacgtgtccaaggacccggtactgacttgagtccttggttatttcccgaggacaatgaccagcgcaagtgtccgactatattcgctgttggattccaggagattgttaccctgagccctcagcagatcatgtcaacagaccctacaacccgtaaatcctgggagcttgccgtcatggattgtttaaactcacgcgcagctgcgcggggatcaccgaagtatgtacttctgcgatcaggtcaattggttgggacagctctgatgatctacgtgcgcgaggatattctcagagacataaagaacgtggaaggaagtgtaaagaaggtgagcggaacttgctatcctcttataaaactcactaattcggtccctgcagaccgggctttctggaatagctggtaacaaaggaggctgtgccatccgcttcgaatattcgaataccaggctttgcttcgtaaccgctcatttagctgctggctttgcgaattatgatgaacggaacaatgactacgaaactatttgccagggacttcgctttcagaggaatagatttattgaggatcatgacgctgttatatggctgggagacttcaattataggattggccttcccaatcagacggttagggacttg

SEQ ID NO: 24589 - DNA, 219 bp, Emericella nidulans
atgtctgggggattttactcgtcgcccttctgggctggctatctagagactcagcggagcaggctacctgtgctcccagaaatcgacgatggcttgtctcactgtgtcgtgcgctttcttggatacaaccctggtagcatgcagctgcagggcaccaacacatacctagtcggtactggaagcaccaggatactcatcgacactggagaggtaagacct

SEQ ID NO: 24590 - DNA, 469 bp, Emericella nidulans
ctggcgcacgcgggcttcttctacaacccctacgagacgaaccctgacaacacaacatgttttctctgcggaagagcactcgacggatgggaggaagatgacaacccgatcacggagcacttgaaacacgcaaaggattgtggctgggccgttatgatggatattcagcagcgtagctcgaatccagccgagatagaagaccctacaagtgagccgatagtccaggcaagactagcaaccttcggcgactcatggccacatgatggcaagaaaggctggatatgccaatcagacaaggtaaggcagcttttttgcaatcctaaggcttgtatgtctaatggtatatttcttgatggtagatggttgaaggcggatggtacttttgtcccaacgaagaaagcgccgacctcgcgagctgcgcctactgcaaattgtccctagacggctgggagcccaaagacaatcctta

SEQ ID NO: 24591 - DNA, 312 bp, Emericella nidulans
aagatggaagacatgcgcggagtggaccacgagctgtcgcgccgggagcgcatgcgtaaactcgagctacggatcgacgagctcacacgagaagtcgaatcagcaaagaccacttcggagatgtttgacgaagaggtcgtccgggaagtggctgactttgaaagaatcaaagcaatcgaattccgagactccttgggcgcgctcgcagaacaacacattgagttttatcagggtgtactaaatacttgggaacgatttgtggctgagatggaggaggaacagagtacgggggacgctcacccaaacgcataa

SEQ ID NO: 24592 - DNA, 483 bp, Emericella nidulans
atcccccaatgcaacaatggctcctcattatccactcctgggctgacggatgacatgacccctgcttctttccaatcccgcagcgaagctattacccctgcaacaaccgagcagccatcatcgtttcaatcttctgccctgtcccccagctttgacaagctatccttcccctcctccccccaagatgcttcgttcgatgactccctccgacgcgacagtcatgcgaagtctgaggtcagcgactcgttcagtcgaggcgtcactagcaacgcaagcagcttcacttacaacaacctccgggactcggaaatgagcggtgtgtcccagacctctaccagggcgacgtcgcctgacattggaatggccccgtctctcaagaacagtgtcagttactcaactctagccgaggagaacgaggagacagaagccaacgttctggagaagacatatgctcatgaactgatcttcaaggatgaaacgtga

SEQ ID NO: 24593 - DNA, 579 bp, Emericella nidulans
agcgccaacggactgaatcccacaaggcctggatcaaggacattgacgaggtcaccggctcaaagctgaccttccccatcatctccgatcccgagcgcaagatcgcccaccagtacgacatggttgactaccaggacaccaccaacgttgactccaagggtatgtgggatctaggaatatgctgaacttgagcttctctctaaccactttcccgcaggtatggctcttaccatccgttccgtcttcatcatcgaccctgccaagaagatccgcctcatcatgacctaccccgcctccaccggccgcaacacggctgaggtcctccgtgtcgttgatgccctccagaccaccgagaagcacggtgttaccacccccatcaactggcttcctggtgacgacgttgtcatccctcctcccgtctccaccgaggatgctcagaagaagttcggcgacgtccgtgttgtcaagccgtaagttcacccgagcctggagcattcatcagttgtttggagcagttgagcagttgctaaccatctctcgtgcagttacctgcgtttcaccaacctcaagaaggaataa

SEQ ID NO: 24594 - DNA, 458 bp, Emericella nidulans
actgcatgatctggaatagaactaagataaactatgttttcgtctttgaatacgacactagatccgcactggattggcgccaattggccgaggtatgtttactcaatgatacactttttcctgatattaactggcgacagataccttgcttctttctttgcatataaggcctatatatgtggctgaactgtctgacagacaatgccatgtacatttactgggctgtagtccttgcaggagccactgaggctgtgctggatctgccgttacgcgtactataccatcgaagacgaaaatggtgcgcgaattataatgttagacaacatgtacgtgatgcgctttctactgctgatatggttacgtggcgtcatctactggcagctttgtaccagtgtgagtgtcgggactcttatttggctgacatgtactggaatcagacttatgcattgagcgagagt

SEQ ID NO: 24595 - DNA, 1516 bp, Emericella nidulans
ccttttagcgctcaccccatggctccaaaaatacttaaagacggcacggtgctgtcctataacgcatccacgcagtcgataaaggcacttcagcgcgcttcgatcttgattgtcgatgaccgtattaccgccatagaagagaacagcgatgatctctctgctccgtcaagaaccgagaccattgatgtctcggggaagattgtctccccggggttcgtcaacacacatgtccatgtgtgggagactgtctaccgctccatgggacctgacacgactctggcggagtactttggctgggttagccacatgtcggagatcacacaggctgcgttcacgccagacgacatttacataagctctgtggaggggtatgttgaaggtctgaatgcgggtgttacgtcctttgttgaacatgcgcacagcaactggtcagaacccgtaatggaatcgggctaccgggcggctgtcgatagcggggcgagggtgtggtggtgctatgatgttaggcataaggagggattttctagtgacgaacagtgggaagcttacggcgctctcatcaaagataaaagcagtccccgcgtcctgcctgggctagccctggacgggctggcatggactgttatgaacggcgatggaaagggagcggatctcattcgtgagaaaaaggagtatgttcccaatcattatgctagagagtgatgctaaccgcagcaggaagctgggcttgcaagccctcactatgcaccatcttggtggaccgtggcctcccatgaatacatcccccaccacagtctgcgctgacaataacatccatgaggccaatcttccgatcattttctcccatgcatcctttcttaccgactcagacaaggacctcatgcgtaagcataacgtctttatctccatcactcctgaatccgaatgcctctacgggcagggccaggagaccggccacgaggtgtccgaccaggcatccctgggcgttgacacgaactggaatttctctggggatattgttggccaggcacggctttggctgcagctggtacggttccggaactacaccaagaccctcgcagctggcctgataccaaaggcgagcccgatggccgtggagcaggctttcctgcttggcacaagacagggaggccgtgctctacgaagagacgatatcggcgtcattactgtcggagcgaaggcagaccttgtcatcttcaatggcgatagcccgagtatgctaggttggagcgaccccatagcagcggtgatactacacgccagctccggagatatagagcatgtcttggtggatggggaatggaaaaagaaggatttcaaactcgttgacctgcctaccggtgcatcgtgggacgagctgcgtgagcgatttttggagtcctcaaagcgcatccagcctcatttcaagactccgccgcccctaccggagaagctttttggtgtagctgacttcggagaggttgagaatgttagtactgtctttaaaccatcgtga

SEQ ID NO: 24596 - DNA, 1614 bp, Emericella nidulans
acatataagtcgcaggttacaagtaacaataggcattcgcgagtttatagcgagaccaacctgccgtccaacccacgggatgttgggaagactatgtcccgatctgtgagcgcgatgggctctagcacgagctccgacttccataatgatgagcgctcttttcattacgcgcccactcgggcgtatcttactcaccgcgcgtcggtctcgtctatacagcagaatcacttagttccatctgtgaaggaacgcgcatcctctaattcgccttcgattgaaggagtagaggaagaggaggcgaaaatctcgaatatggaagaattcaatactgcttatccagttcatgaccccccttctcgctcccaatcccagctccaggtgcgcgacctgcaggatcagatgaaagggcttcacatcaagatctcgactctgaaggtgaaggcacaggaggatggtctgcggcgccgcagcctacagagtttgcgcacgcccagccctttgacagccgcaaaccattggtacgccaatcctcttgagcacactgcacgccgcagtcctctacatttgagctcagaatatgaccaatacatgaactcccccatcaacagccattccagcggcagcgggcagacgtcaagtagcaataccgattcgactgtccttgtcccggagagtaggccttccgaggctctgcagtcgtcggacggcgctatcgttgcagcctttgaactaaccgaccatgagagcgatcactcgaccgcggaaagcctctacgaagatgcagaggaggacatcgaccgtgaggcgttagaggagattctacgagaacctctggatgatgacctcgctgatggcgagctggagtcgcttccagcggttgacgatactccgcacgaagaacgtgaggacgcttttgactacgagcactttattctgcatagcgcattgggcaattacacacagacgcgactccgtcggcaaagcaatgcgtcggaaacgtcagttgagaccacccggccaatcaacaagcgccgctctatgcgttctataaagcattccaggtccaacagcaacaactctatatccacgatcgcaacctttgcaacagccgcggaaggcagggacgacatcgaaagtgttctgtactgggaccggaaatttaatgatggtacgctttttactctcactatttctgaccaccaaaaactaataaccctagaactcaaacaccgctacgtagaacccgaggatgaacaaacagacatcgaccctgaaccagaacgcaaccctcgcaaatcgctcgcagtcgaatcggtcgcctcacagcgtcctgactctgcagcaaccggctccgcaacaccaacgtcgcttgcctcgtcgcttgtctcgacagtgcgtgcggcagcaagcccacatccaaactccacgaacagccacctaggtattaatgaagacgacactcggttgctcgaacagctgttcaaaagtctaggcgacgtttgcatgaacttgcaggaacttacgacgtcaccggactatgacgagaagcaagcgaagctactcaggcgacggttacaggccgcgaggcgcgtgcttgatgaaaagattgattga

SEQ ID NO: 24597 - DNA, 532 bp, Emericella nidulans
gaagctttcagagttagactatccacctaagccccctgttgctactgacgcaggatctgaaagtaccaaggctgtgattgagtccctggcgaaggctcacgccaccgagaactcgaaaatcggcgtcgatgttgagtctatcgatagcatcaatatctcaaatgagactttcattgagaggaattttacggccagcgaacaacaatactgccagaatgccccgtcgccgcagtcatcgtttgcgggaagatggagcgcaaaagaggctgtcttcaagtccttgggtgtctgcagtaaaggtgctggggctcccttgaaagacatcgaaatcgagaatgactctaacggggcgcctactgttaaggtaagatcactcaacatgtttcatgttcagttttacatttgagctaacgatttctagctccatggtgttgcggccgaagctgctaaagaagctggtgtgaagcatatcagtgtcagcatcagccacagtgacatgcaggctgtcgcagtggcaatctcacagttctaa

SEQ ID NO: 24598 - DNA, 843 bp, Emericella nidulans
atgcgatcaccggactcgtggctttctcttaagccccggaagaccgcgtgggtggcgctggccgccatttgcctggcctgcactctcttgctgctctttcatcagtatgaggacatcccactgtcctcatcctcaaacctaccagccaccaaagtcctggaaactcagactagtggtgatttcagaaacacgccaaccactccaagcagcagcagcagcagcagcagtagtgccaccaaatacaaccccagcaatgccgtgcaaggcgatcgccgctgtcaagcctttgctgaccccggcaacgtcgccttcgtgatcaaaaccggcgctactgaagtctacgagaaactccccacgcagctccttaccacactcggctgcgtccaagacttcctcctcttctccgaccttgatgagcaaattggtccctaccgtcttcgcgacactctcgccgacttcaacgagactctcaaggccacgctccctgatttcgagctataccgtctgcagcatgagttccgtcgtacaaaccaggatatggcgcccctaaagggcgagcatgcatggaagctcgataaatacaagttcctgcatatggtggaaaaggcgtggctggagcgcccgggtcgcgattggtactttttctttgagacggatacgtacattgtgtggactaatctggtgctttggctgcaacgtatttcgccgcctactgagccgctatatctgggctctgttgcgtactttatgaatgatccttttgcgcacggtggctccgggattatgatttccggtaagctccttgagcagttcattggtgggggagcccgggctcgccaataa

SEQ ID NO: 24599 - DNA, 1473 bp, Emericella nidulans
atggtaccgaaccctgtcttcctcttgacactggccctgagcctggcaaagacctcgctcgcggtccgcggttactcgcgtcgagtcgacacgccgcagctgccgtttgaccccaataccactccgtactgtacgtggtggattgacaatgatgggtcaagctcgtgctcggacatcctctccgactggattatctccctcgatgactttaggcgctgggtgggtgctcccctccaccgatatgggggccttcgattggcctaactcctctctagaatccatccattactgctggttgcggcgggttagagacaggaaagtcctactgtgtagaggcgtggggagagcccgtgcctacgactagtacttctctgacaactacggctgtccccataacgacgactactaccaccaagaccggaaacgcccctggccccacccagtcgggtcaggtcgagacgtgcaaccgctgggaccttgtccaggacggtgatacctgcagcgtgtaccttgaaaaataccccggtctgtcgttggcgaagctggtggagtggaatcctgctattgggagtcagtgccagaacctgtgggttgagacatatgtaagaaacttccatgcgtccccgtacgcggaagaagacatacgttgctaacgagcatatctagctctgcacaggcatcgagggatggtctgcacctacgaccaccacagctacgactactacctctccgccgggtaacgggatcccaaccccaacgcctacgcaaccaggcatgatcgcggactgcaacgcgttccatgaagtgaaatctggcgacacgtgcgcgaacatcgcccagagtgcaggcatctcggtctcgcagtttacagcgtggaactccggcgtcgggacgggctgcacctcgctgtggctcgggtactttgtctgtgtctcgcgagtgggtgctacggcgacaatgactacgacaaccacaagcgcgggtaacgggatcgccacgccaaccccaacactccccgggatggtggcgaactgcgatgctttctacctagtgagatcaggtgacgggtgtgccgcgatagccagcagcaagggaataagccttgcgcagctttacgcgtggaacacgaatctcgggaccagctgcacgggcttgtgggccgagtactacgtctgcgtgtccatcgtaggtgtgtctcccactacaacgacgaaaacaaccacacggacggctacgactacgagaaccaccacaacgcagggcaatggggtggctacgcccacgcctatccaaccgggcatgacgacgtcgtgcaagaagttccacaaggttgtctcgggagaccagtgcggaacgattgcctccaaggcgggcattacacttgtcaactttctgcggtggaatccaggtgttggcgggtcagcttgttcctcgttgtggcttgggtattatgtttgcattgctgtgctgtga

SEQ ID NO: 24600 - DNA, 786 bp, Emericella nidulans
ttgaagtttttcagtcatgttgactcgacgttctctgtcagtatccttaccgtcggctggtggacaatggtgacaggccaatctttcgtcctctattctcggttacatcttgtgcttcgagacgaacggatccttcatcgcgttttgtacatgatcatagcaaatgtcttccttctgcacgtgccaacaaccgtcttgacgtacggggcaaatgtcgtcgctgacgagccttgggtagtaggctataacgtcatggagaagattcagatgaccgggttcacgattcaggaagtcatcatctcagtactatacgtctgggagacaatcaggatgcttcagctcacctccagtcgtgagaaccggaaaataatgcatcagctggtcgggatcaacgtgatgattgtcacaatggatttagtgcttctgggacttgagtacgccagcttgtatgctatccaaataacgttgaagggggtcgtctacagcgtgaagttgaagctggagtttgcggttctgggaaagctcgtcgacgttgtccatggcaataaacgcaccggtttagtcgggagcccgatccatctatgctctctccaggcttcccgtcccccaggtggagtgtcggcggccgtccgtggcggggtcaatctcggtcacagctcaatgatgaacgctgcttcaaaagcgcctccatctcaaacaaacatcgatgtgccggatgacaagattttagcaatgacggaagtttcaacctgggttgagagacgcccgagaggcggtgatctttag

SEQ ID NO: 24601 - DNA, 956 bp, Emericella nidulans
cccaccagccttgaagctcccttcctggaacagttcacggacgactgggaatcgaggtggactccttcgcacgccaagaaggaagactccaagtcggaggaggattgggcttatgtcggcgaatggtccgttgaggaacccaccgtctacaagggtattgacggagacaagggtctggttgttaagaatgtcgcggcccaccacgccatctctgccaagttcccgaagaagatcgataacaagggcaagactcttgttgtccagtatgaggtcaagccgcaaagtgagtaattctccttgttggaactgacgcatggtgttgataacctctttcagactcccttgtttgtggtggtgcctacatgaagctgctccaggataacaagaaggctcttgcggacgatttctccaacaccaccccctacgtgatcatgtttggtcccgacaagtgcggtgccactaacaaggtatgaccagccgctaaagttttatccatggcatccacttactttctgcaggttcacttcatcttccgccacaagaaccccaagactggtgaatatgaggagaagcacctgaaggctcctcctgctgctcgcaccagcaagctgagctccctttacaccctcatcgtccgccctgaccagtccttccaaattctcattgacggcgccgctgtcaagaacggcactctcctcgaggacttcaaccctcccgtcaaccccgagaaggagatcgacgaccccaaggacaagaaacccgacgactgggtcgatgaggccaagatccctgaccccgacgctaccaagcctgatgactgggatgaagacgccccctacgagattgttgatgagtctgccgagaagcctgacgattggctagaggatgagccgaacagcattcctgaccctgaggccgagaagcctgaagactgtccttgtatctacgtcttctaa

SEQ ID NO: 24602 - DNA, 827 bp, Emericella nidulans
ctcactggccattctctggaagcagccattctcatctggccgttgtgtcaaatgcccatccggtgaaatatcctcactgcttgagcagaggatacgtgggctcaaagggtcacctaaccttgccgagtctggccatgtcttgtctgtctgtgatggaattgttcgcgcgcgtggtttgacgaacgttcaagctgaagaacttgttgaatttgaatctggagtaaaggggatgtgtatgaacctggagtccaatcatgttggtattgtgctttttggttccgatcgtcttgttaaacagagtgagcctgtctggcggactggcgaaattgtggatgttcctgttggtcctaagatgttaggacgtgtggttgatgcactgggtaaccctattgacggcaagggacccatcgagactaccgaaagaagtcgtgcccaaatcaaggctcctggtattttgcctcgccgttccgtcaaccaacctgtccaaactggcctaaaggctatcgatgccatggtgcctattggcagaggccaacgtgaactgatcattggcgatcgacagactggaaagactgctatcgccctggacacaattttgaatcaaaaaatatggaacaagtcggatgacgaatcaaagaagttgtactgtgtttacgtggccgttggacagaagcggtccacagtagctcagttagtcaagaccctggaagagaacgatgctatgaaatattccattgtcgtggctgctacggcatctgaagctgctcctctgcaatacattgctccttttgccggttgtgcaatgggggagtggttccgagaccatg

SEQ ID NO: 24603 - DNA, 207 bp, Emericella nidulans
atgaagaccactttcctcgtttccctggccaccgctgccctcagcagcaccgccgccgccgtctccgtcagcggctcggccgagggtttcgccaagggtgtgaccggcggtggtagtgccacagccgtctacccagacaccatcgacgagctggtctcgtacctgggagacgacgaggcccgcgtcattgtcctctctaagacgtac

SEQ ID NO: 24604 - DNA, 209 bp, Emericella nidulans
aacgacgacaagcccatgaagctctcgaagcacagaagaaactcaagcgtcctcctgttggcgcccccgaagcacccggacgccccgtcaaggctgccaagggcgctggtctcaagcctacttctggcgctgcggcagccgtcatcccggacgaatatctaccttccaataagattctattcctgcgggagctccccgatacagcggac

SEQ ID NO: 24605 - DNA, 678 bp, Emericella nidulans
atgactaccgatgattttgagcctctgctctgcttaggcaagggatcctttgggaccgttttgctggtgcgccatgctctcacaggaaagctttacgcgcagaaacagttcaagaaagcctcgattacggttcacaagaaactcgtggaacaaacgaagaccgagcgcgcgattctggaaagcgtgaatcgacaccccttcgttgtaaagctcttctacgccttccaggaccacgaaagactttaccttgtcctcgagtacgcccaaggaggagaactcttcacccacctcgcgatggaacgcatgtttgacgaagacgctgcggccttctacatggccgagatggtcctcgcgttggagcacctacatcagaacgtcggcgtgatctaccgcgatcttaagccagaaaactgcctccttgaccgcgaggggcacctccttctgactgacttcggcctcagcaaaatcgccgtgggcgacgacgaccgctgcaactcttccctcggcacaatcgaatacatggcccccgaagtcattcaaggcaaaccctatggcaaagcatgcgactggtggtccctcggcgctctgggatacgaccttctcaccggctcgccaccctttaaggcaaataaccacgcgaagctgcaagagaagattctcaaacagaaactcgtccta

SEQ ID NO: 24606 - DNA, 836 bp, Emericella nidulans
atgtcttcggaagctgcccccaaggtgcccgtctactccccgaatggtatgctggcagtaactgagtctacagctcacagcactctgaaccaactaacatccgcatctgcttaattctcgatacatgtactaattcctttttgaaacaaacacagacctcaaatcaacaacagacgacgccttagtcccctaccttaccaccctcccgcagccctacacctttaagcaagaccacttcaagacaaatgttcgtttcatcgtcggttacagcgccgtcgcaatcgcagcgttcacgttctacgcggaccgcaagcttggctgggaagcgacgacatcgtcatgggttattgccgcagttggttcgtacttcattctaaactcgctgctcacgtactgggtctgggccgtcgaggctagcgaggtctttcgggggaagcgcaagtctggggagacggtatgtatcttctcaataatgtctattcctttggttttttcactcaggggaagggagcggagcgactgttggcgacttgcgtagtttctaatacggctatgaatagatatctattcgctcgtccgtgaagaagcacacgcctctctacagactgcagattcagtataaatcggcttcgaacagcgttttagaggagatggagatcgtgtcgccgtttacagcttggttctctgctgacgggacataccatccggagcctttgcgcatgtggcttgcggatgagattaatgtgctacgcctggccgctcagaaccccagaaacaaaccgggtggcgtggctagcgtggtgggagtcgaggagtctgagcacaacgaggtctag

SEQ ID NO: 24607 - DNA, 423 bp, Emericella nidulans
atggacggggacgagctcatcgcctcggtctaccgcaagatcgagcgggagaaagcccttatcgccgctgcgtcgaatatgcgacagtcaaccgataatcctctggtgcaacaacgagtcgatgcgaatattcgagatggccgcaagaacatcgcttatctggaagagaagatgaaagagctgcagctgcggcagatggagcgagaatccggttcacccaccgataaacggctgccaccgaaccctgaagatggccctgcccctccgccgaaagatcctttggggtatggtgatcctacgcagcacccgcagcctggggccggatctatgccgtcgggtgctcctttcaaggatccccgacctttcgcgcctgtgcccaaggcccgtccgaattatactaaactcggtatgttcattgcattg

SEQ ID NO: 24608 - DNA, 538 bp, Emericella nidulans
atgaagctaagtcccggttctcttgaaaaccatgaccttgtgaaacgcgcattcgccggcgatgaggtcgttcaagagttcgagcaggagaaacttgacactatcgaggacgagggcgacaaggtcatcgacgagacactccctggctggggcagctggactggagacggcattagcaggaaggaaaggaagcggcagaagcgcgttttgacaaaggttgagggagtgaagcccgaaaatcggaaggatgcgaaactttctcgtgttatcatcaacgaaaagcgtattaagaaggtaaaggcttttatcgatttcgcacccatcgacgtgaatactaatatctggcttcctgcagaacaacaagtaccttgcgacgcaactgcctcacccgttcgagtcgaagcagcagtacgagaggtcgcttcgtgtcccgattggtcccgagtggtctacaaaggagactttccagtcttctaccaagccccgtgttatgatcaaacagggcgtcatcaagccgatggagaagccgatggtttag

SEQ ID NO: 24609 - DNA, 831 bp, Emericella nidulans
atggatgagcttttcgatgtcttcgaggataagccccaagcggcccagctctctgaacccagacgaccgaagaaagagaagagcaagaagcgccagataaacggcgatgtgaaggaaaacggggaaaatgcaaaacccaaggagaatatcgctcccgatgtcgcggaacaagaaaacaaggaagagaagtcttcaggctcggataacaacaatcagccagagacaaagcgattgcgattagaagaagagccggaacccgttgtcgcagacttgttcgaaactgcgcaagagcgcgagattgcaggatctgcagggcttcaagctgagaaagaagcaggcccagtggtcttgtcccaccaggtccggcatcaagtcgccattccgccgaagtatccttacgttccaatctctcaacacaaacctccggagaaccccgcgagagtatggccgtttacgctcgatccattccagcaggttgctgtctcgtcgattcagagaggagaaagtgtgctggtatcggctcataccagtgcgggaaagacggtggtcgcggaatatgctattgctcagagtttgaagaacaatcagagggtcatctatacaagtcctatcaaagccctgagtaatcagaaataccgggagtttgcagcggaatttggcgacgttggtctaatgacgggtgatgtgacaatcaaccctactgctacttgcttggttatgacgaccgagattctgcggtctatgttgtatcgcggctccgagatcatgcgcgaagtcgcctgggttgtcttcgacgagattcattacatgcgagatgctagtaagtgtgtc

SEQ ID NO: 24610 - DNA, 219 bp, Emericella nidulans
ctgtggtccctcgttcccgccgagcagcgtgatgcctacattagcggccagaagaccgacactgcccccgtcattgaccttctctccctcggttactccaaggttctcggcaagggccgtcttcctgaagtccccatcgttgttcgcgcccggtacgtcagccgtgatgctgagcagaagatcaaggaggctggtggtgttgtcgagctagttgcatag

SEQ ID NO: 24611 - DNA, 402 bp, Emericella nidulans
atggggaggctccagctctcaagcgggctgaaggccatagccctgctcacattcgcagcgacagcaacatgctggccatacgacgagtccctcgttgactacaacgtcaacacgaataagtcggccactaaccccgccgactactggggagaatggtcggatcacaagtaccatccgtcgccagagaactggcggtttccgttttacacactcttcatggacagattcgtgaatggggatccaacaaatgataacatcaacgggaccacgtttgagcacgatctcaattcaaatcagatgcgtcatggcggtgatgttgctgggctggttgatacgctggattacttgcaagggatggggatcaaggtgcgtataacgatattattcgtcaatttctggtaa

SEQ ID NO: 24612 - DNA, 459 bp, Emericella nidulans
gcatttatgacgctgttcaagacatttatggctgatctagatagccgcgaggaccgcgacgcagccttgcatcttctcaaagatgccgagaagcgcgccatgagcaggtataatgcagtggtacaaccccaagaagcaaatgacagcgggacaggggaactctcccagtcactaaaagtcacttgtttgaccgacgagaaggcagagaatcaggatggtgatgacgacgatgatgatgctgataggctaaatgtgcgggctttagccaattatttggatgaatgtgtgaactgtcggagggagctcgagaatatccacttctggtacttttgttgcttgtgcctgtatacagcgctgtgtcgcaggtgctatcacgagttggaaggaggacctcatccatccgggctgttcggtacatgtaatccagagcacgaatttatttatactaggggtcttctt

SEQ ID NO: 24613 - DNA, 267 bp, Emericella nidulans
ttacccttgccgttcctccgcgtacaatcttcaaagcctcctatcgataaaatggcgtactacgaaccccaaggctggcaggccccgacttctcgtcaggcatcctgggagcagcctgtgcctccgtcgcgatcaggtatgaatcgatctgtcacaccgcggttggactttttgcgatacgggatcagaaacttacccatgtgtgatcaggatccagctccgtctcccagcgtgacgatgtccccgctttctcctctcagtttgacg

SEQ ID NO: 24614 - DNA, 528 bp, Emericella nidulans
atgatcgacaccatcacagacctgaaaaacaaccgcctcaaatcagccgcaaactccaccatagcctccgagcacatcaccaagatgcgcaagattctcggatccctcaacaactcgcgcgtcatccgtgccactgaacccatcagcatctctcggagcgacattcataattcctcaaagaagggcaaatggtggctcgtcggcgccagctggaaagaggacccccttgagtctgcccgccaggaactctcctcactctctgccgccaacacacatcaagccacgatagtagcggacgacagcgaagctgaaccagactacgcctctatcgcgaaggcgcaccgcatgaacaccgacgttcgccgctccatcttcgtggctattatgtctgcaacagacttccaggatgcacacgttcgtctgctcaaactccgcctcaagcgcgcacaggagttcgaaatcccccgtgtcctcacccaatgcgcaatgaaaaaggacgctcataacccgtactacacgctcatcgcc

SEQ ID NO: 24615 - DNA, 799 bp, Emericella nidulans
atgacagagttggaggtaaaagagaccgttgcattgggcctgtccagcagcccatttgcctgctcctcactcactcagcttagtggaggaacagccaatttcgtttatcgcggcgttctctctcgacctcttccaaatggcacgacaaccgttattgtcaagcatgcggaagaatatctcgcttcaaactcagattttaagctgactgcaaagcgatgtgtatggcttgtcctttctgtctgggactcagcgtgactaacaacttatagttagtagaggaagccgccttgcgggccctggacggcatgcaaagcgagaccacgacaaaggaagactcggactttgatcagaaacatcaagtaattgtcaaatcgcccaagctattgcacttcagccgatcgacatatacccaggtcatggaagatctgcccgactctgtagacctaaagactttcctgctctcatctgatatctcggaaagggtctcaaaggagtgggtactgtctatcggccgcactataggttcctggctacgtttattccacgtctggagtatacacccagcgcagtcgaagtttgcagagcagcttgctgagaacacggttatgcgggatctgaagttttctattaattacgacagtcttgtgagcatgattgatgcataccctgatatcctcggggatagtcataccaggtctgtctttcaaagagttagggatgctgccgctgctgagctggaggatgcggacacccaggacgggaatattggaccaatacatggcgacttttggtctggaaa

SEQ ID NO: 24616 - DNA, 447 bp, Emericella nidulans
atggcccctgcccttctgataccgcgtgaaagtgtggaaaagcatcgccagcatggccatcgtgatgaggaatctcagtccaacgagaagacttctacgaaaggcaagagcgagggtgtacaggactctagcgatatagacaaccaactcgtccggaacacgtctgtctttacttggaaggacctctgctataccgtcaagactccgagtggtgatcgtcagttgctcgaccatgtctatggctgggtgaaaccgggcatgctgggcgctcttatggtatgtagtctttatttgacttgaagccactgctaacaagtctagggatcatccggtgccggaaagacgacactcctcgacgtccttgcccaacggaagactgccggtacaattcagggatcggttctagttgatggtcgtcctcttcctgtatcgttccaacgttcagcc

SEQ ID NO: 24617 - DNA, 1453 bp, Emericella nidulans
gcagcacgagcaacctactattgaagaggcacccgacttcgcgagcaccacgcatggagatgtcgggtatatgcaagacaatgcgtatccctccatcttcgggctcgacggcgcgagcccgcaggcttcatcgctggccgttgcaaaggcaatcgacctgtaccttgagtgctgccaccgccagccggtctggtgtctgaacataaaagagctgggcaatatcgaatctcaccctgaagaactcatctgtagtatcctggcactgacaagccgcttcacccgagatgccgcgcagggccagcgctacgcggacagcgcaaagagcctgattatgctgcggattgcgaatgggacggtggagttggctacaatagagagcctctgtctgcttgcgtactctgcttttatcggtaagtctcttatagcagctctattctgaaaataaaaaggaagaaagaaaaagagaaaaagagaaggaaagaaaactggagaagaagaaaaaaaggaaaaggaaacaaggttgacaggacagacagatggcaacctccaactcggccgcttccacctgggcatgggcttccagctctgccgggccgccatgctcgacactgaggccgcgtacatgaaccagcaggaccggcacgcggacgagaagaagcgtctcttctggagtctgcaactcctcgaacaatcatacggccggcaaaccggcctcctcagcatccccacgtccaaatggcggccgccctacttatcctcctgcgaccctcgagcatccgacaacgacagtatgccacgaccgcccccgatcccccgagacaccgttggctgcgcatccccggatgacaccgggatctggagtatgagcatccacttcggctgggtgtggagtaaagtgcgcgcgtacgtatcgcactgctcgagcaaccgtgtgacggagccttggcggcacgaatccatgtacgcggtggtgctgtcggacctcaacgagatcgaaaacagcaccccgttgtgtcatcgctacgaccacgtgcagttctatcgacggaccgcggaggagcttgcagtgaataagagctactgggttccttgggtcaagctgcagttcatgtaccacgccatcttgacggtcctcaaccatccgttcttgtatataatggcctcacagcataacccgaacctcgcgattccgaacagtttctggcgtcgatcatctgagctggtcctcctccatgctacgtggatcgtgaggctcattgacatggtctctgagaagaatgtccgactcacagacccgttctttgcgcatgtggcgggcatcgcggcaacggtgcagctttactctgtctgcgccgatgacccgagactaaagtacaagtctcgagcggacttcgccaaatgtagtgactttttgcgcggatttacaggcttttcaagggcttgtgaggtgttg

SEQ ID NO: 24618 - DNA, 1404 bp, Emericella nidulans
agcagtcgaaggcagctattccgaggagagactgtgtccggtgagtcttctggagccgccgggtcgcagcaagatggtgctcagaggtttacagaccagctgggagaaagacccctttgcactgctggggacaaactttgtttttggtgttatgccgaaaaccctagcagcgtgagcattagtgggcctgctacttgcgtttttaacgctatccagaaagcaaccaacggtttgaatgcggcgcagctccctcccctgctatatcggtggtggaacgttcgatcacaaggactcaatctggagaatgtatttgttgctggaatgtttgccagtcttttcaagggctattttgctccagacacgcttgcagaagacgtgtttaatcgcctctttgaaagccacatccggcgtcataaggatttcccgtctcctttcatttcgactttcatgtccctccttgcaccagttcacagggggctgagggaaaaggggggtgccaccatagctattttcgacacgagaaaactgaggtcgaaggtttactctgccagagagtttgtccgcgaacaaaatctcaagataggaaggatgtataatggtgcgggcgagtatgcagtatggggccggatcaacaatgacgctattatctgcagtttcactatcgataccctatcccgcattgcagatgagcatccagatattaatcgattcttgcaacttgatctgatcactacacataggcacaacagaaagggcttgcacaaagccatgacaaaaaacgccatgtccttggacatggaggctggtgctacagtggggaagctgctgtccctcttggatgtcccacaggagttctgccgagaaatcagcagaggcatggcgtactcgtggagaatcaagaccagatacatgtcctggcagggtttctttcaaggtgttgagcttggttacaggggtgaacctgtcatgcctacgctgctcaccccagatgctacacccgactcagtagagccaatcccatttggtggatttgactcagatcccggtatgaatatcgtggaatcatctgacgattggggtgataagtctgacgccaccctcgatcttcagtccgatgaggacgaacaggacgaatcttccatggatgagactccaccgccttcatttaggcacagaaggaagacagtccctcctcgtatggatctcgactcttcgttggcgcaggatccgaattcaaaccccgcgaatgtcgtcaataatggtttcgacagagaaatggacgatgtcatggagtctgagtttactgttgaggaagctgtcgaccaaaagcaaatggcaattgatgaattcgccgtggacaaggctcgtgttatgtctgtgctgcgtggaaattttttagtctag

SEQ ID NO: 24619 - DNA, 962 bp, Emericella nidulans
atggcctcacagccagtccagaaaaggactctcaagggggcatttgaggagatcgtagatcccaccaagatcggtacctggaacattgtctgccgtcctcctatcgagaatcacagtattattcagggcaaggctcgtgagcagaattccaatgcattcgagacacatcaacagaaggagggtgtgcggttacggaaggccatcaacgctttaacacacgggaaaaacatctttgtttaccataacatcccgccaaatcaagttgtgtattcgttgacgcgatacctggaggtaagtgctatcttttcagaccgatattgcttttcttactgacgccgtcgttcctttctgtagaaaaacaacgtcctccgtcaactgctataccacggtaaaaagaccgtcccagcgaccctccgaaaggacatgtgggttccctacttttccgtccactttaacgactctaaggtcggtcttcgcgcataccatctcctccgtgaattttccatgcagcgccagctagacccgccacgagaaatgatcaccatcacagaggaatttctgagcaggaaacggccgcgaagcccggaagaggccaaagagttcgacgataaatacaacgacaaaattggctggctgatggagaagaaggaccgggcgcgtgctgtcatggaccaaaaggctaccagcgtcgccgatatttcggccgttttggctatccaagaacaggaaatcaaggatgggtttgccgatggtaaaaggggttacttgagtcgtaccgcgagaagacgtcgccgggaagctcgcaagaaggaagaggcgaaacgaattgagcatgctgagcgcattgcccagttcgaatccaccctgagcacgaaccatgtcacgtacaatatccaagaggccgcagactcgactgaaggcgccacaggcccattccctggtgacgccgtgaaaatacctct

SEQ ID NO: 24620 - DNA, 249 bp, Emericella nidulans
cctcaagctctgccgaacaacaacgatccggatacccaaggccggacgccgaccttcggcgaaagagcaagggctgcagccgcttgggacccgtccgcagagggagaagatgtcgattggtactcggaatatattgctcgtaatggaccaatatcactcagctggctccagcagccgttcacaaggacacagagtggtggaaaatcttacatcgaggtgaaagggatgggacttttgcaggactggagc

SEQ ID NO: 24621 - DNA, 353 bp, Emericella nidulans
attgccgtaatactactaaacggaggcacactccaagagcagaaacttgatcggtacctctcccgtatgaacgccgaacaattcacacctgtcgaacgcacagatcatttactccaacggctctgcaaagaaggctacttagtcaagaaccgggagatggacggtggagatgaaatcattgagtatatggttgggccgcggggaaaggttgaagtcggtgcgagaggcgtagctgggcccctgagggaagtcaacggtccccaggctatgattgaagatgacgatatcactcccgccgagagggagaggttagaggaattcgagattcggttggcaaatagtcttgggtttag

SEQ ID NO: 24622 - DNA, 872 bp, Emericella nidulans
ataggccctggggagtgggatgaagggctcggggtacctctatgtgttgtctgccaaggggtacgtcattcacagaacctaatgtcgggccattgctaacgcgcgcagaccgacaaaatggagaaactggagcgggatcacggctggagcgaagacgaatttgattttatccaccaattcatgaggacgttgctggtaaaacgtacagaaacccaacgatggaatttgatctattctaacccactgtagatggcgcgtctctgatatacaccaagccctttcatgcaaacaaccttcacagcgtactgcattcctctctcggtatacattctctcctaaagaagttatctctcaaagccaatttcatcgagcgtgacaagattctgataccgacgaactgggattcatgggcgaaaatccgagtcatccgagaagggtctaacttggagggtatttcgacagcttggtctatcgagattcaggatccgcctgagccactcagtgacaggaatgatgaggcccaggacgatggttcttctgaagaagacgatgggaccagtgccgtaaagatatacgagcagacgatcaaggatcccaagcggaacacctcactgtcatacccaggaagccaacagagtgggaacaagattgaggtcgagacattagatatgcaaggtttcctcaccaaacagctggaggtcttggagcagctgaagattgaggatgagaaagaccgcgcagccaagaagacccctcagttggagatgtccccgttagaggataacagccgggtcaacgagcatataggccctgtacagttcaacatgggcggtattcaagttgacgccgatgacatgctccagaagctgaag

SEQ ID NO: 24623 - DNA, 367 bp, Emericella nidulans
tgtgttcaagttcgtgctctcccgaacagaattccgtcgccaactgaaggtaatggatgacttcataaaaccctacattgaccgtgtcctcgccatgtcgcccgccgaactagaccaaaaactctccaaaagcgacaccttcctccacgcattggctcgcttcactcgtgaccgccgcactcttcgcgaccaactcgttgccatcctccttgccggccgcgacacaacagctgccactctatcattctgtctctttgaattagcccgcaacccagaggtcaccgccaaactccgcgaagagatcgcatcgcgcctgggcctcggcgctccgcccaaaagccctcttacacggacctcaaggaaatga

SEQ ID NO: 24624 - DNA, 564 bp, Emericella nidulans
gttcttctctccggcgacagacacgagtttgccgctacgcgattccctacagttcctgaatatgacccactcgtcgactccgaatctcaatcgccccgtatccagaaccaagaagtcctcgaatccggcgaggatcttgttgaattctgcaccggcccattgagcatgttttacgttcccgtacgcacatactaccagtctggcccggacgacgttcccattaagtaccttcccgatgggaacacgaagtttggcctcgtggagatagaagatggtgttgtggatggtgtgccaagctctgtccttacatattcactctatatcgatgagaacatggtttggaagtacaggctaagtgtgccattggctctgacttcggaagctgaagagcctgctgcgtcggcagatgcggcagcgggaacttcagctgcgggtgcattgcttccccctggggaagttttggttgacaagacggtcgatgggtgggtggatgtcattgctaagagagtgtttgggtgggatgtgatgagagttgagcatgccagtaaggattgggtcgtttga

SEQ ID NO: 24625 - DNA, 477 bp, Emericella nidulans
tgtcttctcactcttcttgactctcccgtcaacaaagctggcaagctgcaaatctacattcacactgccaaaggcgttttaattgaggtcaacccctcggttcgcattcctcgagctttcaagcgcttcgccggtctcatggttcagcttttgcaccgactctccatccgttccactaactcgcaagagaagcttctcaaagtcatcaagaacccaatcaccgaccatttgcctccaaactgccgcaaggtgacgctcagttacaaagccccggttgtgcgagtcaaggattacatcgagtctctgggccccaaagagagcatctgtatatttgttggagctatggccaagggccaggatgactttgcggactcgttcaaggatgacaccattagtatcagcaactacagtttgagtgcgagcgtcgcatgcagcaagttctgtcatgccgcagaggaagtttgggatatcctatga

SEQ ID NO: 24626 - DNA, 363 bp, Emericella nidulans
cccctcggcctgtcggttggcccactcttctggtcgggattaagcgatatatatggaagacggattgtgtttatcatcggcacagtaattgcgctggcttctacaatcggggctgcggccacggatagctatggcgggtatatggctgcacgcttctttcaggggtttggggtcagcccgggtagcagtgtgggcatggctgttggtatgtctatcattatagaacatatggcctgggagctgtttggttagcgctaacgaatacctgcagtgaacgatctttttttcgactatgagcgtggccagaaactgggtctatgggtgctggccattgattctggattgcttgttgggccaatttgt

SEQ ID NO: 24627 - DNA, 441 bp, Emericella nidulans
atgaaggggaagcacgagctctttaccctccttgccggacctattgctgtcctttctattacttatgtgtccccagaacacttgaaggccgccatgacagttctggctcccaaagccttcgggtatactgcgcccactcgaagagcgaaccccgactggcacgagcctcacgtccagaatggtctgaacaaactgagcgtacttgctgcacgcctggataaccagttgttcgatgttgaccagacgaagtgggttggaagtattgaaggtggtatggacggtctgcgttctcaactcattatggcattacagagtatgggatccagtattacgagcactctggagggagctggcaagagtttgtacttcactcttgagagcaggagaagtgtgcttgaagatgagcagaagggcaccagcggtgagaataaggcagagtag

SEQ ID NO: 24628 - DNA, 1265 bp, Emericella nidulans
gaaacaaacccatctttcgtcctccgcgcagtcaaagacgtcgccttcgaggacagagttattccccctctaaaagacccctgggatgtgcgcgtccaagttgctcagacagggatatgcggcagcgatgtgcattattggcagagggggaggattggaggtacgccgcctgctgggccattctcaaaccatcagctgagctgtcgatacctagcttacaccggttaatgcagactttatcctcgagtcacctatcgtcctcggccatgagagctccgggatcgtgacggagattggatcagcggtcaaaaacctcaaagtcggacaaaaggttgctattgaaccaggggttccttgtagacagtacgtccgattcctgttcgtccgggggtttctcacctgaaaagaaaaaaaataaaataaaaaaagaaggaaagaaggaaagaactaatgtacatggtacagttgcgactactgtcgctcaggatcgtacaacctctgcccagacaccgtcttcgccaaaacgccaccccacgatgggacgctgcaaaagtactatatcacccaggcagactactgctacccgttgccctaccacatgggcctcgaagaaggcgctatggtggaaccagtcgcagtggctgtacagataaccaaagtgggcaatgtccggccgaaccagacggtcgtggtatttgggtcgggcctatcggtctcctctgccaggctgtgtccaaggcgtacgcatgcaagaaggttcataggggtggatatcagtcaatcaaggcttagactttgcacaggcgttcggcgcagatggggtctttctccctcctcccaggccagagggcgttgaggagacggcatggagcgagaaagtggcggcgctgatcaaggagaagttcgggctgggcgagggcccggatgtcgtcctggaggcgaccggtgcgcagagctgtatccagaccggggtgcatttggtcaagaaaggaggcacgtatgtgcaggcagggatgggcaaggagaacgtcgtcttccccatcacgacagcctgcatccgggacctgacgatccggggctcgatccggtacagcacggggtgctacccagttgccgtggacttgatcgccagtggcaagattgacgtcaaaaagctcattacgaaccggttcaggttcgagcaggcggaggaggcctttgagttggtgaagcaggggaaggacagtgtgataaaggttgttattcagggataccaggacaagtag

SEQ ID NO: 24629 - DNA, 384 bp, Emericella nidulans
cccatcacagcgccccgcccccgcgtccatattacagctccctgtctttaaaggagtggatttcagcattctgagacttcgcgcaattaattatcttttcatacagactcgcaatccataatgtccaagccagcaatcggtttcgtcggcctgggagccatgggcttcggcatggccacccaccttgtcaagcagggctacccagtccatggcttcgacgtctttccagcttccgtggagcgcttcaatgccgctggcggcatccctgcttcgtcgctacgtgaatcagccgagggcaaaagctactacgtcgtgatggttgcctcatcgccgcaagcgcagtctgttctcttcgctgaggacggtatagtgcaacgtatgtga

SEQ ID NO: 24630 - DNA, 2394 bp, Emericella nidulans
agctagtcacaaggattctctatcgcttgcgcttcgcgtccgagcagcgcccccttgataactcttctctggcatacgctctgcctctcctattcacggtcctcgcacagaacggcattgaagaggaaaaaggcgacgaggagggcgagcaggtgctgcttgctcttgaaatcctgtcctaccactcaggctcatgttagtcctcgtccgatcattagcaagactccactaacaggaccatctagttaccgataaccgtcttcctcgagtagagattctcggccagctgatatcctccatgcagaggtatactcagcattacaagctcatcaaagatactctattcgatgcaagcaggtgtatcgcgccgaatatcaacgaaaacgaagtgaacgttctcctcaaaggcaccattgtctcggacccgtctgtacggtcagcagtcctacaggccattgacgctgaaattgacttaaccgatatggacttttccgagcatatctggcttgaatgccatgatcatgtggaggaaaacgccgagatagccgagagcatttgggaagagaacggcctggaaattgatgagactgcgtatggaaagctcattccctacctcgactctcgggattccaatctccgaggagctgccgctcgtgcaatagcccatgcaattgagtcaaaccattcagtgttcggtgatattatctctcagcttcaatcgaaatacgaattcgaaatccggcccaaggagcccgagaaagacaagtatggcatgccgaagaaggttgacacgacagaccactgggagtcacgcagcggtattgctcttgcctttggggccatgcaaaaccttttcgaaggtgatcaaatcgtctcattcctccggttcttgattgagaggggaccacttatcgatcgcagcagtgttgtcagagatcagatggccgacagcggtaaaggtgttattgccgcacgtggtcaggagaaggtggaagagctgatgaagctcctggagacaactctagagacctcagataagggaagcgagacatccgatcttcttaacgaggctgtcgtcgtcctctacggctccctggcccagcacctcaagtcggatgatccacggttgcaaactgtcatcaagagacttcttgccactcttcctactccctccgaatcggttcagtctgctgtgtccgactgtctcccacccctaattcgacttgcggggcgccagagcggcaagtacgcccaggaaatgctagaccaaatcctgcagagcaaggattacgccacccagcgtggtgcggcttatgggttagctggtattgttaagggccggggaattgtcacactgcgcgagttccgggtcatgccccatctgcaagacgctgctgagaacaagaaagagcctcataaaagactgggtgctctaatggcgtatgagctttttgcaaccattcttggccggacatacgagccgtacgttattcaagtggttccacagctcctgactagcttcggcgacccgaacgcggatgtccgcgaggcttgcctgtacacggcaaaagcctgcttttcgaacctcagctcttatggcgtcaagaaaattcttcctactctccttgaaggtctcgacgatacccaatggcgtacgagaagggggcatgtgatttgctaggagccatggcctaccttgacccgcagcaactcgccgtcagtctgcctgagataatacctccactgactgtcgtgttgaacgacacccataaagaggtgcgcaatgctgcgaaccgcagtcttcaacgattcggagaagttatcagcaatcctgaaataaaatcgttggttaatgtattgctgaaggccctgagcgatcccaccaaattcacagatgaagccctcgatgcccttatcaaagtctccttcgtccattatctggacgcaccatctctggctcttgttgttcgcatccttgagcgtggtcttggcgacagatcagcgactaagcggaagtctgcccaaattattggcagtctggctcaccttacggagcgcaaggaccttatcactcacctgcctatcatcgtttctgggctcaatttggccatcgttgatcctgtgcctacaactcgtgctactgcatccaaggcccttggttccttaattgagaaactcggagaagatgcgctgccggatctcatccccaaccttatgtctacgctcaagtcagacacaggagccggcgaccgtttgggatccgctcaggctctttcggaggttctggcgggtcttggcacaacaagactcgaggagaccttgccaacaattctacagaatgtcagcagctccaaggccactatccgcgaaggttttatgaccctctttatctac

SEQ ID NO: 24631 - DNA, 210 bp, Emericella nidulans
gacagcttgactgattacgttggcccgactatcttcaccaccgaccgcctgtatgacacctttccgacaggtgtcaccatgggtctggcttggaccagcatgggaggtgcggctctctacgcagagtccatcttgaaaaatgcatcgacacacaagtcacaacctggtcttgacatcaccggcaatctgcagaacgtgatgaaggagtga

SEQ ID NO: 24632 - DNA, 283 bp, Emericella nidulans
cgccctttgcacccctcttgtgtgtcgaccgtcttcgccctctacgcgtccaattccaccctttcacaaatccctatttctaaacgccggaacctcgtctctcgagtgaactatcgccatgctctccgctcgtctcgcccgcgctggcctccgtgcctccgcccaggtctccgtccctcgcactgctgccgttaacggcctgcgcacctatgctaccgcagcccaggaggttaagcctcctgtctctctcttcggcgtcgacggcacctacgctactgctctg

SEQ ID NO: 24633 - DNA, 602 bp, Emericella nidulans
tcgatccaaaaatctacacttcaaatatctccgcatggcgctcaatcatttccaaggaaggcgtgcgcgggatcttcttcggttggtcgcctacatttatcggatactcattccagggagccggtaaatatggcttttacgagtattttaagtacttgtatggcgagcgcatgttccccaacacaaaccgcacggttatgcatctggcggcaagtgcctcagccgagtttattgccgatattgcactctgcccgttcgaagcgatcaaagtgcgcatgcagacaacattgccgccgtacgcccatagtctgcgcgaggggtggagtaagatcattgcgcaagagggcgtctccggcttttataaggggttatacccgctctgggcgaggcagattccatatacaatgaccaaattcgcgacattcgaggagacggtcagcatgatctataagacgctgggaggccccaaggaaagctacaacagccttcagcagacggggattagctttgcaggaggatatattgcgggcatcttttgtgcgattgtcagccatcctgccgatgtattggtgtccaagttgaatgccgatcgaaaaggtatg

SEQ ID NO: 24634 - DNA, 859 bp, Emericella nidulans
atgaagccctgcgaaccgcgtcgagcaggacgcccccgtcttgaagccagcagcgacgttgtccactccgacgatcgtcgggctcagatccgtcgcgcccagcgcacatatcgactgaaaaaggaagccgtttttcgaaatgcgacggctagagccgagcagcttgaagagagattgcgcactgccgtcgaagaggtagcgttgctgtccgaggccgctgtagagacgcagctgcatcattctcatcctgagatctatgcgcgtctgaggcgtctcaatgggattctaatcaagggtggtgatagtcctaccgatgcgagtcctactgagctatcgccgggctcatccggacatcaagtgccaatgctcaatgcccaagtccaatccgccagacaatcccaactttccctttcccgtcctccttcactcccagccaggcagtacacgtacgcattccaggaaccgcgctttgcccgtcggttactgcgatactgtctcgaacacgcgtatcgtgtctttgcagacccccggtcggatccgcgtgagatctaccgcatgttccggctcgtcccctgcgtaaaagaccggggaaagacccagccgcgctttcggcagctcttgatgggcgggcacacggatcctctggaagtgccaggtctaccgttctacaatgttggtggcgcgggttcgcatttcccggatctcgacgaggatgggaatgcgatttacccggtcaatagtaggatgccgaggcgggtgctgggggtgttgccgtgggacgagctgggaaagggagatgtagatgctttggaggttcatgggctaggtggggaatggttcgacagccgggacgtggaag

SEQ ID NO: 24635 - DNA, 864 bp, Emericella nidulans
ccccgaagaatgtattgaagcaccacccctgtacgacgaggaccaatactggggcgaacccgtagtatccgacgaagtcggcacatacaacgtttcaaagtactacttcaacctcaacccggagccattcggtcttaactactcgatcttccgcttcccagaaaaggattatggcgtggactacttcaaacgctccttcctgggcgtgggtcttggcaaaatgctcaacaagctacttccccggcaggaactattgcaggacgtcattcggttcagcgacgtctgctacgacgaatgcaacggcgccgcattggaagcggaacgactggggaaaacaccctcgctttgcgaggctacgtccgcgttcatggacaagctcgatcaatgtagtcggtgtaatgagagataccccgctgaagacgaggaagatccgcaggtcatcccgcctgatttgaaccagtggctaggctactgtgacgggctgggcaacgatgaggaccagacctctactcgcgaaccgatcacaacgtccagcgagagcacatcgagtacacgcacatcagccgtggatccgaccagtacaggcggggatggagatgaggactccacctcggctaccgactcgaccaccctgactgggacatcaagtcccggtgatgacgaatcaacccagacagaatcgggctcagatgccaccaatgaaagctcgggctcgggaacttcgggtccatcacctagtccaacctctggcagtggcggtagcgacgatggctcgggaggctcaagcgcaccgacgccagggtcaacgccaggtaccccgactgatgtctcgccgacgggcaccagttcggcctcgccctcggc

SEQ ID NO: 24636 - DNA, 222 bp, Emericella nidulans
atggatattcaccgctgccgcttcgttccgtataacccacaggctatcaatgcgctcgcgttttcccaccccccttccattgggctaggcggaaaaggtgtccctacactacggctcgcagttggccgtgccaacggcgatatcgaaatatggaatcctgcgcgtggtgcatggttccaggagacggtcctgcgtggcggaaaagaccgaagtattgagggt

SEQ ID NO: 24637 - DNA, 438 bp, Emericella nidulans
atggaggaccgacagctcgtttggcagacacgcacgtggctgatttcgtccactctcgaattggacgtcgctagtggaacagggcggaaatcacgcctcggcgatgttgatatctcgaagctgcgaaaatttcttgattaccctctatctcttcatagtgacatgcggaccgtttctattattgaataccatcagatccgaacaagagggcggcagataatcgagaactcagcagccgctccgatcatacatacagagcttccagcaatcatgcggaagctccagcaatggtgggaggaatgggatgagctacaccatcgtaggttctacgtttatatttttttttctttgacatctactcaccacagcagaaaatgcctttcatcctggtgcatttcagcgctcgtctttaaagctgatgttaaactatgccaaggt

SEQ ID NO: 24638 - DNA, 785 bp, Emericella nidulans
atgcagaacctcaagttcctcatcgccgccgtcagctgcctcgggcgggccttgcagctccgactcctaccagcaactttatcaacagcaacttcaacaagcgtgcttccgttgaagatgtacgtttcaaaccctctgatagtgtgtataggtcgttctgaccatgtttagtccgcctttggctatgccagcctgaacggcggtactaccgacggtgccggcggtaccacaaccaccgtctcctcttacgccgagttcactgccgccgtccaaggcgacgaccccaaaatcgtcatcgtcagcggtcccatcgaggagaccgccgaacaggtcgatgtcggctctaacacctctatccttggtgccgactcttccgccgtcctgaccggtttcggtctccgcctcaaggaggtcgagaacgttattatccgcaacctcggtatcgcgaaggtcttggccgacaacggcgacgccatcggtgctggtatgtatcatgcgataatcacgtaattcagtccctgggctgggatagcctcacccgagactgatctaggacaagcatcacagactaatattgctcagaatactccaacaacatctggatcgaccacgtcgacgtctccagtgaccgtgaccacgacaaggactactacgacggtctccttgacttcaagcgcggctctgactacatcaccgtctctaactcctttattcacgaccactggaaggcttcgctcgtcggccacagcaacagcaacgaagacgaggactctggaaagctccac

SEQ ID NO: 24639 - DNA, 1134 bp, Emericella nidulans
  unsure (1)..(1134): unsure at all n locations
acnccgttcctgcgctatctacaagagctccgcacgctctttcgcccgaatacggatctatggacacatctcacctcgagtgacctgcagactgcgcccttgcccagcgacgaggctattgcggagcagatcgttgtccaggacgcgacctggaggcttaataacacgccggacgatgcatactaccagcagttttcagagtactttaccaagtacaccttctcgaaccgtgcgtctcacttgggatttttcctttcttggctaagaggctgattgatgtggttagactggcgagacaatgatgtccacggactctacgcggacgggtctacctcggatgggactacatacggcgcatggctggtgatgaatacaaaggtcagtctcgttccttcgaacgggttgaattcaatgctgacatttctaggatacctactacggagtatgtgcattacacccctaacagatcctagctgacagagcagggcccgctgcactctgacctcaccgtcgacggtataatctacaactacatcgtttccaaccaccacggcgaaggcactccgaacataaccaacggctttgaccgcaccttcggaccgcagttctacctcttcaacggcggaggatcctcctcactagaggagctcagagacgaggctcgctctctagcgagcccaagctggaacgccgacttctacgactcgatcgccaaacacgtcattggttacgtcccttcgtcgcagcgcggcagcgtaaaaggcacgatcaagctgcccaagaacgcgaaaagtcccatcgccgtcctcaccgtcgacggccactacttccaggataactctgccgttccctcgtcccaccaatactgggccgacatcgacaagaatggccgcttcagcatcgaccgcgtcgttgccggcaaataccgactaaccgtctatgcagacggcattttcggcgacttcacacgcgacgggatcgttgtcaaagcacgcaaatcaacatccatcaaggagacatggaagcccgaatctgctggcacagagatctggcgtctcggtacccccgacaaatcctccggcgagttccgccacgcgcagcgcgcgatcctacccatccccgccacccgccaga

SEQ ID NO: 24640 - DNA, 992 bp, Emericella nidulans
agtcgagtcccgcagcggattccatcgatctcccgcgtttccgctcgaccctctcaaagcttatccccgccatggacggacgcggcccgtacggcctcgcctgtcaaaactgcgccaagggtaaggtcaagtgtattgcgatgcccgatggcgacgggtgtcaaaggtcagtgcgtggcctgtatttgctggacagcatgcttacacctgtctagatgccaccggctcaagaagccgtgccatccgtctcatggcgtgaggaagcgcgagtcgcagcattttcagagtcctttgattgaggagatggacgctaagctagatagtgtactttctttgttacagtccgtctacctgcaaccttcatcgccaaatggccaggctcagcagtataagcgtaaggccagtactccagagctatcttcccctactcaaccagcgcgcacttcggtttcggagtcgacatacatcctcccaccggggcctctaacatcccctgacatcgtggatgccgagggggcgctgaaccggtttcgcgaacaggtcttacgattttgtccgtttctctatctgccgccgggcctaacggcccggcagctgcaacaggaacggccttttctatttgagacaattctgtctgtgatgacgcgctccgtgcaggagaagatgaattggtcaaagaggattaaaagcacaattgctcattctatggtaatggaaaacgaatcaaatatcgacctgcttcttgggttgctggtttacgcgtgctggagccaagaccactatcttaagagaatgccgactctgacgcggattgtcgagctggccgtctccgttgtcatggacctgaatctgaacaagccgcccccgcctgatgcgcacaggctcaccgagttgggtggagggaatgatcccaattggacgaggaaaggacccaagatacggacggcagaagagaaacgcgcggttctcggctgttttttcgtgagctctat

SEQ ID NO: 24641 - DNA, 1050 bp, Emericella nidulans
cgaagcctcccaatgtcgctcttcggattcacgagtgtagtcggcatcgcccttggcccgttcattggcagcgccatcgtccagatccacaagaacgatccctggcgctggatcttctacgtgcagatcatctataacgccgggctcttgcccatcttctggctaatcctgcgcgagacccgaccagatgtaatcctcaagcgtcgtgctgctaaaatccgcaaagaaaccggccgtcccgtctacgcccaagccgatatcaacgccccgtctaccctccgcctcctccaaatctccttcaagagaccgacgaaaatgctgctcactgaacccgtcgtcactttcttcactctttggattagtttcgcctggggtattctgtacctcttctttagcagcgttgtgcaaacgttcggcgagaactacggctgggatactttggcaacgggtctcgtgcaactcgccatctctgtcggtgccgtgattggtactgtgttcaacccgtttcaggactggctctatcttcgctcgtcgagtaggaataaggaaaaacctagcaagcctatccccgaagcgcgcctgtatacgtccataccgggctcgctcctttttgccgcaggcctcttctggtacggctgggcttcacaaccagacgtgcactggatcgtgcctacgatgggaattacagcagcaggtgtcgggatttacagtatttacatggctgttgtgaattatcttactgatgcgtacgagcgatacgcggcctccgcgctgtctgctgcgagtttaggacggaattcctttggtgcatttctgccgctggctagtccacaactgtttagcaaccttggttttggatgggcaggcactcttctcggattcataggggttgcattgagtgttgtccctgtggtactggtgctcaaaggccctgctattcgacgcagtagtccgttcatgagggagagtatgtgggatactgacacggaggagaacgaaaccggggatggcttagacgtgaaggagggtgatcgggctgaggctgtctga

SEQ ID NO: 24642 - DNA, 828 bp, Emericella nidulans
gtgacaactctgagtacattaagctcatccacgacgacaccggacgtagcctcatgggtccacgacaggagaactggttctatcgccagctgtcatctagcaaggaccgtggcgcaaaatggcgcgtcatcggcaaccagcttgtcttcgcgcacatccagcagaagaacgaagacggttccttgagtttcagcggggacgcgtggacagcctaccgtgcaaaccagaaccgcacgctcaagcacatgtacgagaatgaaattcggaataacattaacattgcgggcgatacgcatgtcaactgggtaagtctcgccctgcacctccttgttgtcgacgcaggcacagatgtttatttgagtcaaggtctcggatatgatctgggagggcaccaagccctacaacaacgtcaccggcgccggagccgttggcgtcgaatttgccggcacggccgtttcgtccacgggcctgagtaccgtgtccgtcgccgacgccgagtcggttgcagagacatacagcatcaatcccgaactcaagtgggtggaggggtactaccgtggatatttcgagcttcatttgcgccaggacgaagccgaggcgcgctatttcggttgtccgaccgttgcggagaggaacagctgggaactcccgcttgctaattggaccgttagccacagtgagagtcatttgcagaggccgttggcgggaggaagtgtcgaggcgggctacttcgtcaatgggaatgttaagcacagcgagcttgcggttaataccgagacgggcaagtgggaggcagtgagctttggaaagatgtttattagagactag

SEQ ID NO: 24643 - DNA, 2442 bp, Emericella nidulans
atggccacagaggacgaggtctcttactcacaggccttccaacgcgcactgcctgactcggtactgttcgcccagttagagcttaccaatcgggagtctcaattcagccggtcgagtatcgtcaggctgtacaagattgccgtgacggtacgacgcgatgttctaggcattgactctccggccgttttgcaaagcctcatcatgagcgcccgtgcggcagaccgggctcaggcgccttgggctaatgagcatctttatgaagcatggacgcgcagtcgcatgcggttgggcccaacccaccctataacgcacgacctcgagcagcttcttgttgccacttccgaaggcgcaggtcgagcggaccgcacagctggtttgaaaacagacgcactccgaggcatggcgttggacggctgggggtcgtcagacatcagtttcgctcagcgattacaatatcttgaccgactggtcaaggcctgtgacaaggagaaccaacacgacaaagcatacgatgtctcgaaacagttctaccaccagactatcaaagtctacgggccgtattcatcggaaacgatggctgcggctgagtacctcaccaataactttgacatcgctcccccagatgagcttgcgttagagctcgcccaggcaaagtacgagaccatggttcgctcaatggatgcctcggatccgcgtcgagtagaatattcactctcactgaccaagatgtatgaagaaaactctcagccggcaagagctgaggaggttttgaccaagttgtggcagagtttgtgcggtccggataaagagcacaaggcaccatgggaccaaaagacaaaagtcgtgttctactattccaagtttctcgagcgacaaggccaccatgatgaagccgctgcgcttctccgtcagttgtccgccgatttagaggcagaaggcggtgttcggtctgcacaaatggccagccgtgcgcagcagttacggcgggaggctcgtgagatgcaactatacgatatggatcggactctgggaatgcaattatggaagtactacaagtccacaaaccagcagtatcatgcggatgccgtgaccttagcacggaatctcattgaaggagccataccaaaggaaggacacactgccgagatgggtaacctttcagtagaggagagtaagatgctccctgaatggatcgatagtatcgcttctgccgtgacgactgagacgagttcacgaatgcctttactccggctgtgccaccagctggcgcgccagtatatgaaagacagccaatggcgccaaggaagcgagattgtatgcgcggtgctgaagcatacatggcctagttttgaggaccccggatccaaagagaagttctcatggaacgaagctcctattatggccgacttagctcaggaccacgcctactgtctattccgtcgacttgatgtcccgacagcgagtattgtctacggaaatgcgttcaaggcagcgataactgccgagcaggtggaagtgcagtctgttacgacagtagtcaagactgtggtggacttctatgagaatactttccaattcgataaagcgttggttctcctgcgtcaggtcagcgagttcttcgccctgcggttgggcgagaaggataagcacacgcttgatagccgctactatgaaggcgatcttgcatttcgccttgaccgtcgtgcagaagccgaaagcagctaccgtcacatatacaaggcgtgcattcgggatggcaaaatctcatcgtcaggtgtgcgtgctgctgtagctctcgttgcaatttacgagcaaaacaagcaatgggatgcagctcttggggtgtaccggaacttgtggccgaccttagtgcgctttgatgaaaaggacggctacgatcgtgctctcctcgagggtttacttcccaagacataccctgcttacatgtcccttctaacgcattccgctgtcaaggcggaccataccgagcgcctgcaagtcgcctcggagcatcagcagctctgccgcaagttgtacgggccaacacatgcccgaacgcgcgatgcgacgctccttctagcagagctttctgcggagagtgatcaacattcgggtgatgctattcatctgtaccaacaagtactgaacacgcacgactgggttccacagtctgaagcctcccgtgctttaccggatatgaaggaccccctctcaattgacatcaagcaccggatggcccagttgtacctgcggcagggtcaagcgtctcctgaggcaagaaagttgtatatggaggagctcactctggctaagcagcagcagggactgtcggcgccgacaaccctgctatggttacaagaaatctgccggatgcatgctagctccgagtctgccacatcgcgtcaacagggggccaaaatcctcactgggcacgttgacgag

SEQ ID NO: 24644 - DNA, 3372 bp, Emericella nidulans
gcataaggcgattcaaagagttcctcacgtcaataggacagactaaccatgaaggcgagaaagccaaaaaattccgcatacttaaggcgtactgcgacactcaaattactcgcaacacagaagaagcaatctgctttccggagatcatccagacgtggaacttcgcagacagcagtaataatgaatcattacttacttctgtgccctcagttctcgcaatcttcctgaagaccgtctccagcaatctggattttcgggaatttggtatcgctctgtgcaagtatttgctgcagaaggaccagctgcggcttttcaaccgtggccttactgcgaacaaatctaaagagcatctgatttctccttgtcttcgactcctgacggagatcgtcagtttcgacggcggtgctgtcgcccggcagctctacatcgcgcgtcacattacttttaagcgcatggacgtgtttctgacaccgaacaaagcgcagctggaagacaacgccgatgatcctaatgcatctactctgaggcggaacgctcagcgatatgttcttgcaaacttgaaatttcagaacactgccaacaagaccgatatcatcgagcaacaaaaggtcataagagcttttcttgaacatctaagaaaggacccgcatgaaattgtcatcgatatcgtcaaagcaattgaaagagatgtaatccaagatagctccctctcccgcaacaccaagaccaaattcttcagtcgatggaaccttgaaagactggtcaccctttacggttatgaccgagaatccgaacaggaaaacgcgaccggcttgtctctcgccgatgaggcacataagatcttgttgacagtctgcaccaagactgagcatggcgttttgctgcctcaaacaggatggtaccctgttaacagcgatccagaattgcttccaattgaagacgatgcttcgattgatttaggacttgattccgcagtctacgtggataagtaccgggaatcggtacctgtccgcaatggtacgctgtcttacctcattcaggtcctccgtccggaatccgatagtctccagattgcgcttctcttagctattttcaaagcagcgccggagctaattgctgattactataccaagaaagcgctctttatggcagatccaaaacccacaccttcgtggatggcggaatcaaccgttctcttctcgacagttagtttaccggttcctgccaattgtggttggaaggataagctgcccgccatgcctccgcctgtttcggtggtcatcgagaatattcttccccggccacttacgcagaaagtgctgacgcgctgtttcaacttgaatactgagatcgtcactctttttgcagttagagtcctgacgatgtctttcaataaattgcgcgacaccctgaaaatcttccgtgctgatcatggcgccggccagcatttgtggacccaagctgcagacaagttgactgttgagtttggtcataggtgccctcagatgaaggacgttgtaactttgtttcggagaacagctaaagatgacttgcagcagctggaggcggtctccgagctacttgcttgcttctatgaggttctgacaaatgcggctctggaagagggctttgacgtttcccttgttctcgttgatattttaaaacgactggacgaaggaaatctcgacgcggagagcacagaactcctgataagccaattacaaaacattctcaaaattgctcaacaatctgcatccctacgctggtggaaccagccaggtaatgtccctggtgtcaagttatcatcgttatctctaacattataacaggatccatgcaattttctgcgtttacgtccatcttgagagtcttaatcaacacgtcctctgaaggttctttcaaagagatccactcactcctcgcaaatgtgctgatagaatactcggtcattcgctcctccagcttctcggctgtcctgtctagctttgggtcgtccgactccgaatctcaacaccagttggccttcttcgataattgcgcttgccgtgtgaccaagaagccggttcactatcaagatctactcggatctcttgtccaaactcccgagctgctgagtcctctagtggctgctgttattgagcaatggcctttcgtactcaaagctggaaatgatagcgctaagacaaacgtgagcgaattcatcgttagattgctcagaaaccttcatccagccggggagagtctacaagggctgaaagcggctcgggacgaattagtcaacgctacggaggatcggaagctgaagtcacgcttcagaaaggccttgaaagggtgtgaagaggacgaaaaagaggatcagaacccagactctgaaccaagagaacaaccctcgtcagccccgaaaaaagaatggcaaaacattgatttggaagaaatttttggctctttaccggccgaggggactactcataatgagctatatagatgggaccaaaaagaggtagcggagtcgctggaggagggtcgaatagcagagcttttcctatgcctgtgctccgagcatgaagaggttcggagacaggcgcttccgaacatttcgcgattcatgatgaagctcaaggtaatatcctcgttgcctgtatgtctcagcgtcatgagactaatcaacgcttgcaggaatccaagtatgccgaatggcgcagcgcctacatcctaactggagaattcctcgagactgtcaaacaaattggggttgaatcacccgtgccgtggattgtgggagaatgtgctgccagctgtcttgcaattcttgtggacccgatgcataaactctatggaaagatcaataagttccttcagaaagctcctgcttgggaggtggaaaaaataccgtcttattggattgacaaaatcctgttgcatgagcccgagttggatgacggctactttgaggaaaccgcatggctattggatctgcttgtcaagggacttcgaacggaacaggtacgccctatagccctccatagattgtcccgcttgtttaacatttatcaggatatggagatatatcgccgggccaacgtttttgagagagtcctgtcgttctacgattcaccaggtgctggcttctctgcgaagaagaaaattttgcacttggtgtaccgctcaacacaggtccagggcagtacaactttgattacaagagcaggcattattagttggatacagagccaaatcccatcagtcaccggcagggatgcgtccacccttacagctatggcgcagtcattacttcaatcgtcggaccatgatcggaccgtgaagtggagtgaaggcgctgtacaacgagcagttgaacagattactgcgtag

SEQ ID NO: 24645 - DNA, 947 bp, Emericella nidulans
ccaattcggtatcgttgttttgcccacggtattatacctctccaaggtattggcgaagctggccatgggcttggaccgccgacctgaactaattgcccatctcctgagacttgagggaggcgccgatcaagacgagagtacagagaaggttacattagtggaaaagtctgcgaatgtggttcgagaagcgttcatcaagtgcctcaccgaccgcagtggtacacccggggttcatggaaagccggagggcaaaagggtcgggatttatctcatggctaatctgtgccttaagctgctctttcaggtagtactgggattcttcgtgttctatcgatgaatagctgacactgctatagtgcggaaaacttagaaacgccgagcaaatgttcgcaagtatctctgcgcagtctcccccactgaaacacttccctgcttcccagagggtaacctacctctattaccttggacgatacctgttctcaaacaacctattcttccccgcacagatcgcactacaatcggcttacgaccagtgccaccgtcaagcgataaaccagaaacgccttattctcacataccttatcacatgcaacattataatgggacgcttcccgtcactacaactgctccagcgacctgaggcagagggattagctgataagttccttccagtttgccaactcatcgttcgtggagactacattgctttccgagatcacctcactgtaaactctccggcaacagaatggttcgctagaaaaggcatcctcctgccgctgcgaaatcgatgtgagatacttgtgtggcgctcgcttgcacggaaggtcttcatccacggtggctttcacggagacccccagggccaagctcaaagaggtccggctccattcctgtacctaacaaaacttcaagctgctggacggtggttacaggcccaacatccacaa

SEQ ID NO: 24646 - DNA, 264 bp, Emericella nidulans
cgcttgccagtcctccaccgcccctccacgctcctccagcccctcacccgccgacaacctttctctctgactactacccaacatctctcctcgacaacagccgtcatggatgccaatgttaaacaacactacctcgctgactcgcctccgactgtggtccgtctagaggtgaagcaccactttgacaacctcaaagacaagaacctacggaaatacgctcattacatcagccggtttgttccccaatactacaagctgctgtaa

SEQ ID NO: 24647 - DNA, 1740 bp, Emericella nidulans
ctacgttcgacatcccgtcatgagtttggacctgacatgaaagaattatttgtctcgtacgctctagcgattgccaagctgcagaagcttctcaggctgaaagaggctgccacgaagcgcgaggaaaatacggtcaaccacgattgtacggatcctggccatgtgaactggaatccgttcgattttcctgactggatactactcgagatcgatgcaaactttcaaattaggcaggaccaggttactgtagccatggagatgatttcaccttcctctgggtccaattccgtccttcagatgaatatgggccaggggaaaacgtctgtaattatgccaatggtagccgcggttctggctaatggtgaggtactcagcaggcttcttgttccaaaagccctactatctcaggcagcgcagatccttcagtcacgccttgggggtctccttgggcgagatattgtacacgtcccgttttccagaaggactcggacaacccactctcttctggaagactaccgtcaattacatgaggggactttgctgagctcaggtataatactaggggtgccggagcatatcttgtcgttcaaactcagtggactccaacgactcgctgactcgaaactgccagaagcaggtgtgatgatcgacacgcagaaatggctggaggaagtttctcgggatgtgattgacgaagcggactttacgctggctgtaaagacgcagctcatatacccaggcgcctcgcagctagcggttgatggccatcctaaacgatgggaggtcgccatgactcttcttggtctctgtgcatgctatctcaaagatctctcaaaagaatacccccggagcatcgacattctcgagcggaactcaaccgggtttcctgtgacttacatactacggaaagacgtggaacacgctttggttcacaagattgcgcaggatatatgcaacgaaaagacatctttgttgccgctccgggattgcaacaaaatggacaaagaagcgatcaggctgttcattaccgaggaaaaagtcgaaaagtctgtgactaaacgcgttgcaaaactgttccctgacacccccaaattgcgcaaagttgtttatctactgagaggtctgctggtacacgggatcctcattctgtgcctcaagaaacgctggaacgtcgagtacggacttcaccccggtagggacccaatcgcagtgcccttccacgctaagggagtcccatctgagcaggctgaatggggtcatccggatgtcgcaatcttgttcacttgcctcgcattctactacgagggcttgagccagcagcagcttaagaaaagcctgggagcagttctaaaaagcgatcatccgttcactgaatatgagcgttggacgcaaacctcggccacgcttccggaggcgttacgacattgggctgccatcacggtggacgacgcaggcttggttgcggaaatatggaggcacttgcgctacacgcgcgaggttatcaatcatttcctgagcaactttgtgttccctctgcatgccagacaatttgccaccaaattgtcagcgtctgggtgggatttaattttgagtcgcggctctcaatatcgctcgacagatgggctatgggtccatcctggtttcaccaccggcttctccgggacaaatgacaaccgccgacttctcccactcaccattgagcagtgcgacctgcctggcttgtcacatacgaatgcagag

SEQ ID NO: 24648 - DNA, 357 bp, Emericella nidulans
atgtctatttctccttacccagccacgttgcgagggctacaggtgatgtcaaaacacttctacagacggcactctgtcaacgtttcgctctacttaaaaagatcgacaggacaacgccaagtcgagttcacgtccccgagcatcgcgctggaccttccgactacggataataagcggtacaaagatagctacgagctgtttgcgccgattgacccggagaaatccacgttcaaggtgctcggcacgaagctagagttgatgctcgtgaagggagatggaacgagctggccagtgctacgaaaggatgatagatggactggggaacggatccagattggtagcgcagcaagggcttaa

SEQ ID NO: 24649 - DNA, 929 bp, Emericella nidulans
gtgtatttgctcctaaccctccggggccggagaacaacactctcttcatcacagtacgcttctccgcgtcaataccagacctccgtcttgacatcgactaccccgaaaccaccacagccacaggtctcaagcaagccatccgagctcggctcccaccaagcttatcctcgcatcgtctccgtctgatctacgctggtcgtggtctcgaagataccaccccgctagctgtctccctcaagttaccacctccctcaaatcggttctccaagtcattatcggcaccagacaaagatgcagccagcgaggataccagtaatcagggcatatctacaaaacgggacaagggcaaggcacccatccgtgagccaccacggctctatgttcactgctcaattggtgatattgtcttgagcgccgcagacctcgaagccgaagctgcggctgtttcaacgcttcaaatccagggtcacaactcacaccggtctagcgatgagaaaaccaaagattctcactctcgccagcaaagtcatgacggccaagcctcttcttccacgatacccgcgccgcgaggattcgaccgactactatcagccgggtttactgcggcagaagtcacagccctccgatctcagttcatggctactctatctgtttctcgtactcgggatacgatgcctactggggcagaactacgtgagcttgaggacagatggttagatgaggggtcatcgacaatggcgacgggcggaactgtcgcgggtggagagggagtttcattcacggatgatgatggcggctttgggtcgaactcaaggggagcgatcgatgatatgctctggggtgctgtcatggggttcttctggcctgttggttgtgcgatgtggttacgtagggaggaaggcgtctggagctggcggaaggggttggcg

SEQ ID NO: 24650 - DNA, 396 bp, Emericella nidulans
gcattgccgctgggaatggcagctgcaaaggtcatgttagatgagattcacagttctctctcgcaaccctcgacggatcgcaacaattataccctcggtcgacgggctggccacaatgtagtggtttgccttccttctggcgtctacgggactacctctgccgcaacggtgtttgctcagatgctcccgacatttccccgtctgcactttggattgatggtcggtatcggcggtggagtacctcgtgaagatacagatatccgtcttggtgacgtggttgtcagcttgccgagcgaaacctctggcggcgtaatccagtattatttcggcaagactctccgtaatggacaattccagcgcatcggatcccttaataaacctcctcagtttctttga

SEQ ID NO: 24651 - DNA, 513 bp, Emericella nidulans
accacctgttcgccccataatttcaacctggtcaaatccctcggcgcaaccgcagccttcgactaccactccccaacgtgcgggcgtcaaatccgcgacttctcctctggaaacctctggtacgcgctcgactgcattacagacacacggtcgatggccgtctgctacgaagccatcggaccatccggcggtcggtacctcagcctcgacccgttccccatccggggccatacacgacgcagtgtcaagccgaactgggtgctcagtgtaacgatgtacaaccagccgattccgtggaagaggccgtttaaacgggatgcgtgtccgcaggacctggagtttgcgaagagctggttccagatcgcccagaggatgattgatgcgggtgagatcaggccgcatacatcggatgtgaaggctggcgggtggaatggtatcccggggggattggaattattgcagaagggagaggtttcggggaggaagcttgtgtatgaggtcgcgagtcactaa

SEQ ID NO: 24652 - DNA, 1007 bp, Emericella nidulans
atgaaaatcctcccatccttgcgcttggcctacatcatgactgttctctccgtcctcaacatctcgaacgccgccaccactgcagaatggaaagcgcgctctatctaccagacaatgacagaccgttttgcgcgcaccgatggctcgaccacgcacgcctgcaacacgaccgctggtctatactgcggcgggacttggcgcggcactatcaaccatctcgattacatccaagggatggggtttgacgcggtgatgatttcgcccatcatcgagaatatcggcggccgcgtgtcctacggtgaggcgtaccatgggtactggccgctcgatctgtacagtctaaacgaccatttcggaacgcatcaggatctgctggatttgagtgccgccctccacgagcggggcatgtatctcatgatggacacggttatcaacaacatggcgtatatgacggatggagatgaccctgctaagaacatcgactattcggcgttgaccccgttcaacaagagcgagtactaccatccgtattgcaagatcaaggactggaatgactaccatgatgcgcagtggtgccaagccgaaaacaataaggttgccctccctgacctatacactgagcgtaaagacgtgcaggacaccttgatcagctgggcgaaaggtattgtgaaaacatactcgattgacgggctgcgcattgacgctgccaaacacgtcaacaccgggttcctgaagacatttagcgactccgtcatatgtacgtgaccggcgaagtccttcaacgcgaagtcgacatcatctgcaactacacggagaactacattgacagtgtgcccaactacccaatctactattccatgctggacgcctttacccaagggaacactacctcgctgtaccaccaggtcgagaacatgaagaagtcctgtcgcgatgtcaccaccctcgtatccttctccgaaaaccatgatgttgcgcgcgtgccgagcttcaatgatgacatggcg

SEQ ID NO: 24653 - DNA, 282 bp, Emericella nidulans
atgaagcgcacccgctccacacagtcccagacaaacccattgaaggctgctgtccagcagacatccgtccacaacggccagaacatccaggccgctgaacggaactactataattgccaccggcgtctccttgagcaactcaacaacatcacaccccaggactccgccatgcatgacaaggtcaacgcaagtctccaagaactcattacccttggaattacataccgccaggcccaagccagccaggccgttgctcaaatcggcaatggaattcccgcttga

SEQ ID NO: 24654 - DNA, 524 bp, Emericella nidulans
gccagtccgcagctagcctcattgatgcagacgtggacgacccgtttttggcggccggcatgatgggccgcggcgcggagaacaaaggagagcgctttcgtcggcgtctagtcgagaagcagaaggaaaaagaaatcacccagatgataacctccacacgcgctggaggagtcgctggagaatatctgcgagcacagaataatgagaatacccgcattacagactcgacccgatccggagcacagcacggaaggacggactccagagatctgaaaccacaacttagctccctcgccggcgataaaccgctcggcatgaacttcagacgggctgaggcagtgcgcctcagccctaagaagcgtgcgcatgacggcgataggccctatggaagcggcgtaaagaaaacacgctttataacatctaaggggatcaaagaggctggcagggacagcctgggaggcgtctcaaacgccacgcctcgaacggatgattatgatgacgatgatgaattggaaattgtctga

SEQ ID NO: 24655 - DNA, 420 bp, Emericella nidulans
atccccccaacaaacggctggatagtcgaactcggtcacggtaaagacgcctcttcattcaagcctggctaccgcatctacatatctggggataccctgatgttcgacgagctgaaggagatccccaagcgatacggcgagcataatattgacttgatgctgatccatctcggcgggacgactgtgccgtcgccggcaatgtccccgttaaccctgatggtgaccatggacgggaagcagggggtggagttgatgcagctggtaaagccggatgtaacgattccgatccattacgatgactacgatgtctttgcgagtccgctgagtgattttaaagagcaggtcgagaaggctggacttgggggcggggttgtgtatctggaccgaggggaggagtatcggtttgccgtgagggattag

SEQ ID NO: 24656 - DNA, 397 bp, Emericella nidulans
aacacatatctgattagcataaacgtgacgaacaagttgaaggagaaatttttccatgaatatgttcccgagctgcttgatgtgagtcacataaagttaattgacgcgaatcttggctgacggtaatcagggactacaagacctgaatgaaactagggtagcacggctgaacacgctatggtctcttgcggcgcagcttgagaaatcatctctagtgaagagctcggatcacatggcgaatcttatcaacgaaattccccgaaaccagcctcacctcgattccctcatgttcctgcggcacaacgttacacaaattcaggaaccagccaacgtcggcttcgagccaagtccagtatggcacgatgatgaagcacttattacagatgaaacagccaag

SEQ ID NO: 24657 - DNA, 953 bp, Emericella nidulans
atgacgacctcctatgcatcagccccatcgtcaactacctcatccatccttgacctcgatgtcgacgtcagcctcggtgtttcagggtcgagtcccctcggtgcagcgggcgtctggcgcgaacgccgtgctttcgcctactacttccaccatgcagcgccctatctggccggcggactggaccagtccttctggacagtgacagtgccacggatctgtcgtgctgagactgcggtttgggacgcagtgaatgcgataagtacattgttcgagtttccggagatgtgtctagactttgtctttttgcggcatgaaaagacccaatctagccttaataataagcaaatcgaggcgttgagttggtactcacggtccttatccaagatccagagcgggattgagaggggcaacctcagtgtccaagttgcgctggtcagctgcgtgctgttcatctgtattgagatggtgcagggacatgttgaagaagctctggggctctacgggcaaggtgtccggctgatccatggtctgcgggctagagctagatatgcacctcagactgcaagtgatgttgactttagggagactataattgtcccgctcttcctccgtttaggaactgcggcgctggggatctcgggcgttccggtctgcgacctgctcagcgggcttgacacgcagcagaagtacctatttagctcactggaggacgcaagagacgcaatcattccgctggccgcagaggtgcagatgttctggagagacacaggccgcaacccgtttatccccggtcctggtggagaaccagccataccctcttctacagagaccgaagcggccgtcgcccgagcccaacgagaccgtcttcaggcacgtctggacgcctggttccgggcctatacggctctgaagacgctcccgcggttcaccagagctcaccaacctgccgcaaa

SEQ ID NO: 24658 - DNA, 868 bp, Emericella nidulans
cgtccgcatcgacatttcaattgaccccttctccggccgcaacccatcctactgcttcgtggacctgtcgacgaaagagctcgctgagcgcgcaatggctgaactcgacggaggcgatcttctcgggcgaccggtcagaatcaagcctggtgttgtgaagagcgcgagtgagcgccagccgcagcaacgaactggaatgggtgcgggcaccggcagtattggcgatgggatgagctcagggtcgccgcgcgcgaatagggcagggtcatcgccgttaaatgcagaccggtggcgaagggacgacaacttgacgtccgcttctactacacccacaaagttaggcaacatgagcacatacaatcccaaagccgaccccagcaaacgcctctatgtcggaggcctccccagactaacggacccagatgccatatccagcaacatcacgcaatttttcaagggttataacctgtacgttgtctcttcccttccctccagcggccactctttcaacatgatgtaaaacatagcaaaggaatgttaacacatggtcaggacgaacatttccaaactattcaccccacacccggcgaagcgtttcgaaccaggtgaccactactacctcttcgtggactttgagacagtcgaagagacgcagaatgccatggccgccctgaatggcgctgaggggccatggggcgctgccatccgcgtccagagggcgaggggtgagacgtggaaaaacactgactcgaacaatacctcagaggagaggagacccgctgctggacgatggggtcctaccacgcggcgacaggatgtggcgtctacccctgctccggcgagtggtgaagccgccgttcaagcgtga

SEQ ID NO: 24659 - DNA, 858 bp, Emericella nidulans
atgccttacggcgactacgagtacgatactgaccgcgcacagcgtgagaggtctcgatcccctcgtcgtcgatctcgcagtcctcgacgcagccgccgttcgtattcgccgcgcagtcgatctcgcagtcgcgaccgcgacgattaccgccgtagcgatcgccgttctcgctctcctatgagtgctgctcaaggcccatcaggaggtcattcaggctcgggatacagtggacgcggtggtagttacccgcctccacccaggtcatttgaggatcgagcagtcgccaaagaacaaatgatgcaatctgtgcgcgaatcgtcccaacaagaccgtcgggtctatgttggaaacctttcctacgatgtcaagtggcatcatctaaaagatttttatgagacagggtgagcagggtcatatcgtgctggcagggcatttagtgttttatgggattggaatctgtggctgactttgggggttttttccgcgccatttttacagctggagatgtcatcttcgccgacgtcttgcttcttcctaatggaatgtcgaaggtgggcgccaatgcgtagcgtgactggttcttcctttctttcatttgtttctggtttcttttcacccccgttggttcgatttgcttggactgtttgggttgacgggttgggcctggctgtccgggatcattgtagggatgcgggtgagttatgcaccgtgactatatccgggtgtcgcaagctgaccatgcacaggattgtggaatacgctacaagggagcaagcgcaaaatgccgtcaacacgctcagcaaccagaatctcatgaaccgcctcgtttacgtccgcgaggtaattgccccttttcca

SEQ ID NO: 24660 - DNA, 450 bp, Emericella nidulans
ctaaagtacggacaggaattttccgtaaatactgagcagggcacaatctacgacccagatctcgaagataatcttccgaaaaagctgtccgatctgggtatcacaacttcagctttcttgacggttatcgacgaagatgagcaaccaagagttaacctccagcttatcgtagtcgcacctggatcaccaccgtcagaggaacaacccatcgtgcttaacagaatacctgagatcccacggaaacctcaagcccctgcaccgtatgatgctgaagcgaatgggacgtcaaatctagggaaacgcaagcgcgatgctaatgaaaccgagctcaacggcgatcctcccactaagcgagtggcgaacgtttcaatctcggatggtgccgataaagcacatcccattgatctgtctgaggccgaagggggcgctattctgatcgatgatgactga

SEQ ID NO: 24661 - DNA, 723 bp, Emericella nidulans
atacaggccaaaatatgccaaaacgaactgaatcctaactgtacgcctctccatccgcatgcatatgacaagctaatagttacagtggcatatatgtatctcggccttgccgtccgtacctgtctagcagcaggcttcaatcgtaacgtccgacacaccagcgacccgcgtgcagaatggatctcccgaacttggtggggtctctactccctcgagatgtatctgtcccttaacctctagccacagtattaatatcttcccttctaacttaaaacagagaaatgtccttctcgctcggccgtcccgacaccctcggcctagacgattaccataaccgccccctcccaccacgagacaatacacagtatgccatcatcccgtggatggtggactttgcgcgcataacgcgcaaggtctccgtgcagatttatcaccgacaactaacgttagaggagaaattggccactgcgttggcgattgagaatgagctggactgctggattcgaaatttgccggaatggattcggccagggttcatcaaggctgactctagagctgggagtgggactggaattatggcagttgatagaggagaaggtggggagggcgccgcaggatcaagtgaggacgggacgaagactgggatagcaattggtggtgcagggaggaatgatctaaaagatccgaagtgggcacggaggcagaggcttgttctagggatcc

SEQ ID NO: 24662 - DNA, 1424 bp, Emericella nidulans
ctctgaatcgtataaaccatctgattaatgatctcttctatcatccatgtgccaaagtcgtccatttcgcgcctagagctgtagccccaattccatcgagtactgcaccgtccgacttcgattacccggtcgataccatcgagacgctaccgtggcggtcgcctaccgaacggacggtcgcgttcgcgccgttgaggctggagaaagtatacggattgacggtgttcttgaaatgcggcagcgtcgttcacgccattctgaagaactcacagtgttggtgtgtggaccgggaatccacctttgttttgcgcatccgccccctcacatactaccgaatcgagcttccgaatgagacagacccggacaaagagcttgtcactcagatgaaggacgcgctgtcaaaaatcctccgctatgaagtcacaccatgtccgttcaaacgcggctttactgtggagataccagaagaggcgaaggctcctagacggaagagggcatggcgcccgaaaggacaaagggagagtgctctcatgcagccggctcactctcaggagaccttcactatatcagaggccacaactcccgattcgcttagcgcagctgaagacgttaatattgctgccactgataattcgggcttcaccccggaggcaagcacgacggaatcagaaactccagataatcgggagcagctgccggagcctattaatatcccagtctccacagaaatgccgcggagatcagtatctgagacacaacagagcttccagaccttgctggtgaggtttgaagacactgaatctcatgatagcccggaacagacactttcctcgagcattgaatctttccactccatcgatgtcacgccggagccatccctgacacctccatctcccgcctcaccggacgacacacatcggatgtggtacgggcatcgcgaggtacaacccttgggagaggatttcgcgtatgcagagactttgcacgccagagaccagatgtatacgccgcaaaatttatatcctgagcaagatctcaaattacggcggacaccgggttctttctcaagcattcacagcgcgacgtccgcatcttcaaatccagatctaagtagcatgagcatcgaatttcgccgccgctcaaaagcatcttgcgagcgggaaaccgggcctgtgcgtccaccatccaccctaatcttgtccagacccgagaaacatgaggcagcttccctcattcagaagacctgcacactagttctagtaccccccctatcgctactcatagtcttaatacacatcgccgcacggatcgttataggtccagcgctggattcacctgccggagagtttcatcgaaagcttgaacggcagacttctcggcctcatgaggctgtggatgatttcgaccttccacttgcaccagac

SEQ ID NO: 24663 - DNA, 378 bp, Emericella nidulans
atgcatgtctcggtaggcattcctgtccaaccaggtgtaatcagggaaatggtcgagtccttcaaggcgctcgtattgaaagtaacaatcgctgaaatggatgtccacacgctcaacaccacgctccaaaccgaaatctacagcactattgtctttgaggctctcgattcaggaattaccgacatcagtttctggggttttaccgacaagcacgcttatacttgggtaaagggtgcaaagcccttgatgttcgacgagtattacaatcctaagggtgcgttctacgctatccactctgctttaacaagcttcaaagatgtggtacctggcaatcaaagctgtgcatatgcgtcgcctgggtctctgaagaagcaatag

SEQ ID NO: 24664 - DNA, 611 bp, Emericella nidulans
gcctgtgtcgcctgtggcatcctgtcggcatgtgctataactgccagtggtgaccatagacgtctgagaatgcaagcgcaacagctggtgctggcctctgttttctttgacctggaaggtcgagttatggtcacaccacatgctcttcttcccacccgaaagatagtcgaccgttatatcggcaaggtaagtcgctaagccttcccagcgatcgctactcgccacaagcttacgaactcattatgaagaccttcagcgatgacgacctcactagaactcatcctgcttttctatgggccttccgggcaagtcggaattggagtctaataaaagaggttgtcccttatatgagggacaggatagaagtagaggatgaggcgcacaagcggtatattgcgaagggtatagatccggatcaagaagccgaagccaatgcagggttcgacgaaatgttcaagcgccacttttgcgtggcagcgtatgatcttgctgaccaagttcgacaaccgctggatgaattgggtatgctgtatgacgatgttttgaccacatcaaccacctcatcacgtttttcgcgcgctatggcatactccaagctacgtactggaagg

SEQ ID NO: 24665 - DNA, 343 bp, Emericella nidulans
atgtctgccgccgctcgatttatccgcccctttgcctcccgcgcccttgcacagaagcttcctttgagctccgtccgcagagtctcgcccgcaattggtttcccgcggggaacagtccgcagcttttctcagagcacattctgtaagaatcgcccacaaattgtccctacggaggcattggccttagtcgctgtgattttataatgatattgtactaatcgtctctctctggtatgtagtgcaagtgaagaagtacacagagtctcacgaatggattgagctcgctgatgacggcaagactggtgagctccgaccgaacaccatcaaccctgcaatattttaa

SEQ ID NO: 24666 - DNA, 447 bp, Emericella nidulans
ccctaggtccgcccgggcagtcttaacgaggttcgagagtacgtacactgaagccgccactatccttcttgctacatcactacactattatatctgcatcactttatagcacctagaattactaacgcctccctcagcatcgcccgcaacgccggtaccctcgtcctccgctccggcggtgttattcgcggctacaccaactggggcgtctttcgcctccccaagaccacaacgaaacaccaagcccgctatacagacggccatcactttatcatgcgatttgatgctgccgcgcctgtacaaatgggtatccgccgccagctagcgctcgatccgcggatgatccgcttctcggttgtgaagcttggcgataagctggacgaggtcaaagatgttaccgggaaggttgagtggaacgacacgagaaatctgtcgagcacgatctaa

SEQ ID NO: 24667 - DNA, 1675 bp, Emericella nidulans
ctgatttcaaccagatgtcaagtacgccttctgctccgaataggggccttgtggtcttttctggaggaagtgctgccaataaccttgtcgaggtctttaattctgtcagggagagcaaggattgcccccttagttatatcatcccaatcagtgataatggaggctcatcttcggagctgatccggatttttggggggcctggtatcggcgatgtgaggagtgagtgctctaagcccgtcgtatctatgttttcagtggctgatgctgtacaggtagattggtccgtctaattccaccgtcgccccccaactcagagcgagctgccattaaaaaattattcaactataggctcccggcagacgagtccgctcacagcgaatggcttgccatcgtggatgggacatcatctctatggaagtcaatcacacccgcaaagaaagagcttatcagatcctttttcaacctacttaacctagagatcctcaagcgcgcgcggccgccctcatcgacctttgacttttcgtccgcaagtgtcggcaatctgttcctcactggtgcccggctcttcagtgggagtttcgagagcgcaatctacctcctaggcagcatctgcgacgtctcctcagatctcatccgtgtcatccctgccatcaactctaatttctcccatcatatttcggcgtcattggccaacgggaccatcatcgtgggtcaaaacagcatttcgcatcctagtctcccaccacgtccggcatcgccacgaccgaggaaagcccttcatgctgaagaaaatggaaacggcgcaaacgccgaactggcaataacgatcgactacaccgagccgtctgatgtccttgatacagctctctacgaagacgatcaaccaccaggattcctcccgcacttgcgcaacaagaatattaacttctctaaatccgagaatgaggatctcccagcccgcattactagggtgtggtatattaacccttacggccaagaaatcaggccgcgcgccaacccgcgtgtcctggaatccctgcgcgatgcacaggcaataatttacagcatcggatcgctatatacgtcgctcatccctagtataatcctgcagggcgtcgggcaagccattgtctcgtctccagcacgccacaagattcttatcttgaacggttccctagatcgagagaccggtccctcttcagatccattcacggctgcggactttgtcgaggcgattacccgcgcgggagaggaaagtcgcggccgagtgacgcttgaacctccacaatctccaccgtctacttcaagtttgggatctacaactggtcccggagcattcccctctttattcccaaatggacatggatccagcaagtccgccctgccctacacctcatacattacacatgtccttcacctcgaaggacccgggacaccacatgtggacaaagaccgcctcgccgagatggggattgagacgcttcgtctttacggacggaagattgtagcgtcgactgatggcgcggaggctgaagttcctattgggatgaggtatgattctaatggcttaattcaggcgttagaagttgtgctagggaagaagggggatgggatgataaggggatcggtcagtcggaggaatacgctggacccggggagaaagaggggtgcttag

SEQ ID NO: 24668 - DNA, 825 bp, Emericella nidulans
atgggtgactctctatacatggactggtttccatactggctgtccgatcttgcccttgagcacgaggctgttattgtcagcgccaattaccgcttgatgcctcaagcaactggcttggacatctatgacgacataaaagacttctgggcatggctacagtctccagttgtggaagagattctagcgacgtacaccacacccaccgaaatcgaccttgcacacatcctcgtgacgggagagtcagctggtggactgctgagcatcaattctgccctccagcttgcgaattcagattttgtcggatttcccgtgcgcgctgccattggcatgtacccaactgtagacatgaactccacggattttactgagcctcgtacgacccctccctttgggcagcatttcgacgaatcgatcatcagcgcgattctagacaccgctccagacgggcctatcacttcaacatccggtgattacctccctctgatgctggccgcgatcgaatacgggtacctgggggattggtacgcgcgagactcccatcactctgaaacactataccccgttcagcaactgaaaaagggagttcagatccccagaggaggtattaccatcattcaagggctcaacgatactgtagtgccgccgcaccattcagagccctttatcactcgactagctaaggtaacggccggccagccagggaacgacaagattcatctcattacccacgacggtgagcatgggttcgatggagacttgcggtacaataaagaggcgtggctacaggaggcattgaggcccgcggtagaagcgtggctggactga

SEQ ID NO: 24669 - DNA, 1438 bp, Emericella nidulans
atgctatggcacgccgataactccacctatggatggctcctccaaggcctagcggctgccgacaccgtcgcaggtccatacgaatttgtttctgcgacgtccccgttgggcaattggagtcaagattttggtttgtttaccgaccgcacggatggcagatcatacgctctttactccaacggtgacagtgttgacggccgagatgtttacctcacccgatacaacacaaatattactgccctcgaggaagtggtacgaatcgttccggattacgcagaagtttttttttttttttttttactcttctgacaccgtcctaggtctaccgcttccccaaatatgacctagaagccccaaccattatccagacagaccacagctactgggctttgatgagccacaagactggctatcgcccgaacagtatgcatgatatccatcctgagaaaagctgaaagaaactgacacctacagacgtcgttgccttccgcgccgacgagctcagcggaccatggtcacagccattcattgtggccccgctcaacactcgcacgttcaactctcagtccggattcaccatcaggattgacgggacgaagcaaacaacatacctctacctcggcgaccaatgggattcaaattccctctgggagtcgcggtacatctggctccctctccagattgatgagcgcaagaagaccctcgagttagaatggcatgacgtctacgatctgaacgtgtgagtattacggtcatgaaccagggagacagttgttaattttttaggaaaaccggagaatggcgaagcatcaagggaaagacatacacagccagcaaagcaaaaacaaacggcgatgcctatctgcaggaggctgtacgtttagagccctcacgatacccttccatcgaggcatcctaactctgaacacagaactttggcaccgacggggtcatagcaactggcatttacggaaatgatagcacaatcactttcgaaggtatcgaaggcaccggcaagccgcagtgggtttctttctactaccagagtatgcctccttttattcactgaatgcagccctacttactaatgtctttctctccattcagatactgacgacatgggcttcggcgaccaacgtatgtaccttcctactatcctatctaacatgaccctctgaacttctctagctaacctctaacagctggcggcacacctgaccgcatcggcggaagctggcaactcagacgcatctcctccgtggttgtaaacggtgacaccgagaacgtacagactctctaccaacgcgacacccataagggcatcattctgtcgacgccactgcagctaacgctgaagaaagggaaacgcaataccattactgttgggggtctttacaacggttttgactacaaaggagcggatctggaccgtattgtt

SEQ ID NO: 24670 - DNA, 511 bp, Emericella nidulans
aaactgggtcttccgcaaagccctcccaccaccatcgatacaacaaacccaagaccttcccccaccaacccctccctcttctctcccagccacgtctacgacaacctcctctccagacggccttacccacacacgcaccctccgccagacggccgtaacgctcttccgcttctcagcactaacgtttaacccgcataaaatccactactcgcagccgtggtgccggcaggtcgaagggcacaaggatatcgtcgtgcatgggccactgaatctcattgcgattctggacttttggagggatgtacggagctctgcttgtggggcggatgttgatgcaaacacatttttgcctgacagaattacataccgagcgacgagcccgttatatgcggaggatgagtaccggattgtgctgaagaagggtgagggtgaggacggcaagaagagtgccgtggagattattacgcctgagggtaatgttggcatgaaggctaaggttgtgggtgtatag

SEQ ID NO: 24671 - DNA, 432 bp, Emericella nidulans
tgcttcatccagccagacgggacggagaggcatctcctctgccagccagagagttggaaaattgagctgccaaatggcgaagtccaagcccaacggcagcaggtcccgctgatcctcgcatgggctctgtccattcacaaggcccaaggccagacactacaacgagtcaaggtcgatcttgggaaggtctttgagaagggacaagcctacgtggctctgagtcgagccacctcgaaagccggtcttcaggtgctccgattcgatccgcgcaaggtcatggtccatccgaaggtcattgaattctaccgaaatctggttcatgccagcgacttgatcaagtcgaaacagccgcctaagccgcagcgcacaatatcgaatggagatgaggatgtttacattgatgagcttatcgcggaagcggaagcatattag

SEQ ID NO: 24672 - DNA, 729 bp, Emericella nidulans
ggtgaagaaggcactggcgatttcgagatcgatgaccgtgctgcgttctcttggcagcatgatatccgcatctataaccagaccgaagaaggatttgcgatgagcttattcaacaacgccaatactccaaccaacgaggtagccgcgactactgggctgagtttcgatgttgatatgattaaccgcaaggtccacactcgtcggattttgaacgacacggacgatgtgattcacagcgtcagccagggaagttatcagctcctcagcgaagagactcaacacgtacttttgggttatggttccatcgcccaggtaaaagagtacgacgccgacaataaagaggtcctcactgtcaagtttggcgaggacaatgcagttgcgtcataccgtggctacaagtgccaatggaaagccactcccttctggaagcccgccctggtcgttcgccggacgggcccagactccatctttgtctacatgagctggaatggggcgactgagtatgacaactgggccgtctactcatcaacgtattccgacgggtccgaccctaaatttgaagccactgtcgaacggaccggattcgaatctagcattgaactgcacggcttacctagcgggttccttcaagtgattgcacgaaagggtgacattccactaggatcttcggacgtcgcatccctgcagacggaggtgggcggcgaggtggagacagagacaggcaattag

SEQ ID NO: 24673 - DNA, 763 bp, Emericella nidulans
gtagcatgggcactagtgctcaggtcctacaccgggttggaagatgtgtgtttctcgtatgcaacgtcggggcgggatgttcctcttaaaggaatcaacaatacggttggagccttcctaaacgcagtggtctgtcgcatcaagctgccgcctactgcaacagttccgcaggctttggtgaaagctaggaacgacttcgtggaaagcctctcacatcagtactacttagccttggatgatgcgcaatctggggactttgcccgtttcaagagcaacacattaatgtcatgccaacgaaaagctgcaactgaattagcgggatctgggcttgcttttgagcttgttgatgctgccaaccccaatgaagtaagtagtgattatatcccttacagtccattcgacgctaacaagtgcgcaagtatgacatgtccataaacatccaagtagggcatgagggattggaagtaatgattgattactggaactcacggattggccagcgcacggtggagagtgtggcacaatccttccggcaggcgctcctgaacatcgtcaaagaagaagatgccgtgctgggagagattgatattagtaccactcaagaaatcaatcagcttcgtgaatgggccaaggagatcccaccaaaggcagactatcgtatccacgacaaagtgtatgaacagcgactccgccgacccgatgcttgggctgttcagggctgggacggcgacttaacatatcagcagctggacgacccgccgaa

SEQ ID NO: 24674 - DNA, 690 bp, Emericella nidulans
atgattgtcgtccggggtattaagactcgtgatgccaatggcaagccgtacctccggcaagacatcgacaagtggtacatggagcagatggctggcgacagaatccagctcactctatttgtggaagctctggctctgattcagagacgtgatttggatgacctgaagtcttacttccgtctggcggccatccattcggctccatggtgcgaatgggacgatgtacctcaagctcagcgtgagccgggcgaacgaggatattgtgtgcattcgaactacacgtttccgacttggcatcgagtgtacatgatgctctatgaggttcgacagtcccggcggttgggtgaaacggtgaattgatatgtgactgacacattcatgcagcgaactctgtatgaagcaatgcttgaatggattcacgaggctgtcccagagagccataaagatatctggagaaaagaagccgataaatggcgcctcccttactgggactttgctcgttttgcggatcgacctccatcaacagctggccctctcccgcatgatattgaccatgaccaacttagactgcccatcctttgtatgatgccgaatgtgcggattaccttgtttaccaaggacagcggccctattatcgaatctcgacccaatcctttgtataaatacataaccccacaactgatgggtgaa

SEQ ID NO: 24675 - DNA, 258 bp, Emericella nidulans
ggatgcttacgcaactccggcggaacagcgacatcggcagctgtcggggcattgccccttaaacaaccacgcacaccgccggtggtaccaagtcttcctccggcctggtattcaccttcattctcccagatcacatcaacggaacttgtggacgatgaagagatggagctttgggtggacaccgcatctagagagaaaaccgaggaggaagaggaggaagccgacgatgagatcgacgaggcatacggatgcgcatag

SEQ ID NO: 24676 - DNA, 2297 bp, Emericella nidulans
ccgacgataaggaggctgatcgaagatgatgcagcctgggcatacgatctctactctctcggcttggtcctgatggagattggcctttggacgccgatcagtcgcctgtggaagttcaaatacaacaactctatgttcaagcaaagggtggagagtatgtatctgaggaagctaggccccaagtgcggtagtgcatacattcatgtggttcaattatgtctcgatgcaccaaatttccacctttcgacccagccatttgatgacctcaacttgagaatacctcagaccttccactacccggtcttggatctttcggcacccgagagcacttttgctttctccatgaatttcgtttacaccttgtgtaaaataacttggtcgtgctgcaggattgacattttttctgctccagcagctgaagagctggacgattgtcttcctctagcgcttgtccctggttccgaagcagatgctgcaaagcaagctgcgcgagaatacaagggacctgaacaagtaacccgcttctcgcaaccagtggctgtggctcttacccctgagaccaaattaatgaagatcgggcttgaagaaaaaaggctgaggaagcgcacattcaagaaacttacaacggtcgaaattcctcaagaacacctcgatgagtggaacttccgcatgctgcccaaattgaggaagctgctgcagaaggtattgaaggattcgtctgaatcatgcggtgtcactctcatgatgacgggcgacggtttggaaaatgcgaagacaacaattgtgtgacttgtgctagcgttaaaaggttagggcggcgctgaaaaagtactttccctcttgatgacaaagaagactgggacttgcttgtgcttcgcggagatattgagcgatccaaagtcccgcgcaagaagcgccgccgccctgcaaagactggacctcttagcactatcgaagcccctcctcctccgcaggaccctaacccctgttttcagccgaggcctctctgcggtgcatccatgggcgccttcatgaatgaagaacatctccctcctgtgtcgtacggtggtgccatcctagttgatggtgttccctacggtatgacagtacatcacatgctcgaggctcccagcgatcaagaggatgcggatgatatacatgaagctttggaggatgctctgcttcggtcggccggaaactggactcgcgatctggcttcccagaattcacagctcatgtcagcttggaatgatgactcctctgcacatagtctcgaatttgaagtctccgatgacgaggatggcgacgactactatgatgactttgcgctctctgaaggatattcatctgacgagggcgacgacgactttgcttacgatgacgatgacagagcgtcgatcggagacacagctggcatcgaacctggagaagagcctcccgtgtttgtaacccagcctgccattgatgacgttcgcgaagatttctttccaagccccgaggacagagatgacgagcatctcgcttcccacactttcggatacgtttatgcttcctcaggcgttcgacgctggacacgacagggcatcaagcatgaaatcgactgggctttgattaagatcaaccaggatcgcttagacgcgaggaatattgtctacgacaagccgtcctactctttagtggcctcagcgagacggagaccgggtgaaccgatgcccctacaacaacggaaccccatcctcttgaatgacatagcacggtttgaggagcttggtggcctcaatgttcactgctgtggccgaactagcgggttgcaaactggacagatttcgaaggcgttgacgatggtgaagctacatggtcggcacaccttctccacgagctttggggtggatgggaacttcggaggtgagtgagtgttgcttgccagcattctcgttaactttctcccttctcatactaacctggctctttagttcccggtgattctggcgcttgggtctttgaaaaatccactggccgcgtttgtggagctgtcctggcatggtccgaggcacttcgcatcgcctatatcgctccaatggaggtcctccttgaagacatcgctcgcaccctacacgcgacccatgtcacacttccagatggccctaacgagtctgtgacctttcctatgcagcacccgtccgttcccccaaatcctagatacctcggcccgcctccattgccagatcaacttcatgttgatctcaaccgacaactgcatcttgatgatcagagcgttggtgcagtcaacaccagtc

SEQ ID NO: 24677 - DNA, 628 bp, Emericella nidulans
ggacaacctgccgccgtcaaggtgtttctggtgccccagtttggagcgccggtctcgcaaaagacgtttttcaagggtgataaggttcaattgaagtggaacgcgtcaggcactagcttgattgttctcgctcagactgaagttgataagactggcaagagttactatggagagaccactctctatctcttgagctctagcggccagtttgattctcgggttcatctgggtatgtcctcacaatcagcttcttacacagcgatctaacgctccatcagacagagaaggcccgattcacgacgtcagctggtctcctacttctaaggaattcggtgtcgtgtacggcactattccggccaagacgaccattttcaatgttcgcggtgttcccaaacacagcttccccctgacaccccgaaacaccattttgttctcgccccatggtcgttttgttctcgtcgctggctttgggaacttagctggtcaaatggacatttacgacatggagaaaaactacaacaagatcactactgtggaggcagctaactcgagtgtatgcgcatggtcgcctgacggccagactattctgactgcgaccaccagccctcgtctgcgcgttgacaacggc

SEQ ID NO: 24678 - DNA, 399 bp, Emericella nidulans
accatgggaagagagaacttcatccgacaaatcgagaactctgtcgagttcaaattagtcgatagagtcataaaagaagaagttacagttcaagatgcagtccaagaaatcatcagcatgacaatgactgcattgtccattcatggtcccaagaaacaaggcgggatcggtctcgcagactacaacgtctctcttgcagtaatggagctggcccaacgtctggaaccatccaagcacacaaagcttgttgggtttatatctcatctccagaaacaagtggccgttgatccctcaacgaacgaaccgctgaaggtccagggtgataccctctggaccgacatgccgtcgttcggctatacggagcttgagacatggtatgagttcggcggcgactataag

SEQ ID NO: 24679 - DNA, 489 bp, Emericella nidulans
gaggatgacgaatcccctcatgtctcaccgaagaccatcggccctaacaaagccacagaagtgaacataagctccccgcattcctctagcgagaacggatcagaagctgcatcatccccgccagagactacatttacccccaactcaagctccaccgctttgccggtggcaatagttccgcgatatcagcttacaacagctgacgcatacgcatgcatggttcctatagccgaccaatacaacgtggccgatcactggcagtggatggcagctctctggcgcggtgccgtggggccggatatcacggtttacatccgggagtgcgacatacaagagttgaagcaagtcggaaacccagttgagatccgcctgcaggatgccaaggcggttgtcgtgcggagactcgcgaatgcccctggcccaaaggagctggaggaaaaagttcttaagcgattaggtttcgaaattgaagattacattacacaataa

SEQ ID NO: 24680 - DNA, 296 bp, Emericella nidulans
catacctcaagaaccccacaaaccccgactcgaacgcagactcttctgcttcgtcatcagtaggaccgccgcgtacatcgcccgggctcgctactggtgatcctagcctcgcccccgctcttcttccccagtccaatatgggcgtgcagtccggaaacaacattggcagcctaccgagcggattcatggagcccaactacgaggtctttgatcctctcaattggcttcttgatggcctggtggacttgccgtatccatactctgtctccggcatggaggcgcaaggaattgcatag

SEQ ID NO: 24681 - DNA, 282 bp, Emericella nidulans
aacctgcagcggaactttcctgccgagtcgcgacaaagcttagtgatcggaatcttctattctggcgtggccgccatattcatctcgtactgcaccgcctggtgtgtacgagcgacctcgtctaccacctacgccatggtgggcgccctaaacaagcttcctcttgcggtcgccggcattgtcttcttcgcggcccccgtcactttcgggagtgtatctgccatcgtgcttgggttcatcagcggccttgtctacacgtgggcgaaaagcaccggtgcgtga

SEQ ID NO: 24682 - DNA, 780 bp, Emericella nidulans
atgcctgagcacctggctgagggtgaccataagtatgatcttcagtttggtggacggcactttgagctctaccagcactcacatcttggttatggtctcatggccgctcgcgatgcggtgcataaggctattgtcgaggcaaagttagcgtctatgcccccagacgatcgctcttggctgaagcaaccaatctctaacccttgcattggaccgggaatggaacgtgaagtgaagttgaagtatgaaggtgaacaggcaaaccacccgctcgcgcctggtgtcacagtcaaaatggttggccctaaggagggagctccttcgacagccgctcaatgccgcggactgacggagaagatcctcaacaaggatgctgcgtgcacactagctccgtgttccttcaatggtgtccaccagccgtctcttgaaaagaccttcgctaaagaagatgtttacatcttttcctacttctacgagcgcacgcagcccttgggcatgccggactctttcacactagatgaactgcacgaccttacaaagactgtatgtgctggcgagtctgcgtggagtgtctttgaaggaatcccagacgcactgaaggaactacgtgaccgacctgagtggtgtttggacttgaacttccagcttggtctccttcacacggggtacgagatgcccttgtcgcgagaggtcaaaattgcgaaaaagatcaaaggcaacgagcttggatggtgtcttggtgccaggtaagtatttcagcctctctttgatttccattgcact

SEQ ID NO: 24683 - DNA, 591 bp, Emericella nidulans
  unsure (1)..(591): unsure at all n locations
atgactgtactcactcagctgcagcactggcatggccttactgcatttactgccccattctcagatggatccccggccgcaagccaatggccgattcccccgggccacttcttcgactacgaagtcaagccagagcccggctctgcagggagctacttctaccactcccacgtcgactttcagagcgtcacggccaagggtcctctgattgtcgactcgagcgagccggctccctaccactatgacgaggagcggacggtgatgatatcggattacttcagtgagcccgacgacgaaatcgttgatggactcgtttctaccaacttcacatggagcggcgagacagaagcgatcctggtcaacggtcaaagtcgacctgcgacgaatgctaccggtgcatgcaagttggctgcgatctccgtcgaagcaggaaagacgtatcgcctgagattcatcggcgcaacggcactctcctttgtttcgctagcgattgagagccaccatatgcatatcatcgaggcagacggccattacacnaagccactggagacangacttctgcagatcggcagccggcagagatacagtgtc

SEQ ID NO: 24684 - DNA, 585 bp, Emericella nidulans
atgccaccccaaatcaaacaggatctcaatcggtcaggatgggagaccaccgacttcccatcagtctgcgaaaactgcctccctgagaacccatacgtgcagatgctcaaggaggattatggcgccgaatgcaagatctgcacccgccctttcaccatcttccgctggaaagccgaccggacggcccgcaccaagcgcacgaatatttgccttacctgcgcccggttaaagaactgctgccaatgctgcatgctcgatttgtcgttcggtttacccattgtggtccgcgatgccgcgctgaagatggtggcgcccggtccgcagagctcgatcaaccgtgaatactacgcacagggccacgagaaagagattgaggaaggacggggtgctgtggaggaatacgaaaagactgatgagaaagctcgcgagttgctgcgaaggctcgccaacagcgaaccttactataggaagccgaggcagctggaggcgccggaggaagatggagagacgcaaggcccatcagatgctacggtggtcaggagccgttatggtaacgggccagggccggtacgaacaagtgagagc

SEQ ID NO: 24685 - DNA, 330 bp, Emericella nidulans
tagcccccccctccgagttggttcgtttcaggactcaatcgactcaaccaggcgggccggggtgactttttcgaagcagtgatgcggtacacggctgtagatacggaaaccatgcaacccgtcacccactcgcaggctcaagccaaccagaagttgaaattcctctatcttccacgcatcaggtgccacgattgtcccgggaaactgtatacacctggccctgctacgacggtggataattttgaggttcatcttcgaaatcgacaacacaaagaacgtgtcgaagaacggctcgcgaaggcagcagcggctagcaacgcggccacataa

SEQ ID NO: 24686 - DNA, 1635 bp, Emericella nidulans
acctcatcatgtcgccttcattgcagacccgcagctcgttgatccgcacacttaccccgaccgcccgtggcctctgtctaccctcaccatcaaatttacagaccagtacatgcgtcgctctttctcgtcaatacaacacacgctggacccggactcggtgttattcctaggtgacctctttgatggcggaagggaatggtcgacttcccgcagcagcagcccagaagagcgttggagacaatacaacgatgatttttggaagaaggaattccatcgctttgttaaaatcttccttggtccgtggagtagccaggagacacagtctacgaactcgcgaggtcggagattgatcgccagcttgccgggcaatcacgaccagggtttcggctcgggggtccagctaccagtccgcgatcgctttcagaacttctttggcaagggaaatcgagtggacgttatagggaatcatacgttcgtctctgtagatactgtttcgttgagtgcgatggaccaaccagatccccgtactggaagtacgggtggtggaaacggagatggcgaccggccaaaccaggagatctggcaagagccggaagattttctgaatgccatgaaggtacaccgcggtcgcgccgaggcggacgaactgcgtttcatgggggaaccaagaaagggtcggctgttcaagcatgaagtttccgaagtctcaaagccttcgatataccgagaagatgacccagagattatcggatttccggctatccttctgtcgcacgtgccgttgtaccgcaagccagccacgccttgtggaccactcagagagcgatatcctccctccgcagatggcttagaagaggacgagcaaaacgcgcttaagatcagtggcggatatcagtatcagaatgtcttgactaagacaatctctaacgacatagtgtccaagattgggcccaacctagtccaggtatactctggcgatgaccatgattactgcgagatctcccaccgcgagttcagcggttcgccgaaagagatcactgttaagagtatatcgtgggcaatgggggtccggaaaccaggctttgtcctgacaagtctctggaatcctatcgaccctaccaccgggacctccatcgagtcttccagccctggaagcaccatccaaaaccacctctgcctcctccccgaccaactttccatcttcatctactacggcgtcatcctagcattcacccttaccgttcttctcgtgcgagccgtcatcctcgctctccgccgcaccgaatctacaaccccggaacctatccttccgctcaccgaaaaccccgtaatccgcacccgcagccgagctgtttcgcatacatcctcttcgagcatcccaaacaccgccttcatcaaaccaggcgggctagctagccgcgcgacgaataattacaatccccgctattccccgccacactcgtataatgacccctcggcctaccccagctctgactacattggggaaaccgatacatcgaaatggaagccgagccacgcggatcgcgcgcggcgcggaagtgagacgctttttggacgggcgtggacagagttcacccgctcggtcgagaacgttgctagggttgcgctggcgtg

SEQ ID NO: 24687 - DNA, 877 bp, Emericella nidulans
atgtacaatgccctaactggccttggaggctccggccaggtcgatccaaccgtggcagcgaacgcgaccgtagcccttctctcagcgaccgcaggaaccgctctattcgtcgtaggacccatcttcgaccgcgtcggccccaggatctgcctgctgtttggaggatggacataccccctgtacgctggaagtctcttgtgcttcaaccggaccggaaacggggcctttgttatcgcctctggcgcgattctcggtattggcgcttcgtttctctgggtctcccagggcgctataatgaccacctacgtccgtgaatcccagaagggtcgcgccattgccgcgttctggatcatcttcaacctcggtggcggcgttggatcgctcgccagctttgggctcaactaccactcgaccagtgggactgtctcagacggaacatatatcgccctgttgatcctcatggccgtgggctggcttctgggcatgctcatatgtcctccgtccgccgtgcgccttgaagagcttcagcaatcgtcccggactcagactgctgtggtcgagactgagaagcccaattggaaaagcactctgcgcctggctgcacgcacgatccttgactggcgtgttctctgcatgctccctctcttcttctgtgccaatgtcttctactcctatcagcagaacatcgtgaacgggatgaccttcaacatccgcacgcgctccctcaacagcgccctctactggctcgcccagatgctcggcggccttgtcatgggtctcatcctcgacattcccgctctaacggcccggccgcgcgcgagcgggatggctcttcctcgccgtcacggggctggccatctggggcggcggtacgcgt

SEQ ID NO: 24688 - DNA, 480 bp, Emericella nidulans
gacaataccttgggattcttttcttcacgaaaaaatggtcaagaggaagctgggggccctggaaaaggtcgaggctgatttgtatgtattactcctctttacgtttatcacggccgcctgtcccccagaaatttcatctgtcgctaatgaatatatctcctccgttacaggcccaatttacaacataaaatccgcagagatccgaagtgagttgtcgcatgaaaagcagcaagactaaacttgaacgtatcctgaccattctttctcctcaggtcctatatcgaagatttccgcgcccagcactatcaatatgaaagtcaccgggaaattttcatggcagcgccctcgtccgccacagacacaggtctgatctcgctgcgtgaacttatcgacttcattgcccatgttgcagactgctatcccgacataacgaaggattttggccagcagctcatcgatatgctgtcgcagcatcaccag

SEQ ID NO: 24689 - DNA, 558 bp, Emericella nidulans
cgcggccttgttcctaccatctcctacaacggcaccgctattcccgaatccgccatcgttgcgcagctcctcgccgacgcccaccccagccacctccttcccgcgtctaacacccccgaaggggccatccagcgtgcccacgtctcctttttcgtcgacaccttcatcggcaaggtctggtcgcaggcattcgcggcccagaaggctgcgagtgaggaagagcgcgccgccgcaactgagagcattgtcgcggctattgagaagaacaatgtcgagggtttgctgtacccggaggggactgggtcaggaccctttttccgcggtgcggagaagttgacgcaggtcgaggttctgacgggaagcttcctgctgcgattgctctcgttgcacaagtatggtctgctttccccagagctgccgagccagttggagaagcgggtaccgaagttctataaatgggcgcaggaggtcgtcaagcaggagagtgtcaattatatctgggatgaggagaaggttggcactcggacagcgaagaagttcggcgctgcaaaaaaatga

SEQ ID NO: 24690 - DNA, 276 bp, Emericella nidulans
gactcgtggcgacgcgctcgcgctgagggccagactgacgaggaagggggcggacagtactacatggacacgcagaaccacttgttctggacctgggacacaccgacactgatgactcgcaagttcacagagatcgtcgatgtggagaagctgggaggcgtgatggcctggagcttgggagaagatacatataactttgagcatctgaaggcgatgcaggagggtgttgcccagcgcgccggtggaactgcgacccctgcgcgcactcggtgttga

SEQ ID NO: 24691 - DNA, 285 bp, Emericella nidulans
cccacgtcgaacctcgacccaacccgtcagaacccttccatgttcgagcccatccacggatccgccttcgacatcacgggcaagggcattgctaaccccgtcgctacattctggactgcagccgagatgctggagtggctcggcgagaaagacgccgccgacaagctgatgcagtgtgttgaaagtgtctgcgaatctggtatcctgaccgcggatctaggcggcacggccaccacgaaagaagtgacctccgctgttgtcgaggagatcaaccgtctgaattag

SEQ ID NO: 24692 - DNA, 566 bp, Emericella nidulans
gtaggcacttgctaccgtttcgtcgagagactcgggtttgcatatggccctctctttcgacggtttacatgcatctcttcagatccaaatgatcgaaaagcctcagctaggctgcgcgacctcggacgaacccggtatccgcttcaccccgccataattgaccacctgctccaagctttcccaatggccatagctcaagggttatcccgacggttccagatcattgtccctgcggcaattggacatatctatgtgcgacgggccgacgttccagaaagcgaaatgtcgctggaagcattgatggccgagaccggcttcgggacatggatgggtcatggtatcatgatggctggcgacgggaatgatgctgtgcctgtcctgtcgatgacggatgttgccgggttccctgcgtccgggacgggagacactgcttccataccgctggggtcacagattcggtgggctccggatattgatttcgtagaggcgtctagcttgctgctacctgctgagccgagcgatgagtatgtgagcatgatgcgggcatgtgatgctttgagtatcct

SEQ ID NO: 24693 - DNA, 816 bp, Emericella nidulans
atgccaacggacgacctgaaatcccacgcgacatcaaatgcgcacgacttttacgccctcctcgacatctcccccgcagcatcagaatctgagatacggcgcgcctaccgtcgcacggctctgaagtaccacccggacaagatcacaaaccccacgcaagccgatatcgaccggttccacctcctgcagatcgctaacgatgtcctttctgaccctgcagtccgggggctgtacaataatgcaagggaggctcgggagcgtaagaagagggaggttgagctgatggatgcggcgaagaggaaaatgagggaggatctggaagctagggagagggctggagctgctgcttcgggaactgcagggcagagaggggtgaagagggcgtggggggctacggttgatgataatgatgcggaagagaagctggcgagagagattgagcggattgcagaggatggccggcggagacgcagagaggcggaggagaagttacggaaagaagtcgaagaggatgagaaacggatacaagaggaagaggaagagaagcggcgcgcgcaagatcgaagctcgaagcgcgtagataggtcgcatgaagggggcacaaatgtccctgagcaggagcgcgcagtgaaagtgcgctgggttagggagggacggggcgtgaatctcggcaaggacaggcttatggcactgttcgcgccgtttgggacaattgagagcgttcttgtgctcaagataggcgacagccaattgaaggccacaaagaaaagaagaattgtcgcttttgaggggttggtttttcctccatatgcagtg

SEQ ID NO: 24694 - DNA, 312 bp, Emericella nidulans
atgggtgcgcgggtgatcaaaattgaacggccgggcgtgggcgattttgcccgtgggtacgatactcgagtaaacggactcgcatcgcatttcgtctggacgaatcgatcgaaggagagtctagcgttagatgtgaagaaccctgaagatcacgaagttttgatgcgacttgtcagcaaagcagatgtacttgtgcagaatctcgccccaggtgctagtgctagattaggcctttcattcgagacgctgaaagaagagcatccgtccctgattgtctgtgatatatccggatacggacaagatggtccgtac

SEQ ID NO: 24695 - DNA, 471 bp, Emericella nidulans
cttttctcctacgatccccttgactccacctataccctcgcgccgacagtgggatggactgcgatcgagatgtccgcaggcatcgtctcagcctgcctacccaccctacgcccggcgttccatttctttttccggattctaggacttcaatcgatcatgccctccctgctccgcaccggccaatcgcaaacaacaaccaccaatatcgtaggcaatgatgtcagtctgggcacatcgaagacagcgcagaccagtgccgggcgagcgaacagacgctccttctaccatcttcctgatgaggacgattcgttggagtcagaacacggtagtccgcccttccgcccagagtatgatagtgctcacacgaaaattgtagttcaagggaaaggccaggaaggcgacttgaccggagatgaggtgccattgcaaggaatcagggttcagcgagaatttactcagcgcgactcttga

SEQ ID NO: 24696 - DNA, 770 bp, Emericella nidulans
cttccgaaacgcaagcaaccggcaacacaagcaagaaccaaagttctacgggaagccgaaaggccgtccgagcctcagttgggccataccgtgtcagtgtccgccggaaatgggcctgcaaaggtcctcagtagccccaagcacaagcactcgtccagcaagtcgctgaagaaggaaaagaaggaaaagaagctttacagccggtcgttcaactttgagaaagagaagccggaaatgcttcaaacactagcttcttcttcggtcgccagcacaaatcttcttaatgctcttaagcgtgtcaaccgagagacgcagcgtgtgagtgaagatgcagaggtcctcaacaggtttgagacgtgtaaacaactgcgccgtcagatactccggtacatccaacacgtggagagtgaggaatatcttggaagtcttatccatgctaatgaggagttggtgtccgcactcatggcatttgaggtgttggacaaaagtgtggactacgatagtgatagtgatcaggacgttcttgaaagcggctggacacccgaccgcgaagtcagcgaatcctttactgggctatccattaaccctccaaaaccgccccgtcctactcgaccattgagcatttctgtaccttcatcttctacacacagaccggaatatgataccgagagtgagtcggaatttgagcctgatgatgatgacgagaacaacccttttggggaccgaaatgctattataacccctctggtggataattttggccgaactgt

SEQ ID NO: 24697 - DNA, 768 bp, Emericella nidulans
cctgcgtatggcaaccctggcgtcgggtaccaggtcttctggcgacgtctcctcctcgtgctgataggagttgcagcagcgatcatcgtccagatactgcctcgtcccccatcagcagcacggcacgtttgcagctcgctttcacgttctcttcgcactctatcagatcactacgccctcctcctctcctgctggggtcgtgtcggcgacgagggcagagctattaccgagcctatctggctcgaactcaccgagtcactggtgctgctcgaagggccaatattcaatctccgttttgagttttccagttctcgcttcgactctgagagcctcggccaagtcaaacaaatctgccacactatcaacggtctcctcgctcgactgcttgttgcatcggcgtccctcccacaagcctacaaagaccgtctctccaaccacatgggtatgctcgaccatcgccgtatcggcgaaatcatggctgtgctcggcgtagccgagcagtcacttcgcaccggtgacgcgccccccgagatcctcccaacaccactggtccgacgcgcgctggagcactggcagacgcagacacttctggatgagtacgctgtattggatgcggagatgatccgtgatgagaactaccggagctactgcgttgcattggcggcgtacatttcgttcttaggcaaaatcgatgagttggtcttggtggttaagggagtgctgggggaggcccatttagtgagtcaggagctggtggatttagtatag

SEQ ID NO: 24698 - DNA, 396 bp, Emericella nidulans
gaggaatcacctgttgagccgaatcgaaagtcctacgtgtcgttcgatagtggatccgatgaccctaacaattcacgtcacagccttctcgatgagaatgcaagtgttgctgcaacagatggcggctctttcaatgagcgtctgagcgttctcgtggctgaagacggggaggaagaagacgatggattggcagaatttttagctggtaacaacttcgtcaactggatgaaaggctcactgatcggcgagggttcctttggcagtgtgtttttggcacttcactcgattactggtgagcttatggctgtcaaacaagtcgagatcccatcagcaaccaagggcaccgaatttgacaagcgcaagaacagcatggtgcaagcgttgaaacacgagata

SEQ ID NO: 24699 - DNA, 507 bp, Emericella nidulans
gcaattatatgggccctaccaaacgcccgaaatactcgagcttcgattgctgccagcttgctcatgggatgtggatcgctcattctgtgtgttttgtcatacatggagcatttccgcaacgttcggccgtcactcttgctcgagctctatttgttggtcaccctactcttcgatgtcacaaggacgaggactctctggctacgcgatgataatgactacaacaagctcatggcagtcattgccagctttgccgtcgctgtcaaggttgtgcttgttgtgctcgaaggctggcagaagagagctatcctgaaagacaagtaccgagcctaccctccagaggcgctcgcgggactcgccaaccgtgtgcttttctggtggcttaacccccttttcttcaagggatatttcaagctccttcgagtggaggatctgtatcccctcgataaaagactcgagtcagcacgattgcgtgagttactcgacagacgatgggccaaaggtacttga

SEQ ID NO: 24700 - DNA, 1329 bp, Emericella nidulans
ataaggacatgaagaaacacaagaccgcctcgtctgagcatgaatactgcaacaaatgcgacatcgagtttgagatggaagaacacctcctcctccacaagatcaagagcaacaaacacatcgtctgtccaatatgtggtattgactttgacagcgaaggcggccgtgaccgtcatatacgtcaggtgaatgtttttcccctttcatgttaactgatgccgatagggctcatcgtggtgttagttccaccgctcagcacaaaacctcacctgcttcggatgcaaagctacataccgcagcgcttctggactcatgcatcatatcgaaaacggcgaatgcgtcaagatccgttcacatcgtctccttgtcgaacagcagaagaagctgatgcgcaaggaggctctggagttcttaatagccccagctgtcccttcgctcgtcgacatggatgaagatgacgacggcggcttagaaaaagaatacaaatatactagctgaatgcgtccagctcccaatggcccgcagcgaccttaaccgcgaggcgatacccaaccaaccggacaggataacagcgaacacgaacgggcttgtcgaccgtcactggccaagactgacagaaacgggactggagaataggatgagcgatctcatggacgtctccacccccactggcaacggaaaggagaatgagagtaataaagggaacatgccggctggatgagtaaaggacgcaccatacttttccagagttgccagcatcgaaagcatctgcatctgtatctgcagctggagctggggctgaatcgaaatttaagtccggaaccctagccgcctgtgctcttggttctcccctgttcgttgggatttctaatgctggagtcgagcttgcgaggatctacaaggactggaacccaggaaacttcatcgacgtgttcaccggagaatacgtatgtgcgtgcggaaagcgctgtctaaccaaggaggcgtttgagacgcatgtccttgctgagagccagggagcacgcagaatgcagtacgttcctactcgcctatgttataatacctttactaacgttgcgcggcaggtgccctaattgcctgaagattttcaagtctactgctgcgatcatcacgcattgggaatccccgagtctaaaatgcgaccagagcgaagctgatatgtacgcgcagattgtggacgaggtcagcggcggactgatccacattgccggctacaatgaggacggaacgataaggtatgaggctagcaacctggaattgcacaagaccaagacaattggagtggctctagataggattgactggtga

SEQ ID NO: 24701 - DNA, 479 bp, Emericella nidulans
  unsure (1)..(479): unsure at all n locations
gcttgcgactagcgggcagcttaaggagcgggtacaacttggggtcgtcaagcagaaatttctcaaggagatacattcccttgtcacgattatgctcgggccgcctcctagccctgatcgagagtttgtgtggcagtacaacgacgcggatggaaaagnnaaggagattcggcagacgccgctggagtttgggcggcagggtttctcacagtcaacacgcacaagggtctccccaagtcgcttatacagtcttgtcaacgaccccaggaacgaatattatcggctactgaccgtggaaaagcttggcaatgttgttgagggcaagccgctgacctatgttaatgtcgaaatgaaggtgggacagtttagtctataaccctttgcgtcacgcatctagctgacttgttcaggccctcaaaaaagcggtcattgccatgctcaaagctggccaccccgttttcttcgttgcgacgtggtga

SEQ ID NO: 24702 - DNA, 447 bp, Emericella nidulans
atggtaattccgcagggttggggggtcattacagtttcagaggggtatggcccggaagaaagggtggaggtcatcgatgttaaatcacagcatggtgaagataagcgctggaccatgcagaagtgggcggactattacgagagcactggcgataaagtcgtccgaaatgtcatcagcctcgaggtatcacaaagtaaactaggcaggctaatccgccggccgaagattgtgcgcgatctcgatctccaggatgcggtttggcctgaggagttaaaggccgttgggaacttcctcaaagtgcaattctattgcttgatgtcagtagccgactgctataccgactttcacattgattttggaggttcctctgtctactaccacatcctgaagggcaagaagacaattttttttataccccccaaagacaaacatctgaagaagtatgag

SEQ ID NO: 24703 - DNA, 1200 bp, Emericella nidulans
gacgaagatgcaggtgatgacgagtacaacatctctcgcgctgcttaccaggctctgcagctgtacgcccagtgcgtacaggccgacgtcatccagcccgtgcttgcttttgtcgaggagaacatccgaagcgaagactggcgccgcagggacgctgccgtggctgcgtttggtgccataatggacggtccggaccccaaggtcctcgagcccctggtcaagcaggccttgcacgtactggttagcatgatggaagacagctccatccaggtccgcgactccgctgcttacgcgctcggccgtgtctgcgacttctgctctgagacccttgaccctgacgtgcacctccaaccccttatctcttgccttttcaacggccttgcaagctccccgaagattgccagctcatgctgctgggcgttgatgaacgtggccgaccgttttgctggtgatgtcggcgcgcagaccaacccaatttcaaaatacttcgaggagagcgtcaagtcgctccttgccctcacagaaaggtacgtgcctcggattttcatttcttaagttaaacctaactcccgtctagatcagacgcagataatcagcttcggaccgctggctatgaagtcctcaactctttcgttaccaatgctgccaacgacagccttcccactgttgctcacctatccgacgtcgtcctccagcgtctggagcgtactattcctatgcagcaacaggtcgtcagcgtcgaggaccgcatcatgctcgaggaaatgcagaccggaatcacaagcgttgtcctggtaagtacacggaagtttccttcactaattgtttactgacttgactaggctattgttcaacgcctcgaggctgaaatcaagccgcaggccgaccgtattatgcaaatcctgctccaagtcctttctactgttcctccgaagtccagcgtgcctgacgttgtgttcgccactgttggtgccattgctaatgccttggaggaggagtttgttaagtacatggagtcttttagcccgttcctcaacggtgcccttggcaaccaggaagagcccggcctttgcgccatggccatcgggctggtcagtgatatctctcgtgcgttgaatgagaaggttttgccttactgcgacactttcatgaaccacctgatgaacaacttgagcgtaagaaacctttcttatattcaat

SEQ ID NO: 24704 - DNA, 1211 bp, Emericella nidulans
ggcgcaaccagcagcctccaaattcacctattcgcacattctcgaatcaccgtgcagcagtcagtgctattgtggtgggacacagcaccggtagatacaacattgctatctctgcggcccaagacaacactgccattgtttgggactatcggaccggtcatgttttgcggaatttcctcctgccggccagcgcgatctcccttgcccttgacccggttgatagagcattctatgcgggttatgaagatggcagcgttcagtcgctagacttctacaaggaacaatccattcagcatcctcttcacaatccgtcactacaggctactccagcacaggcctcctctgaagaccgctggctcccaccttccgctgacagtggcgcagcacatgcgttgaccctttcttacgacggtatgactttgctatcaggccatgagaatggcaaagtgtactcctggaatgttggaagacgaaaatatgcatcaacagtagcggacttcacgcatccggtcacaaacattatcatgctacctcttgaaggcctatatcaacaggcgacaaatttaaagagagtagcgcatacaataatcaagccgaaatacgaccatacgcttttagagaacacgcaggctgcaggtactgttcctgcagactatgagtttaacacccatctacttcgctcatcctcgcctagtgaagcgcctgctgagtcagactggttcatggacgcctttactcactcttcttttcccgcatccttgatagagcaaggtctaagtgagctaactgctatgtccttacctggatcggatactgtctctgccccgtcaatgaacgtggcaatggacgttgatacccccggcaaggattcccaaattgcctccttggaaaacgaaatcgctacgctcaaacagaaagtctcagtcagcgatgcagctcggcaatccagcactgacgaaatcacgaaactccgttcaaaccttgccaacctccacgatcacatcaatgaactcaaagcgaagcaggagcaatcacagcgggataggatacggcgacaagcccgcagagaggagcgggcaactcgtcgacgggaagcctggttcgcggcggagaagaaaggcaagaatggagacgctgtgctgcgtcggatgaaagctgaagacgagtctgagacgagcggcagcgacgatcagagcagtgatgagcaatga

SEQ ID NO: 24705 - DNA, 1362 bp, Emericella nidulans
agttgaacgtgggcaacaggtccacaccgcaagcagaggagctacaaggtcctctttcgcgtgtggtcgaagagtctcctgtttccgccagtcgctttggaacgacccgtggtcgccgtggggggaagcagaaagatccgagtgtctacaatgagcatgacggcgcactcaacacaaaccccaagagcaaagggtggcgccagactgcgttcgtagaaccatctaatccaagtttgttggactccccacagtcgtacaaggagacgggcacactcaatggcaaacggcggaagaagaagagcagaggctaccctgcacaagtcagtggctgggccaccgaagaagcaacagatatcagaaaatgggcgacttgattttgcaaagtaacctctccaaattcgataaaagacgtgtttttaagagatcagaaatgacgacacaaccgccgatgaagaacgattggtcagcttcaacaggagagtaccaaagcctgggaccaatggaggccggaacttacactggtccgagaacgtcctcgatgacagcctcgaagagagtgataatgaagctacgaaccatgaaccaagtgatgccaagcttagtagtggaacaatttccggacgtgacgcatcgaagctgtcaacccgcggccgagggtctcggaaagggagtgctatatttggacaaccacttattccaacacagctgaataccattgggcgcagtcaattgagcaactcccgtacgaaatcaagcagcccgcttcctacgaaaacgcacgtttcggcatcaccagttaccggtattagtgcatctagcgccacgttacggcttgctactacaaacagaagctgtccagctgtcagccctctgcagattctcgaagttgagcagctagcaatcggcgaagttggtctgactgaggatatgattacggagaatgcgggacggagtattgccgaagcggccgttggcgttctctcgagcgatgccgctgcacctactatcttggcactagttggaaaccatcggactggagcgagagtcatttcttctgctcgccatctgcggaaccgtggccatcgtgttaccgtatgcatgctgggggtggaacaagaggttgagctgcttgagagctgccgtaagcaggttgacatcttcaagaagattgggggccgcttcctcaagtgggaagagctttcttcgagactctcaacttctgaatttgcacctgatttagttctggacgctctgctcggaatacatcttcctttcaacgacctgcgaactgatgatcaagccacagcctttgagatgatatcctggattaatcgaagcggacttgacacgctatctgtggat

SEQ ID NO: 24706 - DNA, 703 bp, Emericella nidulans
ggtgatgggcaactgcctagctggcgatgggtgtccattttctcatgatccctctgcactgattgcgaatctcagtgttgacggcaattcttcggccacgtctgctggcatcgctttccaagtggataatgcgccggatgccttccctcctttgcaatctacgcccggatcttctgagcagtgggctggtcaactcggtagtaaatatccaggatatctctatggtgggcctggaggcaaaaatgcaccacatctgggaggtaaaagaagtggaagtatgacaaacctgtcgcgtcctcattcacggccaggaagccgtcaccaacaccgagaacttaatccaacagctctgtctgtcgacgacccagatgcgtttcctacgcttgctgcagtcaatgcgaagaattcaggaaagaagaatcacggaaggaagaaccgtgacaataatacaaccagagataatatgcctacgtctctggcagatgtagtacgcatgtctccagctccagcttcaggagggaagggaaaaccctcctctaagaacaaccagacaaagggtcgcgaaaacagcgccgccgcgcagtcaataccggcgccacagcatatcccttggcttgagaccggttctcgaacaaaccagcaatatatcaaatacagaacggaggcgatccgccacggcacggtgagaaacaagtttctaaga

SEQ ID NO: 24707 - DNA, 240 bp, Emericella nidulans
ctagtgaagatactgaaacgcatgctcgacgagaccgaattcctctcagatcacggaattcggtcaatgtcaaaataccatgagaagcatccttactcgatggatgtcaacgggcagacattccgggttagctatgtccctggcgactccgacagcggcctctttggtggcaacagcaactggcgtgggccggtgtggttgtgcgtcaactttctgctcatagaatccctcgtcgctttt

SEQ ID NO: 24708 - DNA, 693 bp, Emericella nidulans
atggctctgaaacgcacattcaagctcaacacaggctatgagatacccgccgttggactgggaacatgggtacgaacaactacttcatctttcaggaaccaagcttatgaatgtcttattgtgtatagcaatctaaaccgagcgaggttgaggaaccggtaactgcggcgctgaatattggctatcgtcatatcgacgctgctgcggtctacggtaatgagcgcgatgttgggaacggaattaaggcatctggtgtgccgcgtggagagatattcgtgagctctacgttgactttggaagaggtttgtgtgttcaactgacgtgctaagctcacgagcaaattatggaatacccatcatgaccctgagaacgtcgaagctgcagtagatcgatcccttagcgatctccagacggattatcttgatctttaccttgtaagtcattcaagttctgttgtgacagagtgtaaacgtcgctaatacctgctggtcatatagatccattggccagtggcttccgctactcaaccacaaccattcagcctgtcgatgagaaaaccggtttaatcgatgtgatagacgtaccaattaaagatacatgggctgcgatggaggcacttgtagctaaaggcaaagtgcggtcaattggagttagcaacttcaaccggcagaggatcgaggagctcctcaagac

SEQ ID NO: 24709 - DNA, 402 bp, Emericella nidulans
ctgggctagcgttgtcgccggcagccgaacccttccggatatctactcgtggcaccagattggcgtctgggagcgcgagccagaccgatcagttgcagactttaaggcacttctgaacttatacggtctaccggataaacccatcgatctgaatgaatacgcatggacgaccgagcagaatcctgccaattcggacttctacctcgctcagcttgaacgacacaatgtccgcggcctgcgcgcgaactggggttctggcggtggacttcacgattaccttgcgaacttggtctataagagcgaaagcgacggcgaatatcaacccaacggcgaatggcatctgtacaactactacgcgaatatgacaggggtcaggttggcgacaacggcagcggcggatag

SEQ ID NO: 24710 - DNA, 1617 bp, Emericella nidulans
  unsure (1)..(1617): unsure at all n locations
ctcccctaccgcgcttcaacgttccctcggtcagagtgagcgatggtcccaacggcgttcgaggcaccaagttcttcgacggcgtccgcgccgcctgtcttccttgtggcaccggcctggccgccacatgggaccagtctttgcttttcgatgccggtgttctcatcggccaagagtgcctagccaaaggtgctcactgctggctaggacccacggtgtgtatccaacggtcgccccttgggggcagaggtttcgagtctttcgcggaggacccatatgccaccggcaaacttgccgccgcctacatccgaggtgcccagtccaccggcgtgatatccactatcaagcatttcgcagcaaacgaccaggagcatgagagaattagcgtcaatgccgtcatgagcgagcgagcgttgcgcgaggttcatttgttgccctttcagatcgctatcgccgatgcagctccgggcgcagtcatgacatgctacaacaagatcaacgggcaacatgtttcggagagcaaggagatgttggatggtctcttgcgcaaggaatggggctggaagggcctcatcatgagtgactggtgcgtctgcattaccacgtccgattcgggcagatcatttgcttacttggccttgacaggtttggaacgtactcgaccgccgaggctctgaatgccggccttgacctggagatgcctggccccacaaggcttcgaggaccgttactggagcttgcgatttcgagtcgcaaagtctcccgctcaacgcttgacgagcgcgccaggaccgtgctcgaattcgtgaagcgagccaacaaggccgaggtttcgacagtcgagagcacacgagactttcccgaggatcgtaggttgaaccgcaaacttgctgccgatagcattgtcctgcttaagaacgagtcggggcttttgccactaaacctgaaggcgttgaagagtgccgccttgatcgggccaaacatgaagaccgcggcgttctgcgggggaggttctgcgtccctccagccatactacagcatctcgccgtaccagggaatcatgaaccagctccctccgggcgtcgagattatctacgagacaggcgctagttcgtatgtttttatcccggagctggaggcgtcagaagtgcgcacgccggaaggcagcctgggcttcgaatgcgcttctaccgagaaccaccctccgtcaaagaacggcgcgtggttgaggaaaccatcctacaggagtcttcgtggcagctgatgggcttctccaacccacaattggaccggctcttctacgcagacattgaagccgagttgattgctcctgccactggtcctttcgaattcggccttgctgtctatggttctggcagcctctttatcgacgaccagcttataatcgataacactactgtgcaacgagggggcaatttcttcttcggcaaaggcacccgggaggaaaaggccaccgtggatcttgttaagggtcagttgtacaagattagggtggaattcgctagtggcccatcgtccaagctcatgaaaccgggggttgtgaatttcggtggcggcgctggtcgctngggaatggttcaggccatcgatccggag

SEQ ID NO: 24711 - DNA, 1047 bp, Emericella nidulans
atggcccatcctgagtccgacgcgtccgtcttatatcatgcccgttatctacaatacacgcggaagttcatatcttcgccagttcagaaccacaccctcgctggaaaacagacaatggactcctcgcattaccggaaaatcgaacttcaatctgccgcagactttacctaccttcacagcaacaccgttgctctctcccgccaaaaactagacctgcacctacccccctccgcagccccaaacaatgagcccgaaactatgcgcgagcgcgtgcgcgaacttgtggacgatgtatctgcatatttcttaatgcacctttatatattgagatatgcagttgtgctaacagatccgttttcttattcgatctaggtcataacgcgcacattcacatccgcatccgcctccgcttcgatcaacgggctggactcgacatcaccggagtttcctttcccagcagcatttactgcgccaacagagctggaaacggtggagtacgagccatttgacggaaagttagcggcgcgggttgcgtcgatgtatgcgcagcttgagtcgttaactacaacggtcgcgcagttgaggagggatgcgccgcgacgggcggcgagggaatacgcgaaagagctggggaggattattgaggaggaggataaggaattcaacaatgaagaagacgatgcggatgttggaatgaacgatgcagacgcggatagaaatcaagaccaactgcaaacgcaaccggaagaagacgttgctaatattaatgaaggggagaggagacggcggggaaaagtctccaggaaggagtggaatcttgatattccccttggaacagaacaggaagcggagcggtggcggaatggggagatggcagaggtttacgaggatacattgcggacactccttcggctgcagggcgagcctgtaccggggaatgacgatgctatgtccaggtctgatggtgtggatggtaatgcgctggcatctacagtaggcaaagctgagcgagccgggcgggcggttgagtttgtggaaaagatctga

SEQ ID NO: 24712 - DNA, 1026 bp, Emericella nidulans
aactgtctgtacagccctctctgcaaagaagtgaacgatgctctctccaaatacgatgaaatcatggatattggcgctatcatcatcacagggggggagatggcttttgccggggtgttcttgtctactccatgtcaaggctctttctcttcaagtcgcaattctaacagatatttttggtgtataaagccggcgcggacatcaaagaaatggcccctctaaccttcgcttccgcgtatagcaacaacttcatagccccttggtcgcatctcgcgaattctattcgcaagcctgtaattgccgccgtttctggcttcgcccttggcggtgggcgtgaacttgctctaatgtgtgacatcatctactgcaccgcgtccgccacgttcggacagcctgagatcaagctgggcgttatccccggcgccggcgggtcgcaacgtctccgggctgcggtgggcaagagtaaagcgatggaactcatcttaacgggcaagaacttcagcggcaaagaggcgggtgagtggggagttgcggcgaaggttgtcgatggtgggaaggaggaactcttgaggaggcagtgaagactgccgagacaattgccggatatagccgggttgcgactgttgcggcgaaggaagtagtgaataagagtcaggatttgggagtgagggagggcgttgagtacgagcggaggctgttccatgggttgttcgggagtcaggatcagaagatcggtaggtttttgtccctttaccattactccaagaatggcactgacggagagaaaggaatgactgcgtttgcggaaaagaagaagcctcagtggtcgcacgagtaagaaattgggctagaatgttagcctatgcgcacatgtaagaacttgacaatgaacctgtctgaaataacagtaaaggcatcattagacacattcgttgcctcataacgtattatgtacactcattattagatattatgggatgcaagaaagcggtatgtgggttaacaaagctcagaacacgccagtag

SEQ ID NO: 24713 - DNA, 842 bp, Emericella nidulans
atgaaggtctctgtccttgtgaagcttggtgccctcgcaaggctgaccaccgccagcttggtgagtctagctctgaacgcttaattccttctgaacaccataaaggctaaccttccgcagctaacccggcagtcacaatgcagcggagagcctgccactctaacattaagcgaccctccgtaccagaacttcttctactctgactgcaacaccgctgcccagcttgtcgttacaagtccccttccagacagcgatctggaaatcatcggcccgcgcttgatcgtggcctggcctgctggtaatagcggagtatgtgccttcttcgcgccgcagaatggggtcaatggcagtctctcaatctcgcttgttaattcgacagctggccctccattaaccgctatccacactgagccacctgagaattctgggaccgatttgccgatagtgggtgtacagggaatcgtgaggttcaacgcatcggctgtcctgaccgttcctattttgggaagtattaggacgatcagagattttgtcgaaggacccagtcttctgtaccctgaggtgcaggacgctatcatgtttggcaccactccagatgggggcgttacgcttgaacgcctctggctggataatgttaccaccactagtcttaacttcgtgcccatgaactcgagctatagccaggtttcaattgcgggcaggacagtgactttcacaccgggggattatatgttctccgcatcctacaactatccccagttgacgcagctgaagccatcggctgtgcttgctaacaagtgcggcgatctcattaccgagtatcctacccaaacaacagcact

SEQ ID NO: 24714 - DNA, 813 bp, Emericella nidulans
gttgttacgatagagcctgtgctctcgagagtcgctcatcttcctcggcagcatctcgggtcgacgttatatgctccacggatcggagtaccgactgcaaaagcgacattggagagtgccaagttcggctacacaacgactcccctgccccttcctcgctttgatggcaaggagaactgcaccttcaccatccgtgtccctcgattccggatagataacagccaccgcgaagaaatctgcgcccgccgcgctctctggggcactggtatctacacagacgattcggacccagttgcagcggcgatccactcgggctttatccgcggggcctggggggaagatgtggatcccgacatgctcgatctggagatcaaagattcattccagcacgctcctaagacggccaaggacatgggcctcgatggagaccagcgacccaagatccctccgccaccgccgtccggcaaagacctccacatcacattactcatcctccccaaactggaacgatatgagagcagcgtgctgtttggcctgaagtcgcgggtctgggagcagaatcacgatggcatgagctttaaagtactgcgaatcgagtgggtagacgagggtgtcgggcgggcggaggagcgcagcggagaggccaggcgcaaacgcctacgcaacgccatccagtccgggcggatctgtacagggcccggggtggtgaagctagatcagctccgcagtggaatcgtccaggttccacggcgggaaaccaaggcgatcgagggccaagatcagcctgcctcggcgatgcctattgtctcgtga

SEQ ID NO: 24715 - DNA, 1168 bp, Emericella nidulans
aacaactcgtttcgttcacgcctctggtcgccccaatatcccctgtctctaacgaacaggtgtttaacgacttgcaatggaaaacactcttatctttggctgatactgtcatcccgtctgtgcgtggcccccgggcccgcaaatcgcgcgctaccaaggttgtaccacaggcgaagctagacgctgcgctcgagactttaagggcctccatccgcggccccgacgcagatacccttgtaacacagtacttggaggaaaatttaacctccatcccggaggttcgccaagcattgcagcggctcttcactcagcatgtgcacaaggaaggacgaaatggactgagtatgatcctcagtgctttgaagtatgttgctttcggtcaattgccttttgtgtatgctgatggtcgtatagtacgaaagccggctctttgctacttacgggctcgatgatccctattcaggaccaacccttctatgtccgagagcagattttccagggctggagtgactcgcgcttgccaccggtgcgcgccgtctatcgcgccctcactgcgatctttaagaaggtgtgggttacgttcagtcctagcctttatccgacgcttggagttccccatgttcccatctatggaaccccgcaaaatggcttccaattcgagtttttgcaattccccccagggcagaaaccagagatgatcgaaacagatgtgctcatcatcggaagcggctgtggtggcagcgtcgccgccaaaaaccttgcagaagccggcaagagggtcattgtagtggacaagggctattcattcacaaaccagcatttccccatgaagcccaatgaaggtttcaacaatctgttcgagtctgctggtgccgtcatgaacgatgagagttcgatggccgttctctttggctctacctggggtggtggtggtaccgtcaactggtccgcctcgcttcagactcaagcttatgttcgccgtgaatgggccaagcgaggcctcccgttctttacctccttggagtttcaaaatagcttggatcgcgtctgtgacaggatgggcgtcagcgccgaccatatcaaccacaacaagtccaaccgcatgatccttgagggatctcgaaagctaggttattcagccaagccggtgccgcagaacaccggtggc

SEQ ID NO: 24716 - DNA, 740 bp, Emericella nidulans
atccatacatccctcccgcgagaatcgagaaagacagtttccgcgaagaatcgtttcacgccgcgaaatccaactcaacattatcccacaaggcggactcgcaatcggccgtgacagtttcgaagactaattacgaatcagacatcaagtatcctgatcttccgcctgttccgcccgatgacaatcccgggccgtcgagcagcgcactgccctggtcttcctcgcccccctcccactttcaaaagcccgccgcgcctcgaaccgttccctggcggaagcaagagaataatatcattacgatagatgatgaggcaaaaccagagacacccgcgcggccagctgcaacggctccgtggaataaaacagccagcgcaatcaaggaagagcagaaggaacttcgccgtcagaataagaaagcgcaagcccagaaaacacaatcaagcaccaaacaccatatgccccgtgcccaagtggctcctatatttctcagtgatgagcagaagcatgtcttgaaagcagttgttgagaaagggcagagtatattttttacaggttcagcaggaactggtaaatcagtcctcatgagagaaatcatcaagaaattacgggataagtacaggaaagaaccggaccgcatcgcagtcacagcgtctactggccttgctgcatgtaatattgaaggtgtcaccttacatagtttcgcgggcattggcttaggtaaagaacctgtacctgagctg

SEQ ID NO: 24717 - DNA, 2660 bp, Emericella nidulans
atggaggacttccaagctgccggcaaaaaggttgctgcgtatgctcatcttctggcgttggtggtccaggacaaggagatgtacaacgctacactagacgagctaaaggagtgtttcacaacgttccttcagttcatcgcggtaccctcggagaagactcctgatgaatcatttccctgggtaggacatgtgttgcttgttctcgagaaactactctctgatgatgctcaaccaccccaaatcaactgggccttacctgataactcggatcccagctcgatagacgatgggccggcccagttgcaggagcctctcatatccaacgaggagaaaatgcaactgtttgaagttctcgtcgaagtgcttcctagaattggaaaggacgacactctggctctctcagtgtgtcggatcctggtcatcctcaccagaattcgcagtattgccgttcgactcggtgagaaacgtaatttgcaacgattatttgtcatggtcaagcagctttcgagctccacaaatgataagcttcaaggcgctttcatgcttatcttgaggcatattattgaagacgaagataccatccggcagatcatgaggagtgaaatcgttgccaacttcgaatcaaaatctcattcacggccaatcgacactacggggtatgtcaggcaaatgtatcatttggtgctcagatcgccagaaatttttgtcgaagtctccaacgaaaagctcaaactcttgcggtacgacagccgacaacgtcctcagcacctcacgttgaagtctgagaagaagactgaagcgggcgcgaaacccagcggttctgccgagcagaagcctgacaatgcacaaactgacaaagagaagggaaaggccgctgagttgaaaactcctgtcgtggagaagccagatggggtcatccactatcttctttccgaactcctgtcttacaaggatgttgatgataaggaaccatcaggggacaatctagaaacctctgccgttgagcaatcggagactccgactcagactgatgttgagatgtcaactgacgaacctgctccttccgtttcgagcaccgagctccagggctcgcggaatcccaagaagtcagagaagcccgcattccaagcagatgatcatcccatctacatttatcgatgcttcttgcttcaatgcttgacggaactgctttcgtcctacaaccaaaccaaggttgaattcatcaacttctctcgcaaggcggatcccttggtaaccacgccctccaagcctcgctccgggattctgaactatcttctcaatgccctcgtgcctgttggcacgatggagcacgatgaatccgttgcctttaaaaaacgcagtaacacctctgcttggacaatgcgtgtcctggttgcattgtgcaccaagacaggtgaaatcggtggtcacggaaggcgccgcaatgatcagaattctaacgaagaagacgaacctgagctagccttcgtgcgaaggttcgttctggaacatgctctaaaagcgtacaaggaagcaaatgcttccaatgaagcactagatgcaaagtattctcggttgatgtcacttgcggacctatttgacaagatgctcagcggctatgcgtttgtctcaggagacactgctttcccatcctccaccaggcaaatcgctaaaactatgttcgagaagcatttcatttctgctctcactgcatctgttgccgaaattgacctgaacttcccatcctctaagcgggttatcaagtacatcttacgcccattgaacaagcttacccagactgctgtgctcttaagcgagacttctgacatttcgaccattgggggatcagaggatgacgaaatctcatccgctacctctgtgtctgacatggaagatgagcgtgaagaaacccctgacctcttccgccactctaccctgggtatgttggaacctcgccacgaagaggaaacaagttcggaggagtcagaagaagaagacgatgaaatgtatgatgatgaatacccagacgaaatggactacgaagaagagatggcggaagacgacggggaagtgatcagcgatgaagaagatgagattgaaggcgttggccctattgaaggccttcctggcgataacggaatggacattgaggttgttatcgatgatgaggatgacgatgaagacgacgaagatgatgaagacgaagacgacgacgaagacgaggatgacgatcactccgaaatggacgacgatgaaatcctcgcgggcgagatcactggtgacagagataatgaaagccttgatgagggtgatgaggacgaatgggaaagcgaagagatgtcagaagacgatgatgaagccgacattatgaaccagctcgaggacgaactagcggatatcagacacacggatcagcggcatgacgggggacgccttgaagacattttccgtgcgttgaatgaggccgctggtggcgttgaagacctccaggcggatagcttgggagatttgcatgatgacattgccgatgacgagctgaacgaagatgatggttcgtatatcctcttcgccgcagtttactccactgctaacatacgtaacagaagacgaagaaattgatgagctagaggaagagcttgatgaagcagatgaagaccaag

SEQ ID NO: 24718 - DNA, 507 bp, Emericella nidulans
cttggctgtggctggggtactctggcgaaatacgcttctgtccattatggcgctcaggttaccggtattacgctgggccgcaaccaaaccgcttggggcaataagggtctccgtgctgctggtattgatgaatctcagagccgtatcttgtgtatggactaccgcgatgctcctcgtgtccctggcgggtataagaagatcacttgcttggagatggctgagcacgttggtgttcgccacttcggttcgttcttggctcaggttaatgagatgctggatgacgatggtgtcttcttcctgcaaattgctggtctccgcaagtcctggcaatacgaggatctcatctggggtcttttcatgaacaaatacatcttccccggcgccgatgctagcactccccttggattcgttgtcgataaactcgaggctgctgggtttgagatcaagggcattgacactatcggcgtacactactctgccactctctggcgctggtaccgcaactag

SEQ ID NO: 24719 - DNA, 1256 bp, Emericella nidulans
  unsure (1)..(1256): unsure at all n locations
atggtatcgttatttgggggcgcaaaccgacgagcaaaagcggagaagcttacaaagggtgttaatctactcattgcgacacctggtcgtctactcgatcatctgcagaacacccccggctttgtcttcaaaaacctgaagaccttagtcatcgacgaagcggaccgaatcctggaagtcggtttcgaggatgagatgcgccagattatcaagatcctccccaacgaagacagacagactatgctgttttctgccacccagaccacaaaagtcgaggacttggcgcggatatcgctccgaccgggacctctgtatatcaacgtcgatcacaggaaggagcacagcacagtggagggattggagcagggttatgtcatttgcgaggctgacaagcgattcctgctactcttctccttcttgaagcgcaacctcaagaagaagataattgtcttcttctctagctgcaattgcgtgaaataccacgctgaactcctcaactacattgaccttccagtgctggacctacacggaaagcagaagcagcagaagcgaaccaacactttctttgagttctgtaacgccaagcaaggagtcttgatctgcacagatgttgccgcaagaggtctagatgtatgtcttcctttcctctgaagtagctatagcccactgccacctttagatccctgccgtcgactggatcatccagttcgatccnacagacgacacccgagactacatccaccgagtcggacgtaccgcccgtggagccaatggcaggggccgcagtttgatgttcctgcagccgtctgaagttgggttcctcaagtacctcaaagaagcccgagtaccagtcgtggagttcgacttcccagccaagaagattgtgaacgtccaatctcaacttgagaagctgatcagccaaaattactatctcaacaaggtaagcttttagcccagaactcgttttgagatgtggacgatgtgtatgtactaactcattcccccagtccgccaaagacggctaccgctcctacctccaggcgtacgcctctcactccctgcgctccgttttcgacgtgcacaagctcgatctcgtgaaagtggcgaagagcttcggcttctcgacgccaccgcgtattgacatccagcttgggtccagtctcagcagagataagaagcaacagcagcagggaagacgcagttacggtagtcaaccgaagggcctgaagttcaagaggaagcatgaggatgattga

SEQ ID NO: 24720 - DNA, 645 bp, Emericella nidulans
tgcaaacaactaccagcaagaagaaagtgagatgtggatcggcgagtggctgaagaagcgcggtaaccgtgatcagatggtgtatgtccaacaccattttctcccagtggtctccctgatgctctatctcactgattttcgttcagcattgcaacaaaatatacaaccgggttccgcacctctcactgtgcgaccgagcctcttcaatccaacttcgttggcaacagcttcaagtccatgcgcgtctccgtcgacaactccctccgcaagcttcagacagactacatcgacatcctctacctgcactggtgggactttacaacgagcgtggaagaagtcatgcacgggctcaatagcctggtaactgccggaaaagtgctctaccttggtgtgagtgatacacccgcatgggtcgtcgtcaaagcgaacgactatgcgcgcgcgcacggcctcaagcctttctcggtctaccaggggaagtggaacgccggctaccgcgatatggagagagagattgtccccatgtgccgcgatcaggggatggggggattgcgccgtgggcgccgcttggtggcggcaagtctaagagcgcagacgcccggaaggctgcgagcagcggggggagtaaccgcggagcgcagatga

SEQ ID NO: 24721 - DNA, 2019 bp, Emericella nidulans
atggcccggttccgcgaggctgagactctcttcgatataaaaaggggcccaatgttgacagcccaaatctgggttgctcccgagagccagtatctgttcttggcggctcatcatctggttattgatctggtatcgtggcgaattatcctgcaggatttggaggatgtgcttaggactggccgtatcaactcaactcccactatttccttccagaattgggcgaagttgcaacgcgaatatgtctcccagcacttgtcaaaaccagacacctgggaccttgaggcacccacaggtgatctggcctactggaacatgcagggagaagccaataactggggagatattgtcactgaatccttcaccatcgattctcagaggaccgcgctgctactcggagactgtaatattccgttgcgcacagagccgactgatatcatggtagctgcactgcttcattctttccgtcacgcgttctctgaccgaaatgtccctgccgtctacctagaaggacatggccgtgaaccctggacatcggccattgatgtctcacgcacagtgggttggttcacgaccatgtatcccgtcagctacgagactcccgaagacaactggcttgatgctgtcaaaagattgaaggacagccgacgaaagattgcccacaatgggtggcggtactttactgcgcgatctcttctggccggcgggatgcaggatatggaggttgttttcaattacctcggtctttaccagcaactgcagagagtcgacgccttgtttcaagagtcttctatcaccggaactgattgtgttgagatcagccctcagatgcagcgttactctttgtttgagatcgccgccggggtctccaacgggcggatggagttcactttcgagtataacaagaaaatgagccatcgcgatacaataagttcttggatcaatcattatcgtcaagtcctcgagactggtatcgatgaactcatgaggcagtccgaattaattcccacacttagcgatttcccgctcctgaacttgtcctataaagacttggataacctggctacctccatcctacctgaagctggagtcaagtcgatcgacgagatcgagagcctttctccttgctcgcctatgcaactgggtttgttgatgagtcagttgaaatccgagggtgcctacgagttcttcaccatcatggaggccactgcccgcgagggagtcgatagtgcacagttggttgcagcctggcaacaggttattgaccggcacccgatgctacggaccgttttcattaaaagtgctgtcccagaccgaccttacgaccagctggtgctgaaagagttgagggcgcaagtggtggagctgcgtagcgacgaccctgtccatgctttacgcacattacctcagacagcaaagctccatcaattagcaatctgtcactgtgagaacggtcgaatgttttgcaagttggagatcaaccatgccttgatcgatgggacatctatggctatcattgagcgggacttgaagcgcgcctacagcaagaaactcagcagcgtgccccctcttgcatacgtcgactacgtgagcttcctccaagaagcaaagagggccgaatcggtcaatttctggaacgattacctccaagacgctcagccctgccagtttcccattcttaatgacggccgagaccaatctcaggctctggaatcgatcaatgttgagcttcccggcttgacaaaggagacactgagcgccttttccgaacgctggggattcaccgttgctaacgtcgttcaaaccgcgtgggccctggttctgcgcgcttttattggaacagactctgtctgctacgggtatctgacctcgggccgtgatgctcctcttgatgggatcgaggactccgtgggtccattcatcaacatgcttgtttgtcgcctgaagttcgatccccatgagccggctctggttgctctaaaaaacacccaagatgggttcctgaaggccatgtcccaccag

SEQ ID NO: 24722 - DNA, 779 bp, Emericella nidulans
gatttcggtacagcatactagtacattcttacgcgcgtgactctgcaaacttctcacgccacattctcccttaactcaccctccggttcacaagacgacactacctggcgcgctgtctacaacgctggccgtatcgcaccacacactcccagtcttcatccacgccactcacctcttcacataccattctcacacctatcacaacgcatgaacttctctcccttgccctcatcttagcacccacccccgacccgcttccagagatcctcggcgtttggcgccgtgcagacgaagaactttccctcctccgtgcccgcgaatcggatgaagaagacgcctgggacaccaagggcgatagaagcgctgccgccacatttctcccgggtggcttcaatcaaccgaacacagagcaagacgtattggaaacaaaacagcagcacgcccgtcgcgcggcccgcgccgcccatcacaaccgtcttgattcgggcgaagcaccaatgggtctttttgaagttgcacgcggtgctgcgagagcactgcataagaatgttgcgttcccgttatctgcatccgcgtccgcttccgcttcatcgtcaatgtcgctcgttgatcgcacttccgaggatgacggcgagaatccgaacggtggtaccggcgacagtgatgcggggagaataaggaagcgagatgtcgttagtaatatggttactgggggtctagcgagtgggataggctgggttctgggtgcgcagccagttaatatgaataataggcagtag

SEQ ID NO: 24723 - DNA, 474 bp, Emericella nidulans
gaagagacccacagtcgattacggtttaaccggcgcgggctttatggaatttcaaagagcgaggatggctcgggggggaggggatttttcatcacccttgccaataccgagcgcgagttgaacgggcaatgcacgctcttcgggcgccttgagggggatacgctgtacaacatgttgaagatcgcggaggccgagcgcatcgaggggaccgagcgacctgtatacccggtgaagattacatcttgcgaagtgggtgatctgggaccgttcgttgataaggctaagaagaggcaggttgttgctacagggccgaagactgaggagaagccggccgcgaataagaagatgaaggccaagcccgggaaggccttgttgagttttggaggcgactatgaggaagacgaggatatgcctattcgtccggcgaagccaaagttaaattctatgcttgttacggacacaaagcttccataa

SEQ ID NO: 24724 - DNA, 376 bp, Emericella nidulans
tactcgcggaggtgacaaattcgctcttcctggcggacggaagaagcgcgatgagatactattagatatgattcggagcactttggtcaaaggtggcaccgtgctgattccaacggacacaagtgcgcgggtgcttgagctggcatatgcgttagagcatgcctggcgcgacgctgctagggacacccaagatgatgttctgaaacggggtggactatacttagctggtagaaaggtcaacacaactatgaggcttgcgagaagtatgttggaatggatggatgagagtattgtgcgcgaatttgaggcagctgaagctgcagatactgctggccagaacaatgacggccagcgttccgaccaacgccagggcaag

SEQ ID NO: 24725 - DNA, 217 bp, Emericella nidulans
atgaacggtgctgttgatcccgaaagggagcaggcactggaggagtacaagcggagcctactggatctccgggaatgggaggctaagctcaaagcgcttcgtatgggaataaaggacttgcaaagagagtttgatatttcagaagaaaacatcaaagctctgcaaagtgttggtcagattattggaaaggtgctgaagcagctcgatgaggagcgat

SEQ ID NO: 24726 - DNA, 613 bp, Emericella nidulans
tcaaagactacagaatccaggtagaccccgcatatgccagtggttaacgtcggaagtatagccaagccatcatatctgcctgtggaagtctgtgacgttctgtcaggccaaccagcaaagacgaagctttcgtctaatcagacacgccagatgttgaactttgcagtgcgaagcccagcgcaaaatgcccattccattgtcacaaagggaacgcaaatattgggtcttcgggatcccaccgctgccacgctggtttgtccacccttccttattcaaaatagaattgctaattcgttcgtcttgacaggtggactttggcattcaaaccaaccccaacctcatcacagtacctggccgagttcttgctcctccgactgtatattacaaagatgagaaatcaaaggacaaagagattgcccccatgtccggcagctggaacatgaaatctatcagattctcgacaagctccaatcttcagagctgggcctgtatccttattaccgctgggcctaagcaacacttccaaagccctgatgatctggaagactgtctataccggtttacgaagaagctcagagaggttggggttaacgcaaaccctcctgtttttaaa

SEQ ID NO: 24727 - DNA, 1775 bp, Emericella nidulans
atggatgtgctgaagagcagtgccttggaggatattgccactgctattcgggaaaaaggcttgagtctcaaccacgccattgacttgcaacccagcaacaaagaccagatccgcgagattgtgtccttggtcgaaacagcagctggcctagcagacgcaagcaacttcatcaacaagctcgaccacggctacgcaacaatggtcggatcaagcgggaacctcatcagtgggggccagaagcagcgtatctcgatcgcccgagccttggtcaaaagcccccaaatccttatccttgatgaagccaccgcatctctggattccgctacggaattacgcgtgcaacgggcgttggaggcggcggctgctggacgcactctagtcactatagcccatcggctctcgaccatcaagaaggcggataacattattgtgatgagacagggaaagctcattgagcagggctctcatgcagaacttcttgcggcagatggagcgtatgcagagctggtaaggttgcagaatctcaatgtcaatgcctcgcaggagagtgcgtcttcgtctgctcggccgtcactggacagtacggcgcttgagaaagaaaggaatgcagaggtaacatcggtacaagacgacgaaagctccactccatcccctaaagagaagccagcagacgaagaaccagttactaccgagcgctctgtcggttctacctctaaggccattgcctctctcttccgtccgtactcgctagccctccttgtagccatcatcggtgccgtcgtcatcggaggcacatactgcggttctgctgtcatattcggtaacgttgtgggcaagctaagctcgtgcgagacagcagaatccatccgccacgcgggagaattctgggggctcatgttcttcgtcctggctctgattgagtttttcgcaaacctcatcagctggtccctcttcggctggatcgcggagcagctcatatataaagtccgcgtgctctctctacgttccattctcgagcagaagctggaatggcatgaagcgcgcacaccctccggcctcctatcactcattgtcaaggacagcaacgcgctcaatggcctcacgggatccgtcatttgcacaatcctcagcatcctcgtcaacctcttcgccgccattattatgacccacatcattgcctggagaattgcactcgtttgtctctccgtcgtgccacttctcttgggcgctgggttcatgcgtgtctcaaccttagcccgctttgaggagcgccacaatgacgccttcgcccgctccctgggcataaccgtcgaagccgtgacatccattaagaccgtccacgcgctggccattgagtccgaagttctttccacctaccgccgctccctgcagggccccatgcgcgagataacagggcaatccgccttcaccaacctctggctcgccgtcggttacggcctcagcaacttcgtctatgcgcttgcatactggtggggtgcgaagcagattatcgctggtcactacacccagacacagttcttcattgttcagctggccctgctcgtctcgtctcagctctggggccagatgtttgctttggctcctgatgtgtctcgcgccgtgcaggccacccgccggctcttgaacttgctggacctaggctcaacgaagagactctccgatcccatcttaccccctcactcggcatcaacagatatcgaagcaacctcgcacccatccgaaaaaccccctccccctgatccatcaggcacgca

SEQ ID NO: 24728 - DNA, 397 bp, Emericella nidulans
aatgcatgcaggttggccttggagtgatgcgaagggatatgttgctgcaagaaactcccaatccgcatctcaaggtactgccgagggatctgtctatcctcgaatctctcatgctttgcattgaacagtcatggcctagcattctggtgggagcttcaggatgcggtaaaacaacattgataagaaagcttgctgccattaacggagccaacttggttgaactagctttgagcgcggataccgatacaatggacctcgttggaggcttcgaacagatcgaccacaacagagagacgtcggctcttttagaggatattttgctgttcgtgagacgacatatactctccagctgcccgtccgaaacctctcaagaagagacgtatactttgattgaact

SEQ ID NO: 24729 - DNA, 475 bp, Emericella nidulans
cgaactatggatatctacgattatgtccaaggggatctattctcctccagcaatcaaacagaaaaggacgaatcccagcagggtacaaccaacacgaaccaacccgccgtcgatttgaacaccgagctacaggagaccttccgcgccttctccgcaagcccttggggctcacgcctcggcgacatctggggcaacgtccgtaaacatggtgaaagctactacgaaggcgcacgacaggaatacgccgccgccagcgaagaagccgtcaaaggattcaccggcctcaaagatagccttgtggggcggacaaggggcctatcgctcagcacagcgtttggcaccaccgctgagcgaggaacaacggacggctctctaactcctacggaatcttgcgctgcgggaggctcctccaagacagaacagcagcaggatggtggcgacaagaagactgccggaggcgagagcttcctcgccc

SEQ ID NO: 24730 - DNA, 741 bp, Emericella nidulans
ggtgactggatcctcttcacccacgagggtggtgtcgatgttggtgacgttgatgctaaagcagagaagcttttgatccccgtcaaccttaagaactacccctccaacgaggaaatcgcttccgcacttctcagcaaagttcccaagggcattcacaacgtcttggttgactttatttctcgtctctacgctgtctacgttgactgccagttcacctaccttgagatcaaccctctcgttgtcatccccaacgccgatgctacttctgccgacgtccacttccttgacttggctgccaagcttgaccagactgctgagttcgagtgcggtaccaagtgggctgttgctcgtagcccggctaaccttggcctggccgctcttcccacatccgacaaggtcaacattgatgccggtcctcccatggagttccccgctcctttcggacgtgaattgagcaaggaggagaagttcatctcagacatggatgccaagactggtgcctctcttaagctcactgtcctgaaccccaacggccgtgtctggactctcgtcgctggtggtggtgcctccgtcgtctacgcggacgccattgcttccgctggtttcgttagcgagctcgccaactacggtgaatactccggtgctcccactgagactcagactttcaactacgcccgcaccattctcgacctgatgctgcgctctcccatccaccccgacggcaaggtcctgttttcgcga

SEQ ID NO: 24731 - DNA, 438 bp, Emericella nidulans
atcgtctctttcctcgtgcagggctctggagctggactgatggccatgggcgggtcgatgacgaacgtggcaaaaggtattgttatcgcggggctgatggtccagattgtgatatttgggttcttcatggtcacgtccgccgtgtttgaccagcgcatgaggcggtacccaaccagtcttagcatgagcaggaacggtggtgacgggataggctggaaagagcatctctatccgctgtacgcggtcagtatcctcattatgatccggtcgattttcagagtcatcgagtatgcaatggggcagaaggggtaccttctagcgcatgaatggccgatatatgttttcgacgcggtcttgatgcttggggtgatggtgatctgggggaaggtggcattccgggagcatcaggaccgaggggatgggagcgcagttatttag

SEQ ID NO: 24732 - DNA, 1295 bp, Emericella nidulans
agcaaatacctcatcggcgcagacggagggcgcagtttcgtccgccgacatgcagggataccctttgagggtgacatttccgaggatagatggatccgaattgatggaatcgtcgagacggacatgcctattactcgcgcttatgggtgagttgctgcgctgaggcgtgcctatctgcctaaccgtacctcgatcacgactgacacccagccctgcgtcctacgtacagcgcaattgaaagcgaaacacacggtaacgtcctctgggcacctctcgaccacggcgctataaggatcgggtatgcatacagcgcggagattgcagcaaagtatccgaacggcgtgacgcaggaagtcgcagtacaagaagcaatcgaagccatgaaacctttcaaagtctcgttcagagaagtccactggtggactctgtatacaatcgggcagcgcatcgcgaagaccttcgcgacggccaataaccacgttttcctctgcggggacgcagcacacacgcacagtagcggtgccgcgcagggcctcaacacggggatccacgacgccgtgaatctgggctggaagctggcgctgcatatccgggggctcacaaagccagaggtgctggagacgtacacggccgagcggctgacgactgtgcagagactgattgactacgacaaggacattgcgacgctcatgtcttccaagtggccggcgtggtatacgggcgaccccaatgcagacccgcatcttgttctggggcagatcttcgacgaagctgctgcgttcaatacgggactaggaatatcgtacccggcaaatgtgctgaatgatctcggatcggtctcttatactaacaacagcagccagtgtgttctcgcgcctggaagtcgacccccagacgtcgacctgaagatgcccgccacgaaccagctcgtccgtctacagaaaataacacccaacaacgcgcaattctgggtcatcatcttcgcaggaaataacagcccgagtattcaggagacgttgggggcattgcagcggtacctgcgggacaccgcgccagagctcatatcgcataagagcatcagatggttgacgatcaccacggccgttgggtgctcgccttacgaagctctgggaatggatcccctcggtgatgcgtactttgatgcagccaaacccctggcccatggtaggctcggtgtggatatggaggagggggcggcggttattctacggccggatgggttggttggtgctacgggtaagatggaagggcgctggatacgggagtatttctcg

SEQ ID NO: 24733 - DNA, 933 bp, Emericella nidulans
atgaagggccattcaaaaccaagcttgggggaacatctgcagaaggacggcaaagtggagggtactgtctctttgaatgaaaaattagagagcgaaatgtgcaaactcgaggttctgttgtcccagcctggagccgaagaagacgagaaggagttcccggatcttgaggacgacgattgcaaagtgcaacctatgccgaagcaaaccggcgaagctcatatcgcagcggactccaacggacccgctattagctcgagggtcacttgcaaatccaccacagtctcccgtgcttcacaggatgacttacctcatcagtcggaacctgaagaatactgggacgatgacgatgaggagaacgaggaagacgactatatcactgcccgatcataccgctcccgtagcgagaataccaccggcggagcaacgaccctactgtttcccagatataaccagcaggtcaaacgtgagctggctctcgcaaagcagatagtcgaggctacccgcaccgtggaagatatcgaggacgactattgtgatacaagtatggtggctgaatacagcgaggagattttcgagtacatcagagagcaagaggtatgtacagatatccgcaactatcaaacggggctaagctcacaatatctttgtagatcaagatgctgccaaatgcacattatatggacaaccaagccgagatccaatggtccatgcggtctgttctcatggactggcttgtgcaggtccaccatcggttctcactgctccctgaaactctttttctttgcgtcaactatatcgaccgtttcctctcatgcaagattgtttcgcttggcaagctgcagcttgttggtgcgactgctatttttatcgccgcgaaatatgaagagatcaactgtccgtctgtccaggagattgtttacatggttgacggcg

SEQ ID NO: 24734 - DNA, 467 bp, Emericella nidulans
gggtctttgaaaaacaaggcgtctctctatccggcttgttgaatgtcatcgacggtgtcgcagcatgcgaaggccgcatacttgttatgacaaccaaccaccctgagaagctcgaccctgcgctcgtccgcccaggccggatagacttgtctattgcatttgggcactccacaacctctgacattaaggagctcttctcagctatatactctacattggagggcgacctgcgggtttcgcctgctgagcggttgagccctaaactgcgtgcgaggatggcgaagcgaagctcaacctcacattccacaaacagcaccaatgctaacgtcgttatccacaaggaaactagaaagttctctgaagagcaaatccggctatgggcggcggaatttgcagaaagggttcctgcaggcgagttcacccgtgcggagatccaggggtatctgttgaaacataagactgatccg

SEQ ID NO: 24735 - DNA, 417 bp, Emericella nidulans
atggctcaggttctgtacaatttcacctcgcagaatgtcgtcgccgtcggtgtaggtctcaatgtctccaacaccaacgatgtcgacaacgccatctttgctccttggcgcaaagccctcgtcactatgcagttcggtatcaccctcggcaacgagaagccctggtcccagatcttggctgatcagcagacggtcactaatgaacttgcgccccagcttgaggctctcactcctgggtccgggacctacgagaacgagtccaacttcctccagccgaactggaagcaggtcttctttggtgaaaactacgataaactagccaagatcaagaagaagtgggaccccaacaccttcttttactccttcaagggcgtcggcagtgactactggaccgtctccgaatctggccggatgtgc

SEQ ID NO: 24736 - DNA, 759 bp, Emericella nidulans
aacccgaacttggaagatgacgaggaagaccggacaaatacctggcgaccgatccgctaccgtctacctcctcgcagcatcatgccatatgcctgggacttcccggcgacaaagaacaagtctctcgtgttggcttgcaagggcaaagaacggcggattaggctgaccgagattggaaacttgatacctatgcgtattcctcccagtcagcctggagaagcgcagaagatcatcgacatcaatattgttgctgatggtccgacgcagactctggttttatcgaacttcaaagcatcaaagagtatatatcggcagcaaagatcacaaacctcgcaaacgagcatcaatactggcttcgaagtcaaggaatttgactctgatgtcaatttcaaagctcagcttcaccttggtggtatcggtatctccttaatcaaccagaaaatgaaggagttactttacatgacgttccgtgatatcgaggtcaagttcaaggaatcgaaggcttaccagactctgaacaccaccatcaaatggattcagatcgacaaccaactttacggcggaattttccctatgctgctgtatcccagtgtcgtccccaaaactggtaaggaaatggaagcccatgcgatctggcatactatgaggacactcgggaaggatgactcctatggtgcgctgtacataaagtatgctactctgctgatctagcagatgacgctggaacctgacgaggacgggatctgtgctatgctagat

SEQ ID NO: 24737 - DNA, 565 bp, Emericella nidulans
atgcagtcaaatcctggactcgccaaaaatacttctggggcctccctccctcagtttaatgcaggagcagttgatcagcatggtgaaccagcgagcactggtcggcccatatcgtacgtgatcgaccagcctgtggatataagctcactatcactgaacgatgacacggaagaatccgacacgtacacgtacataccgccggatccgagatcagtatatggcactattgtagctcaggccttgagctatgatttgaaagaccacgagctcgaggctacacaagccacgtcggacgtgccatctatgaaactactctctaagcaatctacggaaatgttgaatgagatctgcctccgatggagaattcccgcgtgctcgaggattgtcctatttctggacgttgtacggtcaaagtttgtggataatgagattgacctagacacactggactcagcgttcacctttgtcaaggaaatgccatcttctgaaggcaaaaacgcgcaacagctttgttgcgtcagtgctctatgataggcacaagtggactgtaaatgacagactgatg

SEQ ID NO: 24738 - DNA, 815 bp, Emericella nidulans
atggaagatgaacaagacaacagcatggaagacctcgggagcagaggcggagtccttaccctaggcgatctcacagcggtcataatgggcgtgagttctgtcgaagagttccgcaaattgggcgcgcatatcgtggcacccccggcagaaccagcaccagaccaagtaccaccgtctgataccacagatgctggaaccccaccctccaagaaacttggtctcgacgttggtgtcgacggcttacactattctcctgatgaagccgagaaactcgaaaaactccgcaagcagcgcgctgaactcttccaccgccgcgatatgctaactgcacgaaacacgttcctcactctcgtgcgccaccgctcaaagagcatcctcgacatacttaagaagaaagatcccaaaggcggctggaaggatatctgcggcttcgatacccggcttgcctggtccgacgaggaattcgacgagtggaggttgtcagaaccaggtaaaaaggcgttggaggagggcacgcctgaagccttggcggcaagttatccgactagcaatgtcgataccgatggcgatacggctatgggtgttgaagatgaagacagttctgcgagtcttacgcgtggcgtctgcctgaagaagcgatgtgagcggcacaagcagtgggtcaaggtgcagcagcaggatgtcgcgtttgaggagcgcacgctggagagcgatcttgctgagtgcgagaaggaggcacgggaggtggtcgaacgtgctgtgctgcgaatgtgggctgaggacgggaatgctcagagtcagctggagaatgggtg

SEQ ID NO: 24739 - DNA, 249 bp, Emericella nidulans
gtgaaatacctcccatcctggttccccggcactggcttcaagcgcaccgctgcatcctggaaacagaccctgcttacgacgattgagaagccgtaccggcttgtgctgaagcagctggaatcgggcaagtaccctgactcatacctgtcgaatctactggaagagacaaaaggccgccccctcagcgcagacgaagagcaggttatcaagtggacagccgggtcgctgtataccggtggtgcagatact

SEQ ID NO: 24740 - DNA, 1065 bp, Emericella nidulans
aggaagaccattaagagaatggctactatctccgctacagccttgcaagagggtacaacaccatggcgcaagaatctatccgcccacgtcatctgccccgagtgcaaagaaatgcccccaaatctggaattcccaggttctcatgagactgtttgcggatcctgtggactggttcttgcggatcgagaaatcgacatgcattccgaatggcgtaccttctcgaacgatgaccaaaacaacgacgatccttcgcgtgttggtgatgctacgaatccgctattgaatggtgatcaattggagacgcaaattgctagtggtggttctggccgggttcgtgatctgtaccgtgcccaaaataaacaatcgagcgacaaggcgaataagtccctccttgccgcatacaaagaaatcggtgctctctgtgacgggtttggaatcccgaagaacgtggcagacactgccaaatatttattcaagattgtcgacgacgcgaaagcattcaagggcaaatcgcaggatgtcatcatcgccggatgtattttcatcgcctgtcgcaagtgcaaagttcctcgtactttcactgagattttcgctgtcaccaaggtctcaaggaaggagattggacgtatatacaaagcccttgagaagttctttaccagccagaatctcgagcgggccaatgcagttgtgtccaacggaggtgttcccgaccccaacgacacgtacactgctacgacctctaccaagcccagcgacctctgcagccgtttctgcaaccttctagatctaccattccaagtcacaagcgtatcatcggccctgtcggatcgcgtgactacggagggcaaccttgccggacgctctccgctctccattgttgcggcgtgcatctacatggcttcgtatctcatgggccaccccaagtccgcaaaggaaatctcccaagtcgctcacgtcagcgacggcacaatccgcggcgcttacaagcaactctacaccgagcgcgagagctgggttgacaagatggttaaagatgtaaggagcctgaaaatcttcttcagctaa

SEQ ID NO: 24741 - DNA, 615 bp, Emericella nidulans
atggaccgagtacgaaatctagagaccgagtcaggaccccgatataacgaaagcgtcgagcacgtccgagaggtcgaataccctacactgagggatgtcatataccttgaccacgcgggatcgacggtatatgcgcggtcactaatccggtcgtatgctctggacctccagacgagtctgtatgggaacccccattcagataatactccatcacgcgtatctggggctcgagtagacgctattcgcgtgcagcttctgcacttcttcggcgcagatcctagagactttgacctggtcttcacagccaatgccaccgcttccatcaaactggtgggcgagtgcatgtccagctatactcggtcacaaaaggcgtcgcgtttcagcaaacgccgcggcttcaactatgtgtaccaccaagatgcccataccagcctggtaggcttgcgggaaattgctaccggtcagagtatgtgcttgcgaggagatgcagccgtcgaggagtggatcgattggggaaagacgcccagtcagagagacgtgacgctgttcgcatatccgggacagagcaacatgaccggccgacgaacgccgcaatcttggtgcgaaaatctctaa

SEQ ID NO: 24742 - DNA, 1095 bp, Emericella nidulans
atgctcctcctcctcgagctagacggcgagctgtatgagcacttccccgacgctgacagacgcttgtacatcttctcctgtccccgcaaagcatgcaaccgaaaagcaggcagcatccgagccctgcgcgcgacaagactacacaagagccaccaggcgccgcaaaagattgagaagcaggaaccggagaagaaggtggtcgaacagtcccaggcacccaagccggatcttggtgcaagcctgtttggtagctcaactctcaccaagagcgtctctgcgaacgcaaaccctttctcgtcaaagccggcttcaggttctacacaatcaagcaatccgttcgctgcccctgttgctagccattcacctgctcctctcgcgtcagccacagaattcaaatcaacccccaacaccctctccgaatcatttgcagacaaagtccgcgtctcctcgccgcctccgtccactcaagccgccgagccagctggcccaccaactccctggccggcacgctctgagttcccagagccttacacaaacttctacatcgatgcagaaggcgaaactctctcgcgcccgccgacccccaaaatccctgacaacgtcacaattgatacgagcgaagacgccgaggggggtagcggcggcgcagatgcaaaagacgcgttcgagtcggatctcgacaaggccttcctcaagttctctacccgcctcggtcataatccagagcaagttctgcgttatgaattccgcggtacccctttgctatactcgcataccgatgccgtgggaaagttgttgcatgactctaccccttctgctgccaaagtcagtacgaagtcgagcggtgcgagtcgtatgccacggtgtcagtattgcagcagtgaaagagtgttcgaactgcagcttgtcccgcatgcgattagtgttcttgaggaggggagggagggggttggacttgggaaggatgatggcggaatggagtgggggactatcattctgggtgtttgtaataggaattgtgggccggaggaaattggagcggttgggtacagggaggaatgggctggcgtgcagtgggaagaggctgctaaatag

SEQ ID NO: 24743 - DNA, 509 bp, Emericella nidulans
gacaaaccagacgcgttttcggatccagcgccggtcagatctcggcaattgagctacgccctgagtccagcttgccagtccccagagacacaactgagattcagcaacctaatggaactttctcatccaacaatcaggcgagcggaggtaatagcttcagctatatggacacaacgaatgatcagggcgacaacgacgcggtgaacccgcaggccggatcaccagcagactcgctctttggaggagctgattctttgttcggcgatgcagacggcacagctggcgatggactgggcacagcaaccaattcgtttggcatagatgacgacgatgagttcggcaaagctcttaccaacggtgtcgctcctgacgctgatgccgctggcgaaccagacacagtgcagcaaaaaaatctctttgactccaaagatccttccaatgatgcccccggcgtcgattcaaacacacttgtacccaaccaaccgctagattctcactcaacggacgca

SEQ ID NO: 24744 - DNA, 437 bp, Emericella nidulans
gtcagcacatggatcttcttggtggcgtcggacaaatcccgctgaaacattcagaacatctacctgccccgcaaaggcaatctctcccgccctggttgcgtgaggtatccgaccctgcagatcagggtcggctggccgcttcaagatttttcgacattgagaagacggaactagaacggatgaaacaagctttttcatacgatcaggacaataatgcaggttcagataggccttcgtctccgagatatcgtgtcgctgggattgaaaagggcgccaagaaccgatataacgacatctatccttacgatcattcaagagtgaaactccatgatatacccaatggcggctgtgactacgtgaacgcaagttatttaaaagccgagtatagcaaccagcattacatagcgacccaagcccctatgcctgatacttttaat

SEQ ID NO: 24745 - DNA, 1129 bp, Emericella nidulans
gatcaacaaagttcagtatctcgctgaatcaacataacgagaagtgtgattctcgtctcagccctttcctcgagacatgggacagtgttgaaacagagcggtacgcgcgaggaaacgatgtttatgtgcctctgaatcattttgacatcgaccagtctcggacggtgtcagtctctttccatgggttcttctctccggaaactgtgacgctatacagggttgaaattgtcccagaccttccttggggcttttacgtgccccccaagctggaaactgggaaactgttcctcagatgcacgagaccgaactccttcgccttcggtattgacgatggattgccgcacctagtacaagacgtcatgaatatactggaagaggagaaaatcttggtaacctttttcgttgttggtgctgggctccgggacaaggaagccaacttctcgcaagtgtacgaggaaatgctgcggagaggtcatcaagtagccctacattcggatacgcaccagcagttagtacattccccaatcacaacaattccagttccctaagattgatgctaacatttcctaaaggatagaagcactcgacactattcaagctatcgacgaggagattgtccacaacattgagactttccagagactccttgggattcattgtatgcttgcttcacccctttcttttgactttgctttaaggcgtacaacgacttatttatatagcccgttactttcgcccaccttacggcactgtcggcgcgaggacccggcagcgactagcgacctatgttcaagatcccaatattataaattggagcgtcgatgttgaggactggctgtgggcagagagcaaaacaccggagcgacaacgtgacgcatttttccgaaacgtgggccgaggaggaaatttggtcgttatgcattatttgagtcctacaaccgtcaaatactttcgggagttcatccgattcgtcaagagtatcaacctcaatatcatgagggtggaccagtgtttggaggatcctgacagtccccccattgatgctcttcgattaagccagcagggtcgcgcgcggtacagggttcaatcgaatagaaagtctgataacaacccaggcaaaacggggtga

SEQ ID NO: 24746 - DNA, 834 bp, Emericella nidulans
atggcgacggccttctggttgcttctcttccttctgggaagcctccatgttctgactgcagctcagaatagttcccaatccgaatggcctatacatgacaatgggctgagcaaagttgtacaatgggaccattacagcttttacatcaacgggcagcggatattcctgttctcgggggagttccactactggcgtatcccagtcccagcactatggcgggacatattggagaaaatcaaggcgattggattcactggctttgcgttctactctagctgggcttaccacgcacccaataaccagactgttgatttctcgactggtgctcgtgacatcaccccgatatatgacttggcaaaggagcttggaatgtacatcatcgtgcgccctgggccatatgtcaacgccgaagccagcgctggagggttcccactctggcttacgacaggcgcatatggctcgacgagaaatgacgaccccagatatacagcggcctgggaaccgtattttgcggaagtgtccgaaatcaccagcaagtatcaggttaccgatggtcattatacactttgctaccagatcgagaacgaatacggacagcaatggattggggatccgcgtgacaggaaccctaatcagacagctattgcttacatggaattgctacaagcctcggctcgtgagaatggtatcactgttccattgaccgggaacgaccctaatatgaacacaaaatcctggggcagtgactggtcagatgctggaggcaatcttgatacggtgggcttggattcgtacccttctgtaagtggcttatatctatattgctaaacattt

SEQ ID NO: 24747 - DNA, 522 bp, Emericella nidulans
ctggctcggtatgacctggctctaccctgcagagatcgtgcctctgaagatccgtgctccggctaacgctttgtctacctcctcaaactggatcttcaacttcatggtcgtcatgattacccctgtcgcgtttgacaacatcggctaccagacctacatcatctttgctgtcatgtaagtttctgattccctcctcttagagcctcgatactaatgcgatgcagcaacgccttcatcttccccgtaacatacttcttctacccagaaaccgcctaccgttcgctcgaagagatggaccgcatcttccgcaagacaaagagcattttctcccttgtccgaactgccaaggaagagccgcacatgtatggcaagcatggtgagctcatgcgccagctttctgatgtcgaagacgaggcggtgcgccgcgccagctacctcgagcaccacgccggcaagaaagaacatgagtctagcgacgaaacgagtaccgagaaggtggataacgtggagcatgtgaaataa

SEQ ID NO: 24748 - DNA, 984 bp, Emericella nidulans
ggcctcaacgaccaggactccacggccgacagcggcgaggcgaacctcgacctgcagtacatcatcggcgtctcgtcgccgctacctgtgaccgagttcacaaccggtggccgcggcaagctcattcctgacctctcctcccccgacccgaatgacaacaccaacgagcctttccttgacttccttgaggccgtcctcaagctcgatcagaaagacctgccccaggtcatctcgacctcctacggcgaggacgagcagacaatccctgagccgtacgcccgctccgtctgcaacctgtacgctcagctcggttcccgcggcgtgtctgtgctcttctcctcgggtgactctggcgtcggcgccgcctgccagaccaacgatggcaaaaacacgacgcacttcccgccgcagttcccggcctcttgcccctgggtgaccgccgtcggcggcacgaacggcacagcgcccgaatccggtgtatacttctccagcggcgggttctccgactactgggcgcgcccggcgtaccagaacgccgcggttgagtcatacctgcgcaaactcggtagcacacaggcgcagtacttcaaccgcagcggacgcgccttcccggacgtcgcagcgcaggcgcagaacttcgctgtcgtcgacaagggccgtgtcggtctcttcgacggaacgagctgcagttcgcctgtatttgcgggcatcgtggcgttgctcaacgacgtgcgtctgaaggcaggcctgcccgtgctgggattcctcaacccttggctctaccaggatggcctgaacgggctcaacgatatcgtggatggagggagcaccggctgcgacgggaacaaccggtttaacggatcgccaaatgggagccccgtaatcccgtatgcgggttggaacgcgacggaggggtgggatcctgtgacggggctgggaacgccggatttcgcgaagctgaaagcgctcgtgcttgatgcttag

SEQ ID NO: 24749 - DNA, 1987 bp, Emericella nidulans
ctgcctaaggcactaccacgtcatttgcccgcctacgttgccgtggggtcgtcggcgggacagtttttagcatcccgtcaacaacaatcgctccatccaagcgcaacaccgcgcattgccaaaatggcctcgtacgtacgtccagtactttgcaaaaatatcacctattgacagaaacagaaatatcctccagattcccttccgccgctcgcacactgtctccctctcgaccgccttgacccaatacatttccaccaaatatgaccagcgccctgacatgtttgcagatgacttgctcattatcgatcggttacgaaatgaggccataaacgtgcaggaaccacatgtcagcggaatcagccggctggttacttacgccgcgcaactgaaatggcttgggggaaagtttccagttgatgtacgtatcaataatatcatagatattccgggctgagttgacggtcgtaggtcggggtcgagttcccctggtatcctgcttttgggttcaacacaagtcggccaggtacgacgtttctcacagcgaatctgctaggatgttggctaatgtacgacagtctcacaggataacatccgcttcgagctggcaaacgtcatcttcaacctcgccgcactctactcccagctcgccttcgccgtaaaccgcacaacaaccgacggtctcaagcaagcatgcaactatttctgccaggcagccggtatcctagcacacctccgaacagacatcgtccctgacatgcgctccgccccgccggaagacatggacgagatgaccctccgaagcctggaagagctgctcctcgcacaagctcaggaatgtttctggcagaaggccgtgatggatgggctaaaggatgcatcaattgcacgactcgcgggccaagtgtcggacttttatggcgatgcgtgcgatcacgccgtcaagtcgaatgcgatcagccccgaatggatccaccatatgacggcgaaacagcatcattttgcagctgcagcgcagtatcgccagtcgctggattgcctggagaagcgcaagtatggagaggaggtggcacggttacgggacgctgtggcttgtgtgaatgaagcgctcaaagagagccggtggatcaatcgcacggtgctgggtgatttgcaggggttaaagaatagagtaacggaggatttgaagcgcgccgagaaggacaacgatatgatttatctcaaccccgtgccgcccaagtcggagctcaagcttattgatcgggcgtgtatggttgcggctaaggcgccgtcgcaggtcccgtacgcaatctcgatgctgggggaaaaagggccgttgggacagccgctcttttcgaagctcgtcccgtatgccgtgcacattgcggcgagcatttactcggacaggagagaccgtcttgtcaatgagcggattatcggcgaattggagaacatgacggacaagctacgcgagtatgtcacatccttttacattctctatttatgctaacaggccagtctactatcatcgctcaatctccccggctcgctgcaagcccttgagaagcccctgggcctgccgccatcactggtcgcccatgccgaagaaatgcgtcaacaagacggcctcaaccgcctccgcaagtcccttctcgacatcgccaaagtcaaatccaacgaccgcgccgtctataccgaaggcgtggaactcctcgccgctgaaaaagctgaggacgacgcttcgcgccggaaatttggcaccgaccgctggacgcgcgaggcctctgaagccgccgctcctaaactctacaccaccgcccgggaaatcgacggctacttcacctcagcgcagagcagtgacaacctggttgagcagaaactgcacgactcggaagctgtctttcgcgttttgaccggcacgaatcgcgaccttgaggcttttgtcccaagtagtcgacgcgcaacgataccgcctgaagtcgaacgcgag

SEQ ID NO: 24750 - DNA, 319 bp, Emericella nidulans
aaacgcaaggcacagaatcgtgctgcgcagagagcattccgtgagcgtaaggagaaacatttgaaggatctggaagcgaaagtggaggaactacagaaggcatctgacagtgccaaccaagaaaatggcctcctcaaagctcaggtagagcgtctgcaagttgaacttcgtgagtaccgcaagcgcctttcctgggtgacacaagggaacgcgctctcggctatcaactcatatccaggcaatgccaaccgcatgtctggactcaataataacgatttcatgttcgatttcccgaagtttggggatctccctggcggcc

SEQ ID NO: 24751 - DNA, 655 bp, Emericella nidulans
ctgcacacatccttcaataaccttggaaaagacctgaaatcgatctttgagacgatggccacgcatctttcagagcagaagaacgaaataaacaggctacgggccgagctacagagctcgaaccgccagaacatagaaacgacgcacaaggcctccgctcatctcgctcaagcgattgaagaagaacacgtcgctgcggaagcggaacgtgagattttaatgtcacagatcaaagcgctggttgaggaatctcgccagaagcaattcgcccgcctcagggccaagattgacggggtcaggaccgagatttcagcatcaggggacatgttagagcaggccacaactcagcatgaccgccagatcgatgagtgggttttcaagtctgagcaattcgctaaggatgtcaatgcatcgaaagatgagatcaggacgaagctgcaaaatgattgggaggtaagtgtattcctcgttttcggtatactttttactaagtatgtaggcatttgatcagcggaattcgacaatccggaaggcaacagaatctgtccataaggagacggtacgcattgttgacgttcaagtagacgacatgggacggcatatggaagctcttgacgatttcgtggcataggcacgatctcagaatggtcgttac

SEQ ID NO: 24752 - DNA, 300 bp, Emericella nidulans
ttttacctgacgaatttgttatggccgctgctccgcaagaccgcgaagctgccagatacgcctgcgcctcgggtggtctttgagtcgtctgagcagcaccgcgcggcaccgtcaggggtcaagttcggatctctcgaggaaatcaacaaccctgatctcggaccgctggagcgatacgggcggacaaagcttgctatcattctcggagtcaagtacggccttctagagaaagtcatcaagcctaatggtgacaacatttatgctctctccgtccaccccggcgctgttagtctccctgct

SEQ ID NO: 24753 - DNA, 1602 bp, Emericella nidulans
atgctagttgtgatctcagggacaaccgaccggaagcgattacgagagcttggagccaagattgacttaagtcagttggaccaacactcgagcagctacaaccgcagcggggagctaagtgagcttgagcaacgtctgcgccaggcatgggccgagaccctgaaacgcgaaccggagtccattcggctagaagacaacttctttgcgctgggtggtgactcggtaatggcgatgaagctcgtgactatctctcgaactcacggccttgagctcaccgtcggcaacactttcaacactcctgtgctatcagagatggcagctgttgtcaaggtgtgtgattcgcaaacacggacagaaacgcggccattctcgttgatagcccagagtcccgagagcgctattctcgaggcggcgcaagcgtgtggaacggagccggaagcgatcgaggatatctatccctgtacaccaacgcaagaatccttgttcaccttctcactcaaagcagttgtggcgtacgttgcccagcgagttgcaacgattccatcgcatattgacatcgactcgtggaagaaggcctgggaagacgttgtcgcagctaaccctatcttgcgtactcgtgtagctcagatttccgagcgcggtcttcaacaagttgtgcttaaggagaaaatctcctgggggcatgcaaccgatctggagcaatacctcgaaaacgacaaagccgagaaaatggaacttggccaaaacctggcccggtacgccattatcgaatcacacggcaagcagtacatggtctggacaatccatcacgtagtctatgacggatggtcagagccgatagtcctccagcaagtcagcaaggctctacagaagcaacctattgagatccaatcccaaatgagggagtttgtcaagtacgtgcgtgacacggacgaaacggcaatggaagaattctggagacgcgagctgaggggtgctgttggtccccaatttcctcgtctgccgtctcgagactttcttcctacacccaacggcatggttgaacgccacatcaatctagagatcggtgctggctcaactttcactattgcgacgctgatccggggcgcttgggcactagtggcatcacagtacactgggagtgacgatgtcgtatttggtgaaacgcttatgggtcgtgatatttctttacctggtgttgagggtattatcggtccgctaatcgcaaccgtacctgttcgcgtacatgtccaccgaacaagctctgtcgaggcttatctccagagtgtccaaaaggccatgttgtcccgcacaccttaccagcacatgggtatgcagaacattagaaaagtcagccaagatgctcagcatgcctgcgaaactggtactggcttggtcatccaaccagaccccgagtacgtgggtggtgagctagggttcgaagtgggcgatgtcgtccgcgaagcactacatttcaacccatacccggtcatgctgggctgtggaatccagaagggtggcttcaggatttgcgcaagctttgatgtctctttggtcgaagtcaggcagatggaacgtatccttgcgcaggttgagactgcg

SEQ ID NO: 24754 - DNA, 753 bp, Emericella nidulans
ttaattacccaaatactcattgcttccagaactcagctcccggcatccgatgacagcgaaccaagacgaaactacttcactggccccgcccgcacattaggtggtgaggacacaccaagcagagtgattgatactccgagtgggcctgctcagcctcagattcctcgacgtgtgcggcggacgctccatttctgggcggatggtttttccgttgacgatggtgaactatatcgctccgacgatcctcagaatgccgagattctgaatagcattcgacagggccgcgctccgctgtcgattatgaacgcgcagcatggccaggatgtggatgttgagatcaaacaacatgacgaaaaatatgtcaggccgaagcctaagtaccagccttttgcgggcaagggacagcgactgggtagcccgacgcccgggattcgagcacctgcaccctccgaaccagccccagcgcctcaatccagctctggacctcccaagccaaatgtggatgaatcccagcctgttgtcactttgcaaattcgactcggcgacggaacacgtcttacctcccggttcaatactactcatacaattggcgatgtttatgattttgtgtccgctgctagtccccagagccaggctcgcccgtgggtgcttttgacaacattccctagcaaagaactcactgataaggcagccgtgctgggtgacctgcccgagttcaagcgtggaggagtggttgtacagaaatggcaataa

SEQ ID NO: 24755 - DNA, 339 bp, Emericella nidulans
ctggacttctccgtacgatggggagacgtggacggccactagcgatgtcgatattgaccacgttgtgccactgtcgaacgcatggaatgtatgtacccatcaagcgaacaccaacggcaatagcgccctagaatgctaggaatgctagatgctagggagccaggaatgcaggcatttttcgctaacagtacgcatcgcagtctggagcaagtgaatggacgaccgacgagcgcgaggcctttgccaacgacttgagcattccgcagctgctcgccgtgacagacagtgtcaatcagcagaagagcgattctgggcccgaggagtggctgcctccactcg

SEQ ID NO: 24756 - DNA, 376 bp, Emericella nidulans
agtatgggcttcctctcttccaaaaccctgatcaaggcacacgccgttttccttttcaccctcgccgtctacctcaccaaatcccccgaagttatcacggaaagcgatgtggtcttcatgctaggggaattcctacatttggtacaggactttcatcccatcccaaatccggatgaacaaacgatttgctaagaaataactcaaccaggattcccgcccatccccgaacttctcgcgtccgcaatcccctttcgcaatgtgcggcatcctcctcgtcgccgacgccttaatagacttgatcctcgtaaccaagatcccacatataaacgagattctggccatggccgaggccgccagatcggaggctcctggagct

SEQ ID NO: 24757 - DNA, 1340 bp, Emericella nidulans
gagcccgcatacaagaggtatggctcccaagattgttctttgaggttccttctcttccaattttccttgcgaattgcgaagtctgaaccttcacctaatcggcgtttgtaggcagggtccgactgccccgccctccagaggaaatgtcgcccgcagacagcgagtccgcctacttcaacaactaccctccacccaaagccctttccaaacatgaatcgctcgccagatcgtttatagagtaccatgtcgaatccagtcggcgcgtagtactcgtcacctccggaggaacaacggttcctctcgaaaaccaaactgttcgcttcatcgacaacttctctgcaggaacgcgaggagcgacatccgctgaatacttcttggagcaggggtatgcagtaatcttcctgcaccgacagtttagtctgctgccctattcccggcattacagccactcgacgaattgcttcctggatttcatggacgaggcgtttccgagtgatgttagccgttcagatcatggtcctatcgtggtgcggaaggagtaccaggatgagatgcgcgacgtgcttcgaaagtacagatacgcgaaacagaacaatcttcttctgctgcttccattcacaacggtctccgagtaccttttcgaactgcgcatgctcgccaagtgcatgaacccgctcggtcctaatgcgctgttctacctcgccgcagcggttagtgactttttcatcccgcgcgaccgaatggcagagcataagatccaatcctccgaaataccaaaggagttccaaggtaacgatgaagctgtgggtgccgatgacctttacacgggcgggttcgaacagaagcaggagtcgagcaaaaagttggtcattaacctagacccggttcccaaattcctccatcaactcgtagatggctggtcaccggagggtagcatgatcgtgtcgttgaagctcgaaaccgatcccaatctcctcgtctataaggctcagacggcgctccagcggtacgcccaccacctagttattggaaatttgctttctaccagaaaatgggaggttgtcttcgtcacaccgaacccaccttatgagcgctggattcgagttcccaagtcgcgccggagtaagagcatctccggcgtcgaagaccaggtgggcaaggctgaggcagcgaatcggtcatcaggagaccagaccttggcggccccagtgggtgaagagccgtctaaggaagaaaaggacggagaaggcacgtcccgtgagggcacggagattgaaagcttgatcataccagagctagtcaaactgcattcggagatgatcgagaagttcaagcgatag

SEQ ID NO: 24758 - DNA, 444 bp, Emericella nidulans
taccgaaagtcacttgctctcgggttcttctaccgattctaccatgacgtattatcacagatcgaggccaggagtagtgatctggataacagtgtggtcgctgaaattgagcgagcaatttcaactggagagaaagataacgaggcttcagcggcttaccagcagagggttctaggccgagccgggccgcacctctcggcattgaaacaggctaccggagaagctcagtacaccgacgacattcccgcgcaaaagaacgaactgtacggatgtatggttttgtccacaaagctcacgccaagctgctcagtgtcaacacagaagccgctttggaaattcctggtgtcatcgattatgtagatcataaagaccttccatcaccgagagcgaactggtggggtgctcctaaattgtgacgaggtcttctttgctgtcgataaagtc

SEQ ID NO: 24759 - DNA, 287 bp, Emericella nidulans
gtcgcaagaacctcagctttcctggcgctcaaccggtcagcttctcgcggcggcacctcgccgagctccaacgcgaagactactatgtatgcgaaaagactgacggcatccgctgcctaatgtatttcgcgcatggcgaatcaccagaccaggagatccactacctgatcgatcgcaagaacgagtaccgctacgttcctggcctgcacttccccctgccgggcgatgagaccttaaagcactttcacgtggatacacttgtggacggcgagctggtcaatgatact

SEQ ID NO: 24760 - DNA, 1605 bp, Emericella nidulans
aaactccgtcctttcttcccgccactggagcctctgcaatctgtgaacctaagggctgccctctaccgcattctgtctgatctaaaaaagaatggagatctgggccgcgagaccatcctccgcaagtccatgctggacgactgcaagggcgagaaattcgacgagctcctagctgtcttctctactaacgtgctacggaggaaaatctcaacccgcaatccggcaatcgacttatcactgacctccggcctgacacggcaagaatacacgcgccttctaccgctgattcttgctcatcgggcatcgctgagtacactcagcgagcgccgagagcgtgttcgtgatacccatgagaagttctcgcagttgttggacagaaagaaggaggaactcgacacccggtccgcaattgacacccatgccatccgagtacgggacactgaaatagaggctcttgcccacgagacgagagctaattggcaaggaagcgtggaatgggttaacgttctactctacgggggtcttagtagcagccgagacgccttcttagagctcccatttgatagtgcctggtcccaagccatggcatctacagttgataaactccgcaccaccgcaacccgctctgatctgatactggatctcgagacccgagtctcgcgacagcgagcacgtctacaacattggtgtcggtactcagattcactcaagcgttcaggactggcatcaccagcaaagcctgcagccacaaacaagggccctcaattgatcttccgggaccaccagaacctcaccattgccagcatctccaaggcagtacggcaacctgttaaccgagggcctcctgacgtcgacgatcaaaacatcctgcactccctctcgacagcaatggagcgtataaatggcgtttcgagacagcgacagagctcgccgagccccatttccgggcttgagccagagcccgaaccgaagacatcaaggtcatatccacccatcgaaagacctgaagttatcgaaccacctaccggatccaacgcttccgactacattgacgaagagtcgctcaaaaagagacacagggaaatattcacgctcacagaacgcacccgcagatccatgtccttttttgaagggatccccgagagccctccacaagcggaaccaaaccccgtcaaagattccacaaattcaagtccagaagaagaaccacccagagaatcctacaccctagttgaacgcacccggaaatccatgtccctgcttcctccaccccgtgaccctccgcgtccaccacgacaatctcgcaaatcccgcgcctccttccccgtaaatcaattcgagacgcctccaaagccttcttacgatatcccgagccgcgcatcgaccccaagggatgagttattcgaggaacaggctgattacgcgagtgtattcaagtctaggccgcgtattgcgttaagtcctgttgcgtcgccagcagtgcatattaatccgattgaggactttgatcttagcgcggatgggaatttcgggcaaggccataccaaagacgatttgaatcacgctgcactagggtcgcctttgcgttcccgggggcgatggtga

SEQ ID NO: 24761 - DNA, 565 bp, Emericella nidulans
ggctgagtatcactcctccggctatgtctggcgttatgtgcgcgcatcaatgtcactggcaggtctactcccgcccatttgcgacgaagggagcatgcttctcgacggcggctacattgataacctcacggtagcccatatgaagacgctcggcgcagacgtcattttcgcaatcgacgtgggctccatcgacgacaatacccctcagggctacggtgattccttgtcaggcatgtggtcagtcatcaatcgctggaacccgttctcttccatcccaaatccaccaactttatccgagattcaagcacgactggcctatgtctcgtccatcgacaatcttgaacgggccaagaatatccccggctgtctctacatgcgtccgccaatcgaccgctacgggacccttgaattcggcaattttgatgaaatttaccaggttggatatgcctatggtaaggagtacttgcaaaagttgaagagccaagggtctctacctcttcccgaggaaaatgaagagaagaagaagcttcagcgtaccctggctcctcggcgtgccagtatctag

SEQ ID NO: 24762 - DNA, 552 bp, Emericella nidulans
atgggcggcgtgctgcatctggtcgaggaccggccgacccccaagtccgtgtacaactggcgaatctacgtgctagcccttattgcatcatgcggctccaacatgatcggttatacatcggcctttattggcacgacaatcacattatcgtcatttgaacatgagttcggcttcgacgagaagacggatagccaggtagacctgatcagcgagaatatcgtgtcgctgttcattgcgggagcgttctttggtgccatcctcacctacggcctcggccacttgatcggacgaaaatggaacctggtcgtcgcgtctgccatcttcacgctcggcgccggcttaacttgcggcgcaacgggctcgactggactagggatcctgtacgctggacgcgtcttgtcaggactgggcacaggcgtggcttcaaacatcatccctatctatatttccgagcttgcaccgccagctattcgaggacggctggtcggtttttatgagcttggctggcagattggtggactggttgggttctggatcaacgtaagtgctctc

SEQ ID NO: 24763 - DNA, 615 bp, Emericella nidulans
cgcgccctgattttctgttccgcgtttaccgacatcccattcatgacgctcgtcatcgccggtctcatcgccttcatgggtcttttcacgctgctattctacatctcctacgtcgcctctgcgcgccatctcacgtccaacgacatggccttctacctcgtccctatccttaacgccgcttcctgtttcggacgtacaatccccaccgctatggctgacaagttcgggcccttcaacctgatcgggcccttttgcatggtggtcggcgtcttgatcctctgcatgatggctgtcgtcaatgaagccgggattattgtgattgccgttttcgccggattcttcagcggcgccttgattggtctcccgccgctgtgctttgtcgcgctcacaaaggataagagtaagattgggacgaggcttgggatgggctttggtataatggcctttggagtgctggcggggggacccggggcgggtgatattctgggcgatactcatgatctggattggaacggggtctggatattcggtggcgctagttgtcttgctgcggcagcgatctttgctggcttgagggtttcccagtatggattcaagctgcgggtgaaagcgtag

SEQ ID NO: 24764 - DNA, 798 bp, Emericella nidulans
acctcagatcgttatccattgtacgcccaggcacacctagagacttagacctatgatgaacataaattgacaatttatctaggcgccgccaatcgatcccccgatctgtgcgataaggaccccgagcgagctcgccgggtcaatgtcgacgctactcgcacccttgcagagttaacagcggagaggaatatcttgctagtctatatttccaccgactacgtcttccctggcgtcgagggagaggcaccgtacgaagcagacgcgccgacaaagcccccgaacttgtacggtgagctgaagcgggatggtgagcaggttgtgcttgaagctaccaaaaagagcggaatgggcatcatcctccgtgtaccagtgctgtacggcacagcaaatgagaattctgagagcgcggtcaatacactagttgattccgtctggaaagctcaggatgagaatgcgggcatcaagatggacgattgggcgcagcgataccctactaacactgaggacgtcgcgcgggtattgcgcgacattgtgatcaagtatctcaaggagcgcggtcagattatgaagcttcccaagattcttcagttctcatccgaagacaagatgacaaagtacgagatgtgcgaaaagttcgcggaaattttgggtgtgtccttgaagggaatggtccgcaacaaagaaggaaatgatccgaacgcgtcagtccagcggccgtatgacactcacctttcgaccaaggtgctgaaggacctgggtattgatgtgcagacagtcgactttgtcgattggtggtga

SEQ ID NO: 24765 - DNA, 434 bp, Emericella nidulans
atgaatcgttttcgcaagtcgaagaaggagaaggaggtcaagagggagaaggccaaggaggatgtcgtggttaccgaaaccagtgttccccctactacattcggcgcgattctcaagaagaacaagaaagagcccgagtcaaagcccgatcttgacatcgacctctcaagcgcattaccgtctaccgatgatttccgaactagcttgcttatgccgaaactatcagcgcgcttcagtatgctacgagaacaagacgaccccgaatcgcttatcggaaaggccagcgatgacagtgtcttatttcctaggcgcgcttcgagattgaaccttttcggccacaatccgagtctcctcaccgacattgacgaagtatcctcttcaggtcggccgtcgttcaaccatgagcgtgggtcctatgcgtcgggaagtgatgg

SEQ ID NO: 24766 - DNA, 1658 bp, Emericella nidulans
atgcctcgcaaccgtgtatggtgaggcccaaacttcagctgcacagctgcgcaggcagtttggaagcggcacattacgaaaagcagcgatcagcttaagatatgagaaaacctcctcgcgaacttagggtctccaatcgtcaaaatggttcgtcaaggacggtgctggccatcgagtcggaaggctgacagagggcgatgcgaaaaagctccttggccgtcctgttgacgaagatggcgatgtcattgaccagcacggtagcgtcaagggtcacgcagaaccctacgaggaacccgaagaagagcagcctgaagatgtagacctctcggtcctagaaggaaagacggtcaacaaagccggaaatattgtcgacgagcacggaaaagtctatggtcgcatcatttccggcgatgggaagcgcctcgcaggccggaaagtcgacggtaagggccagatttggagtgatgatggcaaagtcatcggcaaggccgagctcattcccggtgctgagcaggagaagccagaaggtatattctacggtttcgagagcctcacggttgggaaagaaggcgtggtccaggatgcatctggccgtattgttggccgtgtcgtcgaaggagatttcgccaaacttgctggtcgcaaggttgacgaggacggcgatatccttgataagaatggtaacaccattggaaaagctgagcgctgggagccagaggagaagaaacgaaacatcaatcccatggcaaaccgcaaggtcaaccgtgagggtgaagttcgcgacgcggacggaaacctcatcggcaaattgacttcgggtaatctgagcagcctcattggaaaggagattgatgacaacggatatgttgttgacaatgacggaaacaagattggcgagtgcactttactcgagaatatcccggagcctgaacctgaagaacccgaaccagaaggcccgtctcctgacgaattggaagctcaaaagaaagagcaagaggatagagaattggctaaaaagatgtcggccatcgtttctggaaccctggaccgtatccaacctgtctgcaggatgattacagatgtgagtccgactgatcctaacccagagatagcttattgacgcttcaaagcacgttgaccgggcagagaagacgccgaagaacgagcttgatgaggaggagcttgtcaagaatgttaagccgctgcttgaggaggccagcaatatcctccaggagtgtaacggcgccattcgtgccctcgacccagatggtcgtatcgctgccaacgcaaaggccagagccgcgtctcacgaagcctctcccgaagaatataatctggccgagaagctaaaggagctttcagactcggttctcaggaccatcgagaacggaaagagaaagatcgatgggatgccccatgcgaagaaagagctgaaccctctctggggactcctcagcgagccactcttccagatcattgccgccgtgggtctcctcttatctggtgtgttgggtctcgtcggtcgattgcttgagggactcggactggggcccttggttaatggcctgctcggtggtctagggctcgacaaactgctgtcgaatttgggattaacgtcgctgacggattctctgggattgactggcaagaagaaatga

SEQ ID NO: 24767 - DNA, 708 bp, Emericella nidulans
atggccgtgcaagtgaaacctacctccaacaacaagctgtcagctctctggcaggccgcctgcgcagattatgcgaagcagactggaaagctgctagctgatggcgagctccccgaactgcgggggccagaggacctctcgcggcagctggacgcagagaaggacaattttgacgattttcgcatgaaacaacgcccgctattacacgcaatacagacagtgatatatccgttcaaaacatggggcagtctcatcgcggccacctcattccctccagcctcggcaatcatgagcacgatgatgtatgtaatccgtggagtgaggaaagttagtgaagcattcaacatgatttcagacttgttccggaagcttggccactttgccttgcggctagatttgtacaagggtgtccaactaagcaaggggatgaagatgatcattgttaaagtcttagcaaatatcttgagggtttgtgcagcgagccagaagcttgtaagttgcaggtcattaaaggcaaggcttggaaagtgggcaaagagtacattcttggaggatcatgagattagtgggctgcttggagagctgggggagttgacaagtcaggagtatataatagtgtcagtgcatggtttgaacctctcataccaggcgctcaggaatacagaggagctactagaaagagataatcagagagatgattgcaagaga

SEQ ID NO: 24768 - DNA, 387 bp, Emericella nidulans
gtctggtccgtgcgattttcgggagatggccgcgagattgtcgctggcactggtgaccactcggtgattgtttatgaccttgagacacgtcaatctgttcttcgcatacggaatcatgaggatgatgtgaatgcggtttgctttggggacaagtcttcacctcacattctctattctgggtccgacgatagcactgttcgtgtctgggataggagatctatggccgatggacgagaagctggggtatttgtagggcatactgaaggcttgacctacgtggacagcaagggtgacggtagatatgttctgtcgaacagcaaggatcagactatgaaactctgggacttgcgaaagatgatgtcacagccaaattcgacacacttgaac

SEQ ID NO: 24769 - DNA, 1458 bp, Emericella nidulans
atggctcgcagcctcgcagccctcccaacggagataattgcaattatcgccggctacctaccaaacagtggcatcaagaccctgcgtctcacatgcagaaccctctgcaacaccgtccgcctccgtctagaccgcgtcttcctctccgcaaacccgctcaacatcgccgtctttcgcgccatcgccgatagcgaaacattccgccacggaatcaaggagataatctgggacgatgcccggtttctccaagtcccatacggagagttccacattgccgattcccgcgaggatctccggatagataaggagagcggatgtcttcaatggttcgtcgacgcatgtaaaaagaatagggaggatctacagatgcgcaagttcgcacatctggacaggggcaaaatgcccaaacagatcgttgttgcagaggagcaagcagccactgagctgcctctgtggatttgctggcagtattaccagaatctactgcaacagcaggaggaggttattgtctttaacaaggacgctcaggcgctggaatatggacttcgccggtttccggcgctcaagagggttactgttacgcctgcggcgcatggatggattttcactccgttgtacgagacgcctatgattcgcgcgttccccagggggtttaattaccccatcccacgcggttggcccagcgtctccagtagcgggacgtacaggcccagagcgcagccgtgggaggacgaagctaccaaaaaggactatcgcgggtttggcatcataacgcgtgccctggcttcgtatacaaagcatcaagtctcagaactgataatagacgcccacgcccttgacacaggcctaaactgccgtgttttcgaagagccaaatcccgaatacgacgatttagtgacgatcctccgccgacctggcttcacccgccttgacctatccctttcagtccgcggccaggagtggacaggttggccctgtttccgcaacggctacctccgccgcgcccttgccgaagcccacgacctcaaacacatcgccctatccacagacgtcgaggaggacccagcatccgataccactgttccagaaaccggcggtggtcgcgcacaactcgtttccctacgcacaatcctccccacggaaaaatggcactcgctccgctacttcagcctttcaaacttcctcgttgataaaaatgacattatcgccatcctttcctccctcccgcccaccctccgcttcgtccacattggcttcctctacttcgttgaccatggtggctcataccgcgaactccttgaggatatgcgtgatcaactcgactggcgcagccgcgaccctaccatccgtccagttgtttctgtggcgaagcctaccatgtatatccagatcgggcatgcgatctggcttgatggcgaggttagtcagtttctttacggggatgggccgaatccgttt

SEQ ID NO: 24770 - DNA, 722 bp, Emericella nidulans
gtctcatcgggattggctcccgatggtcgtcattttgtttcccgtgctcgcgatgaagcgtcctcatggcgtgggatttacaaaagtcctattcccgtttcggctctagcgaaccgtcttgggggctacgtgcaagcatacaccttgtactcaagcgttcgaccatttggtgttacttcaattgttgggggctgggactctgaggctgagcttgcagtcgatggtcaagtgggaagtggaccgcagtcaggttctggcgggaaagtcgaaggcgcgaaatcgggaggaccaggtttatatatgatcgaaccaagcggtctgtattgggtatgttatctcaaattgcattggatgttttacgcacgctgatatcgttccaggggtactatggggctgcaaccggtaaaggaaggcaggcggccaaagccgaacttgaaaagctagacctggcttcggagaaactcagcctgcaagatgctgtaaaggaggcggctaggattatctacgttgctcatgaagataacaaggacaaggaatttgagcttgaaatgagctggattagctcactgaatggtccaacaaaaggcagacacgaagaggtgccgaaagaactactcgaggaggcagaacgagcggctaagcgggcccttgaaggagacgacgaggaagaagaagatggttcgaaagcaaccggcaatgagggcgagaggatggaagagtga

SEQ ID NO: 24771 - DNA, 1949 bp, Emericella nidulans
cctgctcgccagctttcattcacgctccccggaagcttgattcagtcgtctgcctacccatggtctcattcacctccgaatacatcagtgtcggtggaaataggcaccccgccgccgcggactgggatgttcattccggcatcctcgcctacggtgcagataataatgtagccttgtgggatcctctcgtacgtggctctgaagtctactacacaagcattcttcctgcctaactttgtgttctatatatgcaggcagaatcacgtcggggagtttattcggttctagttggccataccgacaaggtcagcgttgtcaaattttatacctgtcccacaacggggacgaggttacttctgactggatctgtcgattgcaccgtacgattatggcgtgccgatcccattgaccacaggcgattcgcccatgcgcttaccttgacggatcacactggttcagttaatgcaatagctacaaattccggggttgatattattgcaactggcggcgcagatgcaactgtcaagatatggaggatatctattcaagattctgtcaaaggagagctattggaaagcataccaacgaaaccgcgctacttcccacttgcactggcactggcgccgcttccaacggacacgcaggacagacctgttgcattagcagttgctggcaccactaacatagtgcaaatatacgctgctgagaatactgttgacacaccgcggtttaaggtatctgctacactttccgggcatgaggcatgggtgcgctcgcttgccttcactgtggacatgcacagcaagacaggggacctcttgcttgcttccgctagccaggacaagtacgttcggttgtggcgcctgaaccgtggagaggctgcatcgtctgggttagtgggatcagaggaagatgctgttctgggtggattcgagccaacattgtccaacaaagcccaccaattcgaggcagcaagatccaaatattctatgacctttgaagctcttttgtttggtaatgaagattgggtatacactgctgcctggaaccctaacccagagcggcagcaacttctcactgcttccgcagataatactctgaccatctgggaacaagatccgttatccggagtgtggctttccgcggaacggatgggggagctgagtgtacagaaaggctctactacagccaccggtagtactggtggattttggattggcctttggtcgccaaatggctgccaaattgtctgcctcggacgtacaggtagctggagggcgtggagataccaagctgaatctgatacctgggatcaaaccttgggaattactggacatgtgcgatctgttaacggaatccaatgggaaccttctggtggttatcttctatcaacaagtgctgatcaaacaacccgccttcatgcacagtggcttcgggaagggcaaaagtcgtggcacgaattctcgcgaccgcagattcatggttacgatttgaactgcgttgacactcttggcccggaccgcttcgtatcaggtgctgaagagaagctgttacgggtgttcaaagaacctaaaccaattgcccaactgctgaagaacctttccggactcgcacagaatacagagggagagcttcctgacacagctcagattccagttttggggttgtccaatcaagctgtgggtgaagaagcccctgtggaaacagatacggcagaggccgagagtatcggacaagcgcaggcatatcaatcaatactatcaaattcgactcagcctcctctcgaggaccaactggctcgatataccctgtggcctgaacacgaaaaactttacggccatgggtacgaaatatccgccgtggccgtaagtcacgaccgcacactcatcgccactgcatgcaaggccagctcgatagatcatgcagtggtgcgtttgtacgacacatcc

SEQ ID NO: 24772 - DNA, 821 bp, Emericella nidulans
tgtcaatgttactgtagtcgagatctactggtatgtatttctgtcggtcctcttactatcttgacaatccatttacttttgtgcagggtcgtcctcctcctctcccagatcttttacctgttccagctcttcaacaaagacactgcgatcgtagctctagcaggaaattcagcggcgcacttcatcctgaacaacctcttcgttgttgcgtggatcctcctctggacgagaaaccacttctggcccgccgagatcattgtgatcgcgcacattatcaaccagcatctcctgttctggcgcattcgcaatctgccaccgatttcgcatatcgcggttgtcgcaggcccatatgcctggacattgattacgctcttctggacaggagctgctgccgtcaggtctcataatttggcctcgaatatcgccgcgaacatcttcctctggattatctttttgatcggctccattcacatctttttggctgtcgatgatctcctggggtacagtctgagtctgttgaccttcggtatgtttcatgtgaagccctcgcgtagtcattcaccgtcccaaattagatgctgatttcatgtttgattgcaggcctggccgtggcccaaactagtcgcaagagccatcttcatctgcagtggatctttgcatgggtcatctttggagtcttcttgctggactcactctatgtgacctccgccaagtacgttggtcgtaatgtgttgttccggagcccgagagagccagagtcgagtgatgctgagcgcgcccccttgcttaatgacgctacggcacctgcatcgacctcttag

SEQ ID NO: 24773 - DNA, 573 bp, Emericella nidulans
atgccgagtcgtgctagctatagtttcatccctcttgatgccgggagtgaagaaaagcctatggatgtcagaaacccagaacatcagcgagaaatccttctcgcagcacagctttcgcgcatcgtttgccgcatgctcgaggtcgaagggttccgcaaacttgagcgcgatttctacaacatcaaatggaaacagatatcgcaggaaacccatatgaatttcctcaaggaactaggacacatccttctcactctccgttggcgagtttcctggtggaaacgcctaggcgatggcggccgcgaacccgacccgaccaagcagcactatgtagaacgagtcgacctactctgcaggattctttacgtctattacacttgcgtcttggcgaaactcccctcttggtgcgcttccgaggttcctaagggcatctggtctacctacgctgacgcagagaatccggtctgggacgacttcccggttgatcctacagacgacggtttcaaggcgtggatcgagcgaggggcagagctcatcgagcaatctggggcgcccgtccgagttgcgaagatttga

SEQ ID NO: 24774 - DNA, 377 bp, Emericella nidulans
aaactggaaacgaacacccccttgcccacctccgcgcaaaggtcctccaaacccttacctcctgcgctacgctcctccagtcctacaaaccgctcgcctcagacccagagcagaagaaggccatgcgccggatcgggaagaaactatatcactgccagaatccagagaaggtaaacctcgccgggcagaagcgggttcctgctgctgctgcggcggtggcggcgtctgcatctgcgaacccaagcgagactgcgactccggatagtgagatggagaggctggcgaagaagcggaaattagaggcagagcagcagaaggcgagagatatttttgggggggagttggttatggagaggacgaaggagagacaggcgtag

SEQ ID NO: 24775 - DNA, 518 bp, Emericella nidulans
cgtgcggggtcgctgataacggccttggaggatggactgaaaagaatggccgacgctgggaattcgaatggtggtaccaaggggcgttatacgagctcaaactcgctcggtgaaggcgaaatccggcgcagaaaggacctccttatcaacgctcggaaggaaagggatgggttagagaacctgctgaatgcgatggcggcaaagagtcgtgttgataacgcggttgcatcgatcaaggataaagaggcgcttataggggccgcgaatgggacgggagggggaagtagcaggaaaccggcgaggaccgggagggtacttggaaaggagacggagcggacccgcgagctggacaatcagggtgtcctgcagttgcagcaggaaatgatgcagcagcaggatatgagtgtggaggagttgctgaagattgtgagacggcagaaggagctaggtatccagattaacgaggagttggaggtgcagaatgagatgttaaggatggtggatgaggatgccacgag

SEQ ID NO: 24776 - DNA, 733 bp, Emericella nidulans
gcagccatggctcttcaccagtacgactggattctcgccctgggtacaatcttcgccttcctcgacgcctggaacattggcgccaatgatgtcgccaattcgtgggctacctcggtctcctcccggtccgtcaagtactggcaggccatggtactggcgacaatcatggagtttgctggagggtaagttggcgctcctccactagtcatcacggatgaccagtactgactcttccagtatcggcgtaggcgcaaccgtatcagacaccatccgcacaaaggtcgtcgacgtcgatctcttcgaaaacaatccagccctcctcatgcttggcatgctctgcgccctcgtcggctcctccacctacctcaccttcgccacccgcattggtctgccggtttcgacgacgcactcgattatgggtggtgttattggcatgggtgtcgcgctcgtcggcgccgatggcgttaagtggtggggtggaaatatcaattcgggcgtcgtccaggtcttcctcgcctgggttattgctccgtttatttccgcggcctttgcagccattatcttcctgctcacaaagtacctgattctgctgcgcagcaatcctgctcgcaaggccctctacacgattcccttctatttcttcgtgacctgtaccctcctcgccatgctcatcgtgtggaagggcggtacgagtcgtatcaagcttgagggcaacgagattgcagggacagtt

SEQ ID NO: 24777 - DNA, 1145 bp, Emericella nidulans
atgaggaattgcttatgcgccgtcgtctgggaaagaccaatcttgctgttaagcccactcaagtgggcacctcaaatgcgaccaagccggaaaatcttggaccttttgagtatgctcatctgcgcgcacctctacccaaggacctgaaagggtccgagatcttcccatcgcactccccgcagcagcatccagagacatattttctgatggtaagaggacctgaatcgcgcgacttgagcgttcgcgaagtagattctaactaagctgcccttcccacagcgacgaagcaaggacgggtacgtgagcgcgactggcatgttcaaaattgctttcccatgggccaagctcgaggaagaacgatccgaacgcgaatacctcaagacgcgcccagaaacgagcgaggacgaaatcgccggaaatgtttggatctccccagtattgggtaaggcagaccagcgctgaatatttgcaaaccgtgatcgagactctaattttgttatccaatagcgctcgagctggctgccgaatacaaaatgtacgattgggtccgggccctgcttgaccctacggagatcatccaaagcccatctagcgcgaaaaagcagatcacgcctcctccgaaattcgaactgccgcccattcaagctccagaggcactcgtcccttcatcccgtacgagaagccgtcgatcagcttctcccagcaagaaagctggcaccccgcgcaagcccaggcaaactaaggcacagaaagaagccgctgtggcggccacaaacgaggccaacgcgacacttcagagtgccctggatgacacagtttcaaatgcagacggtgaaataaatggagacgtgttgcccagtgtggaagacaagagagagccggaaacgtcgcccgtcaagggcaagaaagcagctgcaaaggcgaagaaacaggccgtttccgaggaggatcaagaggataaagtcaagatcgaaatcaagtcggatgctgccgaagggagcgatgtccaagcagcccagactaccatttccgtcgagatgcccatctctttgccagaggctccgtctgccgaagacacacaagaaatgatcgcgaaggccaaagaaatggctaagcagcctgtcgagctcccgcgagaacccgct

SEQ ID NO: 24778 - DNA, 377 bp, Emericella nidulans
gccgttctcccatggcagaaggcgtttttcgcaatattgccgccaaccatcccctgatcaataacattgattctgctggtacaggagcctaccatgccggtgagccgtcagactcacgaaccatgtctaccctccgccgccacaacatcagaaactaccaccatctcgcccgcaaggtcacactggaggatttcctcaacttcgactacctcttcgccatggatgaatataacttggaagacttgctggagttgcgcgcgtctgttttgtcgtcgtcgagccagtccgcgggacgggcggctcgcggcaaaggaactagagcggcgacgaccgcgttcgatcgctgcaacgtcgaagctggtgctaaagttgcggaa

SEQ ID NO: 24779 - DNA, 242 bp, Emericella nidulans
actctgactgctacacgcctgacgttgcgtagttttaagggacccttcaacacccatggaatcgatatctgccctcctccagaggatccaacctccatctacattgtggcagtgaatcacctgcccaacctggcctactatgacgaccctactcgcccgatcccttctgaaattccccaagctcgctcgtggctggagatcttccatcataaaatcggctccaccgaagcaacgcacgtgcg

SEQ ID NO: 24780 - DNA, 1029 bp, Emericella nidulans
agtcagatcgtcgccccgtgaagttgcctgatgtttaccttcgacctccgcttgacggtaaacgagtacccggtgaggttgaaatacaccagaatggtcttcgctatgtctctcccttccgcaacgaacacgtcgatgtgctgttcagcaatgttaaacaccttttttttcagccttgcgctcatgagttaattgtcttgatccacgtccatctcaagactcctatcatgattggcaagagaaagactagagatattcagttctacagggaggctaccgagatgcaattcgacgagaccgggaaccgaaggcgaaagcatcgctatggggatgaagaagagtttgaggccgagcaagaggagaggaggcgtcgggcagctttggacagagagttcaaagcatttgctgagaagatagctgatgctggcaaggatgagggtgttgatgtcgatattcctttcagagaaattggcttcaccggtgtccctaatcggtcgaatgttctgattcagccaaccacagatgcactcgttcaactgactgagcctcccttcctggtcatcagtctcaacgaaattgagattgcgcatctagagagggtgcaggtaagttaacacagatattctagtcattcaggcggggactaaaatgctgtacagtttggcctcaagaatttcgaccttgtcttcgttttcaaggacttccacagggcaccagtgcatattaacacaattcctgtggagaatctggaaggtgtgaaggattggcttgattctgtggatatcgcgtacacagaagggcctctcaatctgaattggactacgattatgaagacagttgtcagtgacccgtacggcttctttgctgacggtgggtggtctttcctggctgccgaatcggattccgaagacggctccgatgaagaggaggaatccgctttcgagctctctgagtcagaacttgccgcagatgaaagctcagaggaggatagagactacgatgacgatgctagtgctgacgatgatttca

SEQ ID NO: 24781 - DNA, 859 bp, Emericella nidulans
atgggctcagtcgctacccccaatggaactttcctgttcacctccgagtccgttggacgcggtcaccccgacaagatcgcggaccagatctccgatgccatcctcgatggtacgtctacaaggattcactaaagtaaaagagtagatgcttacagagaaatcagcttgtctcgctgaggacccgctctccaaggtcgcttgtgagaccgccaccaagactggtatgttatctagccttgcctgaccgcataaccgggtgccttgctgattcctgcaggtatgattatggttttcggtgagattaccacccaggccagactcgactaccaggccatcatccgtggtgccatcaaggacattggttacgatgactccgagaagggttttgactacaagacctgcaacgtcttggttgctattgagcaacagtcgcccgatattgctcagggtctccactacgaagaggccctcgagaagctcggtgctggtgaccagggtatcatgttcggttatgccaccgacgagacccctgaactccttcccctcaccctcgtcctttcccacaagctgaacgctgccatgaccactgcccgcaacgacggctccatcccttggctccgtcccgacaccaagacccaggtcaccgttgagtatgcccacgacaacggtgccgtcaagcccctgcgtgtggacaccgttgtcgtctctgcccagcacagcgatgatgtgaccaccgaagagctccgcgctgtcatcaaggagaagatcatcaagaaggtcatccctgctgagctccttgacgaccgcaccgtctaccacattcagccctctggccgcttcgtcattggcggtccccagg

SEQ ID NO: 24782 - DNA, 573 bp, Emericella nidulans
cttctgcttcggggggcccagtcaactttccacggtactttcccggattacagcatcaacgccaccgacgaacacaattggttcacttgggctatcctgaaggctcatccccgcaacaccgctggcaccgtgacactgcagtcctctaatcccctcgacgtcccaaagatcaccttcaactactttgacaccggtgttggcgattacgacgctgatctcactgcactctacgaagccgtcgagctcgcccgtgacgccttccatcgccagccaatcaacgtcaccgaggttcttcccggcgcggccgtgacttccaaggaagacattgagacctacgtcaaggacagcgcatggggtcaccacgcttcgtgtacctgccctatcggtgccgacgatgatcccatggccgtgctggactccaagttccgtgttcgtggcgtctctggtctccgtgttgttgatgcttccgtttacccgaagattcctggtactttcacagctgtgtcgacctacatggttgctgagaaggcagctgatgatatcctgactgagctcgctgctgctagctcttga

SEQ ID NO: 24783 - DNA, 640 bp, Emericella nidulans
ctcaagggaccgggcatgggtgacttttattaaccatcccgataccccgaacattccctcttcctccgccatcctcggcatccagagctccactctcattgatgcccccatccaagtcgtctggagcgctcttacagacacatctacctacccgagatggaaccgatttgtaccgcgggtgacctttcgccagcagcctgactcacgcaacgaggatgcaatcctgagaaacggaacaagattcacgttccacgtcaacatgtaccccgaagcagatgacgaaccgcagccgcaaaataaaaatctccgcgacacgttcctgaaaattatagaggtcgagccgccggcgtcaacagaacccgctgatagtggcttgaggaaaggcaaaattgtatgggcgtcggaccccgctgcagacggatatgtcatatcttcattgttgaccgccgagcgcgtccatgagctggaagaggtgatagacggcaatgggaagagaatgacaatggtgacaaattgggaatcgcaggtgggtggtctggcttatgtggtgaaatggatgtttgggggcaggttaaaagggaatttcacaatttgggagaatggcctgaaggaatacgccgaacggaactgggagaattag

SEQ ID NO: 24784 - DNA, 1347 bp, Emericella nidulans
caagtacgctttctactcaatctagacgcaggcaaagtctactgggatccctcgaatccagccaagcggttctatatcgacgatgtcaaagagattcgggttggtgcagatgcacgcaattaccgagaagagcatcaagtttcccaagatgcggagaatcgatggtttacaattgtgatcgcggatgccgagcgatccaaaggccgaccagtcaagacgatacaccttattgccccaaacgaacgtctgctgaaactttggacgacgactttggagtatatttcgcggtaccgggtggggcttatggctggtctggcagcctcaaaccaaaatgaatcggttctaaaagctcactggcagcgcgaaatgacgaggctttttccaaatggaatgaaagcaggagacacagagacgctcgatttcgcagccgttgaaagcgtttgtcaaagtctgcacattaactgttcccagaatatgttacgcgctcatttcttgaaggctgatactggcaagcacgggaagctcaatttcgatgaattcaaagacttcgtcacacgtctaagagagcgaagggatgtccgagagatcttcaggagccacgccgacgatcatcgtgagggcttgacattggaggagtttctaatcttccttcgcgacgtacagaaggaggatatagattctgaccgcgcgtattggatatctgtctttgataaacttgtcagaaagtcgaaatcgcgcacacaaagccctactggtacgagctctgaggaccagtcttctcgcatgagtctcgatgctttctcctcgtttcttgcctctgcccgcaatggggtgtatgcctctcgctcgcctcagtccagatttgaccggccgttgaacgaatattttatctcaagctcccacaacacctatcttcttggccgacaagtcgcagggtcttctagcaccgaagcgtatataagcgctttaacgcagggatgccgctgtatagagatagattgctgggatggtgcagatggtcggcccattgtgtctcatggaaggaccatgaccactagtgtcttgtttgccgattgtatcaccgttatcaaccgctacgccttcttttctagcgagtttccactcgtcatatcccttgaagtgcactgcaaccctgaacagcaaattgctatggtgaaaatcatgaaggagaccttcggagaaaagctgatcttagagccgctttctaactcattcgttctcccctcgccagaagagctcaagcgtcgtattctcatcaaggtcaagacgtgtgatgagacggaaaatatacgacaagacccaataacttcatttcatggtcggaag

SEQ ID NO: 24785 - DNA, 1361 bp, Emericella nidulans
atgaggtccaccgccaattctctccgcctcccagctcttggggcccttggcctcatcctcaccactctcacaccacctgctctctccctccccggttcaggttcgaccaccaacagcgcctctgatgcaatccctatccactggctgggcgataccccagactacgtcgccggtactacattcggtctcccctggccgcgcgggaaatacaccttcaataacactgtgttctccatctctggcggagcagacgagatccctctccagtcctgggttaatgggtattgggcagatggatcgattaagtggacgggccatgccgtccctgcgctgggaagtgttgaggaggggtataccgtgaatgtgcgaaagggaagagcaggcggctccaaggccaacactagcgagagcatcgaggtcacgagtcgcggcagcgaagtgtccgtcaacaccggcaagattactgtgacgtttccgaagacagggagcaaccttatcggctcaataacgacgtcgtctggacagactgtcggcgaaaatggaaagctcgttctgcacacgcagtctggtgttgcggaggatatcgcctcgcgcgcgaatacgacgatcgattacttcaatttcgagagcaagatttccaatgtcactgttagcaaggagaatagcgttcgcactttggttacggtgcgcggcacgcatgcggcgacttctggagaccatgatgcgtggctgtccttcgttgtgcgattctacctgtacgccggttccgatgcaattcgcatcgtgcacagtatcatctttgatggcgatgccgagtctgattttatctctggtctgggaatccaattccaggttccgctggctggagaagaattgtacgatcgccatgtgcgcatccccggcgtcgacggcgggttcctccacgaggccgtgcaaggaatcacaggcttgcgtcgggacccaggcgaagaagtccgcaatgcgcagtttaacgggaccaaactgcccgacgagagtacctgggacactcgcgtgacaagccgactgcaatggatcccagcctggaacgactacaagctctcgcagctctcaccggatggattcacgatccagaagcgcacaaagcccggtcaaggctggatccatgttcctgggggcacgcggtcccatgggctgacataccttggcggcgcaacgaagggaggagtcgccgtcggcctgcgcgatttctggaaacggtatccgaccggtgttgagatctcaaatgccgcaggatcgagggaagcatcacgatttggctgtacagttctgaagctgcgccgcttgatcttcgcccgttccatgatggaaatggacaggat

SEQ ID NO: 24786 - DNA, 636 bp, Emericella nidulans
atgagcaacttgcaaccctcttcatccgagccatctattttcgaggtcggcgctttcctccccggggggcacaacaccgaccccgcgctcccggaaaatagccccacggcgggcttcaagctaaaccacttcatgctccgcatccgcgaccccaagcgctcgctccacttctacatgaatcttatgggcatgcgcacagtgttcaccatgaacacaggcccttggacaatctactatctcgggtacccatcgactccccaagaccgcgccgacctccccgcctggtccgccaaagtcggcggggacaatagaacccttacgtcaacgctagggctacttgaactataccatgtccatggttctgagaaaccgatctctgaagggggatatgagatttctactggcaatgaaccaccgaatctggggttcggccacttaggatttacagtgcctgacgtccctaaggctcttgagagattgaggggcgcgggcgtgcgcgttatcaaggagcttagtgtttcgacaagggaaagtatccctcttagtaagtgggaggaggagcgcggaatcggggttggcgagattcatccaaattataaggctgtcttcgatcagattgcttttgtcgctgatccg

SEQ ID NO: 24787 - DNA, 3611 bp, Emericella nidulans
tatccgtcaagatggctgactatggcgatgcctacgaggaggagtattacgatgatatggatgagggaattacgtcggaggattgctggacggtgatttcatctttttttgatacgaagggtctcgtctcacagcagctggattcttttgacgaattcatctcctcgacgttgcaggaattagtggaggaacaaggccaagtgacacttgatcagacgattccgccctccgaagacgaagttgatcccgtcgttgtccgccgatatgagctgaaattcggaaccgtcatgctttcccggccaatggccatggaaggagatggcgccgccacgattatgctgccgcacgaggcccgtcttcgaaatatgacctatgccagtcctttgtatctcgggataaagaagaagatcatggaagggcgagaacggatggtgggcgatcgtgatgacgacgatatgggcaatgaggataggaaagcgacgggtacctacctacagtgggaggaaatggcgctgcctccagatcaggcaaaggaggaaaccgttcatattgggaaaatgccaattatgctcaagtccaaatactgtctgctcagggatctgggcgagcaggctttatacgactggaacgagtgtccctatgactcgggtggctatttcatcatcaacgggagcgaaaaagtcttgatcgcccaggagcgcagtgctggaaatacagttcaggttttcaagaaggcgccgcccagtcccacaccctacgtcgcggaaatccgcagtgcggtggaaaagggctcaaggctgctctcccagttatctcttaagctatttggtaagggtgacagtgccaaagggggttttggccctactatcagatccactctgccgtacatcaaggccgatatcccgatcgttattgttttccgtgcgcttggggtcgtttccgacgaggatattcttaaccacatctgttacgaccggaacgatacacctatgctggagatgctgaagccctgtattgaagagggttttgttatccaggaccgtgaggtggcgttggatttcattgccaagcgtggttcgtctcagtctagcatgaaccacgaacgtcgtgttagatatgctcgagagattatgcagaaggagctgctgcctcatatctcccagagcgaaggcagtgaaactagaaaggctttcttccttggttacatggtgcacagacttctccagtgcgctcttggacgtcgcgatgttgacgatcgtgatcatttcggaaagaagcgtctcgatcttgctggtccgttgctagcaaaccttttccgcgtcctctttaccagagttacccgcgatctgcagcgttatgtgcagaggtgtgtggagtccgaccgagagatttaccttaatgttggtctcaaggcaagcaccgttactcaaggtctgcgctatgccctcgctactggtaactggggagagcagaagaaggcagctagcgccaaggcgggtgtgtcgcaagtgctcagtcgctacacctacgcttcaacattatctcatcttcggcgaacaaacacgcctattggtcgtgacggcaagattgctaaacctcgtcagctacacaacacgcattggggtctggtatgtcctgcggaaacccctgaaggccaagcttgcggtctggtcaagaacttggctcttatgtgctacattactgttggtactcctagcgaacccatcatcgatttcatgattcagcgtaacatggaagtgcttgaggagtttgagcctcaggtaacaccgaacgccactaaggtctttgtcaatggcgtctgggttggtgtccaccgtcagccttctcaccttgttgagaccatgcaagcccttcgtcggcgaaacatgatttctcacgaagtcagtcttattcgagacatccgtgaacgagaattcaagatcttcaccgacgccggtcgtgtatgccggccactcttcgtcgttgacaacgatcccaagagtgagaactgcggcaacctagtcctcaacaaggagcacattcgcaagttggaagaagacaaggaacttccaccggatatggacccagaagaccgacgggagcgctactttggatgggacggtctcgtcaaatccggtgtcgttgagtacgtagatgccgaagaggaggagacgatcatgatcgttatgacgcccgaggacttggagatttcaaagcagctgcaggctggttacgcacttccggaagagcaagatccaaacaagcgtgtgcggtcgattctcagccagagggcgcacacctggacacactgcgagattcaccccagtatgattcttggtgtctgcgccagtattatccccttcccagatcacaaccagtctcctcgtaacacctaccagtcagctatgggtaaacaagctatgggtgtgttcttgaccaacttcgatcagcgcatggagaccatggcgaacatcctgtactacccgcagaagccgctggcgaccacgcggtctatggagttcttgagattccgagaacttcctgctggtcagaatgcgatcgtcgccattgcttgttactcaggttataaccaagaagattcagtcatcatgaatcaaagcagtatcgatcgtggtctattccgcagtcttttctaccgtacatactcagacagcgagaagatggtcggattgacagtggtcgagcggtttgagaagcccatgcgttccgacacgattggcatgcgcaaaggtacttatgacaaacttgatgaagatggtatcgtcaatcctggcgtgcgtgtttctggtgaggatatcatcatcggcaagaccgctccgctcgcgccggatgcagaagagttgggccaacggaccaagaaccacaccaagttggatgtgtcgacaccgctccgcagcacggaaaatggtatcgtcgaccaggtcttggttacgaccactccagacagcttgaggtcggtcaaggttcggatgcgaatgaccaaggttcctcagattggagacaagttcgcgtctcgtcacggtcagaagggtacgattggtatcacctaccgacaggaagacatgccatttacccgcgagggtgtgacgccggatctcatcatcaacccgcacgccattccctctcgtatgaccattgcccacttgatcgagtgtcaactcagcaaagtgtctgctttgcgtggtttcgaaggtgatgctactccgttcacagatgtcaccgtcgactcgatctctcgtcttctccgcgaacacggctaccagtcgcgtggattcgaggtcatgtacaacggccacactggacgcaagcttgtagcccaagtcttcctgggaccaacgtactatcagcgtctgcgccacatggtggacgacaagatccacgcgcgtgcgcggggtccgacgcagattctgacgcggcagccagtggaaggtcgtgctcgcgacggtggtcttcgcttcggagagatggagcgtgactgtatgattgcgcatggagctagtgccttcttgaaggagcgattattagacgtctcggacccgttcagagtccacatctgcgacgactgcgggctgatgaccccgatagcgtaa

SEQ ID NO: 24788 - DNA, 489 bp, Emericella nidulans
gcggccatagacgctattcgcgcctccggtgccaccagccaatatatcttcgcggaaggaaactcttggactggagcctggacctgggtggatgtcaacgacaacatgaaagcgctcaccgatccccaagataagctcatctacgagatgcaccagtatcttgactccgacggctctgggacgaacacggcctgcgtcagttctactatcggcagcgaacgcgtgacagccgctacaaactggctgcgagagaacgggaaactgggggtgctcggtgagtttgcaggcgcaaacaaccaggtctgcaaggacgcagtcgcagatctgctggagtatcttgaggaaaacagtgatgtatggcttggggccctttggtgggctgctgggccttggtggggtgattatatgttcaacatggagcctacttcgggtattgcataccaggagtactcggaaatcttgcagccgtatttcgtgggaagtcaataa

SEQ ID NO: 24789 - DNA, 389 bp, Emericella nidulans
agacacttatgagggctctcgaggaactgaactaccttgcgtgccttgatgatgacggtaacctcaccccgctgggccgccttgcctcagagttcccgctagaccctgcacttgcggtcatgcttatcagctcaccggagttctattgctcaaatgagatcttgtccatcacagcattgctctcagtgccccaaattttcgtcagaccggcatcccagcggaagcgcgctgatgaaatgaagaatctgtttgcccatcccgatggcgatcatctgacattgcttaacgcctatcacgcgttcaagagccctgaggcgcaggagaaccccaagcagtggtgccacgaccatttcctttccttgcgatctctgcagtccgccgacaatgta

SEQ ID NO: 24790 - DNA, 259 bp, Emericella nidulans
gtgcccccgcgagaccataacgagttcaagaagggtgctcctgctgccgtttacatgattctcaagaactacgacaactacgatgttctcatgggcgagtccatggacggtgatgctatgtatgtattcgcagcaggctgaagtgctcggacttctcactaacttgaattccaggcacatcctgattgacttccgtgaggatggtgttaccccctacgccactctctggaagcacggtcttgaggagatgaaggtttaa

SEQ ID NO: 24791 - DNA, 447 bp, Emericella nidulans
atgcgtttacagacagacacggctgcaatccatggccctctcgaggacgatggtgtcaccactgcggccgtaatgacccgcatgcgaaatcttgagttggcattcgaagcattgtcggaggagctcaacaaccgaacctctgcgctggaaaaggacctagagtcttctttagttgttagcgagaagcgggccaagaaactcgatgagttgtatcgccaagctagcgccgagaatgaagccctgtatgaccgtttcaatttggagctcagcaaacttgcgagagaagtccgaaccggtgacggggaagatgcactgaaaaatcagctgtcttccgctatggacgagattgggaggttgaagaaagaaaacttcagactcaagcgtgaagtcggcgggcttcgagcccaacaagctgcggtggctttgctccgggcaagcactgactga

SEQ ID NO: 24792 - DNA, 207 bp, Emericella nidulans
agttacctcgaatggcgctggacggcctggatcaccatgattatggctgccgctgctggcctcatcggtcttttcgtcctgccagagacctacgccccggtcctgctccagcgcaaagctgccagactgcgcctcgagacgaagaactgggctctgcacgccaagttgtatgccatttgtgctcctctcccctctcccctcttctaa

SEQ ID NO: 24793 - DNA, 492 bp, Emericella nidulans
attcttgaaggcccccgtgaagaacttggcgttgtagaatggcatccaacccgcccattcgtcgtcgcatgcggccttgagtccggctgtatctacacctggtccattgtcacgcctcagaaatggtcggcactcgccccggatttcggcgaggtcgaagaaaatgttatttacgtcgagcgcgaggacgagtttgatattcacccggcagaagagatccaccagcgccgtcttgacgctgaagatgaggagccagatgtcctaaccattgagccctctaaaagcggcgacgatattgagtccttccgtatgcctgtcctgttggatatatctgatagcgagagcgaggaggatatcgttgcggttgggccagggactatgcggcgccggagtcctggcaccggaagggacaagtccaatgcgaatggtgatggtgagaaggatgggcggaatgggacgaccggtcgaggagcgaagggtagacgacgatga

SEQ ID NO: 24794 - DNA, 1279 bp, Emericella nidulans
gtaattcagaacctcactagcaatctccaagccatgcagtatgcgtactcatctcgtgaggagatgcctgtttgggctacgaaacttctcacccctattttcatggcggtcgctgtcctaaccactctgcctcccccgggtcctctacgcgttattgtcgggcttacagctttcactagtctatggcttcatgtcctgactcattgggtctccggacctgcgttctttatggatgccatatttatgatctcgatcaccgtgcgctggcttctcatgttcgtggcagggacacctgagatcgactatcaccagactacccaatccggcacaacgatcactcataagggcacaaaggatagcagtactcttcgtcaagggttgactaaattgaggtggagcgtggagctctggtcgtgctggcggggccaggggtggaatttcgtggaccagcaccttccacggggcgccgaacgaacacagtcacgctggtatgaactgttgctccccgttttcgtgacggatgacgtgctgactctctacgttcagggagttccttgtttccaatgcaggaagagtcctgttgaaccaatacatctcagacctggtccgaaagtacgcattctgtgcactctggcccgctcaggtcgacgcccatgtcgacttcagttcccttcctctgctcaacagacacggactcgtggctctgcagttaattcgtgatagtctgatgctggacagcgaataccgaaaggcttcaatactcttcgtgggactccatctatcaacacccgatcgctggcccagcctcttcggcaatatgcgcgatctctacacagtgcgcaatttctggggacgcgtctggcatcagattttccgacagatctttacgaggtgtggcgatattgtcgccaatgctcttaatgcgcagaaagggacattactttataagtacagcaggctttatgtggggtttctggtatcgggagtccagcactatgcctgcgcattactgattccatccgctgaatatggctgggggatgttttggcagatgccagcctatgcggcagtcgtcaccgtcgaggatattcttaagtattacggcagagaggcgggtattcaagacggcagtaagttcacctcgctgtcggtatgttcctgtctaatttcgggcacagactttgttcgttttctcggttatatttggacagcttattggatgacgcttatctatgctctgcctgttggctttgtgtccgacattggagggttcactggc

SEQ ID NO: 24795 - DNA, 486 bp, Emericella nidulans
atgtcatcagatgatacagtaaagcaagagcacagctgctctgctgatagcgagaaacaggacagcagctgcgcgtctgataacgagcaaccgaaagaaccccagagccctcgcaacatacacggcctgttatgggttgtcactattctggccatctacagttccacgtttctgtttgctcttgacaacactatcgtcgccaacatccaacccgctatcatatcttcccttaatggcatcgagaagctcgcctggtccggtgtcgcctttgtgatggcatccagtgccacagtcctgacatggcttcagatcttcaatcagttcaacattaagtggatgtacatattctccattgcagtgttcatgggaggctcggccatctgtggtgcagctcagtcgatggatatgctgattggaggtcgtgtcatctgcggcatcggcggtgttggtcagtacgtcggcgtgatgaacttcctcccacgcctg

SEQ ID NO: 24796 - DNA, 481 bp, Emericella nidulans
atgaagttcaccggcttgttcaccctggctctggccaccaccgccctggccaccccggccaagcgccagtcctctcccgctgatatcatcgacaccatctcctccaaggtcgatgccctcggctctgccgtcagctcctacagcggcggcgacccctctgatgtccagtccgcctcggacaacctcgtcagcaccatccgatctgccgtcgaggaggtcaacgccggccccgatctctccaactcggacgccctggctctcaccagccccatgcaggacctgaccgatgacgtcgagggcgtcatcgaccagctcatctccaagaaggaccagttcgttgaggctggtgctggcggcgatgttaatgtccccctgagtgcgcagtgcgacccagcctctcattcctggcttgggccagagggcgcgagcgccactcgtgcacattcaaaagacattgccgccatatctcctctggccggga

SEQ ID NO: 24797 - DNA, 969 bp, Emericella nidulans
atcgggacgacttcttccagactacgtgcgacctccgatatctccccgcatctccccaacactgacgggtttagttctgctcttgatgaacagaggcgaaaggaggccaagtcaattaataccaatggctctcctatccgactgcaaagcaagatcctcgccgttaaaccggatcctttcgaccttggctctgtatttgtggcccagagcggcggaacagtcaggaagatagttctcgcagtacgtaaacttctcagctggactatacatcaagcttcttgttaattgcatctcgtatatagaccggtgaaactgcttccatcttcaagggaccgactgcccccatcacgagcctttgttttagcccaaacggccggattctgttcgcgggatgctgggataaaacaatctggagctgggatgtaaactcaacacaacgaaagctacagtatgagggacacaccgactttgtgaggtcggtcgtaactacgagggtcaatggccaggatctcctagtgtcaggcggcggccgatgcgcaaatacttgtatttgacatctcaagcgggcaacggctgcacgtatggaagggtcatgcaaagggcgttcaggacctcctgattgatccgctcacgttagatgacaacagcaccgagcaaatcgttttcagcgccggtagcgacagggaaatacgacaatttgatctatccaaaggcagtcaggacctcacaggcacagaagctcttttggcccacgatacgaacgtttacaaactccatttcgatcaagatggtgatctctggacagcttcagcggataaaacgacaaaatgtcttattagagaggatggctggaaggcaaacctcacactcactcatcccgattacgtcaaggatgtcgtcgtcgatgagcgagggggctgggttatcaccgcgtgtcgagatgaagaaatccgtgtgtggaaccgatcg

SEQ ID NO: 24798 - DNA, 731 bp, Emericella nidulans
caggtcgtcaaacctgtaaagaaggtgcattatcccttctggtttggcggctctgcgtcatgctttgcggctgcggttacgcatccactggatcttggtgagtgtttccctttctagctctattcgaccgtcgagctgtcccttcttggaaaattgctaatacttgggtttacagtcaaggtattccctcatctatagcttatatcgcataatgctccaggagctgacactcgggtgaacaggtccgactgcagacccgagggcctggcgctccctcgacgatgctgggtacatttggggcatattctgcgaaataatgggtttttgggtttgtatatggagtatgtcactatcttgacaatggtaatcaaaaattcgttctgcgctgacaaataaatctttcgtcatagctttcagccgctcttctgcgccaactcacgtattctacaactcggttcgggatttatgaggaactaaaatctcgattcacgtcaccgtcgcaatcaccaagcttcttcacgctcctcggaatggcctgcacctccggtatcctcggaggcattgcaggaaatccagccgacgtgctcaacgtccgcatgcaatccgatgccgcgcttccgcccgcccaacggcgtaactaccgccatgcctttcatggcctcgtccaaatgactcgcacagaaggtttttcgagtctcttccgtggcgtgtggccgaactctactcgagca

SEQ ID NO: 24799 - DNA, 548 bp, Emericella nidulans
cgttgcaagggatggggatcgatgacgaaatccgtatccatgaggatgcacagaaggaggccacagagttagtctggatgcaccaaaatcctggcctccagttcaagaacccctatgccccttatcgtaacccggacatcaagaagccgcagaactcagaaaaacagagccaaccttacgagccgccgagtccatttcgaagatcgtggcgtgaaagccatcgactctcatttagaggtcaatctgccaggaataattcagaaaccgactctaatggcccgggcgaggagagttctcccaggaaaagtgggatcccgagaaagaatctcaaggttaattttgcactggacaaggatcaagggcaaactgatgctggttatggagtggagcccgcggaggtaaagaaggactcgcctagaggcattttcaggaacccgaaagatcagatttacgaggaaccgcagaattatgagcacaatgacaagaaccggtctgttttctccaagtctgactcgtcagcacttcgaaacaagccgcgcaattcagtt

SEQ ID NO: 24800 - DNA, 1108 bp, Emericella nidulans
atgagcgcgtcgagaatagggcgaagcgcggtgaaagcggccaaagggcaagcacccgggccgttacgggcacccaaaaccaccaaaaccagcccagcaccgcggcagacaaggtacgccagcctgaatgagagataaaggaccggcatagctaatagaatccagccctcggttgctcaaacgcgcgaacccgcacctgcaaaatctcagctccgactctgcaacggcgttgcaagctcgcatgtctcctagggcaatgaccgtcttaggcgtcagcgccctggttataagcacctactgcggctatctctacgcctcataccgtcgcgaggtgaaccaagcgcagtccctgactgttccagaggacgtctctgaccggtataaccataccgcgcggacgttcgacgcggacgttgagctctcagagaaactaatgcgcctgggcgcgaagcgccgcgatcttgtgcggcaggcgcgagggaatgtattggaggtcagttgtgggactggccggaatctggagtactacgaactaggagagaaacgggggattatcgatgaaaagagtcaagtgggcgttcgagggtgccggaccgttacatttgtggatttgagtccggagatggtcgcgattgcgagggcgaagtttgagaaactctatcctggtttcattgggagtgagaaggttcagttccgcgcgcaggatgcgagggatgttcctccgccgtcattgtcggcgtcgggttcggtactgccatccgagtcgcaagggcaagggcagggtaaggggcaagggtattacgacacgattgtgcaaacaatgggactgtgctcgatgccggaccctgcgggggccctgcggcacctagggacgatcacagaaccgcagcatggccgcatcctgctcttagaacatggccgatcgcattacgactggctgaatcgcgtgctggataatctggcccccgcgcatgcggaccgacatgggtgttggtggaaccgtgatatcggacagattgttcgagatagcggcttggagattgtcgaggaggagcgctaccatttcgggacaacgtggagatttgttttgaggcccaagcggacgtag

SEQ ID NO: 24801 - DNA, 528 bp, Emericella nidulans
ctaaccctcttgtactttgcaaacatggcctccacctctgcactcccccaaacccttcgctccatcaccgccaccaaaatcaaggagctctccaaacagcgcggcttatttgaaaagcgccgcgatgagattatccagtccgctgctgcaacctctgacctgcgaacaaaggctcgagttctcttggaaggcgtcaccagactgaagggccacccgaacgatgcatttgacaaggaggatctcgatgtcgacgctgagtcatttgaaacaccagttgaagctgggacggagcgagcagtccacgctaacatccgtcggttccttttgcaggggaagtatgacccatccgtgtctgagtcgagcttgagggaatgcattgagtcgcttgagaaggagatcatgtatatggagcgagcgcatgatcatgcctcattctatagtgcgcttgtcacggaatggctggaggatttagaggcttctggcggcatttcagctatgaagggtgaagaggatgaaagtgttgaagac

SEQ ID NO: 24802 - DNA, 927 bp, Emericella nidulans
gcacgcgcagctgcacttccgctccccagcggcatacctcgagatctttaacccagccaatcgctgggacaaggaggaacggctctaccacagcttcggcgaggaccgctcttcgtttgggtatctacgctatgcggaagctaaagagaggaaggatattctctcgcgacggttttcccgcaaagccgtgcaagacgctcagaagatcgtagagggcatagtcagtatccagtcgctgtttcacctaagacggccactatggtttgattaacaagtggtttggagagcaggtccttgatctgtgcaagactctcggccagaacagcgaggaggctgtcgacctgttctatgcgtttcgctgtatgtcggttgatgtaataacctgtgcgtccacccacccatgattttggtctacattctcccttccatgcggaggaggatatatctaccggtgttgataaagtacaccagatctctgcttcgcaaactctgtcaatgcagttcacgcgccaaaatatgaatcgcccctcctcctggccatggacgcctccatgaccgtattcccggctttcaagcactttggtttctacaaagagatgatcatgaactgccccccgaaactgtcgaagatcctcagccctgcaacggcagggctggtcgacctccaaactgtacctctccctgtccacttgagtgaaggcggctaacacgggactggccacagctcctcaaagcccagatcgaagacctcacttctgacccttcccagctggaaaaactgcctcacaacaccacgatctaccacgagctcctgcgacccgaggcataccggacaaaaacccagcccagcaagggaagtctatatgaggagagccaggcgctcatgtttggcggcgcggatacaacagggatgactctcatgcacgg

SEQ ID NO: 24803 - DNA, 1789 bp, Emericella nidulans
gagaccgggagcctgtcttcgccttctccaagtcgttcgtgccctcccggaagtccggcctgacgaccgatagcgtcaccttcaccattgccctaattcaggacccggtcgtgcagtacgcttcggcgcgcggtctgactatgatgcgccctctctggaaatcgtggttcaacagtgttgaatcgttattgagtttccactattttgactttgccaatgccgcatccctggctttcaactactctctgcaattggccgaggatgcatatcagtctggtgcacaagactatgtcgatatagtggctctttccgctcgacaggtgatgggtgcgacgactttctcgggcactccagaagacccaattctattcctgaaggagatatcttccaacgggaacttccagactatcgatgtcattttcccctctttcccgttcttcttgtatacgaacccgcgctggcttgcatatcttcttgagcctttgatagagcacatgcttagcgggcaatatcccaacaagtacgctatgcatgatttggggacgcatttccccaatgccactggacatcccgacggaaaggacgaatatatgccggtggaagagtgcggcaacatcctcataatgggactggcagtcgtgaactcgatgctctatgatgaagattccgctgcgtcatcgatctggtccacacaaggtgaagcagcgcccgtcacggaagataacgctggcttcttccctctgaatgagtttcagactctctcgggtatcgcgttacaggatggaaaatggggaggccctgcctctgggcgtcgtcaagccgaagcatggatccagcgcagctacagtctctggacacaatggaccggctatttaatcgagtacgcactggaacctgagagacagcgtgagtacttaatatcctttccacgcaacgatcgaatctaacatcaccagtgtctaccgatgatttcgccggctgcgttgcgcttcagacaaatttagccctaaaaggcattattggaatcaacgccatgagcaaacttgccgagatcggtggatacacagaagacgtcgtacactacaaggtacactcagaacctattttgagattgatttgtctttaacatttttagaatatctctgacacctacatcaccaaatgggaagagttaggcatgtcgcgagacggcatccacgccaaactctcctataactggtatggctcctggacaacgatctacaacctctacgccgatgcccagctctgctttcatctcgaaaacacccctctcgatcgctctccattctcacccatgcaagacgacaattcccaaacccctctcaacagcaaacctcaacaaccaaaacaaggcttcgtgccccagcacatctataccaaacaatcaaattggtaccacaacgtgcgccagagatatggcctcccgctggacagccgccatctttacacaaagacggactgggagttcttcgccgtcgctgtcgcgtcccagagcgtccgcactgagattctcgagtccgtggctaaatgggttaacgaaacatccaccgacctgccatttacggatctccatgatacggaggggagcgggggattccccgggcccaatttctatgcgagaccggttgttggtggacattttgcttttttggcgctgcagagggcttgtggagggaaagcagtagaagggttaaggttcttggatgatgatacttattctgagaaggttgatgatgcgtacgaggactttgttagagaggatttgtga

SEQ ID NO: 24804 - DNA, 1597 bp, Emericella nidulans
cccttcgtcatcctatcctgggatagaaccgggtagatgcagcagaactcgagatcccccccggaacagaggagcggtaagcgcaaagctactggcaaaaggaagtttccagaccaaggtgaactctctcaacaacctcgacatcagcaggcgactatctcggagctcctccaccggaaccaagcacagaatcaagcacaggaacaagacgacgagcacctccccccaacgaacaagcgagttcgaccatcttcttcctccatcgcagcgaaccagcccgagtccggcgatatgtatagtttctcaaccgctgagccgaaaccgaatggtccgaacacaggtggtttgactttgtcgaattccactctccaagctcgccccgggacctcgtcgcaccagagcaactttacaccgcatacaggcgcgagaagacttgtggtgaagaatctccgcacagggccccggttgaatcaagattcgtatttcgataaagtatggggtcagttggatgcggcattgtcagcgatcttcagcggagggaaaccggagatttcacttgaggagctttacaaaggggcagaaaatgtttgtcgtcaaggacgagctactattctggcaaagcggctccaagagcgatgtcgacaacatgttaccggaaaattgcacggctcattggtcgacaaggcacaaatggcatacaatattgagaccctgaggtctgtggttgaggcctggaaagagtggcagtcaatgttggtacgttagacttctctttttttgtttggaattactaactaagtatagattaccgtgcgctggatcttctactaccttgaccaatccttcctcctccactccaaagaacatcctgtaatccgagaaatgggcctacagcaattccgacagcacatatactctgatcccacactgcaggaaaaaatacttcagggagcctgtgatcttgtttcggcagatcgcagcgacgaaaacggtatcgtcgctgactcttctctgctacggaatgccattgagctatttcacagccttgacgtttatgtctctggcttcgagcctgtgctcgcgtcggggtccaaggacgttctctctctatgggctcagcaggaggcgacaggatatctggcgtcatatgtggagaacagccatcgcctgatcgagcgcgagatgaaccgatgcgaacagttctctttcaatcggacgaccaaacaaaaactgtctgagtcactcgatcaaaccctagtaacagatcaagagagcgtcttattgagccagaaggatgttctcggtttgttgcgaatagggaacaagattgccctagggcaactttatacgcttcttgaacggagggaccttggagccaaattgaaaggcgcctttagcacatatatcgtggaagagggtactggaattgttttcgatgagagcgaagcggacatggtggtacgcctactgagcttcaaaaagcaactcgacgacatctggaatgaatcgtttcgacgcaacgagggcctcggccatgccctccgggagtccttcgaaagcttcatgaacaagggcagaaagtcagacgccacgggcg

SEQ ID NO: 24805 - DNA, 246 bp, Emericella nidulans
atggcgctaatttcagtcttggcgctcggcgcgtttttgtcttatccgatctgtctgacgagcagagctgtgtccctgttacccactcctttcattatcccctccatctacaacaaaatggccgacaccgagggcgcgggcacctcatccgtatccgagcctttggacctcgtccgcctctccctcgacgagatcgtttttgtcaagctgcggggtgatcgcgagctcaagggtcgtttacacgtg

SEQ ID NO: 24806 - DNA, 676 bp, Emericella nidulans
gatttccatctagatacacactaccgaaaaggaacgtcagaggagactctatgtcaccgagattcgggctccgctggtcgtctgggggcagaggggtctgattgcgactccccgcaggctctgattgacgaaacattccggtggatcgagaagaacctgaaaggcaaaatagattttgtgctctggactggcgactctgctcgacatgacaacgatgagaaaatccctcggacagccagcgagaaaaatcgatttgaataaggctttggcggccaagtttattgaagtctttgaagactcgggtgctgctcgcggtctttctatcccggtcatccctacgattggcaacaacgatatcatgccacacaacatcttcagagaagccccgaatcgatggacaaggaagtttacggaagtctggtccgagttcattcctgaggcccagcgacacacttttgaggaaggcgggtggttttcggccgagttgatccccaacaagcttgccgctctcagcctcaacaccatgtacttctatgagtccaactctgctgtcgacggctgtgcgatgccgtcggagccggggtttgagcatatggagtggcttcgtgtgcaactggagattctacgacagcgcggtatgaaagcgatactcatcgggcatgtgcccccggcttga

SEQ ID NO: 24807 - DNA, 405 bp, Emericella nidulans
atgtctcaggtcgacgcccagcttaaggatgtggccatcctcggctccgtgagcaacgaagcccgcaagatcctcacaaaggaagcctgtgctttcctcgccatcttacaccgtaccttcaaccctactcgcaaggctctcctgcagcgccgcgttgatcgtcaggccgagatcgacaagggccacctccccgacttcctcccagagaccaagcacatccgcgatgatcccagctggaagggagctcccccagcgcctggtctcgtcgaccgtcgcgttgagatcactggtcctaccgaccggaagatggtcgtcaacgcactgaactcggatgtgtggacttacatggctgatttcgagggtatgcatcacagatctgcaaacatttcgatgagtaacagctaa

SEQ ID NO: 24808 - DNA, 630 bp, Emericella nidulans
gcagaccatctgcggtgagcacggcctcgatggctccggtgtgtgagtacaatccgtccagcatccgctgaaaacacgacaccttaacagaacctgacacaacccagttacaatggtacctccgaccttcaactcgagcgtatgaacgtctacttcaatgaggtcagtggatgagatatcaggtagcagtttggtgtgtctgacttcgtccaggccagcggtaacaagtacgttccccgtgccgtcctcgtcgatctcgagcccggtactatggatgccgtccgcgccggtcccttcggcgagctcttccgttccgacaacttttttttcggccagtccggtgctggtaacaactgggccaagggtcactacactgagggtgctgagcttgttgacaacgtggtcgatgttgtccgtcgtgaggccgagggtagcgactgcctccagggtttccagatcacccactctctcggtggtggtaccggtgccggtatgggtactcttttgatctccaagattcgtgaggagttccccgaccgcatgatggccaccttctccgtcgttcccattaccaaggtctccgacaccgttgttgagccttacaacgccaccctttccgttcaccagctc

SEQ ID NO: 24809 - DNA, 918 bp, Emericella nidulans
tctggcgaaatgtctgttccccgcgcaatccgcactgtcttcctcgctatcgagcaagcggaaggcgcaggcgctcgcgtccgccgttcaatcggcactccaaagctacgcaacttctcgccattcctcatgctagatcactttaccatcggcaagggcgccggcttccccgaccacccgcaccgaggccaagaaacaatcacctacttgctttctggtggtgtcgaccatgaagatttcgcaggaaataagggcacaatcggaccgggcgatttgcagtttatgacagcaggcaagggaatcatgcatgcggagatgccgcatgagaacgaagacggcagccccaacgtcggcatgcagctgtgggttgatctgcctaagaagctgaagatgtgtgagccaaggtaccgcgatttgcgcgcgagcaagattcctgtcgcgacggttgaccagggtcgcgtgactgttaaggttatctccggacagagccatggtgttgattctgtacgtgatcttgcttacacgccggtctggctgctggatgtggcgatcaagcatggtggtcggatcacccagatcctccctgtggggtggaatgcgtttgcctacacattggctgggacgactgtgttcggttcaaataactcgacacagctggtgaagcaattccataatgttgtttttgagcagagtggagatcacgtcgaggcgtcagtgccagataatgcggaggaggactcgagattcatccttgtcgctgggcagccgctggatcaaaaagttgtgcagtacgggccgtttgtgttgacaagtcaggaggaggtctatcaagctatgcttgattaccagactgcctcaaatgggttcgaaagagttcgggggtgggagagtgagattggaaagcggatggcttactag

SEQ ID NO: 24810 - DNA, 614 bp, Emericella nidulans
agggttgtcgctgtattgagccacgagttgggccactggagcttcagccactctacgaagcttttcggcatcgctcaagtatgttttgctaccgctaccattgaaaaagtttggaggatctcttactgactttcacagttccacatgttctatatctttgctctcttctcggcgttcgtgaataacagatcactctaccagtcgttcggcttccacactgaacagcctattatgattggattcctcctcttctctgacgccctcgcgcctatggatgctgtcgttaaacttctgatgaatatccttagtcgcaaatttgaatttgaagcgggtatgtgctaggtcttagaagcgttgcaatctcaactaacggattcaaagatgcatttgcagtcaacctcggatactcggaggagctctcccagtcccttctcaagctccagatccagaacctgagcactatggatgcggactggatgtacgccagctaccactactctcatcccatccttcctgagagactcaaggctctaggctggaagggcagaaaagttacagaccacaaggaggaagacagtgaaaagcctgtcaaggctgccgaccgtgaactctaa

SEQ ID NO: 24811 - DNA, 270 bp, Emericella nidulans
ttcgaaaaacttggcgatgacgacgaggagactgagttcaacagtgatgacttctcagcagacccggcagccccctgtacacctgtctatttccagcctaggggtgctgaaaatctgaatctcgtggaggctataaactctctcaacccactggttgatagcaaggttgtgaatatctccgaggatgatgctccccagatttttacagtttctggcacaggtgctctgaagcactttccggacgttaaaacatggtttggaggtctctga

SEQ ID NO: 24812 - DNA, 612 bp, Emericella nidulans
ccactacttcggcttgtacttactacgagtgtttctctggagaagatcaaggaagtcactggggctcctggaagagactgtgacttcctcttcctacataccattcccccccctgggaatgacacccccggtcgaatcacggtgaaaacttttctggagccgctcaaggttctacaaaagcggttaaacttcttgatccacgattccacagctgttgaacctatggagctagaagccattttcaagacactaaacaagatggcgacagagcagttcacacgaacacccagcctggacagctgggaggacgttactgtgggagataaaacatgcgaagccgaggataccaagaaggctactctccaatcagcaatatacattgacaagaacttggatttgaacagggctagagctggtagtgacgcccccaagttcaggcttcctaaccaacccgtgcagtatgttccacaaggagatctgcatctcgcggcagaaaaggagtttaatcttagcacaaaagctgtctttcatatcctttttggggataaaagtgccgtttggcagcttcttttataccagaggagagcccaaagtgagccgcccctgtctcat

SEQ ID NO: 24813 - DNA, 1075 bp, Emericella nidulans
atgtccgcccatccgcggattgaagaactccccgacgacttcgatgagtcgctagacctcaacgccgccccgccgcaaccaaccaccccgcccactgcaggccccgagctccccgtgcctggaaatgaagagcgattaaaagaactcgagaaggatggtcaggcgccgaaactcccgccggccatggcggccgtggagtcccatacgacagatgagctggcggatattctgaacaagacgccgctgtttatgacggatatcagcaaagcgggagatgagagtgagtttacgtctttcgctcatctcgaaatatgggagggaccgtgggatgtgagtagattgctgacgggtgtaatatagacggcgaaaatatcatgttaggacttgcgcgcactacagaacgaaggaacgcgcggcgacgttgcgcagaatttccgcgagcaaggcaatgaagctgcgagggagaagaggtggattgacgcaaaggagtactatacaaaggggatcgcggtattgcgctcaaaggagcagaagtgggataagccggaggatgagaaggaggaggagaggcttctgcgggaggtcgaggaggcgtcgtatataaatcgggcgctgtgtaatctggagctgagtacgtttacttttttttttttaaacatgttggcgtcatgtgggagctggatggctaacgataaacacagagaactaccgttcaacgaccctcgactgtgccgcggttctgaagctgaaccccaaaagcatcaaagcctactatcgttctgctatggcgctatacgcgctcgacaagatcccggaggctgaggatgtcgctactcgtggcctatccctggatccaaacaacaaatccctccaaaccatctcgtccaagattgcagaccgaaaagcctctctcgaacggatagctgcgaagcgtagagccgaggacgagcgagcacgcaaagaaaaggcccttttgagcacagcccttcgtgcgcgccaaatccgcacccacaagaccggccagccgcccgagatggaagacgccaatatcagactcacgcctgacccgctttaa

SEQ ID NO: 24814 - DNA, 762 bp, Emericella nidulans
gcaaatccgactcgttggatgaaacccctcttcaaaccgcccgccgcgaagcccacgaggaaatcggcctgccaaatctaatccagcccctcccacccccgtttagagtagaacatctgtgcgaaatcccgtgctcactagcccgcactgagctagttgtgcggccgtgcgtagcactcctgcatacatttgacgagaggacaggcgaaaacgcggacccagagatcacgctgattccgcgcttggatgcgcgggaggtggcagcggtttttacggcgccgttttacgacttcttaaaattgaagcccgctggcgatgaggggtggtatagaggtgtttggaatgagtggtgggggacgcaatggaggagtgcgagaccttttcctttatcttccctccccactgagcgagaatgaagctgatggtgattgaccagtgcaccaattcttcgtccccgtaaacccggacaaggtggtgaagccgcgcccgcaccacgcaagacaggaagaagcagttcgtgatctagaggagcaagaaagcaagcagcaacggagccatcagtcgcaaggtcaagcagcagaacaagggaggtccgattccgtcaccaggtacagagtgttcggcatgacagccagaatccttgtcgatgcagcccggattgcgtacagcactgagccggagttcgagcataatcggcattctggagacgaggagctgattgcgaggctgagaaggaggggccggttagggccgaagatctaa

SEQ ID NO: 24815 - DNA, 285 bp, Emericella nidulans
atgtcccaacataccgcttccacatcccccgatgcctcctccaccacccaagtcgccggacacccctcctccgctacctcccgcgccgccgaactcgccagtcttaaggtaaacgctcggcggtgcgtgcgccagtttcctgacttcccgtcccccggcatcctcttcgaagatatccttcccatcttctccgatcactccacccacgaagccctcgttcgctgccttgagctccacatcctagaaactcttgcggatgagaagcccgatgttatcgtcgcctag

SEQ ID NO: 24816 - DNA, 702 bp, Emericella nidulans
aatcatcgagatttcttttgtgctgagggaccggagcagtgtaagcgcggatgggtcggaccctaacagcttccaatacttaacgcctttcgtaagtttcctgacttacctatggcataaaaagcaggcattattctaacgattgtcctacagctattgtacgcctctggattcctcttcatgggtgccacagaagagcagatgatgctccttgaaaatgccggcatcacccacgtatcttacgtactcatcctctacagcatcgcattcatcctctttctatgtatgtcccctttccgtttactcaaccatatacacagtattaacttttgatttcctatagttgtaaacattctactccatatctacgccgtgcacgcctggcccgagtccgcagacccggcagcccattcccactcccgcataagtaccgacatctctgaccagggcccctccggctccatcgccctgcctaacgggccaggtagcagccgcttcacgcacgtgaacggccacgcccgcacgccctccgaagcacagcgcatccaggacgctgagacttttgagctccaaggtcttatctcagatgaggaggaagatgaggataaagttccaccttatgagggaagaagacatggccctggtccaagaaaagcggaagatgaagaaagcgcaccacttttcaggaaggacagggagtag

SEQ ID NO: 24817 - DNA, 1437 bp, Emericella nidulans
atgcacgtgctccttgctggtaacgacgaggaggcatcttttttcaacaatcttcttcatattcagcagcatcgtcgtcttagagctcttcgacgactggccagtgaagcggctaacggaaatcttcaggcttcgaatatcagcaccatcttcatacccctgaacgaacacttcgtcttcaatgaggctgctgatgagaacgctcacaatcttattgcagaggccgtgttgactattggcgtgctcgcggaatggctggaatggaaccagtttagggctatctttaggagataccgaggctacatgcaaagtaaatccgaatgggaaaggagcgttttgaggcttctaggaagaatgtccgatgctcttacaaatgcgatgggccaactaacttctcccaactctcagaccgaggatggcgaggatgccatggatgtctcatctcccagcaagtccacccttgctcaatcaataccatcagcatctaaggttgcaaacgagcttactacaggattcattcctgtgttgacggacttcattcaccacaaggatgaggctcaaatgagtttgcgtcttcctgcggctgttacaaccattaagctcatgaagctactgcctgaagctgatatggcaattcgtcttccggcggttcttcttgatgtttgcagtatcctgaagagtaaagctcaggattcccgggacacagctcggaaaacactgaacgacatcgctcttttgcttggacctaactacatgggctatatcctcaaggagttgcggcatactcttaagcgaggctaccaacttcacgtgctctcctttactgttcattctattctcgttgcaacaacagacgatttcaagcagggtgacctagactactgcttagcggatctcgcctcggtggttatggatgacacttttggtactgttggtcaggagaaagaagccgaagactacgtcagtaagatgaaggaagtaaagagtaacaagagttacgattcgatggaactcctcgccaaaaattcaaccatccagaatcttgccagcttggtgcggccattgcagtcgcttttgcgggaaaagctcacctcgaatattgtgcggaaggccgacgaactactgcgaaggatcggaattggtctcttgagaaaccctggagtcgaaagccgtgacattctcatcttttgttacgaggtcatcaaagaggcatataaggagccggtccagcttggcgctcaggttgccaaatctgctcaggaggagaacttcctgatcaacatgaaaggccaacgccggaacgaaaagcgaggaagtacgtcctcatacgtctacaaactagtccgcttctccttcgatgtccttcgctctgtcctcagcaagtataactcgatcatgactcctgctaatatcgccggctatcttcccatggttgga

SEQ ID NO: 24818 - DNA, 330 bp, Emericella nidulans
atggccgagatttccagcgttcctttcgctgaacccccctacctcaggggcctcccctccccctactacaatgagtctcaccggcgcttccagaaagcctgccgggcatttttgtacgagaacctgctcaagcacgcaatggagtgggaaaaagctggtacagtgcccgagcatgttttctcggacttttgcaaggcaaacatgctcctgcctaacctccccgcccccttaccagtcgcctggctgaagcgcctgggcatccacgacattctcggcgtcaaggttgaggaatgggactacctgcacacgggaatatacagtgatgagatg

SEQ ID NO: 24819 - DNA, 3927 bp, Emericella nidulans
agactcagcgatagcatggcttctcaaaatgcagagtctgcggaattgaagcaacaaggagctatcgagaccgcccaggctgcctctcaagatccccaatcgcacatccaaccggaaacagtcgagaaaaaactggttgaagagacccggaaagcgggtctaccagcttaccaattcaacccagacgcatcaccccaagaaaaggccgccgaagctgaatctgtacgtctttgactgggggttgtctgcttgagactatgttcactgacactcatctctgttccgctagtgcgttcccccgggatttcaccgtgaccgggaaccgaaggcaatcggcgtgatcacagacaaggtgagcgcgtacattcaattgtacactcgacatttgcttattgatatcctgcttaaaggacgatggcactcccgccccgtatgatcttcctccaccgaaatccgcaaccacgttgcttgatgaaaaatcccaagaacctgcagcagacaagaaagaggaggaggttgatgatgagcagcgttgggcgcgcgaccggacgggctgggctccacggttcgttcatgaggaaactcaagaagagcacgatgaagcaacattgttggaccatcagaccttcttggaggccaaactggacgagaagttctttggcggtatgtcgctgcggacaattgaaccccaatataactaacagtgtattagattggtatcacaatgccggcgtcattgtttttgcatgcttatcatcatggattgtcgccgttctaggcggtggactggcttgggtcttcattatcatggccgcctgtggcacctattatcgaacctctatccggcgagttcggcgaaacttccgcgatgacgttaaccgcgagatggcgaagcaacgcctggaaaccgataccgagagcttggagtggatcaacagtttccttgtcaagttttggcccatttatgcgccagtgatgtgcgacacgatcatcaattccgttgatcaggtgctcagcacagcaaccccagcattcctggacagcctacgattgaagacatttatcctaggcagcaaaccgcctcgattggagcacgtcaagacctatcctaagaccgaagttgacactgtcatcatggactggaaattcagcttcacacctaacgataccatggatttgaccgcccgccaggtcaaagacaagatcaaccccaaagttgtcttggaagtccgtgttggtaaaggcgtcgtcagcaagggtctcgatgtgattgttgaggacatggcttgcagcggtcttatgagagtcaaggtgaagcttcagattcccttcccacatattgaacgggttgatgtctgctttttgggacggccggaacttgactatgtttgcaagcctctcggtggcgataccctcgggttcgatatcaacttcatccctggtctggagagctttatcaaagaacagatccacgccaatcttggtccgatgatgtatgagcccaacgttttcccgattgagattgccaagatgcttgctggaaacgctgttgatcaggcaatcggtgttgttgccgtaactcttcacggcgcgcgccagctaaagaaccctgacaagttcgctggtactcctgacccttatgcagtggtatctctgaacaaccggaccgaagttggccgcactaagacgatacaagatacggatagcccaagatggaacgagactatctacgtgattatcacctccttcactgacactttgactatccaaccttacgattggaacgaattccggaaggacaaggagctgggaaccgcaactttcgccctggacaagcttgagcaagagcccgagcatgaaagtgtatacctcgaagtcttggcaagcggccgatcccggggttctatccacgcagatattcgattcttccccgttttggagggtagaaaattggagaacggtgagactgaaccgcctccagagctgaacactggtatcgctcgattcacagtcgaacaagccaaggacctggacggaagtaggagcttggttgggcaactgaacccatacggcgttcttctactcaacggcaaagaaatccacataaccaacaaactcaagcgaacgaacaaccctatcttccaaaatgcctcgaaagagtttttggtcactgatcgtaagactgcccggcttggtctggtgatcaaggacgaccgggatctagtcaaggaccccatcctcggttcctatcagatcaagatgaatgacatgctcaaaatgatggagaaaggccaccagtggttccatctccacggtgctaagtctggacgtgccaaactggtcttggattggaagcccgttgcggtgggaggcattgcaggaagcgccggctacgtcgatccaattggagttatgcgaatccacttcaaggacgcagcggatctgcgcaaccttgagaagatgggcaagtctgatccttatgctcgagtgctgctggctggctacatgaagggccgcacagttacctttaggaacaacctcaaccctgattgggatgaagtcgtgtacgttccgattcacagtgctcgcgagaagctcaccttggaagtcatggatgaggagtctgttggaagtgatcggtcacttggctcggtggagctctctgcagcagactacgttcatgagaatgaggccggtgaatacgaaatcgatgacgagaaacaacttgtatccagttcccttcgccttggtcaacgtgccaagggaactttgaactatactgtcgctttctacccaacaatccccgtcgtcaatcctgaagacgaagaggaggaagaggaggaggctgaggctgaggccgaggccgagactgaggcagctgggttgacgaggaagagcactgattccagacgcaagagctaccactccaagtccaggagcgtggactcgaagatctccgacaataaggtgctaccaatgggaccgcagatttgcagtcgaacggacgtcctagccttgagtctcgctctggtactgttaaagactcggagacggcgtcggttaggtctattaaggaggtccccaagacttatatctctgtggacgaccttgccaaccatggtaagtctttgttcccttctgttgttgtatttgtcgttgacccggctgatcttgtagaatccggcttcatcgtgtttaaacttcacgaggtcaacctttcgcgcagcaacgtgcatgtggaaatcataatggatgattatatgttcccagtgtggtcatcgcccaaaatccgcactaagactgctaagatcgaggacagtaagtattctagtctttctggaaatttgaagttggctgactttttatccagttggcgatgcgtttgtgcgtgaacttgagttctcaaagatcacccttcggattgtggagaaggtcaatgccgacactgatgatgacgaacatatcgtggccaaactcacaggcgacacgttcagtacgctccagcgcatcctgtacacacctacagagcttgtcctccgatccaccgatggagaggtgagcagagtcacagttagtgctcgatacattcctgtcactatgaaactggatccatcagaaagcatcaacaacatgggaactctccgtgtggatgtcttggacgctgccgatctaccgtctgccgaccgcaacggctacagtgatccgtactgcaaattccgcttggacggtaaggaaatcttcaagactaaagtgcagaagaagaccctccatcctgcctggaacgagtttttcgagacgccaatcaagtcccgtattggtgccaatttccgctgcgatgtctatgattgggactttggcgacaaggctgattatctcggcggtgtgccgatcaaccttgaaatgctggaacccttccaggctcaagag

SEQ ID NO: 24820 - DNA, 587 bp, Emericella nidulans
caaaaagaaaaactcaccactcccccggtactggcttacatgcattcgtccctgtcctctgcacctcttatcaggcgcgtcgatgcctcgccccttcttctttccgtatcgctccgccttgcgaagctcgagtccatcgaagaagtcggcaaagtagccgcctctccgtttgcacacaatcaaaaggtggcctatcctgcgggtgtcgctcaacgttgtccagtgacaaagtccgactgcctccttgccgacaacgtcaccgtggaggaaaagtgcgtgattaggagagtgtcattggggttgggtgccatattgccagcggagccaggttaacccgctgcctagtcatggatggagcagttatcggtgaacgctgccagctgactggatgcattatcggacgccgcagccaagtcgggcgcgagtgcgttttaaaggactgcgaagttcaggatggccatggtgttgaagagcagactgacgccaaaaacgaaaagtttatgcgttttgaaggattagacgaagacgctgatgatatggatatttctgaagacattggagacgacggtagcgatctgggtttttga

SEQ ID NO: 24821 - DNA, 399 bp, Emericella nidulans
atgcccgcgcatagctctctactatcgcacgttgctgcttattttcgaggtgcaggccccttggagaacaagactgagaaagtgatcttgacagatttgccacctatttatcttcaacatcatggtccgtggcctttcttcgtgtcggaatcgcaacgactaatacaagatacagggcattctatgactattgttggaatcgaagttcgcgagcaaggaaacgctaatatcctggtattcgatccgagtttcaaaacgccctctgtgatcaagcatgccatgggggctaatctaaagacttctgaacctgctcgcatactcaaggggtacaggaagggtgtaaactacttgcagaaatatcaaacttttgagctcctcgagtatgcaccccagtcttaa

SEQ ID NO: 24822 - DNA, 263 bp, Emericella nidulans
aaggcgggataaacaaggagaatgattgcgacaaagtggcccaggttccttcaatccttcgtaccggtgaaacggtcaaagcacggcggctcagtacgtcgcgcccgccagaggatgacgaatctcgatactactgcgatgacgaggaggagagcggcgacgattctgaagatgaaggtctagtctttggcaataccagagccgtcaacaaaaaaccagctatcatcatgggcaaagcgaagaaagggcacgatgcaggctaa

SEQ ID NO: 24823 - DNA, 1193 bp, Emericella nidulans
gatacctctggacgcgtggaaatcaagatcaagggaaccaagaagcaggtagaggtagctaagaagatcctgcaacagcgttcaagcgagttcgatgctacggtcacaaagaccatcaacgtcgacaaaaagcaccacaaatccctgatcggtggtggtggtaagtttaaatttgttacatattgtgtcggacctcactgacagtaataggtgccaatattcgcaagcttgttgcggaagccggtggtcctacggactcgagcgcgtctcgactcgtcagattcccacgtcctgaaagcgacgataccaccatcagactggaaggaaatggtgcaattgtggacaagattatcgccgctattgaacaatttgtgcaagagcgcgaagaccaagttgccatcaaccttgaagtacctcccgtgcagcaccgtcttctcatcggccgtggaggagacacccgacggggcatcgagtcgcagttcggcgtcaccctcgatatccccagacaaggttctgggcgctctgatgtcaagctcaaggggcctagcaatgccgttgaacaggctaaagagcacattctggccatgctcaaggatcagcaaggtgtgaatgttgatgtcccgagtcatctacaccatgccatcgccgacaatgggtccttcttccgccgccttcgtaatgactaccaggtaacggtggaccatgcgggccagcaaatcccgccgagaccaaacgtggaagactcgcgcagcgccgttaacggagcctcctcgctccctttgatcaccgatgaacccagtgatgcacttgacgctcactcatggaaggtggtagacaacaatgttgctagcgaccctagccaacctgctaccatcccatgggtcctggctggatctacggacaatgtcaacaaagcaaaggctgccttagaaaaagccatcgccgctgcctctcaacaatccgcgaccggctacctcatccttcctgaccccaagacataccgattcgtcgtcggccagggcggcagccagatcaactctatccgcaaacaaacaggctgtcgaatcaatgtgcctaaggaccaggccaagggcgaggcgatcgaaatcaagggtagtaaagagaacctcgacaaggcaagggatctgattctagaggccgtccgtgccgggctgaacggcaactcaaggtga

SEQ ID NO: 24824 - DNA, 423 bp, Emericella nidulans
aagctctttatcctagtttacaaaggagaccccctagactactccgagtaccgccacacagcgctctacttccagttcgcctcgtctagccggagcatcatgcatgtcatcgggtgcccgggcctcttccgcttcgcgcacgcccgaggcgccggcatcgaccccgcgaatgtcgggattctcgccaaagtcgtgccagttacggatattccgacaaagatcggcgaggactcaatatgtcagacggtcgaacgaacgccaattcgaaacgggcgggatgatctcgattggaattgccagaactgggtaggggatgccttggcgaggctggtggacagagggtggattacgcaggaacatagggaagatgcgatcgataaaatggcggatgcttgcttagaggcgcgggacgatgcaatttga

SEQ ID NO: 24825 - DNA, 1942 bp, Emericella nidulans
  unsure (1)..(1942): unsure at all n locations
caggccaaggtcaagtgcgtgcacgacggaagcccgccttgtcgtcggtgtcagcgtttgagccggcatccgtgtcacctgactgagccntgtctcgctcctcgctctcactctcttcgctttcccctcgacggaccccgcgagctcaacgaacacgaccaacaccaatttcatcaattccatcgattccatcaaattcatcaattctaccagatccttcgcatcgttcagactcatcgaacccatcgaattcattgaattcttcaaatttatcgtcttcgcgagcagaaacacccttctcctctcttcgatcaacaacgcttattgccgcctgcgacctctaccgcaggaaattccccgttgtcaacttcttgcactacccatctctgattgctgaccttgcccgcgatgccgcgactgttgagcccgtcttcctggcggctcttctctcgctctgtgctcgcttcatgagcgatccagctctgaggccgtcagagacatacgcggaatatgcccgcacccagctggctcatcgttccttcgagtcgccctctctcccgctcgcgcagtcgctcgttatgatctcgttgtatgaatggggcactggccggccgtatcgggcgtggatgtacagcggaatggccacgtatatgatccaatcgctgctgaagacggccgacgatcatatggaacacttgccagaagactttcacacgcatgcagatacccgaatcgcttacgaacagctcgtccggacgtactggtgttgtttcgcgcaggactgcgagctgagctctggcgcgcgacagcattttgccctctcttttcgccagatctcggtacccctgccgatgcgtgactcagatttcaatttcggccaagctgctcagagactgacgccggcggatataaacggcgctgttgcggggggagtccggttgggaatcgagcatgggttaacaatcgtgacacgcgggtttgatatcttcgtgcggatcctgcgttttgcgaacgagagccggcgtgaccgtgctcgtggggcagtgcggtcgtcggcgtcaatgtgggcgtcattaaaggaggagctggatgaatggagggctttacaggatactacggtccggtatccggagaccagtgcacccgctcatgttgcgcttgggtacggagagctgtttgcgtacattaacctggtatacttcatgaggtagtatccctgtgctcccggtggtgaggagtgccagctaacgagcgtagcatcctcttcctcgaccgcgaccgattcctcgccagccccagaacccctgacagctcaggccaactggattctgatggcgacacgatcgaccgtctctttgcgactgcacagcacattggagcgatcctctcgtccctagagagctgcgcaacgcccgtcattaccccttatgcggggttcagcgttttcgttgccgcgcatatcaacatgtacggtacggtgtctccgacacgctaccccggcggactcgagcgcgcagagcaggagaagaagtcgaacctcgaatacctagaacggctgtgtcggttctgggatgtagggaccagctggtggcgcaccctgcaagaggcaaaccggttctacgagagcgcgcgctcacaccagggcctggagtcgcaatctagtgaccatctgactctggctggaacatttgacgagtacggcgatatccgtatctcccggccggatcattcgacctccacttcccgaggaggcacctcgcccgtcgagcacggtgcccccacggcggtcagaaacaggggaaactcagtcctggatgccgagcagggtgcgccgggtgtctacgatctagaggcagagatgatgcagtggccttttctcgacgagaactggtccgtgggatttgcgacggggtacgagaatacttggccagggctgggctaa

SEQ ID NO: 24826 - DNA, 702 bp, Emericella nidulans
atgtcttcaattgctgctatggcctctcgccgggcctttgcccgccaggctcttttccgcgctcccgtgcgccgcgcctacagctcgaagatggaggaatcaaccctcgacaaggctcccaagcgtgatcccgagctctacgtacggacttccagcccgacgaaacccaattgaatccaatatttaaagcatgcgtgtctaattagaaataggtcctgctcggtgtcatgtctggtgctttcctgattgccggctggtaagtgtcatgccatgctcgggatctttaggagatgacgaaaacaatttctcacgaactcaattgtttgaatacggcaatatgagactcaagaatctttgttgatagcttctcttgataggtactttggcaagaagcccacctccgtcacatccgagagcaacgtccgtattcccgacagctctatgccctgggagcgtgacgacgacggcaagatctacaagtaccagtaccaccccggtggtgacaagagccagcctctcaggaacgctcccagtgctctgaacactgtcatcgttcctaacgttactctgcctgtggtatgaaccattattcaattctcccctaaattcgaatgatactatcggcatttcgactgacattcacatttataggatctccacgagcgcttcaacaagtacggcaaggaagagtatgacttttag

SEQ ID NO: 24827 - DNA, 2155 bp, Emericella nidulans
atgcatctcacatgggccaccggaatcgccggcctggctatatggctcggccgcatcccacctggtcagaccctggccacggagtccaggttgctggccacctacgactatgtgattgtcggcgcaggagtctcaggacttacggtagcgaatcgcctgtcagagaacaaaaaactaagtgttctcatcattgaagcaggcggattgtacgtgtcttctttttttttgcttgttctacctcgcgcctcagtacaagagatactaattgatttagcgacgaagacgaagactttatccttgttcctggccttgcggggaacgcaatcggcacaaagtatgactggaacttgacatacgcggtaaacccggacctgggaaatcgtactgtttctatcccccaaggaaaggcagtcggaggctcgagtctgttgaaccgcatggtctttgatcgcggatccaaggctgactatgaccgctgggaggcactggggaatcctggttggggttggagggacctctttccattcttcaaaaaggtatgcatatgcgcgccctagagcaatcgaacttatctgatcaacctagagtgagaacttcacgcctccaagcgaggacgtgattgatgagtggaatgccacatatgacccagcagtccacggcacgactggcaacgtccagtccagctacgctccgtggatttggccttctacaaaacaattcatcagcgcgattacgagccttggggtccatgttccccgtgatggtgcgagtggcgacgccctcggtggatttttcgtgccccatagtcaggatgcgatttctgtgactcggagtgacgcccgcagggcctactgggatgcggtgtcgaagagacccaatgttcatcttcttaccggccagagagtgacaagaatgatcagcaaaaggacttcgcgcagggtgcaaatcactggagtggaggtatgtacctacccatcctcacaaccactgttcacagtatatgaacagtaaagaatgaactaatgcgaatgattccatcagtttgcagcgcaccgatcaggggcccgaactattgttaacgctcgcaaggaagtactcctagcagcaggggcaattcacactcctcagctgctgcaattgtcaggaatcggtgacagagcaaccctcaacaggcataacatctccaccgtagccgatgtcccaggtgtcggccgcaacctccaggaccatcttcacgtccccgtagtgttttcatgtaggtgacaagcccgtgattcgactacagcactaacaatgacagtcgatttccccctaaccgccacgaatcttacgacaaacagcacattcgccgctgaatcgtgggccttgtatcgcacccataagacaggcccttacgccgacgcaactggcgacttccttgccttctttccaactgtaaacttcacctctcaagctgatgtcctccagggcattgctgctgatcagaacccgcaagcctacctggacaaagacactccgccctcaattgtggacggctacaccgtccagcataaactcctcacaagcggactcgccgctacggatgaagcgcagctcgtaatcatctgggcggacggcacgtttgtctcggcctccagcatcccttttcacggggcagcgtgcgtctagcgtcatccgaccctttcgcgcaacctctcgcggaccctgcgtatctgcgtaatcctgtcgacgtgcggatcctaatcgaggcgatcaagtacgcgcgctcgttaaccacaaccctttctctggcggcatttaaccccgtcgagctcgtgcccggtggcagcatcacctcggatgaagatctggaagcttatgtccgcggcgcagtagactcgctcttccatccatcaggaacttgtgccgtgggtaaatttgaacttggtggcgttgttgatgtggacttcaaggtacatggagtgaaaggtctaagagttgtggatgccagtgtgttaccaatgttgccggcgacgcatattcagagctcagtctatgcggttgctgagaaggtgagttcgcttttgtttctcgaatcttatccgtagaaacagctagtgtgcttattactgattctacatcgtttggacaggccgcgaaggcgattctatcttag

SEQ ID NO: 24828 - DNA, 749 bp, Emericella nidulans
tatgtgtgggacaaggaggtgcgagacccgatcacgggcgagatggtgcaggtattctcaccgtataaacagtttctgcggcagctgctgctgatcccgtttgcgtcagtcgccagtctggcgctgggggggctgatcgtcgttacctttgcgatggaagtgttcatctcagaggtctataccggctccctgaaggggtaccttgagttccttcctacgatcgtattttcgctgtgcctgccctccatcacggggctgctgacctcgattgcgacgagactgaccaagtatgagaattaccggacgcaagaccagtacgacctcgcgcagacggcgaagcagtttgtgatgcacttcatcaccgcattcctgccgacgatcctgacggcgttcgtgtacgtcccctttggcgcaaccatcgtgccctatctggacttcacccgccgtacagagaagcaggacttccacgtcgataatgcgcggctgcagcaggaagtgatctacctgtccatgactggccaggtagtggatttcggcacggaggtggtgctcccgtacgtccagcgcgtaatctggcagaaatggcgcgactaccagagcagaaaagaggcagtccagggccgtcggcgtgtctcgtcggcgacgaaccaggtgctgcttgacagtcccgaggaaaaagagttcctggcgcgtgtccgcaacgaggcggaggcggacgagtacaacgtgcacgaggacaccctggagat

SEQ ID NO: 24829 - DNA, 545 bp, Emericella nidulans
acttgttcgtttgacacagagctgtcaatgagtagtcaggccaccgggtttgtcgtcgatgcggagcgcggttatattcttacaaaccgacacgtcgtctgtccgggtccgttttggggatatgtcatctttgataaccatgaggaagtaagtcttctgctagtgaccttggattcaaattacaacctaaactaataaatcagtgtgatgtctatcccgtgtatcgagaccccgttcacgattttgggttcctcaagttcgaccctaaagctatccgtcacatgaaactcagagaactgaagctgcagccggatggagcccgtgtgggatcggagattcgagttgtgggtaacgatgctggagagaaactgagtattctctctggtgttatcagccgactcgatcgcaacgcgcccgaatacggcgatggctacagggacttcaacaccaattacattcaggctgccgatgcagccagcggcggtagcttccgcaggccgggagtaaacattgatggaaatgcgatcgccctgaaagctgggggc

SEQ ID NO: 24830 - DNA, 759 bp, Emericella nidulans
actacgttgcagcatcatcgcctcatggccggtttggccagcgtgctcgcgactcggtcaatctggcgaagcgtgcttctcacctccataatgctactgcctctggaaaactccctaaatcggactttcggttcctgacggacaagacatcgcgtacgtataagtctcctctaaatattccaaaactacttttgtgctaaacgtatgccaaagcctttctcgtcgaccatcttcccgacgtgcacttcgacgtgggtgaactctattcggggctgattcctatcgagaagggcaacgattcgcgcgctctgttcttcgccttccagccgaaactcggcgatcccgttgacgaagtcaccatctggctaaacggcgggccggggtgtagttcgcttgaaggcttctttcaggagaacggccgcttcttgtggctgccgggcacctaccagccggtggagaatccgtattcgtgggtgaatctgacgaatgttttgtggtacgcacctcttttgtccctggattcacgtgcaagtgtatgttctggagaattatagtatagggctaagatgttgaatgctgttatagggtcgaccagcccgtcgggacgggcttctcggtcggtaaaccgacagccatttcacaggaggagaccgctgaggatttcgtcaaattcttcaagaacttccaacagacgtttgggatcaagaatttcaagatctacgtcaccggcgagactacgcggggcgatacgtaccctac

SEQ ID NO: 24831 - DNA, 506 bp, Emericella nidulans
ccgacacaaacctctggcaagactacttcactgagattcgacgcctgcactacgcccatcccaccacgtcaaaccgcaccctctactcttgccccataatcttcgaccgcaattccaatgacagccctattctggtccgctgcgccgaccttctttggagctttgccgggctttcgaccatgtaccccggctcaacagtatcgattccaacgtccgtatattcgctcccactcactctcgcatccaccgttggtggctgggacagcgatcccacctccatcggcgaggatatgcatatgatgctcaagtgctatttcgaaacgaacggcgaccttgtctcgcaggtggttcacgccccggccagccagtgcaatgtctccagcgagatcaccagaccaggactgcgccggaagctggatacctgtgttgcgcggtaccggcaggcattacggcatatgtggggggctctagacacggggtttgcggcaagaaacacccttcgctcg

SEQ ID NO: 24832 - DNA, 776 bp, Emericella nidulans
atgcgctcaactcaggcactcgccctagccctcgcccttgtcccgttggcttcggccatcaatatcatctcgtctaatgacgacgggtgggcggagatcaatattaggcagctgttcagcaccctgacgtctgctggtcattcggtcgtcctgtccgccccagcagagaacaagtccggctctggcatgtctgcctgggacttgacccgccagaagacaccagctaaccaaaccaggttcgaccgacgaggccccttctaacagaacggatccgtgccaattcgacagctgcccagctgacagtggttcctacgggtccaatgaaacagacccgcgccttaattgggtgaattcgtaccccgtcacctccatcgcgtacggcatcgacactctgtcgctcgaattcttcgacggaccgcctgacctcgccgattccgggcccaacgtcggcagcaacctcggtcttgcagtctatatcgctggaacagttggcgctgcaaactatgccgccactactgtgggattcctgcgatcgcgttttcaggggcagacgggtcttccacggcgtgggatggccgaagtgcccgcctacagcagcatctacgcagaactcgcggcaaaggtagttgagcgagtcgtgagccggggcacgccgtacctccccgatgatgtttggctgaatgtcaacttcccgagcgtcgagggtgcaacaccgccaacgactttagcttcgtcctttcccggattcttacggcacttccgctggttacggatga

SEQ ID NO: 24833 - DNA, 939 bp, Emericella nidulans
atctcgattcccgcgccccgaagggactgtggatttgagccttcgcagcccaattcaccgtactctttgaactaaggaatttaaagggatcacgcctttaacagactataccttttccctctcatatttagctattcctacgaattacctatctcagactggtcccaacctatcatgcctggaaccgtccccacccacgaagaccatgtcgatgtcctcatcgttggcgcaggccctgcgggccttatgctgtcgacgtggctaagccgctgcggtatcaagacacgcattgttgacaagcgtgggacaaaggtgaggctgatctggaacataacatgaccctactgtaatcacctgagagcgggacgacgactgactgctacgctgtaggtcttcaacgggcaagcagacggcttgcagtgtcgcactctcgagattttcgactcttttggctttgcacaccgcgcctggcgagagtcgaatcatatgattgagatatgcctctggaatccggacgagaacggtcgtattcgacgatccgaccggattcctgataccattcctcaaatcagtcgcttccaacaggtggtcctgcaccagggccgtatcgagcgattttttcttgattcaatgaaggagcacagtaatctgacggtagagcgcggcgtcctgcctgtctcctttgaaattgacgaggccaaagcagcggacttcgatgactatcccattagtgtgacgctgcgcaccttgtctgacaaggaagccacgccacagcagcggcagcagcaccaaaagtctgccgatggacagcgcgctgttgttgatgatggactcttccgaagcaacctggtggccgacgacacagacgatctcatcagggcagcaacagccgacagtagtcgcgacggtcaagtggagttggtcaaggccaagttcctc

SEQ ID NO: 24834 - DNA, 258 bp, Emericella nidulans
atgcatcttgtttcgcgcaatcgctatcctctgatgcacatgatgcccacagacaccgttgtcgactacctcctctccgcacctaaaatagtccgtgaagcacacccgatgcactggacctttctcgatggccctcaagacggcactgttatgcttacatggcaacctctaaaccatctgggaaccaatttcgcgagtgacggttatgtctgggccgatgtcgaacaagctttcaccttcgaggctcgaggctatgta

SEQ ID NO: 24835 - DNA, 378 bp, Emericella nidulans
agtatttacgccattatgacccgcgtagagacagtcgacctggccaccaccacagcggcctactatgcgccggccacaatcacctcagcaaacagccaagtcatccatgtggctgggcaagctgaaatgacaaaagatgagaccgtacccgcagactacgagtcacaagtccacctggcacttctgaaccttcgcaagatccttatcctttcaggagcctcggtcaaagatattctcaagcttaccctctacatcgtcaactacaactcagcatcccgggtgcatactcgccatctcaaacggtttctggcaggccaccgtccagccattacactcgttcctgttgcgcggctggctgcgccagcttggctattcgag

SEQ ID NO: 24836 - DNA, 627 bp, Emericella nidulans
atgtctgaatcaaacagtccggaaaagcctactgaggcttccggcgctatcacagagtcttcatctagcaaaaataatgtccaagaagatggtgccacgcaaccccgcagagaattgttcattagatcgcttcctgcctcagcaacgaatgagagcctcgccgaacatttttcgcagtcctacgtgattaagcatgcagttgttgtcgtcgacccaaagacaaagcagtctaaggggtacggttttgtgacgttcgcggacgtggaggatgccaaggctgcgctggaagaattgaacgggtcgacattcgaaggaaagaaaatcaaagtcgaatatgcgcagcctcggcaccgagttgttgatgagactgttgggaagagtgtaccatccgctgaggcactggagcgcaagaaacagagggagcagcaaaaggccgatacgcagcccccaaagctgattgtacgaaatctgccgtggagtatcaaaacgcccgaagatctcgcggcgcacatccggagctttggaaaggtcaaatacgttactcttccgaagaaggggagacagttggcaggctttggatttgttgtgcgtcgaggaaagaaaaatgcggaagcacctcaggaagct

SEQ ID NO: 24837 - DNA, 1630 bp, Emericella nidulans
gttctgactatctatgccgagcgcccagttgttgagaagcagaatcgctatgccttctatcaccagtctgctcaggcgattgcgagctacctgatggatctaccctacaagatcatcaatatgtttgttttcaacattctcatttacttcatggcgaatctgaggcgagaagcgggtgctttcttcttcttttgtctcaccacacttctcagcactttagttcaatcagccgtctttcgcacattggcctgcattactcggacttccgagcaggctatgatcccaagcgccattttaagtcttgggctcatgatatacacgggatttacaacgccgccggggtatatgccgggatggtcgcggtggatggcgtatatcaaccccctatggtacggttttgaggctttgatggcgaacgaattccatgaacgggacttcccatgtgctagcatggtgcctaccggacaaggatacgctaacctcccatcggcatcacaaatatgctctgttgtgggctctgaagttggctcggcccttgtcaatggggatagctacatcagcaagtcgtttgactattggaacgtacacaaatggaggttagtgaattccaaaaacacgattgatacagaaggacagtgcactaacgggtctcgctcgaataggaatattgggattctctgcggatttctagcaatctttttccctacttatgtgcttgccgccgaacttgccaagccacctaagacacgcggtgaaatactggtattcggtcgtggcaaaggattccatagaagggaacagcccttggatgctgagagtcaagaaaaggatcgtccagtagtggcagataaaacgcacggttcactgcagtctgacacgattattgctgggaaggacgtgttccactgggaggatctctgctatgatatcaaagtcaagggtgggacccgccgtcttctagaccatattgatggctgggtcaaaccgggggtatctactatcctcatggtaagaactatcactataaaagggatatggagctaagcgtcgccttcctagggtgtatctggcgcaggtaaaacgacactcctagacgttctggcaacccgtgtcaccaccggtgttgtgactggccaagcaatggtgaacggaaaaccgacagatccgtctttccagcataaggttggctatgttcaacaacaagatctccatctgagcaccatgacggtccgcgaagctctacagttcagtgctgtccttcggcaatccgccgaaatacccaaatctgaaaaactagcctatgttgagcaagttattgacacactggaaatgcgagaatttgcggatgccgttataggtgttcctggagagggcctcaatgtcgagcagcgcaaacgcctaacaattggtgtagaactggccgctaagcctcagctcttagtcttcttcgacgaacctacctcggggttggattcgcagacctcatgggtcatttcagagcttatcaagaagctcaccaatagtggtcaggcagttctctgcacaattcatcaaccatctgccattctgtttaaccaatttgatcggctgcttctgattgcaccaggaggaaagaccgtatacttcggcg

SEQ ID NO: 24838 - DNA, 446 bp, Emericella nidulans
agattcagcgaaccagcctctctaatacggtccttcttctcaaatccctcggcgtgaaagatctacttgacttcgattttatggaccctccacctcaagaaacaatttctacctctcttttcgaactctggtctctaggagctctcgacaacctgggtgatcttacgcatttggggcggcaaatgacaccctttccaatggatcctcctctcgcaaagctcattattacggccgcggagcaatatggttgcagcgaggaaatgctcacgatcgtctcgatgctttctgtgcccaacgtcttctaccgccccaaagagcgacaggaagaatctgacgccgcacgcgagaaattcttcgtccccgaatcagatcatttaacgctcttacatgtctacacacagtggaaatcaaacgggtattcggaccactggtgcacaaagcatttc

SEQ ID NO: 24839 - DNA, 917 bp, Emericella nidulans
atagccctgaacatctttaacgccgctctggttacgcccacttactacgtcttcttcaccaggtcgaccattatttcctctgcgatccttttccggggcttcaaagggacaggcacgcaaattgcttctgtcatcttgggattcctacaaatctgcgctggagtggtgttgctacaattgtcgaaatccgccaaagatgtccctgacgccgccgtcttcaaaggtgacctcgatcaagtccgtgaagttgcaacgcaagaagagcctgaattcgagccaaaagccgacgccatccgtggcacagccgctatcattcgccgcctatctactccccgccgcaatgtcgaggccgaggaagcacgtcgctatctccgtgagagacaagaagaccagctcagaccacccgctgacaacgagattgtcgaatgggacggcttgcgcaggcgcaagaccgttctttctgaaaagtcccagaggcgcacacctactcctctacctccgctaggaatgtctcgcttcccggatgacttgtccgaagactcccacaatacctcccccagtgtgcatacgtttatgaacgaggttcgatcgcggacgtctagcatcatgagctccccgtggagacctatccctggagaccaacaaacgcatgggccggtgttggaaccagatcccaaagttgtcgataccagctaccctgggcaacatcctcctagggctgtctcatgggtggacgaagagcaagaccaatcgcacctagctgcgccagcacctccgccgcatcgtcatttctcattccagaagatcttcagcagagctaagtcacctgttgacccatcatcagcagacagccgcagccacacccgcagtcgcagccccagaggcattctgcgccgcggacacatgcggaatatgac

SEQ ID NO: 24840 - DNA, 1313 bp, Emericella nidulans
acaatggccgccttcgtgcgagtgtcggggcctccaaatggcaactttctaattgggtaccctgggatttctgctactatggtacgctttacacagtaggattccgctggtcattgcgcttacagtttccagcctcgtattgaaggcaaagtcgagattaggcccagtgtcggcatcacggctcccgtcaacgtatccctcgtcacggtatctctcgtccggcgagaaacgatccacccgtcagcggattccgtcgcgaagagacgtctagcgccgccgaggaaagagatctccgataccgttgggaaggaaatgctcctcttccgttgtccggctggtcgggaatctgaggaggtcttatcaatggatctgccattcgtcctgttcattccctttggacgaggcggtccggacgcatccaggcgagtccctccggctagcttgcagcttcccagtcgcaccgcggagacgttctacgagatcgtggtgatggtacagcaaggccattcggagcaaaggaagtactcgtttccggtaccgatcgcacggtatgacacgctatcgacatttggaatgtacaatcgccccgaatcggcggagagtgtatcagatcatctggtgacgttgggtatttctctaccgcgatggtcatacgggcccctcgatcctgtcagcgtctatgttaaactgtccccgaatcccgactggatcagcaaagctagaaaagttacgatcaacaaaatcacaatcggcattgatgaggagataatctacaatcatgagggcgacgagcctcaacggaaggtaaaaacattaacgaaacggacggaaccaattggtgtgaaaatgcctccgacagggttcttgacgaacatgggcctggtgttcccagcaaaggatatgcgggatggagagggcatactccctagaggcaaacctggatttcccacatacgctgttagtgggtttaccacaacagcaagtctctacaaaatcgaatactatttaacggtcaaggttcgtggtgcgaacctcgtccaacatggaatgcccacgctaacaattaacaggctcatttaacatccgctcgagatatcattatacgacagccaatcgtcgtgtgccctcttgaccacgctggatgtaaagaggaaatggaagcaatcgaacaagcagcacgagaagctgcccacattaaccccgacaaccctcttttacctttaccttcaatagtccgaccgtcggaccccaacggtctccgccatctaggagtcgcgattgtcggtaaccagaagaagcctctgatagattag

SEQ ID NO: 24841 - DNA, 1776 bp, Emericella nidulans
gtgtagctgcgtcgggccctttaacgacgcagaaacccaacgtcttctgctcccctcgcagttcaaagttgcaaatatgatagttgatactgacgtccttatcatcggcgctgggttgtctggggtaggctttgcaatccaactccagaagaaatacccgcgcataacattcgaaatctatgaaaaggccgaagggttcggcgggacttggtgggccaatacatatcctggatgcgcttgtgatgtaggcaaatactcttccatcttcatttcttacctgatacacatacttctaggtaccatcccatctctattcctattccttcgccctaaatcccgactggagcgagcagtttgcgtctcaagcagaaatagccgcatactgccgcgccgtcgcagagatgcacgatatcccccgacacgtaacactccgctcgacggttcagtcagcaacattcgacgaatacttaggaacgtgggccgtgaagatccttgatcagcagacaggacggatatatgagcggcattcgagggtgcttattacggctgttgggatgctttcagaacccaaggactgtgacatccctggtgcagaggagtacaatggcaggctcttccatagtgcttgctgggaccatgagtttgagtgggctggaaaggaggtggttgttgttggtgtgttgcctgccctctatacctcacatccctcaagaattaaagctttcaaggaaactgacctctgtatacctgaaaaggcaacggctgcagcgcaacacaatttgtacccatcttgactaacaccccagggagcgccaaacaagtcacccagttcatccggcagcctcactggctcgagccacgcccaaaccctgaatatccatctgccatcaaatggatcttccgccacgtgcccctcgtgatgcgctgtttccgatatgcgatatttctctacctcgagagctacttcagcacattcaagcgcgtctctggcaaaaggacacgggaggcaaggatgaagtctcaggcggcttacctgaaaaaaatggcacctaagaagtatcacgaaatcctgacgccaaggatagaactggggtgtaagaggagagttatggatacagattaccttgcttgtttgcacagagagaacatggagctcatccatgatgatccgattgagaggatcactgttgacggcgtgagaacaaagtcagggcggaagatctatgctgatgcaatcatcctcgcaacgggatttaagactgcgcagccactttttcctcttggagataacatccgtggtgaagggggcgttactctgagtgagcacgtttgtcacctcccagtgctaccagggctatcaaagtgcaattttgacacattaacgcagtgggaaagtaccgcctcccatgccccgcaagcatactacggtacatgcgtctcgcggttcccgaacatgtttatccttgtcggccctaatacggcgacgggacatacctctgtactctttacagtggaatgccagattgatttcacgctgaaggttcttgatcctattctcaattctctctatcccgagtcatcatcgtcatcctcctctgtcttgcaggagatgatctgtttcctccggaaacctttctcctctggacctcgggcgggaaagaagctcgcactaccaccagatatagtctccgtaacgtcccaagcagaggaaaaagaaagccaatggatcgacgaggcaagtaagcaatatgtctggacgagtggatgtgcaagctg

SEQ ID NO: 24842 - DNA, 1781 bp, Emericella nidulans
gaattgccggaatccttagccatctggtctacttcatccgcggcgagcaccatcaatatgcccatcgctggatcacacgggctcttgcgggcaccgccgcagttgccattgccactctgcgcttgacagactggcagcctctcctgagtcttatcctgacagcccttatctcaacatcttacttcctggggctgtattccagcatcggcatctatcgtgtcttcttccatccgctacggcgcttcaaaggcccgttctgggcgcgcgcgtcgaatctttaccatatgtacatcattcgcaagtcggataattaccttgtaatgaagaagatgcatgagaagtatggaccgataattcgcactggtaaggacaccccctgtcccatagtgtgtttttcctgctctgtagacctgacgactactaggaccggcaaacctctcagtcaacgatccagcggcaatcccccttgttttgagcgaccgcgcaacgtgcgtgaagggcccatggtacgaccgctctttgcccttggtaaatctgcacaccgttcgtgacaagcgggtgcacgatgcgcgcaggaaggtcttcaccaaggcgttcacaccgtcagcgctgcgcgagtacgaggagcgagtggcagtgcactgcgaggagttcgtccgacagatgacgcggctgagcgggaagccgtttgacgcatcagagtggttcaagtattttggtatgtcgattcaattcttcctaacagaactctattacggcatgtaaagcatttacgttatggtgacttagggctcgcccccagttccattgatgccctcgaagccgaaccggtgaattccgacctttctcagacaagcatggcccatgtcggccctacaagtcctgttccatggatggcgccgatcctccataatcttccttgggcaggacgtggtgcaagagcatggcttgagttcgtgggctcgcaggtcaaggagcggactcagaagaagtcggacagacgcgatgtaagccgttgttcaggagagaaaattaccagactaacatagcagatcctctcccacctcgtcgaggcatacaaccagtctgagaaaaagaacattgactaccagtggctccgcggcgacaccagactgaccatcgttggcggctccgacaccaccgccgccacgctgacgttcctcttctaccacctggcccaaaacccgtcgcatgtagacaagctgcgcgcagagctcgagcccctgctaaacggccagccgcggttggatcccaaagacgtctcgaaggcgcaacatctcaacggggtcatccaggaaaccctgcgtctccatccagcgatcccctctggattcccgcggacgacgccgcagagggtatcaccatcaacggaacgtatatccctggaggcacaaccattgtgatcccggtgtatgctttgcagcatgacgaggcaaactacactcatgcggaggagtttatccccgagcggtggtactcgcggccagagttgatcaagaaccgggacgctttcctgacctggaatattggtgagttaacttcactgggataatgacaatctttaacaagtattaggtacaaatgggtgtattggtcgggcgctggctctgacggagatgcggaacctcgttacctacttcatccaccatttctccagggtgaagtttgcgcatggagaggatggcaaggcgctgttgaccgagacgaaggatcactttaccgtgggggtcaagccgttgcggttgatctttgagaaatag

SEQ ID NO: 24843 - DNA, 708 bp, Emericella nidulans
atgtcaaaaatcagcctcttcggactcggatccatgggccaggccctcgcccatcggtacattgatactggatataccaccaccgtctggaaccgcacacctgagaaggcgcagtcctccgggttgatacagaagggcgctcatcaggccctcactgtagccgaaggcctagaagccgccgacatggtcatcctttgcctcctcgacaatgcctccgtaagagaaaccctcagcaaggctgtcacttctctcagtgggaaaactatcgtcaatctaaccaacggaactcccacccaagcccgcgacctctcagaatgggccggcgcgcacggtgcagagtacattcacgggggcatcatggctgtccccgatatgatcagttccggctcgccgcactcgattctgctgtatagcggcaagtccaatgaagtgtttacccgcattgagcctgaccttgctcatttgggagcggccaaattcctcggcacggacccgggctcagcatcgctgcacgacctggcccttctctcgggcatgtacggcctgttttctggcttcttccatgcaactgcgctcgtgcggtcacagtctgacaccacatctgaagggttcttggagctcctgatcccctggctaggcgccatgacgcactacctgggtggactggcaaagcagattgacagcggcgattacacgacgcaaggttcg

SEQ ID NO: 24844 - DNA, 501 bp, Emericella nidulans
atgccttccatgagcaatagcgcagtccctcaacgccgccgacgtgagcaggacgatgactccgatgatcttgcgtccgcatctgaatcttcacctgttccaactcctgcgagtaacaggagtcacagcaagagagctagaatagcagcgaaatatgatgcttccgaagacgcgtctgatcccgaatttgaaggaaatggcgagaacgaaaatgccgaggacagttccgagtccgcgagttccacccaggatgatggacaaactgagacacagagccataattataatcctgcggggctattgtcgactgtgcagaatggcatgaggggtcaggaggggttcaagcctggtgccattgtgcgaatcaaggtcaaggatttcgtgacatacacagcggcggagttcttccctgggccgaagttgaacatggttattgggccgaatggaactgggaagagcacgcttgtttgtgctatttgtttagggctgggatggggacca

SEQ ID NO: 24845 - DNA, 1565 bp, Emericella nidulans
atgctcgcgacgccaggctcatctcacctgcacaatcccgcttcgagttctagccacagaaaccgaggcggaagcacagcggcggcgacacccagccgatcaggaacaccccccctcccacaatatgagccgcctatagcccctctcaccgacacaggccgacaagcgctccttgccctcctccgcgcgcagaacttgcgacaactcaaaactcatattgggcacgtcgagaccaaacttacggatgctgcgggcgaggttaatgagcggttgacggatgcgaaggttcgggccaaaaagagagcggagagggagaaggagaagggtaaagaggctagccggtttactacggggaatgaggatggcgatggcggtgaaaatagtgtcggggaggaggcggatgaagcggcggagctgagggagttagaggagagtgttgaggctgttacaaggcggttggacaagaatatgcggagggcgattgattcggcagttagggttgatgggttgggagaggtgcttgggaaattgcaggtcgagacggagacgagtgcaaatgcgagcagtcaacgtcagagacagaggcggcggagacgtgctgaggtagaagaggaagacgaagaggaagacgacttgtatgaggctacgcctgagccggaggtggatggggaggtgctgtcgttgagagaaaagcttgagagggcaatggctgaagatcaagctaaatggaacgagatgacactgacggagcggtacgtctgctgcataagttgttcttttctggacactgacagggctttatgaacagctactccaaacacaacgactacgtcggcttctaccgcatcatccatgaagccaaaaacccaggcgaagacatgcccccgcttccgcacgcctctacctggttcgcgcatctcgaagaacccaacatttcttcaggatcatccagcgatgccgctccttcacgaaatacccgccgaatgcctcgcaacccctctccggcctctgattcagatgacctcgccattgaacgcgagcgcatctctctcagatgtcctcttaccctcgttcccttccgtgacccagttactagcacaaaatgcccgcacagcttcgaacgggaagccataacctccatgattgaccagagcgccatgaccgtcccagccgcagcgtcaagatctggccgcggcggccgtcgtatccgcgccgtgcagtgccccgtttgttcagaagtgttgacgaacaatgacctccgcgaggatcccgtgctgctccggcgcgtacgtcgtgatgaggcgcgacgaagacgggagcttgaggaggaggaagaggcggagcttgttctttcaggacgaaagaagattcggcaaagtgggattacgcttgggagtgatgatgaggatgatggtggtgaaagtgaaagctgtaacagagctataatgcacattgaccaagtccggatcaaacaagagagggcaagatcgcgtggtgttactgaggttgagaatcatgagcaggaggagcaaactacagcgacggagagcgaaacacaggattag

SEQ ID NO: 24846 - DNA, 288 bp, Emericella nidulans
cctgacatgaccactttcgtatgcgtctgtattgcagagttcttgtctctgtacgagactgagcgcatgatccaggagctgacaagctaccaaattgacacacatgctattgtagtcaaccagcttcttttccctaagcagggcagtgactgtgagcaatgcaatgcacgcagaaagatgcagaagaagtacctggagcagattgaggagctctatgaagacttcaacgttgtcaggatgccgttgctcgttgaagaggtccgagggaaggagaagctcgagaagtaa

SEQ ID NO: 24847 - DNA, 369 bp, Emericella nidulans
atgtctaatgtgaatatgaactgtatacagccctacaacacccaatcccaatccgagaaagaaagccgcccaacgctcgcccagattgacacaatcctccgccctctccgccccgagcaactccgcccctacgcggactacacaggctccctagatgaaggcctctacctgcgtctctgctatgacgactcaaaagaggaagctcacaaggccgtctgggcggtgaatctcgacgtggcgttcgtcggcccggacgggattattcttgacgatagggagatatttggccaatgctcgtctttttcggatgcgttgggagtttttcagagcgggttaccatggtggtgggttgatactgctttggcttga

SEQ ID NO: 24848 - DNA, 228 bp, Emericella nidulans
atgttacaggcctacgcaatcaaacccggctcgttcaaagacatcatcgacctgctgatccccgacgtgcgccgtcgcgggctcttccacgaggactacgcggcacctagggccacgtaccgcgagaatctctacggcaagcccgggcaaagtggccctccggcagatcatccggcagcaaagtatcggtggcatgccggtgtggagggccatcagatcccggaataa

SEQ ID NO: 24849 - DNA, 1421 bp, Emericella nidulans
actagcggttttatcaacgtcctttcggagtcggaggcccgtcaaatactaggaacaatgcctccgaccaatgagacgcctaacaagaaaatggcggctctacgagatatcatgattgccatcggggcgcagtcatcaaagaatgatctgagtccggcaagcaagcgggcagaacggtttttcttcaagcgtgcccagcaatgcgcattcgcaggtatgctggagaatccgagtatggacttgattcgtttgttcattctgctgtccttttacatgctaggcgcttgtcgccggaatgctgcgtttatgtacctaggagtcgctgcgagagcagctgccgctctaggactccatcttacagcggtcactgcattcgacgcagaagagcagcaaaagaggcaagcaatctttttctttggcaacggtacttagataacagatcataggacccgagtatggatgagcctctgcacattagaccttctagtcagctcgattctagggcggccaccagcaacagccaatctgcactccgaaccagcagatgtagaatcgacgccgcaaattggcgctggggacgatcgcctcgtcgcttcacacaatatgacgcggatcctcgacgagatcgtctctcggctatacaacgaaaaggctgcttcaacagaggtagcagagtcgctgcttgacaagctgaaacagtggagcaatgatctccctgaatcgttattatcctcaccaagcacgccacaagagcgcctcgctgcgcaggagcacattatcggcagcctacatattgcctgtgcttatcattttgctgtcatcatcgtaacacgtccattcatggttcaagtcttgggagtgcgactggcacgactacaccaagaatcgccgggaatcatccaagacagcacattactagaggaccctgcgcacacgagactcgccaacgcctgtgtcgagtccgctttgtacatgatccaaacctgcctcgaagtgcaccaatcccgtctcctcctaggcaacatgtgtattcttaagtaagcaattcccaccatatatcaccagcctagcctaacctgcaagcactagggccctcgtcttcgccgcagccctcatccccggcttctccatgttctcgcagaaggagctagactcgaccctcgaggaggcattcaccggggcgctcgagatcctccgcgtcctttcccaacaatccgcccaggctgcgcactacttcgagatcctgaatctcctccgcaacgcaattgacgagcagcggcagcggcttcgggaaaatccacccccagataagaaatacgttagcaagcttttcagtctgaataatcgcagaaatctcgactctcagccgcaaagtgatgtagcggcggcaatgtccctagtttctgaccgtggtgcggctg

SEQ ID NO: 24850 - DNA, 535 bp, Emericella nidulans
atgcgtgagattgtgagtttattccaacaactacaattgtttatccagctgaccatctcttaggttcatctccagaccggccagtgtgtaagtccaccgatctcgagccaattatcctcatgatactgaagtctctctccttcacagggtaaccaggttggttctgccttctggtaagtctatcaacaattctcgttcctgctcgttctctaacactacccaggcagaccatctccggcgaacatggcctcgacgcctctggaatgtaagtaatccaatccaactgcattcttttacctggctaattcagatagttacactggcgactccgatctccagctcgaacggatgaacgtctacttcaacgaagctggcggtaacaaatacgtcccgcgcgcggtgcttatcgatctcgaacccggcaccatggatgccctccgctccggtcccaacggtgctttgtatcggccagataatttcatctacgggcagtccagtgcgggaaacaacatggccaagggccactatactgagg

SEQ ID NO: 24851 - DNA, 654 bp, Emericella nidulans
atggccgaagacgatgctgagaaggccttctttgaggcccaggccatgaatgctggctcgatgggttataacggcgctgaagatcagaatgcgaatgcgtcggactctgatgaatatgatccctcaagcacacttcaagaccagtatcctgctccctcagaaaaccttcaactccaagaaacagacactcccacttcagtttcacaaccccagccatcctttcgcgaagacgcggaccctgctggcaatgcccacccatctcagccaccttcacgacccgagtctcaggcttcgacgtcagtaccggctaccggtgtctctgttcagccgaaaaccagaactatcggtgggtttgtggttgaggatgaggatgaggatgatgcgggggatgcggattatgagccgccagctgtactaggtgtcgaggacatgaatattataccttcgcagcccattccaggaaatgcaaatgaagctacttctacccctgatgtatcattggatgaagctgcgcaggaatctgccagcgcgaagaatgttcctaatagttctctctcttctgtttctctcgcttttaagaatgatgggtccatggatctaggccagaacctgtacaactcacgtacttctttgcagcctgagattgcacgagaa

SEQ ID NO: 24852 - DNA, 890 bp, Emericella nidulans
gttttgacaaggcggtcgaccatctttcagactaccggcctcgcgagcaaggcgatcgtgatcaatccggcgtcgagccgttagtaacatttctcgagctcgtgaatgtcggtgacctcattcttcagatgattgatgtcttctacgagcaggagatgattggatcgaatatcactgatcgaaatgactttttggatccagcggtgaaagagaagaagaagtttgagcagaatcttgacgaacgtgttgcggctgggttgaacaagggaatcgatgtcttgatggaggaggtggattatatccttgccacaagacagctcgcaaccgacttcaacccggatgtctctactgacccgcaccgaaaaaccatggatgtaagcgttaccgaagccgcagccgcagtggtggatgtcgtttcatcgcatacgcagatgctcgtcgggagcacagacaagagtactcttgatgtgttcaaccaggaggttggattgcgtctctttactgctctttgtaagcatctgaagcgccagagaatcagtatcgaaggatccttgaagctgatcaggagcgctctcagctgtatttatttcggctattgctaacgataacaagtgacatgaaccactacttcaagttcatccagagactcaaaaacaacgagctgctcatctactttaaggccttccgagagctatcaccagatttacctcatcgattcggccgatgcaaaggaactagccaacttcattgctgatgcaggccggttctctggtatttggcgagtggaagaagtgtaccagttctcggagaggcgagcagattggtaccaaatcaagcgcgatgtttgacgagctatgtttggaattgggtgcaatgttatggtgatgcca

SEQ ID NO: 24853 - DNA, 965 bp, Emericella nidulans
atctaccggccgatatcatccaagggaaactgacttcgcagtttgaactaccgaaacctgagaacctgctcgtatcggcaccacccaaggcaagcggtgatccagcattgatattgaaggctactcaattgctgaaggctgctagcgctccgctcatcattgtcggtaagggtgccgcatatgcgcgcgcagagctcggaattcggaaattagtcgaccagacacaggttccgttcttgcctacacccatgggtaagggtgtagttccggactcacaccccctgaacgcatccagcgcgcgaagtgccgcattgaaacatgcggatgtcgttctcgttctgggagcgcggcttaactggatcctgcattttggtgagccgccgaaatggtctcctaaagtgaagataatccaggtcgacatctgcgcggaggagatcgggcggaacgctgggacatcagagcttgggatcctaggagatataagtctagttgtggatcaattcagggcatctctttctagctggaaatactcgtcctcagcgaagttcccattgcttctcgccgaatcagccaagaagaatgaagacaaggctcaaaaggctgcccttagacaaacgcccgccggcaagccacttacctatcaacgagcctaccacatcatcaaaacagcacttaatgccttgacacccgtcgaggatggaaatattgtttacgtctctgaaggtgccaacacgatggacatctcccgctccatcttcccgctctaccacccccgccagcgtctcgatgcaggcacgtacgccacaatgggcgtgggaatgggttatattgtcgccgcgcacgaagcattcaatgctaaccccggagcaagcacatcccgccccaagaaaattgtcgccttcgaaggcgacagtgcgttcggcttcagcgcgatggaaatcgaaacgctcgcccggtaccgtatc

SEQ ID NO: 24854 - DNA, 278 bp, Emericella nidulans
gtcagtcctactggccggcccacggagctaggtccgggaccaggatctcgattgccacgggcatccattgctaatgctcccgctgggcctcctccgccgggacaggctccaacccctggcccgagagggaacccaccgcgagatggcaacaatttccgaagcaagacgccgacaaaacaggagcgtggatatggtggaccccccattgacacgactcgcgccatagccggtgacagggagagggagccagcgccaagggactcacccaaagaccctag

SEQ ID NO: 24855 - DNA, 1230 bp, Emericella nidulans
atgggcgatattcacagcatgagaacacctccgcttccatctccggctcaggctccctcgcctgttgccgctcctcagtcccaccaccgtttcttttcccagacactctccagttttgcccacgatgaaagcgcatactcaactggtggcttttacggattggaagatgacagttggaaagctaacgctccgcattattctgccccgttcgaacaggccgcgaatcatcgccgaatacctgcctcaaccaagaaagagaatttggatgcaaggaacagatctgaggaggacctggttcgcagccagccgaccctgaaagaactccgccggcagatggaagatttgcttgcataccagcagatgcgaaattccgagaaccaaggcgcttcagtacctcaagaaaacgctccgtcgcagggttccgttccatccgtttcccaggagtcgaccaagaagagacgaatctcaaatgtattgtcgccgcaagtcgtaccatcccttacaggagcgcccgattcaaccggtttcagcggcacaattagaggcacggattcgcagacaactcctgaagcctgtccagatagaacaccgtcttacccgtttccagagatgccatcgcaaaccacgaaacagaagttcttctcccagctaaacaatggttccttcaagctgactttgcccgccgataaattaaagggcgctgtcgcatcgccgcatgtcccgatcgaagggcagactggcccagggataccttccgcttccaacagcgcctttgtgccgccagaccacaagcctgtggcggaagacccggcctacccaagtccgaacctctacgagctcacgctacaacttaatgccgatccaggccttgaggcctggtgggccaatactgtccatattctgcggactcattatggaatggagcgggcgtcactcgctgtaccgggggactcgacggacctggagaacgttccatggggccagaaggcggtttttaatgaaaatattcctgaaacagacctaccgtatggctcattgaatgacgcaaatgcaactgaggagttagatcggaacatcctcaaacaaacacacaaagaaaaggaggtgtccgccgtgccggaattcgcgaatggacccccaaaaccagccagctccgaggcacgaccgccgctgttagcacgccattcttttgcgggattcggcaaagacagaaagaagaatgacgaagat

SEQ ID NO: 24856 - DNA, 769 bp, Emericella nidulans
agtggccgatcttatcacattaactgttgtgcctggatctgctgccagcgtccgtccttgccctggacgatactacttcctctatcagccgttcagactcactggatgggagagtcacccgttcacgttagggcgctgggagtaccaggtcagagccggtcgcggcttgtcgggctccggccggtcgacgcccagagtgattaaaggagacgagacagtggatgtttcccagatcccgctgttgtcagactcgttttcctcagacgggccgacgagggagtcctcgtctgccaaagaacccagccaggtagtgatgaacctggaactaaccttctggatccgtccctatgacggctggacgcggcaactcagggaccgatgcctcaggtcaccagatttctcgacaaggagcacaatcctccttgaaggcccctacggacacgaatttccgttgtggagatacgactctgtactcttgcttgcgggcggaaccgggattgcctctgcggtaccgtacattcgggatcatattgcgcggtcggagccactcagggctaataagcttggttcaggtgcttattctgacttgtatgacgacgatgtagatgggaatggggagaaatcgcgcacgcgtatcaaagatatgcatctcgtctgggtcacgcgacaagaagcgttcatccaccgactgctctctaccgatctgagaactgcgctgggaagagaggattttcgagggtcattctacgctacttgttctcctccctcc

SEQ ID NO: 24857 - DNA, 2712 bp, Emericella nidulans
atgagcaagcaatactccgtcggcgccaagcgctcggtctttgactccgagttcctcaaagacctcaatcgccttaatcctccggagcgccgggtcccggagtggcacaggaaaagagtgaaaccttggataactttcttagaagagtttctgcggcgaaaccccaagagtgctgaagcacattcagcctccaaccagtcttcgggaataactcgaaagtcgtttgcggagaccatcgatttagctcgccatttgaatgccgctcggacggagctcgatagggaccttttagctcatactggctataaattgaacaattggtcgatggtgtatgccatactcaacgggttactggatgctgcggaggcagtcgcggcagcttcttcttcgcgacgtggggtagttgaggatagggccataagtctggggatctcgctcgacaaattgaccgatgtggatttgttctcctcgccatttccgcggacatcggatattgtcggattggagaccctagattcacttacatataggcctttttcgcgggattactacatgctgctcatggccgaagtctggaaaagcttaggcataataactatatacgctgctgacacatcccctgccaaatccaagcttgccatgtcagtggtctatcgtattcttgcgcggcttcaccattctggtcttgtctccgagcgcgtctacaagtacaccaccccagacacctatcaggctacgttccggcctccaggaatgtatcttctatctactcacattatggacgttctttctgatgctgcctggacggtgcatgaagcagaggttgcggcagaagcagcagccgcggggaaagacgctcccttcctgcctgccaagatcaacattaaggaactcgggcatgagatttggttggagtttatcctttggtgctgcgtcgagcatggacacattaacgaaggaacttggctgcttgaaagattgatccgtcgaaaaggttggaagttccagagttggacgcctcttctccacgaggaaaaggccttgcgcaacactatcataaatcgagaagtctcaacgtggccttcgccagaatctgcaaatgttgcgtccgagccgcccaagcggactgatcccccctcacttttccacggccttggtaagcaaacgattagtgtcgaaatcgttacagctttattggacaacctgcccaatctcattcatatgggaatgggtacaggaggtgtccctgctcctgaaatcctccgtcacatcgataatctcaaatttgccatcacctctgctacgacgtctgagtcggagtttctatcgacaaccaaaacagttaattggtttacaacccgtgtgattgagtccggcggcctgatacccgaagttgatccacaaacgttcgataatcttctcaagctaacacctcacgttgtcccaccatggagcaacggcatgtgtcctgtggaagaggatactttggctgcccttgatcaatcgcaactctacgacgacacgtgtgcctttactggcctaattgaatacaacctgaagtaccactcttctcatagattcactgggaacgctctgaatctgttcgccaggttgcaggctgttatggacacatgcaagatgcgacgtctcgatgatttcttctcgtcgcggttgaaagatgaccgtgcaaacctgcctttcacttatgatggcttattatcctttgaatcgtccattccccagctttcgaacgtcactcttgcccatttatttgatctgattactgtgtcacgagcttttgcattcggcgaatggcttctattgtctgacgacatcgacgggcctacagtgcccgtaaacgcatatggagaccaggctctagcaccttccctcttgcgatttgcggccgccacgaagaatgataacattggggaatccgttgtgcgatcactcagtcagcctgtctccctcaacactcttcgagctattctaaattatcgcatcaccatgcaccagtgggatcaagttatttccactctcaaatacatccgtgataatcgaatcaagacttgggcgcatagcaacatcgccgccattgccgcagagatcatccgtcttgaccacgccctaataatgtcatcggaaaaatcaaattcgcccagcacgtccaattccgacattgaaataaatcttgcagaagcgaaaaaggttctctaccgcatcttattcggcgagtttgacgaaaacccttggcgcaaacgccgtaaccctaacttccaagcacacactctcatcagcttcacccgcctcttccgccacttaccctccccttcgctccacgaaatcgccggttctgtattcgagtctgagtacgttcctatgtatcgccttccatatattccctccccgccatttcacacaattctcgccgctatcgcagaaacccagggcacagccgctgccaaaaaggtctataagcgtttttgcgttagttataactcaccggagttcagtcgtcttgtagtaggtggcatcacgcggttttacgagaaggccgaacgggacttccggaggggcgatccgaactttgacgccgagtattttcaccatctccagaagaagctagtgctgccaaatccaaacacagtgagaattcttacgcaagcggctattcgggagtatcaggctgctacagtcgagatggaggcggag

SEQ ID NO: 24858 - DNA, 291 bp, Emericella nidulans
ccgcacaccgcgcctaccctaagcgacccttcgcaaccatccgatctcgatatcttcatcaacagtgaaccttcctctgcctttggcaaacaagatttcggcttgggtgattcggacatggctgcattcccagactacgtcaacggctctgcgtttgacagcagcttggatttgctccaagggaagaatttctccacagggccctctatgggcgatgacttcttttccttccagttccaagtcgacgaacaagcgtcggacgtcatgtcaagggagtttttcctcgactaa

SEQ ID NO: 24859 - DNA, 384 bp, Emericella nidulans
aaagtaatccaacaccctgccttaacgcctttccgcaagtccctctacctggctctcctgcagatcccgccgggtcaatggacaacctacgctgcgctggccaagcacacaaactccagcgctagggcggttgggacggcaatgcgactcaatccgtttgcgccgggggtgccctgtcatcgggttctggccagtgatggaacgctgggtgggtacatgggaacgccgtctgcatcggtctcggcgcgatcaaagggctccgggaagggaattgaaaagggaggtaatctggagaggaagaggaggatgcttgaagaggagggggtgaagttcgacttgaagggacgcgttatagggacggcttttgtcgcgtttcgttcttaa

SEQ ID NO: 24860 - DNA, 717 bp, Emericella nidulans
tatgagaccatcactgaccttatgggtctacaagatcagattgatgcttttcagaaacttattttctcgcacttccagtcaggaactcacaatgagtgccggatctcggcgttggttcctcttgtgcaagaaagctacgggatttataaattcatcaccagcatgttgagggcgatgcacacaggtaggtttctccgtatcattttgtactcttctactgatcacagttttgttatccagccactggcgacgctgatgcactttcgcctctacatggacgctacgatgctcaacatcaccgcttggtccgattctactatgagtgttcgaacttgcgttacctgaccagcttgattactattccaaaactcccccaggatccaccaaacttactcggagacgaagaagaacgaccagccttgccgaagcggcccacgaaggaggttgaggcagcgccatctcctccaccgaaatctgtggccgctgagccggagcccattaatgatttctggagcaccgaagctcgccggcaacaggaggaatttgaagccgagcagctgcgtcttcagcagcagtgggaggagcagcaacgccaacaattacttgcgcagcagcaagcccagcgtgattttgaggaacaacaacgtttacaagcggagcaacagcgtcttgctcaggaacaacttatgcgcgaacaatatcagagccagacacaag

SEQ ID NO: 24861 - DNA, 906 bp, Emericella nidulans
aactatcatacgaaggctgctctcatcatcctccattcccgtgtcgaacttcccccgtcttatgctaagaactccaacgtacctcgagtgaatcgctgggtatatttcgccgccttgtactgctgctttagaatgattctggctgacatgacctgtgcatagtttaatgtcgagctggaagagacggatgcgttaaaggatcaactcaagacctggagaacatgcgatgccacagacaaccgaccgccgccaatgatcatcgagacgtacttggatacggcagggctcacaaataatcagacacttgtggctttggatgataatgggaaacgttgggatgtgacggaatcgcttgctgcgtcccagagctcgcgaccggctaaagcttcttcatccagagcggtagatgtgatattggagcgatggcgagtagaattgggcgatatgcctggtaaattgcccagtgatcttggcgctatcctgccgacggtatacaagaagagtatcatcctcttccggtctctctttacatattcaaagtttcttccggcttggaagtttattaaacgcaacggtcgatcacgagcacaccctgcgctcagggtcaaatatcggatattcagcggtcatgcccgggatctgtctaaacaggatcacttaactatgcccttgttcgagggcgatacgaaagtggttgacacttacagctttggcgtcacggattctcctgctggcccgttctctgtgcaagtgacgtataggacatgctgcgacttccgcgtcgacgactctgaggctcttctaagctcccagttcatgggagctgacgatgagatcttccaaccgtcgttaccatccgggggtctggacgctagagtaacgccggaagttggatcggcaccgctc

SEQ ID NO: 24862 - DNA, 358 bp, Emericella nidulans
cacgcaaaagaatcctgacgacgtcgtcataaccctctccctccgcacgcctctcacaaaagctcgcaagggcggctttaaagacacagaactcgattaccttgtctacgccttgctgaaggaagtgatcgcgaagtcccagatcgaccctaacttgatcgaagacgtctgcctcggcaatgtcaatgatggcaaagctgcctatctcgtccgggccgcctccctcgccgctggaattccacacacagccggcgcatcctcggtgaaccgcttctgttcttccggattgaaagcagtccaggatatcgcaaatcagatttcgctgggggccattgatattggtgtcgctgttggtgcg

SEQ ID NO: 24863 - DNA, 1401 bp, Emericella nidulans
ttacggcttgatgggctaaccgattttccctacccatagctttctttgacgcatttctgcgaggtacatggtcctacgtcgatcatatgctcgcaggtcctccctttttcctgctcgcaatgctatcccgagaacacaacatcctcctctgaagacacccccgcgacatcccacgacaccgtctcctctcatggccttcgcagcacgaatgccagcggtaaacaatcgccgtccgtcaaatcaccagcgaagcaagtcgacaatgccgacactccgcacaggatcgaagactatccttgctttgtgaaaagtccgtccaatgcgactgagactcagaaactcaacatcttaggcggcgcagacggtgacacctgcgcaagctgtagcttgaccttgcccgaggatgtaagcaaacagctacctcctggggcaccggggaccgcgcgcggcgacgggaaaggcaaaaatggtagtcctgttctgcgctccagggaagtcgtctactcgtgcggcacaaatcattccgatttggacgacagtgcgcacgatgctcacatacatggttctctccccgactctcttcactcatcgtctgtggcttcggatatttcctgccaccaccacatcctcacctacctctctctcaggggcccaccaaaccccgccgactatgcccttctccggcgctcctccatcagaacccttagctgtgagcttctcccgcgcgggctttcctctggtcccttgtgctttggtgactccaatgccggttacacaattgcctacatctttcgactccccgacccaatggcacgcggcaaacgacgcagctatgcgctcgtagccctagctggcaaggatgcgcgcagagcgttccgtgcttgcccaataatctggcgcgctttcgatcgcatcgctacttcaatttacaatgccgcagagaagtttcaagaggacgagaagcgacgggatgagcagaacaacgtggctaaccggcctggtaaccggcagtatacccctgtctcatcatttctcaccggacgcgccgtcgatccggacgggcacgttcgccgccctggccaggtcagagccagaaacctgacggaaatcgtgggcaatacatatctctttgcagaaattcatggaagctttgtagctttgctgcagcaacttggttccatgttcggagctccaccagtttctgaagaacgcttcatctgtagcacagttaatgaagaggaagacatgggccgtcgtcgctctgtgtcatcgacgtccgttggaaaacaaaaagagagcgtgcagaaacgcgatggtggcgatctcggtctgtcgaaacttgagatatcatccggtccgaagcccattcccatcgcaccacgacggtctgtcattgcctaa

SEQ ID NO: 24864 - DNA, 387 bp, Emericella nidulans
ggatctatccagcctttcctggaaatgtcacgtggatcagcgtcaacttggcaggcgactacaagcgcgctgccgggatggctatacatatcgggctgggaaatatggctggaggtacgctcctacaatccctttttggtttattatcgactaatgagtgcagcaatggcctctaacttctatcgtgaacaagatgcgccaaagtataccctcggacacgctctcgagcttggcttctgtgttgtgggattactcgccgtgcttattctgcgcttctcgtacaaacggatcaataagaagagagaggcgatggatcaatcgcaatgggatagctatgaaatggcgaagatgggagatcggtcgccgatgtttaggtatatgctgtga

SEQ ID NO: 24865 - DNA, 582 bp, Emericella nidulans
gaaatctttgtccaaacccccaaccccgcactcagcgcacctcaacgccagacaatatggcccctgccgtagccccatggcgcgctcttttcctcgcgagcctcgaaaagagcaagtcatcctccttctccctggcgtcgatcgcacatacgacggccaataagcccgtccctcgctcgcgcactgtcgaattccgaggcttcttccccaagcccgcgtcaacactgcaccaatctggcatcgaagcactcaagacccagggaattggtctcaatccagatgtgtacgaaagcgaccttttctctatcacaacagacgcccgaatgaagaagatgggacagatcgcggactcagatgatgttgaaggcgtgttctggctcgaggaggtgtctacgcagtggcgggttcgcgggaaggcaatcgcgatcggcaatcctggaaacggtgctgaggagaaggaggcgagggagacggttaggatggcgctgagggtcaagcaggagggggagggcgacatcaaagattgggattgggataggcaggtcgcgacgtactttgcaaaccatagtcaagttatgagag

SEQ ID NO: 24866 - DNA, 1021 bp, Emericella nidulans
atgtcctttccattgaagaatatcaccatcgtcggggtaagtactatcccctccagcccctactttgcatgcttttaacaatgcaaccacaggccagcggatctgtcggccagatcctcctggcagccctcttggaggcatccgacttcaatatcacggtcctcacccgttccaccagcaccgcaagtttccccggcagtgtcacagtccgcaaatccgacttctcgttcgctgacctgcacggagccctaaccggccaagatgcggtgatttctgccgtcggcgcgacagcgtttgttgagcagaagaagctcattgatgctgctgttgctgctggggtgtccaggttcattccctctgagttctctgctgagagtcaaaacgatacggtgcttgggttgcttccgctattccggcagaagaaggaggtgattgattacttgaagacaaagaagaaggatctcagttggacgggcattgcatgttccgggttgtttgattgggttggttcctccaacatatagagtggagatatatttctgacaatacggtgtagggagttgcaaacggcttcctaggctacgacattggctcgcgcaccgcgacaatctgggacgacggcaacaagaggttcaccttcacgaaccaggcgcagctcggacgcgctctggtctccgtcctcagacgtccaggggctacggccaatcggtatctatacatcgcttccgtcgaaacctcgcagaatgagattcttgctgcccttgagagagcgaccgagtcttcctggacggtccagcgtacgaccacggatgtggaagttaaggatgccactatgaagctccaaaagggtgattttagtggtgccttgacgcttgtgagagccacggtgtacggtgatatcccgggattgggaagcaactacgcaaaggacagggacttagcaaatgggctgttgggcttgggggaggagagtgttgaagggacgatccagagggttgttggcgaggccaacaagcagtga

SEQ ID NO: 24867 - DNA, 306 bp, Emericella nidulans
ggggctaatatccttgaaatcgtagccaataagactggctatgtcaactacaaagttgacacaacgaaccttagactcaaccagacttatcccggccctctctcgaatggggatttgtccgaatactcgccggtatggccaaacccattgaccgagggcgactgttcagcgggtcatgggatccttgacacggtcaaggagacatatgctgggactcagcccacgtataactacaccagccctttcccttacgattctaagagtgggtacaacgaagatgttgatgcgacccgcaaaagctcatag

SEQ ID NO: 24868 - DNA, 345 bp, Emericella nidulans
atggcgaagctgaagactcagcagatcggtagcggccgcgcttttcaggcatggcccctagtgggctcgttatcgcgcatggttgagtacctccagctcacagtcgagcatgacgaagctgttcagcaccctttttgccagccttacagagtactcccgccgcctaccgactggactgaagcggaagagcgacggaggatcttctgggccatctttgccctggaccgcttctgctcggtgagcatgggatggaacaccagcctaaccgccgatgatgtccgtcgccgcctgccgtgcgatgggatcacctggcgtaaagagaacccggtcgtgaccccttacttt

SEQ ID NO: 24869 - DNA, 1655 bp, Emericella nidulans
cctggagttctccttctgagtcattgcaggagctccagttcatgatcaacatggccgagcttaccatcggcagtgttattgctcttacggatggtcggcaggccaccgtccggttcataggagctacgagcttcgccgacggcgagtggattggggttgaattgaccgacgacaccggcaagaacgatggctccgtccaaggtgaacggtatttcgactgcgaaccaggcttcggcatgtttgttcgcccaaccgccgtcgcctccgtcattgaacgccccgtccgcacagccaaaccagcagccaaacaatcagcaggcaacgcgccttcccaaagtagaagtcgagctcagagcggtataactggagcgccgggactgaaaagaccgggctctatatcatccatgaatcctaaacgaaacagcgctagttccagcccgacgcctgcttcgaaaggcccagcacaacggctgtctctgaaggtaagcttccacagccggtttatctcagcgtcgctgattctctttcatacagacgccttccaaatcgcctacaaaacagttgacgtccgcaacgcctgccagccgaccttctatcagcggctcttcacgaccctctgtagccgcaccaaaacctcggcctactaccacgaagccctccatgggccctcctacacaatctaccacatctcgagcggctcgtacatccttgtcgggaccaggaaacaagacaaatagacagagtttacagggaactgcgggaacgacatcctcaggcttgtccaagcggccgaccctgcgaccaacacctacgacaagaacatctgaagaaccaagccctgcaacagagggttccgaaaccctttccaatgatgttgaaggtgacattgaggaggatcttggaccgcagcctgcacatccagcacggactagctcctcgcgtctattgtcgggacaatctgcatcgccacgacagtctcagaacatggcaataaacagggagcttgacgaattgaggaccaagctgaaagtgatggaaaagaagcgggttgaagaccgagagaagttaaaggacatggaggccttgcaggccgatcgtgataaactgagaggaatcatccatacactgcaagtgaaatacaagccgcacgagcgtaacttggccgagttggaagcaaagcttaaagaggctgaagcgagagtggaggagctcgagaaactgatagcagaacatgagtcgctaatggaaattgcgagtttggaccgcgaaatggcggtagagatggctgatgcgcataagcttgaatgtgagactctgaagctgagagtggaggagctcgagctggaagtagaagtgctgagggaggagaacgaggaattcgggcagaccatgagcccagaggagaaatccagccatggatggttgcagatggagaagacaaacgaacgactacgtgaagcactgattcgcctccgtgatatgacccagcagcaagaagcggagctgaaggatcagatcaaggaacttcagcaagatctcgaagattacgctgctatcaggtcgaaatatgaggctaccaaagagaaactaatgaagtcggagagtaacctgcaagaggtcagagaacgattggagactggtgagggtaacgagca

SEQ ID NO: 24870 - DNA, 1049 bp, Emericella nidulans
ttgagggcgctgctacaatgaccatcgccattgctgctgcgatcatcctcccggatctgcccagcaacacgcgcggcttcacccaggaagagcttgaagtcgctcagctccgaatgaccgaggatgtcggcgaggccgacgttgactctgaggattcagggccgtgggatggcttcttcatggccatcaaggacgtcaagatgtatatcatgatgctcaccctgacagcttacgtggctggcctgtcgtttaatgctttcttcgtaagtgcattctatcatgatacaggataccattttaacaggcctcttcagccctcgcttacagaaaccctcggattcgcctacgtgcccactctgctcatgagcgctcccccatgggttttctcctgcttgttctcgctttgcgttgcctggagctccgaccgataccaggagaaggtttgtcgagcttagcaataccattaatcatatcgcagagactaacttttccagttctggcatatcgtcattcccatgctcatgggcctcgtcggcttcatcatctgcatgtcaaccctccagactgctgctcgctacgtcgccctcttcctccaagccggctcatacgctgggtacgttcaatactgtccctctccttcgcccacctactaattctcttaaccagcttcatcgtcttctactcctggatcagtacatccttcccgcgcccgccgggcaaagcgcgccgtcgcaatcgccatggttaacgcatttagtcagcttggcaacgttgcgggttcgtacgtatgggatctgaaggagaacgggtaccgcaagagttatggtatcgtcacggcgatgttgggagtcgcgaatgttgggtgtctgatcttcaagctcatacttgaagcgttgaataagaaacttgctgaggcggaggctgtggaggttagtagtggtgctggtgctgctcagcagagtggcatgcatggtggggaaggggacatggatgagagtctgaggatgcataagggattcagatatttggtctgagcgccataagcccgc

SEQ ID NO: 24871 - DNA, 286 bp, Emericella nidulans
ttttggtaaagaaccctacaacttcgatacgttgatcgtaggcctcctctacattccgaattccctggggtatgtggtgtcgagtatattcggcgggcgctggatcgacaagatcatggtgcgtgaggcaaagaaggcgaataggtatgatgaaaaagggaacctgatcttcagacccgaagatcgcatgcgggagaatgcatggctgggtgcgctactctacccagctggactcatctggtatgggtggacggttgataaaggggttttttggcttgcgccggta

SEQ ID NO: 24872 - DNA, 548 bp, Emericella nidulans
gggagttacgccttctgaatgagcgagcctgggctggcgagagtggtactgttccctaaatccttccttcccctcaccccgcgcttcatctaaccgtcgacatccgtatagatatatttcctgtcagcaaatcgctcgattcgtcgctgaaaaagaatacggctttcatcaagcgccttcgcactggtatcaatgctgctgcccagcagacgttactaactgacatccgcacgttgtcgcttcacaaatacctttcggagatcatatcagcatgttacgaggggctttgtaaactcaaatcgcctggagagattactgccggtgttgagattaccagtgccctgcatcagcgatttggtccggcggagttcacccgacaaatcgggtggttgctgggacggggcctgagctcaccggataaaagtcagttgaaaactcttagccaggaactgcgtgagcgcagaggaaaaagaaagactgtctcgccaccgagtattgttaaaggttgtgacggagttgtggctggtcggcgtgttgaggactcttga

SEQ ID NO: 24873 - DNA, 526 bp, Emericella nidulans
cttgtagataaaggaggctcggttgcgtttttgcgaagaagaattgtcatggaccttgtggagaaggcaggaggtgcttttccaatgggttctgagctttggtatccttttgtgacagcctggatgaaaaccaagtacaaagagaagcccgatatgcgcacgctcagaaatgcggtaaagcacttggtagatgctgggaaacttcggcaacagaccttttgtggtaaagacagcaaaggagtcatggttacgaagaccatcatttgtaaggcggaattagcaccagatgacccggtcataaaagagatgcaggagaagatattagcatcaggtgcccgacattatttcccgcctggcgttgacgttgacccgaacctcaccaaacaagggactggatctaagcttgttagggggggtgaaatccccgtcgaacccggcctcactgtgcagctgcataacaaaccggcgcttgtacaggccttggagaagagaaagggggctactatccaacgaagactgaatgggc

SEQ ID NO: 24874 - DNA, 1218 bp, Emericella nidulans
atgcccgtgatctactccgcagcaagcttcccacctatgctgtgccaacggtgttcattccgcttaatttgcatgccattgaatcccaacggaaagattgacaagcccgctctgcctttccctgataccgccgaactcagcgcggccgctcctcaacgcaggccttcagccttgaagaacctctccgagaccgaacaggcactggctcaaatctgggcttcgcgcatctccaacgtcactgctaccatgattggccctgatgattcgttcttcgatctcggaggacacagtattctcgcgcaacagatgttcttcgaccttcgacgcaagtggcgcggcatcgacattagcatgaatgccatcttccgtagccctaccctccgcgccttcgctgcagagattgaccgcctgttgagcgccgaatcctttaccagcaacaatgagactgctgcgaactccacagcggccgccaacgagcccaacgacgagtactcccgtgatgcccgcaaactggtagacactttgccaaactccttcccaacccgcacagaggacatgctctccgctgaaccgaccatcttcctcaccggtgctaccggtttcttgggtgcccacatcctccgcgacctcctcactcgcaaatcaccttcagcgaaggtaatcgctcttgtccgtggcaagagcgccgagcaagccctcgcgcgcatccgctccacttgccgagcctacggcttctgggacgaatcctggacatcccgccttgagtgcatcaccggctccctcggcgacccccgctttggcctcacagacgcctcttgggacgaccttaccaaccgcgtcgacgctgtcatccataacggtgcccttgttcactgggtctacccctactccactcttaagccggctaacgtgcttggcactattgacgccctcaagctctgtgcaaccggcaagccgaagcagttctctttcgtcagctcaaccagtgtccttgacagcgaccactacgtccaggaatccgagcgcagcattgccgccggcggtgctggtatcagcgaagatgacgacctggaaggtagcagcgtcggcctgggaaccggctacggccagagcaagtgggccggtgagtacctcgttcgggaagcaggcaagcgcggtctcaagggaacgatcgtccgtcctggttacgtcctaggtgattctaagagcggcagtaag

SEQ ID NO: 24875 - DNA, 402 bp, Emericella nidulans
gtatactttggtgatattggtcataacggcgcaactgtcaaggagtacttcggccgtaatggagctccttgccctcagaataccaacccggctgagcacatgattgatgtcgtctccggaagtctcagcgtagggaaggactggaatgaagtctggctcaccagcccagagtacactgcgatgacccaggagcttgaccgtattatcatggaggccgcatcgaaacccccgggcacccttgacgacggtcacgaattcgcaacgcctatctggacgcaattaaagctcgtcacgaaccggaacaatgcttcactctggcgtaacacggattacatcaacaacaaattcatgcttcacgtcatctcaggcctcttaaatggctttttcttttgggaaactagg

SEQ ID NO: 24876 - DNA, 1083 bp, Emericella nidulans
aatcatatcccccacacgtggcggcttccgtcaggttcgacagcaggtcctcacaagcgaacctcctttacctggacaggctcatccccaagcacaaggcacaccaaaaataccatcaccatcaagtaggccaagaacggaattgattttttcttcgcccagcgaaatcatgcggaagcgttcatcgatattcttcattctgcggtgcccgtggaggtcacaaagtcacagcaaatcatttccgaagatatccacacctcgaccaaatcatacaaattcacctactctgccaagattgtgcctatctgcaaggacgatctagttgccctaccgattaaactcgcaaagcagcttggcaacatatcaccgctgcttctctgcaaccgaattggtacctcaattagtttcctggatcccaacacacttcagagcgccgacctaaattcccggatatactggcgatcaccgttcacatctctagcagaagcgaaagatcttgttgaatttattgtcttggatgtagagccaacagggcattccagggggaaatggttccaatctgaggtaacggtcgcccgagcgtccgacttcagtggcgacaaacaatactttacgaggacgcatctcggcagcatcatccacccgggcgattccgtgctaggttacatgttgactggaacgaatttcaacaacgcccagtttgatgaaatcgagtcgtccaatacgtacagttcgaccattccggacgtcattctcgtcaagaaattctaccctagacgctcgaagcacaccaagcgcaactggaagctcaagcgcatggccacagaacacgacccctaccttctacccaacaataaagaatcagtggagaatgactttgagatgttcttgcgcgatgttgaagaggaccaggagctacgggcgacgttggcgttatataagaacaagaagaaggacgacacgatgagtgtggcggacaccgacatgatgaacgacgacgacgatgaagttcccaagatcagtatggacgagttactggacgactttgatgacctcgaaattgacgacaacatgcaagattga

SEQ ID NO: 24877 - DNA, 679 bp, Emericella nidulans
tgcaggcctatctccaaggcctgggataccaccttgaagggtacctgcgtcaacattaacgtcttctacttggccaacgcagcgctcaacatcctcaccgatctgctcacgtatacgctgccagtgcgggtgatcttcaagctccagatgccacgcaagcagaagattgctctcgttttcatcctctgtttgggacttttgtatggctcctctcagcgacgctcgaggtgacgcttgctaacgtgataccgacagtgcctgcgtctcctccatcgtccgtatcacctacatccccaccatgctctcgtctgatgacgcaacctgggccatcagcggcgccatgtactggtccgccatcgagatcaacgttggcatcctcgccgcctcaattccctccttcaaagctatcgcctcgcgcttcctcccccgcctcattggcgagtactcgtccaacaaggcctacaattacgcgtacggtgcaggctccggcttctcaaaggtccgtgatccgtcgcggaaccagtctgtgcatatgcatagtctgcgcggtagggccaacgaccacacggttattgggacagggaatcttagcgggatcgatcggtcgagcgaggagagaatctttgtccccgaaggcaagatctatgcccatacggagattgaggttcggcaggactag

SEQ ID NO: 24878 - DNA, 926 bp, Emericella nidulans
aatcttttagaaatatctgtcctttcactggcgcgctcggcagccttattctctcctattatttacctacccacttccttaccaacatctcagatgccaatctactcatgatgtctgaagtccgccagagagccggtgtccccaaggacgcatctaggtccacttctacaactaaagaccgcggtaatgatgcgcaatctagaactcgcagcggcattagcatcctcgacatcttccgtgtgatggtctctttggcagtcgtctcctgcggtttatcatactatctcaccgaaactgtaacatgggggtataacccctggttcacaaactggtcacagctggtgcgatatgttgtacgtctttcccccgcatctaaccagatgaattcattacccgcttactcgacgttaacaaacttatagaaaggcccaatagccttaacgccatcagagctctccctctacgacggcacaaaccccgacaggcccatctacgttgccgtgaacgggaccattttcgacgtgtccgcgaacccacgcatgtacggtcccggtggtggctatcacttcttcgccgggcgcgacgcaacccgtgcgtttgtaacgggatgttttgctgaggatctcacggacgatcttaccggtgttgaggagatgtttatacctattgacgagccggaggaattggaaaagttgagtagtggggaaaagaaaaagaggcgcgaacaggatatgcggaacgcaaaaaagagggtcgagaagcaaattgcgcattgggtgggattttttggaaagcatcagaagtattttgaggttgggagggttgttaaagatgacacggagaaggatgaaatgaaggggaagagggaactttgcgaggcagcaaggaaacaaaggcccaagagggagaagagtaagagtgcctaa

SEQ ID NO: 24879 - DNA, 785 bp, Emericella nidulans
gaaccccgatccaaaataacgtgttggagttgtggtctctgtttgacttcctcatgccgggcttcctcggcacagagaaggtatttttagacaggttcgcgaagccgatcgccacaagtcgtttcagcaaatcatcgaaggaacaggaggcgggcgctctggcgattgaggcgctccataaacaggtgcttccgttcctccttcgccgtctcaaggaagaggtattgaatgatcttcctccaaagattattcagaactactactgcgatcccagtgaactgcagaagaagctgttcgaagatttcacgaagaaggagcagaaggccctgcaagaaaagatgggaagttcagaaaaggccgataaggagcacattttccaggccctgcagtatatgcgccgcctttgcaactcgcctgctcttgttgtcaaagagggacacaagcagtacaatgaggtccagcaatacctgcaagagaagaaatcttatctccgggacgtctcgcacgcgcctaagcttagcgctctgaaggatctgcttctggactgtggaattggtgtcgagccgactgaaggcaacttgggggcaggcgctagctatgtcagcccgcatcgagccttggtgttctgtcaaatgaaagagatgctggacattgtgcaaagcgaggtgcttcagaaactcctaccttctgtgcaattcctccgtctcgatggtgccgtagaagccacccggcgccaggacatcgtgaaccgattcaattcagaccctagctacgatgtgttgctc

SEQ ID NO: 24880 - DNA, 1553 bp, Emericella nidulans
gagacaatggctccaaacgctataaccgctcttttgaaattcctctggggttacccgaacggatcactggttattctcaatgaacaccaccagcggatttgagcactgcacatctgccggcctctaggtctccactgccgtatactttgggggatatctcggtggctccgccgctagttgggcgtccggtgctcaagcactggggctcaagtcgacctttatcaccggcttgtgcttctacgcctgcggttcgctgattttctggccttctgccgtgttgacatcatattctgcttttctcgtatccaattttattaccgggtgcgggctcgcaattctcgaaactgcagcgaatccgtttatctcgctttgcggaccgctcgagaactcggaagtgcgattaaatatatcacaaggtgttcaagctgtcgggagcgtcctctcgcctttgctcgccaaaaaggtcctgtttcgcagcgtgaccgatgtctcctcgctggttgatgtgcagtggacgtatcttgcaattgccttgtttgacgtgctcctcgcactggccttttactacctacccatcccagaggcgtcagacgaagatttggaggaacttgctaatcgccgacgagacgataaccgcaccgccccccttcggaattccagttgtttggatgaccctcgctttgggcatttggtcccagtttttctacgtagctgggcaggaagtcttctctacaggttttggggctctaatcgcgacggcatatgcggatcctccgctcagcgaattcacctacctcacgattggccgcgccatcttcgccgtcggtcgcttcctcgccgccttcctgcaatggtttctcaaaccacgatggatcctccttctttcatacatcggcatggtcgtcttcgccgcattatgtatgcataccactggtgccgcagccatcgccagcgccatgatggttttccttttcgaaagcggcaccttcagcattatttttgctattgcgcttcgcggcaccggccgacacacaaagacagcagcttctttactcaccatcgctatcagcggcggcgcattcctaccttttgcgcgatatggcgcgcaactagcagcaaatagcacactcgattcatacagcgtcctcgttgcgctgtttgcagccggcgctctatttccggtttaccttaatcttgtcccagcggctaaaaagcaggtggaccccgtgccgaacgaacacctccggcatacccgccggcgcagccgccggcagggccgggcacaggctgctaatgtccttccttccgagaaagctaatccctctgaaggtggtgttctttcgcgccagcgcagcgtcctcgacgatgcagacccattgcctagcgtggacttctctagtccgaattctgtggcatcaagatcaaggtcggactcggccgagagtgactcaggcgctgatgctgactctggcgctgatgctgacgttgtggattttcagtgcacgcggacaaaggccgtttctagtacgagtgacgaaatgtcacgtacatag

SEQ ID NO: 24881 - DNA, 225 bp, Emericella nidulans
acgcctccattctcgatgatgacgcctcgtttgagactcgctggggttttggcatcggggctcctggtggcattgctcacgtctagttatgtcttcatgaagatagcaaccttttctgtaggattggccttcttcggcgacccgcttatccaacgaggcattcagtatctcaaccgcgagtatccgcactggaaggagttgtcgcagttgcaaaagtatgtattt

SEQ ID NO: 24882 - DNA, 1381 bp, Emericella nidulans
atggaggctctcggatacgacagccagattgactcgcttgtggagaaaggctatcttgacgaagctataagtcttgcgggtatgcttgaagatgcgcttctcaagaataaagaaggcagaatacgagagattaaactcgaaaaggccgagggaatgttcaggctacgaaggtacctccaatcaatggagctctttacagaggtctccgcaccccctgagaccgtcattcaactgtaccctaggattatcgcgggcgacctcacgtctattagcgaagaagatgaattggaaggaagcatgacagagagccaatctaaactccctgatagtcaagctcaggctgaaggaaacggctcagaagagacaacacccatcaaagctttaaatcatacgccgtcaatgatgtcttttcttcggagccgagatgaagggagcggaagtgactcaggcagcgtccgtggaaagccggaagaggcacgtcttgaaaagcctctaaccgggaaagatctcaaacttgcagttcgtgagctacaggcatatcttgctgacgttcgaagacgattccagcggttcttgaaccccgatggctcactcaagattgacccgcaaactcatgcagcaaaggacgaatatacggattctgtgatgaagttactcgacgtaggcgaggatgacgaagactacgaccttggagagaagcttcgcgagaaaccaagacttgttgatacaaccctcttcagagtttacatgtacgccacaccttctctagcaggctcgctcttccgcattgccaacttctgtgacccagaagtggtcatggagaaactcgaagagacaggccggcataacgatctcattgactttctgtacggaaagaagatgcaccgccaggctcttgagcttctcaggaaatttggccagtctgaatcagaagaagaaacagcgccgcagcttcatggacccaagagaatggtcgcgtatctgcagcatctacccccggagcacattgaccttattcttgaattctccgagtggcccatccgggaggaccctgaccttggcatggaaatcttccttgcggatacggagaatgcggagacgctgcctaggcaaaaagtacttgattttcttcagggaattgacgataagctggctgttcgttatcttgagcatgttattggagaactgaatgacttgacgccggatttgcatcaaaggctggctgttttgtatctgaaccggttacagaaacaccaaaacagtaaggatggattcgcaacagaagatgaatacaaattctggcgggagaagctcattacgatgctaaaaacgagcgaccagtactcgccgtctaaaattctggctcgtctggatcgtgacg

SEQ ID NO: 24883 - DNA, 1306 bp, Emericella nidulans
cgtcaagggtcataacctagggctccttttcggaaaaactaaattccgtgttatgccgcaggtggggagtcagcataaagagtacaatgcaagaaagctgcaggcccgccgaaaacgcgccacaaacaccgtcaaccagctaaacgctcctaggcttcgacgttcttgtttctatggcttgtcggtcttagagactgtcacatacattgaacttgagctataagttcgccttggagctactatctcggtgttaatagatcggggctcctcttgcatttccgttatggctcacgtcattgagctggcgggggagtcaaatcctctgacgccgcagaatgtcctgaactccttgacgcaagctgctagctctacgcagcagcaggttcagaccggtaccaagcagctccagaactgggagaagcaggaaaagtactatacgtttcttcaggtatgcacttccaacgggtctttgctctagaggttttacagttttcatatttgaatgtactaacctatgtaggatgtgtttctagaccagacagtccctaatgaagctcgatacctcgccattatacagttaaagaacgggatcgacaagtattggcgcaagacagcaccaaagtagggacacctgccggacaaaggaatcgcggagcttactgactagctttgcagtgcaatcaagaaagaagaaaaagaccatatcaaagtcagggccttacaagccggtgttgtcgaaccagcgcccctcctggctcttcacaacgcgttcgtgctcgcgaagatcatgcgtcttgagtacccgcaagaatggtgaggagtgcagtctttctcacgtactggtaacttgttgctaatatgttaaaggcctgaaggaattcctgccgtcatcgattccctccgcgcatctgtccaacctggcgcgaacccgttgcagttaccgcggacgcttattattctcctacaaatcgtcaaggaactttcgacagctcggttgcagagaacacgacagagcctgcaatcaattgttccagaaatacttcatgttctcggtggcatatacgtggataaagtgaacacatgggcccctgccctggagcagggtaattatggcactgcggggcttccggaagctatggaacaaagtcttattgctctcaaggttctcaggcgcctgcttgtggctggatacgagcaccccaaccgaaccaaagacgcccaagagttctggcttttgacacactcccagttcagcagactgtttgcgctcatcagcggctctgtggcacacccgaagaagtcagaa

SEQ ID NO: 24884 - DNA, 713 bp, Emericella nidulans
aaaagggacctttaagggacttccaaatgagttttgccaatacacggcccttaaccgatttgtcattcagacctcgcaagctgttgacctgatcggaggcggcgtgaaaatcaacgctatgcccgaagtcgtcacactctccgtaaactaccgcgttgcgcatcaccaaagacccgtcgatgtccagcacagggccgtacaaataattgccgacgttgtcgacaagtacggcctgcgggtcgatgctttcaatggggacaaggaataccatgactatgtcgccgggctctatcgcagcgactcgctctatcgtaacgacctcaagcgtcgtgataaggtcgactataacggaaccctcgtggtcagcgcctttggcaaaggcgaagccgctcccatctctcccactagtggtgctgtatgggagactttttccggaacgattcgacatgcttttgcgtcaggtactaaaaccgttgttcctgttggagacataatgaccggtaacacagacactacgcattatctgagtaagttttgctagggctagttgacaggaaacatagacactgacaataaatcgggcaggcctttcccgtgatgtttacaggtggacgccggctattgctagggcagaggataacatccacactgttgatgagcgtgtgagtatccatgatcatctaaacgcggtaaggttctactatgactttatt

SEQ ID NO: 24885 - DNA, 258 bp, Emericella nidulans
atggcaaaaaataagaccaaaactagcgtgctcttcctcgcgaatagcgagcatggccagaccaacatcgttcttgcaattatccacgagctcctcgtacgtggcgggatagacatccacctcgcctcgttccctgtcctcgagaagaggctgaacaagctcctccacgacaacgagaccgcgtacgataataagtacagcacgcgcatccacttccaccccgtgcgaggaccgtccaagacggagatcataatccgc

SEQ ID NO: 24886 - DNA, 1203 bp, Emericella nidulans
atgtctttcctaactgcttttatcaactcacgaactgatgcttctcaaataccaaatctccgtgcgaccttcccgcacgacttcttctctgacggtcccgagcctgtccgtttgcaaggtgaacgtgccgccaaatcgcctcttcggtctctggatgccacgagagccatcttcgatctagctttgtattcgcaagctgcttgggctgcagcagaaagccaaatgcttattaaagctgtcgtgcagtatgatctgcccgtattcttgtgctcagccctagctttaccccagccttggaccagtgtccagcaaagctttctcctccgcactcttgctgtttttatcatgaaacaagaagagggatatcaacttgctctccacggcgcgtggcgtcaggataagcagtgggtagcggatcagctctttgccatgtttacccaggatcccacctccaccgcagcaatttatgaacacgcaattgagtataactggttggagtaccttcttggatatacaaatggtcttgccatggaccttgcctgttacgctcataggaaaggtccgtttgaactggagcagtgggttcgcaatgccgcatccaaaggtcttatggacatgggtacacttctatccaaatacctccgtatcaaggccgatgatgagcttcgtgtccagaggagggaacagcttgcgccccagatggtcagcttgtcggtcaaaacagtctttacactgctgtcggttctagaagaatacgtcggagatccccagaacctcacccctgtgcaacgaatttgcatccaaacttatccccgactaatcaactacggcgaaggttttgatgatatcatcgatgcgaatggcgaatctgggaatgcattgcccgaacctgtggacaagaaaatgcaagagctgttcggcaaaatgtaccatgaggagctatctctgagagaaattcttgaactcatgaggcaatacaaatcctctcgcgaccccgcggagcaggatctgttcgcctgcatggtccatggcctcattgatgaataccattgttaccacgaatatccgttggaggcgctcacgaaaactgctgttatgtttggtggtatcatcaacttccgtcttgtaaaaagcatcactctgaaagtaggcctgggcatgatactggaagctgttgagaacatacaccatgatcgagcgtac

SEQ ID NO: 24887 - DNA, 327 bp, Emericella nidulans
gtcagtcgagcaatggatcaaatttcatcgtcaattatgacggctcctcgttccaattggcccaagagatctttgacgatgggacgatcattcgtggactcgacgttatccctctagccagtgaccatgacgacagtgatcttttgaacaatgacctggctcttatgattactggtcaaatcgctgtcccagagtttggcactgcctcagctgcgttgtttaatggcaccaccttgattccctttgtcatctcctctaaatctgatggtcaacctggccgtatgtcgcgcatgttctatgagaacaataacccctacgctcgaggaa

SEQ ID NO: 24888 - DNA, 722 bp, Emericella nidulans
atgtctccgctcttgctcagcccgctcgaactcggcgcggacgttgtctacgagagcggcacgaaatacctgtccggccaccacgatgtcatggccggagttattgcagtcaacgacccggccctcggcgagaggctctactttccgatcaacgcgtccgggtgcggactgtcgcccttcgactcttggctgctcatgcgcggagtcaaaactctcaaggtccgcatggatcagcagcaggccaacgcacagcggatcgcagaattcctggagtcgcacggtttcaaggttcggtatccaggtctgcgctcgcacccccagtacgacctgcaccactccatggcccgaggagcaggcgccgtgctttcatttgagacaggcgatgtctctgtcagtgagcgcattgtcgcgaacgcgaagctgtgggctatcagcgttagctttggctgtgtcaacagcttgatcagtcttccctgccggatgagccatgccagtatcgatgcaaagacgcgaaaggagcgtgccatgccggaggatctgattagattgtgtgtgggcattgaagacgtagacgaccttattgatgacttgaggcgagcagtaagtgtttctacgcgtaatcgtgttttctgggttatgctaatattctctagctggtacaagctggcgctgtcaacgtcactctggacggcattgaagcgaacacgccgcagtctgcgtag

SEQ ID NO: 24889 - DNA, 1497 bp, Emericella nidulans
atggcgtttccggaccttcgtcgaccacgaactctactatatcctcccgcgaacctttatctttcctcctcctctcagcgcctgcgtaattccacctctacttcgaattctcgtgtatcgtcccgatctcgaaagcgagcgcttgatcgcagcccagaccgatctgctacaacaagtccgaaccctggcccgggaaaactcccctcccagaccatcaaacctcttgtccttagtcctcccacaaatgtcgagccgtcctccgatccgcctagtccggacaagtccagtatgccgttgtgggccggttcccggcggtcggagcaggagcctcatctgccgaatacatctagcaagcggactcaggtttcaggtgatgaatttgctgccaaatcagagaggagcgcgcctcgttccgtaaatagagggtcaggcactgctcttgaaacagttcaggaggctagcgatcaatctacaccttcaaccgacactatacttcttcagcccgcccaggaagatgctaagctggaaaaaatcgacgaagacgcgaccccgaaagcctcaagaattcatacagaaagcggcagcgacagcgggggaaataaaagttcagagcaaatggaagaaaaccgtcggcgtccgccgtttgcgtcaaagggccccaacaccatcctcccaaaacggtctacgacatcactgagcggcggttctcgttccaagcctgcagacggctctgttcgaaatatgatcgtcgaaacggagactgtgagttctatacctcaagttggcctgggcgtaaacaccggcgaacgaggcggccccagtagggtagacgcgggaactttgcggatgaaacccagcaccgaaaccatccggcccaaaaaagaaaaaagacgctctcgcaagccggctgcccttacgagtggggctgcgtcttccaaggccgatatattcgaagccaaggtagccagcgctgttgatgaagccgacgtttcagactcggatgagacttttgtttatgagtccaatccacaagaccaatacccggtccgccagagcaggtaccattctagaacaccaagtgcaacgtcaatggcaagtcaggtggatcagctggctggccgtagtcgcgcagcgatcagggaaggtaatcacagtgttacaggcaagcgcagcatgaaattcacaaacaacacgtatacaagcagtgtggacggggatgtcgacgaagttccgcgttctcactcgaggattgatggcaatggtacgcacactccccggcaccacattgggcgtcacgggcgacaaaacatgtacccgtccttgtttgacaacgagtcgccgttccctcaatcacagggacacaaatctactcgacattttgttgggagtagttatagacaagctaggtcgggtggatctcgcaacaacccaaattaccgcaccatcaatagttataaaaaagcgggtgaagtgtacggctacgattttgatgctgaa

SEQ ID NO: 24890 - DNA, 332 bp, Emericella nidulans
atggctgcggtgagtttgtctctatagtgtgtcttatcattcttcattgctcattcctgagatagccaatttctaccgtcgcggagtccaaggaactccggggtctgaacctcatcgctgctcactcacacattcgggggctcggcgtagatgttgactcgttgcaaccgagaccggcttctcagggtcttgttggccaggagaaggctcgaaaggcagctgcagttatcctccagatggtcaaagaaggcaaaattgctggacgggctgtcctaattgcaggcccgcccagcacaggtaaaacggctattgcgatgggtatggcacagtcg

SEQ ID NO: 24891 - DNA, 762 bp, Emericella nidulans
atggctgaagccaataccaactccccggcgcctgccccggattctggtgaggcgcctgttgagcgcgcttctgcggagctcaaagctagcccacaggagtcggcgtcagagcccaccaaggagaacacaaagaaggacgccaatggcgcggatggaaagcccgctggtgagtgcagtttacgcttgttcagggcctactttctgccgatgtcagatggcgatcgcgtgtacctatgctgtaccctgtgtcgggtggcttggctaacttgttatgcgtcatacagaaagcgcgcccgctcaagatgataaaaaagaatcttccgatgacaccgctgacaaaactgaggcgcccgcagagcctgccgaggcgaagaagtccgacgagggtgctgctgcttcagcagatgctgagcccgctgccgcaccggaagccaacggagcaccgtcatcgaccaaaaaggcgtcctctaagcgcaagtctacgggcggagataccaaatcgaagctcaaccgcaagaagtcgatgagccgcatcacacatttggatgccaaggctggcgaatactacctcgcgcgtcttcgcagcttccccccctggcccgccgtcatctgcgacgaggaaattcttccgcagagtcttctaagctcgcgtcccgtcaccgctcggcgacccgatggaacctatagagaagactacgccgatggtggtaagcgtgtcgccgagagaacattccctgtcatgttcctccagacaaatgagtt

SEQ ID NO: 24892 - DNA, 582 bp, Emericella nidulans
atgcttccagatctgagtcgtcgaagaaaccggcagactgccggacctacgttagggtgttggaagatctattgttccagctacgtataaatgttgccgtagccaagggatttgaggagctcaagctgcctgggcaacgtggatcggagtccaaaaaatatatcgatctttggcccatccagatgtctgctgaaataaacgccaacagtgaaacgaaacgaaacattttgactacgaacttcgacacatacacactgatccttcagctaggttgcattctgaatactgttccttcgtggaaaaaggcatataagctgagggtagctgttttcgtcgagtatgaaattgacgttgaggatgagagaaagagggttgaaaccctccttgagaagttacggattgaagcggaaattctggtcttctggctcgcatgcggtgatttgaaaacataccgcatcatagtcaatggagacccccttccagaatgtcaggacgtccacgagacggtccacaaagtactgaagaatgaaaattggtgggaggatgttcagcgaggccgcaggagctcagacgagtcgttag

SEQ ID NO: 24893 - DNA, 1164 bp, Emericella nidulans
atgccgcaccttgagtccaccccagccatgcctaccgttgtcgccaaaactccctcggccgttcctcccgctccccaggagatttcttcccttcttcagacgatcttcaacgccgagacttctcagcagtcgcttgatgcctcatatgcgctggccaaccttctgatccagagcgtcggcccgttctcgttttcccaatatgattttatcctccctgaaatcaagaaggctgccctcgacaagaagaatggcgccagacgcgaaagcgcgatgctaatcctcggcgcgctggttgagcgtttccctccggctcatccccttagtgaagttgtcttccttctccaagacggtggtgttttccacttggccctcgatgcgctggccgacaagggtgccgtcgtgcgggatgccgcccagtacgccatcgatgccttgtatgccgccctcaaacccgaggccaaggtcaatgcgctactccctgccatctccagctatctgagccgcgggaccggcaaatggcagggtttcgttggtgcttactgtctcattgaaaagatggcccttgatgcgcagatgggctcagggaccaaggaacaggagctcgagaaggatgtcctccgtgaggctatgggcaagactctgaaggacctcatcccgttggtcgagtctggtatgcacgatctcaaaaacgatgttgtcaagtgcgcctgcaaggccatgaacgccctcaccaccctcctgtccaacgacgatgtggagccccgcatccccctgctcatcaaaaccatggagcagccctccgagcagaccctgcagaaggctatccatgccctatcgcagacgactttcgtcgccattgtcacttctcccgtgctggctctacttactcctctactagagcgctctctcaatgcgccaaccactcctcaggaaactctgcgtcagactgttgttgttgtggagaatttgaccaagctcgtccacgaccccgccgaggctcgtactttcttgcccaagctcaagcccggtgttcaggcagtcaaggaccgtgcttctcttcccgaggttcgtgagctggccactcgcgccatggatgttatggaaaaggccatggcggacaaggatattgctgccggttccgtggccaaggttactcccgatgag

SEQ ID NO: 24894 - DNA, 324 bp, Emericella nidulans
atggtgctttacggttacgatgcctctgtatacaattccgtccaaggttccgacaactgggtcgcatactttgacgatccggacgcaaacctgatcggcgccgtcaacactgcctatactgtgggtgccatttttggaggattctttctgggcggtccatgtgccgactatctgggtcgtaaaatgggcatgggcatcggctgcgttctcgtcatcgcatctacattcatgcagacctgggctcctcggcacaacctcgggtgtttcattgctggacgtaccattatcggtgttggccagggtatcgcattgagtaagtcaccc

SEQ ID NO: 24895 - DNA, 770 bp, Emericella nidulans
aaaatggcccacggccaggaagattgcgcttccgtactggagcagttcgtccacgatgtcgcgaaccttcctctagagatcaaccacttgatggaagaaattcaagcaaaagacaaaatcattcaggagtgccgcgctattattaactcgcgcgacgccagcatccagaagttcatcaaacttaacggcagtctcaccccgaaccctaaagaagaacaatactcgaagatcgtcctccagaatctcgacaagtcaagccagctgcaggatgagaagatccagttgagcgagaaggcgtgcatcctcctggaccggcagatcaagaaactcgatatcaagatccgcgacctgcaaaacgacggcgtcctttccaatgatcctcccataccctctctcttcaacaataaagaccagtaccgcgacccgcccaagatcttctttcccgactcctccaacgactccgcctcctacacatctcctctcgctgcatcctccggcaacgcaaacccgacaccccgactcagcctctccctcaaccgccctcattccgcggccgctctatctcagactgcacgcagctccgcgcccgcgaccccagccgcaaccgcgcacttccagcagcgtcagcgtgaatcatctgccggcgctatcgatagcaagcgtcgtcgtctaaacgcgacgctcggctcccttcctgctgcctcttccaacaacacaacaatcatccctcggcccaggaactccgaaagcaggaactccggcctccagtc

SEQ ID NO: 24896 - DNA, 460 bp, Emericella nidulans
cagacatctacctcccgccttctcaaccctctcagtccagcaatgaaccaatccactaccccgtccgtaggtcttttccctcatttccaccctaacccaggcgcgataccagatactaatggaagggacagttatcaatattcacggtggcgccttcatgctcggccacagcaggatggtctccctcgcgcagatatccgactgtctagctcggaactggatcgtagctgtcccgaaccaccggctttgtccgggcgttgatgtgctctctggaccgatggcagacatacgcgatttcctcgcgtggatatatgcggatcaagatgggctgaatgcattcttggagaagcaggatagagacggaaatggcaatgggaaggggaagtacagagttgctaaggatagagtcatggcattcgggacgagcagcggaggtttcctggcgcttagcttggtatgc

SEQ ID NO: 24897 - DNA, 654 bp, Emericella nidulans
atgttcgaaaacgtccccttaccccagtctcctcgatccgagacgagtacaatcgtcggagaggaggtcgagatgaaaaagggtgtccaaatgactatctgcgagcggttacaccactttacatgggcatggttcaccctgaccatgagcacaggaggcctggccctcctcatctctaaccagccctttcagtttcagggactcagagaaatcggattggcagtgtacatcatcgacctcctcttcttcgctctctgctgcttccttatggccctccgctttttcctccacggcggtttcctcaaatccctccgacacgaaagagagggcttcttctttccgaccttctggctctctgtcgcgaccatcatctcagggttgtacaagttcttcggcgaggatgcagatgagtcctttcagctcgccctcgaggtcctcttctggatctattgcgcctgcaccctcacccttgctgtcgtgcaatattatttcgtcttctcgtctcacacctaccaccttcaaacaatgatgccctcctggatccttccaatcttccccgtcatgctttctggcaccattgcctccgtcatcgctgagcagcagcccgctcggtccgcaatccccattgtctgcgcaggcattacattccagggt

SEQ ID NO: 24898 - DNA, 831 bp, Emericella nidulans
gtccagcgtccgcgcccttcgcaagaggctctccttcgactagagaagggtacggcgtctcccaacattcagctgaacgaggccgcccaaattattggactcgacttgtcgttatgcgccagccatccggagatcaaccgagcccctcatgtcccaatccacgcggccccgaaggaagaatgggttttacgatggttattaaagaagctcaaggctgccaagaactatcgggtcgagcctgcatcttttcttttgttgcggcagctgattgacctcatttctccgaagacattggcgtcgacgcttaaagaccagaagttcatcggcatcctagaccatgcgattacggacttaacagacgatgtcatatctggatctggaaatgggacaaacgagctactgccttcagattccgaatccagccaaactttgagtgaaggatctagcaggaagggcacgaagcggaagagaaccaatgggattgagcacgattcgatggacgttgacgagcagccaagaacgcctgtctcatgctttttggcttttacacgtctccttgactgcatctatagcttggtcacactggttagcggaaaggacggcgttgatgaaactgctcgctctcatctcaggcatgctctcaggggcgaacctcaaccgatcgcaattacgctgggcaaatcatttacccttgcttctctcgcgattactcagttctccaatgctcggaagacgacagagttgcagcatttgttctacgttcttcctgctctcttggagatctgggagtggagatcgtaccgccagggtggtgcagagggatctggtaat

SEQ ID NO: 24899 - DNA, 1572 bp, Emericella nidulans
gatcgttgcgtttcgcggcgccgcaggaccctgaggatgaatatgagatccaggatgccactcaggtacgtatttcgctctgagcggattcgacgctgacaatgaaactatagcatggccccgtttgtatccgggcatctagatatccgatcccagagggctcttccgaggactgtctgtttcttgacgtttacgctcctgcaaggcccagacgagactcgtcaaggctcttacccgtatacgtttttatccaaggtggcggcttcagcagcaatgggaatccctactacaatggatcaggcttaatccaagcttctgatatgaacattgtcgtggtcaacttcaattatcgagtcggtccgtatggttttctggccggctcggagattcttgagggcggaagcttgaacaatggtctgagggaccaaattcaggtactcaaatgggttcagaagcatatcagtaaggtaaagtctcccctctcctcccatctcatgaactctgtaagctgacccatccaagttcggtggcaacccggatcatgtagtcataggaggtgacagcgcgggcggggcctcagtgaccctgctcctctccgcgtacgaaggccgtgacgacgggcttttccatgctgctgctgccgaatcccagagctttgccaccatgttgactgtggatgagtctcagttcgcgtacgacaatctagtaaaccgcacaggctgcagcgacacgggggatacactcaactgcctccgtagtctggacgttgaagaccttcagcgcgaaaacatcgtcacgccgtttcctggcgcccaacaaccccctctctacatgtacgggcctaccattgacggtgacctcatcccagactacacataccgcctcttccaacaaggcaaatttattcacgttcctgtcatcttcggcgatgtcaccaacgagggcaccaaatttgttcctgaagacctcgtgtccgacaccgcaacatatgtctggcttcagtctcaatggcccgcccttacacccaagcatttctcccgtatacatgagtactatctgcaagatgttaactccacacggccgtttcctaatgcaacccgctattggcgcccagtaagcgacgcatatggtgaaatccgctacgtctgccccggcattgcgctgaacgctgcgtatgccaaggccggcattcccaattggaactaccactacgcagtccaggacccggaggatgaagcttcaggtttaggcgtctatcatgtcgtggaactcaatgcaatttggggcccagacaatatttggtggtcggatactatctcgcagccgcctccagagtcttatttcacattcaatgcgcccatcgttcctgttatgcagggctactggacaagcttcattaggagttttgatcccaataagcatcggtatagggggagcccgaggtgggagacttggggtaagcaagagcggttattcgttcgaaccggtgagacgaggatggaacgagtcccggcagaccagagagaaaggtgtgaatattttatttccatcggcattgatttgaggcagtga

SEQ ID NO: 24900 - DNA, 558 bp, Emericella nidulans
gacgacaagcttcttgcgcagtgcaactgcggcggtgtctcgttcaccatctcccgcccgcgcgaggactttatgaactcgccgttgagcaaagggtggatacatccgtcttttaggacaaaatcgctcgcgctgctggatgtctgtgatgactgccgtctgctgacaggcgcacatgtgacgacctggctcttcgtgccgatagatcatatcacaccatccctcccggacgacctggttattggaacgatgaagcggtacgagtcgactccggggaccgtcagccggacattctgcgggacctgcggcgcgactgtgttctgctattacgacaaacgaggggggatagttgatattgcgacggggattctgcgggcacctgagggtgtgatgctgggtgattgggccgtttggaggactgcgaagctggggttcaaggacgatggccgcaggtatgataaactgtttacggaggggttggagaagggggtgaaggagtgggggaggagaagtcatcgggaggttaattatttccaaggaggaccggcgactgattag

SEQ ID NO: 24901 - DNA, 645 bp, Emericella nidulans
gtcctatccacactccctaaccctcccgaagagaactccacctctccaatcccattctttcatctcctcgagcgattaaagacgactaaacgcgaggggtggcgccggttcaacattaacgacggcgagtccatctccgatcacatgtatcgcatgtcgatgatgaccatgctcgcccccccttctctcgccgctcgcctagaccttccccgctgtatgaagatggctcttgttcatgatatggccgagtcgctcgttggtgatatcactcctaatgacccgattaagaaagacgaaaaggcccgtcgggaagctgctgtcatggaatatatcgccaactctctgttgcgcaatgtgccgagtggagtctctgccggcgacgatatcttggctgttttcaacgaatacgaagcgaatgagacgctagaagcgcagttcgtgcatgacgttgataagatggagcttttgctgcagatgatcgaatatgagcggagttatgagattgacctgaatgagttcctgggtgttgcgaagcgaatccaacttcctgaaatcaaggaatgggctgcgacagtactcgaggagcgaaaggcgctatggaagtcacggcagcagcaggaatcaacatctgaagccacgacataa

SEQ ID NO: 24902 - DNA, 621 bp, Emericella nidulans
atggaaggcaagcccgatatcagcatctacttttcccggttaccatttggaaaccgcacttggagtgaagctatcaaagtgacgcacgacgagacacgaagtgagcaaaatcccgtcatgttccagcacccttctggtgagctctggctcctgtatacgtctcagcaaggagggaaccaagactcagccgtcgtcaagcgtacgatctccttcgatgacgggaatgcctggagtgaccctacagttatcttcgacgagcctggcacctttatccggcagcccgttatcatcctaaaaaacggcatctttgtgatcccaacctttaagtgccgcgttgaactgggtgcaaagtggattggcaacgatgacatttcagccatccgcacgtctgatgatcagggccagacttggtctgagattccaatcgccgagagtacggggtgcgtgcatatggaaatccagcgtctgaagaccggggaatatctcgccctctatcgcagccgatgggcagatttcatctactcctcaacatcgccggatggattagcatggacggcgccgaagccgacctcgctgccgaatcctaatgctgggatctgctttgatgttctaccctcgggt

SEQ ID NO: 24903 - DNA, 769 bp, Emericella nidulans
tatcgtaagacaaataccataatggatacagactccatttccagcaaggtgatagaagtggaaggtgacctttttgatgctccagatggcacagctttgatacgtaagttatcgtactcgcaggtagagccacactgtgacaaatgccaaaactaaccgccgtcttgcgcagacgcttgcaattgcctcggctcatggggtgcaggaatcgcaggggcctttcgcaaaaaagtagatatcccttcttacaccggcctgaggaagccacgaagctaacagtttcattcttacccagtaccctgcggcatacgagatctacgaatcttactgccgtatgtacctcgaaaagcctcaatatcgcaagatcaacccaacagatactgttactggaagtagccagattcccgcccgcgacatccgacttccagagggatctacattagttatcccgccccaaaaacgggactacgaaaagccgggaggtaaaaagcactgggtcatctgcctctttacttcgcgtggatatggacgcaatgtgagcagcgtcgatatcattctgcaaaatacggagctggcgattgcggatttgaaggatcagcttgatgagctgaagcaaatgtggtccaaagcagacgatgctaatattaagggcctaaaagcttgccggttcaactcgggactttttggagtggattgggcgcttacgaggaggattttggaggattcggggttggaaattattgttgttcgtccgcccggggagaagtag

SEQ ID NO: 24904 - DNA, 931 bp, Emericella nidulans
taactcgacgtttgtccagagaacggattcgatacgatggacaccttttatggacgagtgcctcaaattgctggagaaacagcaggaatgcctgaacgacgaaattctggcacaacaggtcaggttgcaactaattagcgacaaactcaaccttggtccgtaccatggagggctggccgcaaccccggatccaattcaagcaccccctgccttctatctccactcaatgcatgcgcaattgcgaagcatccaaccccgcgttgcaccaaaactcgcaaagccacagtgggtatccaagtttcgttatcttaatctggatcgcagctgacctttcccagaaattttactccttcaccaccactatacctccctgactcttaacgaatccgccctcactaatgctcccgtgatctccaaaaacctaaactttcagcagctggagcatctttatgcctgcctggaagccaccaagtcatggttcgatctattcttgaccatcccgccggtggagtacatcgggtttcccttctcaatattcgcacaaatggtgcacaacctcgtgattctctatcagctgtcgactttcgaggaccctgcctgggacatagctaccgttcggcaaacggcagatgtcctctcaattctcagtacagtgattcggaatatgagccaggttgcatccttggcgggcctggacggtgagcccgacagtgatgttttctcccgagtcgccaagatgtacagatccgtgcagatggggtgggaagtcaaactcggccctaagcccctttcgctcgcaagcacccactccagccagtctgtcccagaacctcttgataccatgcccattaacttccctttaatgtctgacaatgactggctgtccgatatgctcaattcaatcacacacaccaaccgctctgaagtctga

SEQ ID NO: 24905 - DNA, 813 bp, Emericella nidulans
atgtcgacaaaacgactgattatctgctgcgacggtgagactcacggattcacccatttccctctacgtactgactgacccaggtacctggcaagattccaccgacgacgcgagcgaacctccatccaatgtgactcgactctctcgagcgctgagtcgcacggctatcgtgaaggagaatggtgtgctacgcgagatccctcagatcgtgtactaccagaaaggcgtgggcaccgggctgggtgacaagtattttggaggtaccgatacctcttgatcaccattccttctgtcctagtcggcagtgatctaattccagcaggcgtcacgggtgtcggtctcagcgcgaacgtgcgcgccgcgtacgggttcctgtcagacaattatgccgacggcgacaagatctacttcttcgggttctcgcgcggcgcatacacagcacgcgccatcgcgggattggtctgtcagtggggtctgttgacaccgcgggggatggacaatttctccaacgtgtatgacgacttttacggcaagaagatcgcagggtataccgacgaacagcggcgccggctcggattccggccgcccctacccaggttcaccgtcgagctgatcggcgtctgggacacggttgccttccataagccgtggctgggccgatggtttggcgagcagctcgagtttcgcaacaccctgctttcacgggatgtcaggtacgcgtaccatgcgctggcgctggacgaggaacgcaccgcgtatcagccgacgctgtggcatcagccagacaacgcagaggggcaggaaatgctccag

SEQ ID NO: 24906 - DNA, 388 bp, Emericella nidulans
ccaaaggtggcacgtcgttctatccatccctctgccctaaaccaagaaattcaccttccagctctccgacataatacgcgcggaatcctctccatggcatctcgacccgtcaagaaccagacaggaccccggttctcagggtgctacaggccctacgatcaatggaagccagttttttatcacatttgctgcagcaccgcatttggatgggtcgagcactgtgtctgtgaaagtgttgaatatgacggcagaagatgagggcgataatgttttgagtaagctggagaaggccaacgttacaaaacacaagaagggaaaagttgttgacccccttgagaatgaggaaacccgagttgaaactcttggcatgaacggggaagccaattaa

SEQ ID NO: 24907 - DNA, 753 bp, Emericella nidulans
atggttggcgtacctcacagcactggttgctcccgctgtcgtgaaagacggatcaaggtgatttaagctgatcttctcgaacccgcgctccactgacatccgtttactttaaagtgcgataaggtcacgccagaatgctcgcaatgtcgcaggtatggccagccatgtccaggataccgccgcacctttcgtttccaagacgaaggaccgggccttgaacgacgacacagttcatctacaggccgctccccgagaccagcaccctccgcccacgatgcagcaagactcgttcgtgacgatgcccttgcgatgatacgccggtacgcgtcaatgagtgaagattacacgagcatcggctcttctactcatatctcgctcgagagacaacacgttcaattcttcgccgacttcatccgtacggctttccccaccatgtactatcacaaccgattccgcgccacggaccggctcgactttccttcttatgtcattcaggacgtcggatcctatgtttttcaagacgcggctgtcgcctgtctgagctctgtgtatctcgcatatctttcacaagactcggcactgttaaaaaccagccgtcagatgtacgcgcagtcgctgcacgaggttgcgcgggcagtgcagaccccggacgcaatgtctgacgcgatgctaagtacgatgatgatgctcagcgtatacgagatgtacgcccagaccagcaacgatgcatgggtaatccacgcagacggggtg

SEQ ID NO: 24908 - DNA, 1024 bp, Emericella nidulans
aatgtggtccccccttgccaagtcagatcaaagatccaatagcccctccgagcgcaagttgatcggctctagcgctgccccaaaccaagagcaagataccgtcttctaacctaaggaggtcaacaatgaccttcggcagcaggatcccgagcccctcgtacaggagaaggggcaagagaatgaacattggcagcggagcctacaccccagacccccacgtcccagcagaaagaacccgagctagagcaacgtgacgatgggtcacaggcatctggcccggcgggtagcagtggaagtggcgtgtttgggaaactaggatcgctcgccggtggccttggacaccaggttacccagacggtcaaaagtgtcccaagtattgcttcaaaaccgcttaatatgctgaaggatctccctgttcaggaaggaggggagatccccggccccgagggtggtgttgtcggtaaggttgtcgagggtggagaggaagctgttggcggaactgtgaaagaagggggcaagattgtgaatgatgatggagagacagtcggccaggcggatctcactgacgaggtgaaggagactatggaaagggcgaaggacgagattccggaagatgcaaaaacggaaaccaccgaaaagactacagagaaccccgagaatgaaaccgcagaaatgagtgacgacgctgaggagacggcgaaagaggaagctgaaggtgctaaagagacgtccgaggaagctgagaacgccctatcacctctgtcttccctcgaaggcctgtcctgtaataaagctggcaagattattgactcatccggcaagcccgttggtgagttggtggaaggcgaccccaagaagctttccagactcggcagcaagcttgacgacaagggccagttctgggacagccgcggcaacattatcggaaaagccaagacgatcaaggctgaagaatatggagaagaacctcccttcgccggacttgagggtctccatatcgtcgaaaatggtttcgtcgaggacg

SEQ ID NO: 24909 - DNA, 314 bp, Emericella nidulans
gggccaaatattactatctgcgagccattctccacaactgggatgatgaccacgccgtgcagatcctggccaacattgtgcctgccatgtctgccgactcgctggtggcgattgatgaagtggtcgtgccggatcgagacgcccacttgtggccggccgggctcgatctccaaatgtacactatctttggaaccagggagcgcacagcagcacagtgggatgcgatcctcgacagagccggactgcgtgctgtggcagtcaagaggtatgcgcctgtcatgcaaagctcggtcatttttgcggctgccaagtag

SEQ ID NO: 24910 - DNA, 2149 bp, Emericella nidulans
atgccggtacggcttccaggtcggaaatcgcaggataaggggccggcaaccgagatgactggcggcaatcagcttcccctgactggtggaactgaatgtgcgattcaaacggtttatgaagggccgccaaagtgcacatgttgcaagaactgggtaaccgaatatcccggtagttcacgtacagtgaatgagcaacagcaataccttccgacgaagcggatggccttgattgtgcgtatggcgaagagccacagagatggtgccagtaacgccttaacgctgcactctattgtcgtccagagcccgtcattgaaggagacattgggcgaagtcttcgaggacaagggcatcacttcacccgctctcaagaagcttgttttctatgcccccttccatccatttatacatcgctggaaccggttaggcgagattctcagacgacagaaaaagagagggcaggcggctgcagcatatacgcagttgcttatagacgtgctcagaacgagactcgagggtacggtggcagagatcaacaacctactacaccacaagattatcacatactctatgctgtgggcactctttgagccggacgtccttgtcgtttcccaggttgcggggcatgagcgcttgttcaaagtacgcagttgtgaatatgacgacgaagaaggttgtctgaagattaccgcccggttcgtggactgggacggcaagggctttggctatgtcatgcaaagctttgagattcgtcgattcagcggcgacaaatctatagtcgaactcgacgtcttcccggtcatatttcacccatcaagggaagaggtagaggctaatgcggctagccgtggcgaacgcttccgggatctctgcggcgttcggtacgtggcgttctcgggtttgattcggtatcaggtggagtggaaggagatcgtaaggaacgtaagtcactctatcaaaggtttgaaagatcgtctactcatgttggtgacctaagcttgacgatcgcgttgtcattgatgcggcctcttattttgaaacggattacgaacaccgtgccgcattgatgcctctgaattcggacacagacgcgccccaaatttatgccgtggatgagcagcactgtcacgagagcgtgacggaatccgaagggaggcagtacactatgcgtcaacgggaagagcagaggaacgatgcccaattttcgtaataagcgtctgcgactcggatcaccaatggcagtatgcctatcctatctgcacctgtaagcggcgacccacacggtccaaatgaggagatcatggaggagcacttacggctttgctccccttatgtccgaggcttttcactgaaattgaaaaggtggctggagttcgaccttgacggcatcacagagatcaagtggaatgatagtgcctttgctgaattgatgctgccacctggttacagagatctggtgctctcatttgtggcgggactgagcaacggcaaggacgccttggacgatctcattgaagataaaggtctaggtatcagcttgctctttgctgggagctctggcaccggcaagacactgacagccagggctattgcggaggagctccgtaagcccttgtacattctgagtgccggggaatttgaacaagatccgtcgagcgctgaagaaaggctgaggcgtacattcatgctggctgagaagtggaatgcagtgctccttattgacaaatgtgatactctcctgcaagagcggccctctgatcgccttgagcataacaagatcctcgccgtttttctcaggttgctggaatactaccgcgggattctgataatagccaccgatcaagcagataccaccgacaagacgctgaaaagccgcgtacatttcaccatgcactttcccgagctcagtgcacccgctagaaaagagatatggaggcaatctattgctcgttcaaaggcggacgcggccatcacagacaaggtgtatgaccggttgtcccagctgccgttgaatggccatcagatcaagcaggttgtaaagattgccaccctcttatcttaccaacaaacacaaagccttgggctagcacaaattcggactgttctaagcgcctcacaggaggtagatgcccccgctattgcaggcatttga

SEQ ID NO: 24911 - DNA, 1070 bp, Emericella nidulans
gtcattcttgccaacggaaggatagtcaccgcaagtccgtgctcacattcagacctcttcaccgcgattcgtggtggcggcggtggaacgtatggagtggtcatttccctcaccatcaaggcgtacccgtcaacgccaatggttgctcactcgcttgtgctatcgtcacaaaccggccagaacacaagccagctgctggacgctatcacggacctctatgaagcctatcctgcactaaatgattacggattctccggttacggctcatggtcaatcttggacccgaccactacttacggcaactcgtccgcaggataccaacatgcgttggccgcaagaaacaagtcactttccgaagccaaggctactctagcgccagtcctgaagaaactctcgacctatagctctgtggccgtttctattaactggtttgagttcccctcctacgcagcgtactaccgcacgctgtctggagtccaccagcagactgggtcgcctgaaatggcacttgcgtctcgtatgtttgacaaaacccacctgacggccaaccacaattcgctgcgcagcttgattgggacgctggccggggctccggctgaaacgaccatcaaccaggtcattatggtcggtggcggcaaggttctcgagaagccagagtatagcggcgcacaccctgcctggagatcaacgtatcttgtccacgaagttgcgcgtggctggctggagtccatgggagaggcgtatgggaacagtgtcaagaaagatatcacctacaacaagtatgcggcaatgcgtcgctttacccccggaatgggcagctatatgaatgaggtacatccgcccttctctttctcaaaatacctaagctaatactatcccaggccgatataaacgatccttggtggcgagaagacttctacggtgctgccaactacaagaggcttcttgccattaagaacaaatatgaccccgaaggccttttctactgcccgacctgtgtcggaagttcatcatggtcggagcacgagttgcctggtctgggctttggcccgctctgcgcccgcaagtga

SEQ ID NO: 24912 - DNA, 237 bp, Emericella nidulans
atgggtgtagaccttgatactttggtagtgcaccccaattaccagcggcgcggcgcgggctcgatgcttgtacagtgggattgtggcctggcggacgaagagggagtcgcactgtatgcggatgcgagcagagctggagcgccgctgtatgagcggtttgggtttgtggatgagagcaaaggtgattcgggacaggcggaggttgcatctatgattagaagggcgcgtaagcactag

SEQ ID NO: 24913 - DNA, 240 bp, Emericella nidulans
atggatccctcacaagtcaaaatcccgcctatgaagaaccttacggtcgagaacatcaccgagaatgtcatccgcatcaactcgctctgcgaagacgagcgaatgaaatacgtgctcgaaagactagtcacacaccttcatgactttgcgcgcgagaccagactctcctcggctgagtggatgactggactgaagttcctgaccgaggtcggtcagatctgtacggacgtgcgacaggta

SEQ ID NO: 24914 - DNA, 2208 bp, Emericella nidulans
ggatagctcctcagggatcgttgctaccgatgaagtcagcaatgagaagggcagggctatccactcggcctactcagcgcaggagcgagcccagaagttggcatcccatttgggacgtccctcgaagtctcccagtcagagcccgtggccgagtctgccgtcatctgttgcttcgtctcctacagaagcgtcacagccatttgaggatgctgatgacattccgatgatccggctccctgaaaaacagctcgactacccttcggacgaggacgatgactactacggcctagtagatggacgccctcacaaccgcaactctgaagctcaccagcttgttgaacagatgactcgccgagactttcaccttctgaaccgcatcagtgctaattctcccagcggcctgcgctctggcccggtcacccctatcgaggaaagggatcctgacgcctacgtccagcgtccgactcactaccgcggcggcattctgtcctcgctcctgaagctttacgagcagccgaccctgaatctaccccggggccgctatggccactcccgccagagcagctctggtgacctgagtgcccgcggcctctccccggacccttcgtggcgtgctcctcagaagcccaggaagtggtatgagaagtcggccaatcagtccaacacctccttgtcgggttcgacagccaagaattccatcagctcgccattttcaatgctcagacgctcccgcagtagcggggctatccccgggatgtccaagcgcatggggaagccccagctcgaagatgaaatccgcatcactgttcacattgccgagctgcttgcgcgccagaggtatctgctcatactatgcaaggccctgatgaagtttggtgcccctacccatagacttgaggagtacatgaagatgacggcccgcgtgctggagatcaatgccaacttcttatatctgcccggctgtatgattgtctcctttgatgatgcatctacccacactacagaagtgaaacttgttcgcgtgaaccagggtgtcgacttgggcaagctctctgatgcacacaccgtttataaggaagtgatccacgacgtgatcggggtggaagaggccatgcagcggctaagcaagctgttgcagaaggacaacaaataccccatctggcttcttattctcttccacggcctcgccagcgcatctgttggcccttttgcctttggtgctcgtcccatcgatatgcccatcgccttcgtccttgggtgcctcctaggaattctacagctcgtcctctcccctcgctcccacctctactccaacgtgtttgaaatatccgccgccgttctcacttccttcctcgctcgcgcatttggcagtatcccctacaaaggcggccatctcttctgctttgcagccctcgcccaatcctccatcgctctcattctccccggctacctcgttctctgcgccagcctagagcttcaatcacgcagcatcgtcgccggctccgttcgcatggtgtacgccatcatctattccctctttctcggctttggcatcacaatcggcactgcgtgtacggccttttagaccgccacgcctcaacagactatacatgccctgccagccctatcacgaacgagtacctccagcgctttccctttgtcatcatcttcactttctgcctcgccacagtcaaccaggccaaatggaagcagatccccgtgatgctcgttatcgcttttgccggatacattaccaactactttggcgcgaaacgcttctactcttccacgcaggtctcttccgccctgggagcattcgttgttggggtcatggcaaacctctattcgcgtcttcggcacggcctagcagcagcagccatgctccctgccatctttgtgcttgtcccatctggcctcgcagccagtgggtcattggtagcgggaattgcatcggcaggccaaattaccacgcagcagacgccgttctcggtgcccagtaacggcacgcagagcttcgtcgacgcggcgaaaaacatgaccgctgagcaccgccagcagagctaccaagagaatcctttccagggtgtcgtcttcgacattggatacgggatggtacaggttgctattgggtttactgtgggactgtttcttgctgctttggtggtttatccgcttgggaagaagcgcagcgggctttttagtttctaa

SEQ ID NO: 24915 - DNA, 208 bp, Emericella nidulans
tctgatcaagatcgacggtgttgacaacactgaggccgcaaagtgagtgaattcgggttatggactgggtatctggatcggatgctaagacaggaacagcttctacctgggcaagaaggtcgctttcgtctaccgggctaagcgtgaggtccggggctccaacatccgggtgatctggggcaaggtcacccgacctcacggtacgtca

SEQ ID NO: 24916 - DNA, 1324 bp, Emericella nidulans
gtcatggcgggtgaacggcagcgccgcacgctcggcgctctgcctgggcctgaatctccgtgcattcagcgagcacatcgatccagtttcgaaggaaacaaggacgcgtatctggtgggccatcttctcccttgagcatctactttctagcatgaccggccgcgtaccttgtctagaccaccgtgccatgtcgctgtatccgcctgtcccgtatgacgaggacgacttcgaccatcctgagctgaagacaatcctcggaatgactgaacagcgtgaaaaacggctccattatacaatatatgctaccaacgaggagctagccaaactcactgcttggctgcgatccatagagccgaacgggtctctcttcttctttcacctcgtcgacctatcgatcattacccatgccgccgtgatggccatctacagcctgcaatcgactcgagagagtcacagcggcctcggccaatccgagatcccgcgctaccagtcgatgctccaatcgtgggtctccaatctgcatccggcgttcgcatttacggataaggacatggagcccagtctctctcgggactcccgcgcacaagttagcctggccttatcctactacagctcccagatcatcctcagtcgcccgtgcctcacgcgcccagacctcaaagaagggacaaatatccgcttcccacgctcgcggttcggaaataacaccgcaggaacgtgcatccactccgccctctcgctcaattccgtccttcccgacgagccaaatcgacgtggatgctgaaaaggcacatggtggtgcatacttcactatatcatgcaagcgctcacggtgttgttgatccagatctccgtcggctttgtcccagacgacgtcggaaagggcagaaagaaaaaaggccacgaggccgaggaaagcaaccaagaccgaagcgaggggattgcacccgaggccgtctggaatgcgtctaagaaggctctccgctggctccatttcatggcggacctggacccgagctggcaccgggctcatgagataagcgaggggtttctaaggcggattgcgaaggcgaaagatctgaatatggactttctaccggggattcgacaggaatcccagatgtctggctttgattacagagggcctgggcatgagatgggcgggggtgggagtgccagaaagcaatcatcgtcatctggtctgttgcatgaggaacccatgaattggggccccgactgtactatgtccgagggagattacggacaagagcatcaacagcatccgtttgtgttggatccaaccctgttctcggtgggtatgtga

SEQ ID NO: 24917 - DNA, 765 bp, Emericella nidulans
cctctgcatgcagctggatatcacagccagggcaattccaaaaccgtgcttgatcgggtcatgtcgtcttacagctcgtctattaaagccatcatacgtggccgccaacgcctagcaacagagtctttaccatttgcacttttattgtccatgcaggatacgccagggaatggataccttccatttgccgctgaggaagtacaaatactctgtgatatgtgcaaattaatggctcttcacacaatccaaccaaggcggcgcgaacatgatattataggccacatgcgagtatgccagatcttccactttgctggccatggctacacaagtcataccgatccatctcaaagtcgattgatcttatgggacggtgatgacgattctctcacagtaggcagtctcctcaagatgaacctccacaagaatccgccgtttcttgcgtacctctcagcttgcgggaccggccagatcaaagacgataaattaattgatgagagtattcacttgaccagcgccttccagctggcggggtttcgacatgttattggcactttatggaatgttaatgacgatatctgtgtcgatatggcaagaatcacgtacacagaaattgccaatggaaatatggacgatgaatcggtgtgtcgagggcttcattacgctgccagggagatgcgagaccgttggcttgaagcattatcagagatcgagcgtcagtcgaaactaaccataaatgtatcagaacatcatgagaacctaaagaac

SEQ ID NO: 24918 - DNA, 921 bp, Emericella nidulans
atgaacccattcaaacccgacgagtcctcttcggcccattccgcgctgcctctagccccaggccacgacgacgtcgctctccccgacgatttcgactcgaacagtccagccagctcgcgcgagcccgggagcgcccagactggcggtgatgcagcaggatttcaggatggaaaccgggacaatgcggccgaccgcggggacgacactccacaaacgcaccaggaacaggctggtgacaagccgccatggagcgaaacgaagaccaaggccggcaaagagcggaagcggctccctttggcatgtatagcgtgtcggcgaaagaagattcgctgctcgggagaaaagcctgcatgcaagcactgctcgcggtcgcggattccttgcgtgtacaaggtgacgactaggaaggctgctccccgcacggactacatggcgatgctagataagaggttgaagcggatggaagaccgggttatcaagacgattcccaaggacgagtttagagatatgggcgcgattggccgggcgaatgtgcgtcccgcgcagccggggcaggctgtcaagaaccagaagaagcggtcggccgatgaagcttttgccgctgaactggagcagtgggcgcgcgggagccgaagcgggccgcaggatacctttcccatgcggcgtgagggcaagcctgatggcccgagtctgatgactgagggggccgagtttctgccgtcgctggagatacaggaacatctggcggaggtgttttttgattgtgtttacggccaatcctacctgcttctgcacaaaccgagctttgtgcgccgtctcaaagctcgcacagtaccacctgtgctcattcttgcggtaaaacaagacacggccaggttcacaacacatccacagattaactctgaacccccgttcctacag

SEQ ID NO: 24919 - DNA, 504 bp, Emericella nidulans
atgaagggctccagcatcgcggctgccctcactttgagtgcttctactgttctcgctgcgcctaaactggctgcccgcgacgacgtcactcctatcaccgtcaagggtaacgctttcttcaagggtgatgatcgtttctacatccgtggtgtcgactaccagcccggcggctcctcagacctctctgaccccatcgccgatgcggaaggctgcaagcgtgacattgcgaagttcaaggagcttggcttgaacactatccgtgtttactcggtcgacaactcgaaagatcacgatgagtgtatgaacgccttggctgatgctggcatctaccttgtgctggacgtcaacactcccaaatactctatcaaccgtgcatccccggagatctcgtacaacgacaagtacctccagtacatcttcgcgaccgtcgacaagttcgccaaatataagaacaccttggctttcttctccggaaacgaagtcatcaacgatggcccttcctcc

SEQ ID NO: 24920 - DNA, 1381 bp, Emericella nidulans
gctgcggcacctggtcgactccatcatggccgagggctccctccagcactttcccaatggggaagtctgtaatgtctcagtccttcacggagattacaacgtctacgctgtcttcctcttctccctcctcactccatttcttctgtggctctgcgctttttcaatatttatccacactcatattctatccctcaattccccttcaccttctagacaacaacatcgtgactgtcttcgtcgcgctaaaggaaagtcagacaaggacgaaatgacacacaaccctctggcttactctgcagacctcctcgatggtggactagaagacattcagattaaatctctatcgcacctctatcagaatgtcgtgcagaatgagaaccaccctatgctggttagttctctggaggccccgatggacgggcttgcggataacctgaagatttctgccttggatcccaaggtgcgttctcttgcacaacaaaacttataacactgttcaatatacactgataatgtgatgctctcatttcagcgtacctcgcctatctttccacagtgccaccctccacccgcaccaccctcaaggaaaaaggcgaaaactgaacccatcaaacctgtcgagtggtatggggaaatatcctggtctctgaaaggaaccagtgtctttgacgacgcagaacaagagctggacgcttttatgaatcgcatcaacatgcttgactaccgcaagccctacaacgaactttgggttttccagtatggtcttcgctacatcccctccgtttccgacaaaaatgtgtaccgcaccattcgtatagatgaaatacctttggataaaactcccagtcagattctccctttcattgtaggtgaggtctacagcgctcgcctggcggatacataccgcatcaccggctacaacaccgcaatgattaccttcgtcaccgaagaagacgctgccaacttcctagctggatttgccaacagaacctacgccctaccctttggcagggttattcctgttcacacaccgacctaccccatccccgccgatacagagaaattgatcattgaacagggttgtacccgcatcctaggcattttccattgcagaccgacactcaagagggagatcacccgtgccatgaccagccccttccagaattacattctacagctggaaaatattgttgatggcccagggattggcgaagtctcggtgaagatgctttcggtcaaggcagcagcagtagtgtttgactgcctgaggaaccacccaaccctcagcaaatgccagttccgattcttgaaacaagatggcacgccttccgagggtactgcaatcgtatcggatgatggatatcagactgcgccgtggtag

SEQ ID NO: 24921 - DNA, 435 bp, Emericella nidulans
atgccttctgacgatgtttcattcccgccgcgctccaaatactcaacatctagctttgcggacgttttcaggtcgttaagcgcttcccgggcgaaatcgtttcccgcaaccccattgtcggacagcagcaactccgttcacgacgacacggatggacacacaagcttttggaacgcatcaggatttgactcaatgcatcgtggaagtgtggtttcaagctcctcggatgcttcggggggtcgggattttgagacgtccgtcaagttactggcgcagaagcagaatctaggccatgcctgtgacgaagcggaacaagtggctaaggcccttcagtggtatacccggagcaagctctcggtctctgggaagctggttcgcaccttttactccatgaaggttctcccgacgctcgacgcagtggctcccttttgctag

SEQ ID NO: 24922 - DNA, 1464 bp, Emericella nidulans
atggtctccgggcgtgtagaaacagttgaatcccctttggagaagcgtcctcaccagagaagaaacaaagctgcagtgccagcatcagaggtcaagaaggaacccgtggttgccaccagccagggcccgtcaaccgttgaacaaccgaacggtgaggctctgaagactacagactggaataagtacattgaagccctacaagaaggggtcacctcccaattcaacaagagtctcggaagggagctagaaggactctacgcccgcttcgacgaagagcgacgcagctgggatgctgcgtctgcctcgaagcaagaccaggtattgcgcttggtgtcgagcacgctctctgacaatgtggagaagaatctcgcgcgtatcattaagcagacaattcaatccgatgttgtccctgcactgggcgatgtcacctctgcagccgtgagcaaacaactaaacaccgttctttcagagcggtctggcggcgttatctctcatgaattgcggcaatctctgcctggcgccgttactcgcgctttgcagcagccggaggtgatcaaagtcgtgtcagatgctgttagccagaagctgagcactcaggttgagagtcaaatttcaaagactgtgcatgacagccttgctcctaccctgaagaacgttgcactccgggcagctgaaaaggtcgcaaacgatgcggagaagcgaatgcaggctcagtcgaaacagtttgaagcccagcgccaagctgatgccgtcaagattgatcagctcacttctttggttcggggactttcggacaccgtcactgccatggcggctgcccagaccggatttcagaacgaagtattgcgcttgaaccaagttctcgcgcagcgtggacccgaagctaggcagggctccgagagcctaggcattacctcgcctactccgcttaccggctccattagtcctgaagatagggaaattaccgagattgcgcagcttatgcgtgaggggaaatatgaagagggttccgtcaaggtttgtgcatgttatcctgtacgcaacggaatgtttctaactcgcaccagtggcttcaatccgagcagcaggctgatctttttgatcgtctctttgttcgcttgaacccctcgtatctgaatagcctttctcctattgtggcactgtcggtcggtgttgcggttacctcctctctgcagacaaatgtgatggagcgtcttgcatggctagaagtagtccttcagaccgttgatttgagggtatgcgcccgcccatccccgttcattgcgcggtactaattttctgcaggataccgatatccaagaggtcgctcccaagattatggatatccttattgcgcgactaaacgagctctacatgtccgttgctaaagactccccacacagccccatcctgcgccgcatcccgcctctcgcccgtcgggccaccgagcttcgcggtaactaa

SEQ ID NO: 24923 - DNA, 399 bp, Emericella nidulans
atgcctcagtctaaccccaaacctttgatctcgcacctctacacagccgacccctcagcccacgtcttcaaccaaaagctctacatctacccctcccatgaccgcgaatcttccatccctttcaacgacaatggcgaccaatacgacatggccgattatcacgttttctccatcgacactctagctcccctcacctctacctccacagagaatgtgaaagtggaggtcaaagaccacggccccgtcctgaaaactgagcaggttccttgggcttcgaagcaactctgggcccctgatgcggcggagcggaatgggaagtattatctgtatttccccgcacgggaccatgaagggttgtttcgtattggggtcgcggttgggaatgcgcccgacgggcct

SEQ ID NO: 24924 - DNA, 345 bp, Emericella nidulans
cagaaccaaatgcttgtttcaatgatgcttttcgagtcattggtgaacggcgaatggttcaaacgaaagcccattatcttatttctcaacaagattgacctcttcaaagacaagctcgcgatatctcccatctcaaagcactttcccgactacagcgactcgaacaccgactttgatgcggcagcaaaatacttcgccgatcgcttccgaggtatcaaccggattccggagcgagaaatctatattcactacaccaacgccacggatacaactttgttgaaggctaccatggactctgtacaggatatgattatccagaagaatctccacacgctcatactctaa

SEQ ID NO: 24925 - DNA, 474 bp, Emericella nidulans
atggatcgccattgccatgcaacgcatatagatgacaaagacttccacacaacaagcaccgatatcgatgcctatccatcttattcacccactagcacgagtgccagtgccaacagcgacaccgaaaccctcgaccaacctgactctctcgaactttcccggatcgaaacacaccgactgcaacaaaagaccactgttgggtcaacgcgtgggcttcaaccgcgcgagacatggctgcccatgggcgcgggcaaggagtatccgccgctcctgccggatcctgaggactttgtggtcgagtttgacggcgcaggggatcctttgcatccgtataactggcctttaatgaggaggtatgtttcagtatggctggggcttggtcaggtctaggtcgctaatggctggtcaggatattcctcgtttgcatcctctcgtatagtacattcgcgacatccttcacgagcgccgtgttct

SEQ ID NO: 24926 - DNA, 483 bp, Emericella nidulans
aaggtgctgggatcatctcgggcccttactctggcggagaagattctgtactctcatcttgacaatgcggaggagtcacttttgactggtacgaacaatggacgcgacatccgcggcaaggcggatctgaagctgaagcctgaccgcgttgcgatgcaggatgcgtctgcacaaatggccttgttgcagttcatgtcttgcggcttgccgtcgaccgcagttccggccagtattcactgtgaccatatgattgtgggtgagcgcggtgccgacaccgatctgccagcgtcgatccaaggaaacaaggaggtgttcgatttcttggagagcgcttcaaagagatacggaattgagttctggcctcccggtgctggtatcatccaccagagcgtcttggagaactattccgcccctggtcttatgatgctgggaacggatagtcatacacctaacgccggtgcgctgggtgccattgccatcggt

SEQ ID NO: 24927 - DNA, 813 bp, Emericella nidulans
atgtccaccgtgacacccccggcgtcgagcttcaccatcgacaccccgacaatcctttgcatccttttcgccctctccttcatgcctatcgcctacgtccttggaaacaatctgatcccctcctcccaaacgcgcaaccgcatcctcttctactggcacgcctacgatgccctaactcacctcttcatcgagggctctttcctttacgaatgcttcaccagctacgcgactttgcccgctgggttcgctgcgccagaaccggcattcctcggtatcaaggatagagtctacggagctgcacatggatcagcaccatccgcgaggctctggcaggaatatgcgaaggccgataagcgctgggcgacggcagacgctactgtaatttccttggaactcctgacagtcttcctgggcggtcctgcagcgatctatgtctgttatctagtgtggcagtcgagttgcacacagccggccccaaagccgacctcgtctaaatcctcttcaccaaaatcgacgtccaaatcgtctgccgcgaagctggaaagccagggcgcttccaaagcaaaattatggcttgtggccacggctctcgccacggcggagctctacggcgggttcatgacttttgtgccggagtggttaaccggctcgacgcagttggatacgagcaatgcagtttatttgtggttttacctcttctttttcaatacgctctgggtttggattccgctttgggtgctttgggaggcggctaaagaggttaaacgggcgtttgtgcttgctgagggggtggaaggaaagaaggtcaaataa

SEQ ID NO: 24928 - DNA, 903 bp, Emericella nidulans
gtgcaggttcctctcctctctgttgccaactggggcggcatcctcttgcatctaaggggcaacgttgaagggtacacccaagccggtagtcagctcaaatacctccgctttatcactggacgccacgacctcccattctactacaaagaagaagtcgacattcagctgagctttctcgacgcattcctaaaaggggacgaccgcgctggatggtcgactgggaccgcgcccaaagtcgacctcgtcctccgcaaaggtgacgtaggctttaacaacgccgaagctgagaagacgtacgctcgccgcgtggaaaacgagtggccaattgcgcggacgcagtatacaaggttctacctcaccccgaatcgggaactacttaccactccaccggaacagaagggatacagcaagctcagctatgccgccttgggaaacatcgagaacccgtcgtttattcagttcacgactccaccattcgagcacgaaacagagataacaggccacatcgtcgcgcacctgaatgtctctatgagccctaatcccggagctcctacccccacggatatagatcttttcctgaccctacggtacatctcccctgaaggaaaagaagtttactacacagggacggctggggaccccgttccgctctgcaagggctggctacgtgtgagtttgcgcaaggtcaacgacaaacacgcccggcacagggagtacctcccgcaccgggactacttctctacggacgtccagcctgttattcctggagaagtctaccccgttgacgtagagatctggccgacaaatgttgtcgttgagaaaggcggccagattgttcttgaggtcgcgtctggggatactcaggggagtggaattttcctgcacaatgagccgacagacagg

SEQ ID NO: 24929 - DNA, 805 bp, Emericella nidulans
aaggattcgaggtgcccgctcaagacctaattgcacatggtgccagttacgacgccgactaccaggggcgaaatggtcccgttaaagtgggttggcctacagcaatgaccaacagcatcgtctttcctgttcttaaggagacctttgaacacctgggcgttcattataatcgcgattccggaggaggcaggatggttgggtttacggtccatcctgatactgtggacagagaggccaatgttcgcatggacgccacgagagcgtacttctggccgtacaaatctcgcccgaacctgaaaatcatctcgaacacacaagcgaacaggatcatcaaggcaaataccacccatggcgaaatcagtgctattggagttgaggttactggtccacagggcgtgggtatgatatatgcctcaaaagaagtcatcctgtcggccggagcattaagatcaccagcacttcttgaactgtccggtgttggaagcccagacattcttcgtaagtacagcataccagtaaaggttaatctccccaccgtgggcgagaacttgcaggatcaaatgaacaacgttcttacatgggaaagcaagaattacttgaccggactggcaacattttccgccctgctctcggtcaatcagctctatgggacaaagtttctgaagtggcggcatttgtccaagccaacctagctagctacgcaaggaatatatcgaagacctcaaatggtgttgtcaaggaatccgatctgctggttgctttcaagctccagtacgatttgatcctaagcttgggtctccctata

SEQ ID NO: 24930 - DNA, 279 bp, Emericella nidulans
actttcatcgtcgagcgaagcgggacagatattgacaaggcgctcgcggcattgcagccatggaaaaagaatatccatgttattcaacaacttattcaaaatgacgttagcagcactaagattcgcttattcctcaggcgagatatgagcgtacgctacttgatccctgacccggtgattgagtacatctatgagaataacctctacatggacgacggtacgacacaaccgacggccgacaagggcaagacacgagaggagcccgcgccttcaaattag

SEQ ID NO: 24931 - DNA, 2088 bp, Emericella nidulans
ttgggggaatatttgttccggaacgaacgttgcgacttaaccacaaggtcattgggtcaccagcttgcgcgaccatctataccggggctgtgcgacacatagaggtgacacggggattggttgcatcattgtgtcgcaaagttaatcgctatcatccgagaccggctgttttgcgatttcatttcaatccagcatttgcgctatggctcacacccaaccgtcgcctactggcggcgtcactccccaccatggccacctgccgcccacccagtgaacggccatctgcctatgcagtcgccggcgcagaagcctccgctcagtactgcccagaaaatcgcggcattgaatgagcaggtctggctgcaaataggtacgtgatgctatgttataacgcgcccagcgcaaactttcgcatactgactaggttttataggcaacttgactgagctgatgggcgatctggatggcgctatgaacgcgtatgaacaagctttacggcataatcaatggtctgttcctgctatgaatgcgatctcctgcatccttcgaacaagagagcagtttcccaaggctatcgaataccttcagaatattcttaagctggatcccggtagcggagaaacatggggaagtctaggtatgtttggagaagcagcgatgtccgcgggaaacggctaacctgcccttctaggtcactgctaccttatgatggacaatttgcaagaagcatacacatcttaccaacaagcgctttaccacttgcgggatcctaaggttagtttcgtcaatgttttgactgtcgatcaagcctaacagacgtataggaacataacctgtggtatggaatcggtatcctttatgaccgatatggctctctcgaccacgccgaagaagctttctctcaagtcatgcggatggcccccgacttcgaaaaggctaacgagatctacttccggttgggtataatctacaagcagcagcagaaatttaaccagagtctggacgtaagtgcacgactactgctgcgttcgagctattactgacgagtctagtgctttaaatacatcgtcaatgatcctccgcgccccttaactgaggaagacatttggttccagattggtcacgtgcatgagcagcagaaagatgtaggtgcaatatttcaaataaggttgttctatctgctgacagcattatagttcgaagctgcgcaacaagcgtataggcgcgtactcgaccgtgatcccaaccacgcaaaagtgttgcagcagcttggatggttgtatcaccagcaaagcggtagcttcgagagccaacaaaaagctatcgaataccttgagaagtcagtcagcgcagataactccgatgcccagagttggtaccttctgggccgctgttacatgtcgcaagccaaataccccaaggcgtacgaagcgtatcagcaggcggtctatcgcgacggccgcaacccaactttctggtgctcgattggtgtgctgtactaccagatcaatcaataccgtgatgcgttggatgcgtactcgcgtgctattcgcctgaatccgtacatctcggaggtgtggtacgatctgggaactctttatgagtcttgcaacaaccagatcgctgatgcgctcgatgcgtacggtcgtgcggctgacctggatcctaccaatgttcatatcaaggcccgcctgcagcttctccagagccagctgtcaggttccggccagagcaatggtcccgccccgcagcctcaggacgtccatccccaggcttaccaggctcctggcgttggtgccccccctgcacctcagtggggagctcctgctcccacaggaggaccacctgcccaggctcctgctcctccccagcagattgacgcctggaaccgtaacatcaacgaccttcggactcaggctcaggcgccgggcgcaaacggctatgatccccgcgagggacctcgccctggtgcaatccagcaacccagccctcgtcaagaaccaggacgaggattgcctgatggcgcccgtccgctcggtgtgcggtcgccgaagcctggtcttgccggccctggcgtttatcctcctg

SEQ ID NO: 24932 - DNA, 904 bp, Emericella nidulans
aaactcgcctcgactcttgcaaccatttttctcaaggcagatgctccttggagccgtgctgtcttgagattagctgtttctttggccaacggtaaaagtgtacccgaggaccaatgcgcatcaatcagtctgcaagatgtacttccagcactgtctgagattcaggtgatctcgctactctatttctcaaaaatcttagcagaagagataggtcgctcggggggagaatcacggaagccggaagatactcgccgcatctctgagaatcttggggatgctttcttgcttgtggattttgtcctctctcagatattgaagcatgatgtctccggtgggtctgtcgctaacgaagttcctgggacagaggcaatcaactcttaccatgtaagtcctctgcattttatatccttgcctgtagatatttctaaccgtggctcgctagtcttggatattcgttcggagttcgcttcaactgcatgatgctatttctgtcccacagttggcgtctgccacgaattgcgttatagggagcctgaacatcccgtatttatcaaagacagccggtcatattctgactgagattatgggtcgccgtgagagtgtgctgtcaccgagtcatattgaggctatactagactacgtcattagtgttgccggtaccgcacatattgcatctcttatggaaggcgacttcgaagatgagaatatgaccttcatcgaactgctgctgtcgttggccacccgaaaacaggcgcaaatattcacccaatatctagacgagaagcacgaaaaggtgctagctctaatccataccttgttcaaatcacctggttatgccgcagtggaagacactgcgtcccccttggccctggagtggtggactgaagccgccgacgacctttaa

SEQ ID NO: 24933 - DNA, 741 bp, Emericella nidulans
gcccaggcggtacatggcaccctgcgagagcgtggctcgaggaagatgaaacaggggatgatgaggatgatatggattatgaacctgattccgacaaccatgatgatagagccgacgaagaagagtaccccgacgaggatcctaacgtcgatcaatccggtattttgaatcaaacccatttattttcagcaagcttgatgctgatttaatatcattttagattccgagttgcatttaggcaacattcatatcgaattcaccatggatgaacatgatcagactggggaaggtaatcaaaccggccggacgactcaaggtagactctccatcaggagaagattggttagtgactatatatattatagattctgactatgaatagtctcgcctgctcgcttactaaatatactcgcatctggtggcctgcaacaaattttccggtatcatggtttcgccacgggcaatgctggcttcgacggtgatgacgatggcgaagaagacgaatatgggatactggggctaggcaggagagttccaagacggcgaggccctcctcaatatcccaagataccgagtgacgaaggtatcaagctgatgagatccgggaaattcggtacggaacccagctacgttgatgagcgtatgaaacgcaaaaaatcactggcggagaaggtgatgtggcgagaattgggagtggatggacagggactgcaaaggaccagggtctcgtcgatagcacaa

SEQ ID NO: 24934 - DNA, 964 bp, Emericella nidulans
acaatggccgaaaaagacatcgagaagccctcgcacatcgagagccctatcaccgaaatcggcacctttcgtgtcgtgggcctgagccctgaagatgcggacttctacaccaactatcccgaggagaagaggaagagggtctttcgcaaggtatatcaatccactctctaccatggcgtggtactgtgcagctgatatacagaagattgatattcgcctcgttcctatgctcgcccttttgtacctctgcgcgcacatcgaccgcgccaatatcggcaacgccaaaatcgaaggcatggtcacagaccttaacatgtccggggtacagtacaacaccgttctctcaatcttctttatcccctacgtcctcctcgaagtgccgtccaacgttctcctcaagaaattcaagcgcccctccacctacctcgggatccttgttctaggctggggcgtgatcatgacctgcactgggctcgtcaataactacagcagcctgatggccgtgcgcgtcctcttaggtatttttgaggcgggattcttccctggcgccatctatctctgctcgtactggtacatgccgaaagacctcgccttgcggatctcgtacttctactgcgcgacgcgctgagcggcgcattctcaggtttactggctgccgccattgcgaagatggacggcatcggcggttatgagggatggaggtggatctttatcctggagggattagcaaccgttgtccttggtgtggcttgcttcttttttcttattgatacgcccgctttgtcgaagcgctggctggaacccgacgagatccagtatctggagctctctatgttcattaaacagggtggccgcgtggagcatgagagtgccttcaaatggagggatctgacgatggttctcacgaattggcgggtttatatgcaggcctggttcttgttcgcgcagtcgtcgctttcctacg

SEQ ID NO: 24935 - DNA, 1076 bp, Emericella nidulans
atgaacgagcattatttgcctgcaaaggctctgactcaacaaccgcgggccacgggtccgtctcttcttgcttgtcttctatgtcgccataagcacctcaagtgtgatggagccacgcctgtgtgtagccgttgtgccgccacaggtgcagagtgccagtataccccgtcgcggcgaggatacaagggcccctcgaagaagcggcgcgccaatccttcctcacctgagcaactaccagccgatcttgcaccatcttttgaccctaatgttgggttctacaatgtgcctgtggattggaatgctttgaatccttatccatatgtgccttcggccacccttcctgcctcaacctcctcgggaagtagtccccaattcactgaacaacctggggcttcgcagcaagtggtcaccaagaacgcacctctgacccctgaatcgtcgtcatcactttccaatgatggatatcttgtcgacatttactatcagttcttccacccttcgcaccccatcttgcctccgatcaagacactctatcacaaccgtgtgccaccttaccttgagcaagtcatcaagtttgtgggatctcatttcactcccgccgcgtcgagtgagacttatcgacccggcatcatgacgactgttatggagcaggaaggaacgttggagaagattcaagctcttctcctactcgcgattgtgctccattcgcgaaacgaacgggataaggccaaagattgccttattaccgcagttgacctggcctttgagctcggtcttcatactagggatttcgctaccacaatgggcgggggtaatccgttagggaggagtgcctaagacgtacatggtgggaattggtcatcatgaggctatgttgacagcacttggacttaaaaaaggtctcgacacatcatggcccctcgaagaccccttcctgggagagcggtatacaggacggatagagctccgcgtcaccccgatgcgcagttgatagcggctttgcaccagagcgagatctatctttacgttgaacaaacgccgtttctagacggtgggccatcagactggtgggcccc

SEQ ID NO: 24936 - DNA, 516 bp, Emericella nidulans
agaaaaaccccgctaagaagtacaggccgcagcgttttcgacaatatcatcccgacaacaacgggtgctgccaaggcgatcgcatcagtgctgcctgaactgacaggcaaggtaacgggagcctcgatccgcgtgccaacgtaagtcattcaatttgattcaaatctgatctggtctgatgtgaggggccgaatcgccgctgacttttgaattttcagccccaatgtctcgttgattgatttgaccgtcagcaccgagacgcccacctcgctagccgagatactagcggcgtttcggcgcgcggccaagaacgagctggctggcgtgctgagcgtaagcgacgaggtgctggtgagcagcgactatctgggcgactcgcatagtgcgatcgtagacgccgctgcgtgtagcgagctgaacccgacctttttcaagatcatggcctggtatgacaacgaatgggggtattccagccgacttttggatctgacgagacatattgcgcataatgagtaa

SEQ ID NO: 24937 - DNA, 348 bp, Emericella nidulans
atgccctgggcgcccaaagccaaggctcttctgcaggcttggctcgggggcaatgagtgtggtaacggcatcgcagatgtgctttatggaaacgtcaacccctctggaaagctgcctttgaccttccccgtccgtttgcaagacaaccctagttacctgaacttccgctcagagcgaggccgcgtcctctacggcgaagacatctatgttgggtaccggtactacgagaaagcccaactcccgccgttattccccttcggccatggcctgtcctacacgactttcacacgcgagaaactggagttgaacacttctcctgaaaaagacaaactgcaagacggagaaccc

SEQ ID NO: 24938 - DNA, 330 bp, Emericella nidulans
agccgtgcagagaaactgaaactccggttgacgatcactcagaccgaagacgaccggctggatcggtacttctcgctcatacgcgtgctttaccagtaccatgagccttcgcccacggggaccaccacgaaaacgacaaaaccgacgcagtgggccgttttaatagacgatgatacattctttatgtcgatgcggaaccttatcgcccggctagcgacctacgacgccatggttccgcaatacatcggcgccatgacagaagatctcgctcgactctcggggtctggatatatggcttacggcggcgcaggaatattcctatccatcccc

SEQ ID NO: 24939 - DNA, 450 bp, Emericella nidulans
ctgtggctgttggctgatcttgagagtggcgaggaatttgtgaccgaggctggcactatgaatctttttgtagtctgggtgagttcttccacggggaagaaagaactggtgacgccgccactggatgggacgatcctgcctggggtgactcgaatgtcaatcttggagctcgcgagggagaggcttgaaggggacaggtctggtattgaggtggtagagaggaggatcaccatgcgagagttggcggctgcctcgaaggagggccgcctgttggaggtgtttggtgcagggacggcggtggtggtgtcgccggtgaggtcgattcgttggggagaccagtgtatttcctgcggtctacgagatggagaagaagctggcccgatgagtctgcagatgaaaacgtggcttgaggaggtgcagtatggcctggttgagcatccttggaggtga

SEQ ID NO: 24940 - DNA, 929 bp, Emericella nidulans
agccgaacccctatcacgggtaacacgcaagaccccctcctacttgaaggaagcacaatccgcgagaacgtcgatccattcgcctactgccccgacgaggcggtcatcaacaccctgaagcgcgtgggtctgtgggagatcctcgagagcaaggatgggctggagacgatagccagccctgaactgttctcgcatggtcagaagcagttgctctgcatggcaaaggccatgctgcggcatgggaatattattgttttcgatgaggcgacgagcgggtgcgtatatcctttccttccttccgtcctttcattagtccctcgatgaaatcctaacgaaaaatagagtcgaccccgaaaccgacgaaatgatgcaggagctcatccgcagctgcttcgcccaacacactgtgctcactgtgacgcaccggctggacacgatcattgattacgaccgcgtgctcgttatggataacggcatcctggctcgagagcgacccaccgcggaccctgctgtcgcgtccatcagtcttccgcgagctgtacaagtcctcgcgcggctgggaagaatacgagcgtcaagagcgtgcggaagccgaagctcggagacgtgaaagggtcgagaaagagcgcgccgaagaagagctgcgtggacgcaggggactcattagtgagaaggaggaaccagagacagtcagcgcaatccgcgagcattggaatgtggtcaatcagctgttcggaggaattattccaagagccgtcccgaggacaaggagtcggagtcgggatcatagtgcagagaggagagaaagtaaaaggtatagtggtggggattggacaggcgagggcgatggggatgggggcgatgggggcttggggaggagggatacgaggaggcatttgactgggttggcggcgagggggttacattag

SEQ ID NO: 24941 - DNA, 465 bp, Emericella nidulans
gttgatgccaccttcacatctgacttctacagcggcgacttcatgaagggctactatcacgggaaaggcaagcatatatctgactcggtcgctacctacactggcgactacgtcctcggcaagcgccacggcaagggctttatggagtacccgaccggcgatacttacgatggtgactggtttgaggaccagtgccacggtcagggaacattcgtcgaacgtaagacaggcaacaagtatgttgggggatacaaggatggcaagcgccacggcaaaggtatcagctactgggaggttgcggatgaagagatggacctctgccaaatttgtttcggcgaggagcaggacgctctcttctatgactgtggacatgtttgcgcttgcgttacgtgcgcacgccaggtcgagatctgtcccatctgcaggaagaacatcctcaacgttgtcaagatctaccgcacatga

SEQ ID NO: 24942 - DNA, 1648 bp, Emericella nidulans
atggcgacgccgcctcctgaggcaccctctgttctaaaagagggaaagcctcaactgccgccgtcgccaaatggagactcatcttctgacttcgatcgcgcagggtatgtgctcccgttattcttagagcgtgttgagccgcagttgtgttaacttcctccccagtgtacagcctccggtgactgactccattccgatcccgccgaccgacggagctaaaacaactgagaaagatgccaagaatattagtatgaatggtcatgcctctgggcaggagaatggtatcgtgaacaccgcttcccctcccaagtcacctgcgcctccagccacaaccaccagcatcgcacaagatggaccagttgctgggaactcagcggtagatgacaaaccagccactcctggcaacgtgccgaaacagccgaccaacggcgctggtgcagacgacaatagctccaaggccacacccttgtcgcaaagcatcccgcaagattcatccgctacaccagctggtgtgcagtcaccacaaagcactgctgcggtcaaaaccgagcttcctcatcatccccatgctgctgtgcagcccgaaaaaccttccaccgtagatgtttcctctgcagcaaacgcgcaaccttcgccagctattgaccaggagatgcgggatgcacccgcttcaccaacgaagctctcgagggagcgcgaggttgaaccgaacgatgaaccttccgcgaagcgtacgaagatcgatactcaaggatccgccgaactcaaggctccggaattaccaacaccagtcacagatacaccaatgactacgggaaatggtgacggccctctcacaagggtacagcataggttccttgtcaaagccattcaaagtctgaagcgtctgcacgacgcgcggttctacaaggagcccgttgatcccgtcaaaatggctattccgacttattttgacgtcatcaaggagccaatggatttgggtaccatcgaacagaaactgaagaacaatgtgtacacgtcaccgcagagcgttttcaacgattttgagcttatggttcggaatgcgcacgttttcaatggacccgatcacattgtctccgttgagggtaaaaggctccaagccacattcgagaagcagatgctgaatctgcccaaggctgacgaagtggaggaaaagaagcctaagaaagctgcgtcgtccaaaacctctaacgctcgtcgagatcctcggccgtcagctggatcgaatgcagtacgtccaacaggtggatcaccccaggctacaacttttgccttgggacccgagggactgcctcttattcggagagattctacgaatgccgatggccgccccaagcgttccatccaccctcccaagcgcgacctgccatattcaacaaagccaaaaaagaagaagttccaatgggagctaaagttttgtcgagaagtcctcgatgaattacataagaccaaacactactcgtatgctttcccgttttattaccctgtggacccggtcgccttgaacattcccacataccacagcatcattaagaagcccatggatctttccactgtcagctccaaacttaataccggtcagtatgagaatcgaaagagtttgagatggacatacgccagatcatga

SEQ ID NO: 24943 - DNA, 645 bp, Emericella nidulans
cgagggggtaatgaggcgttagcgaacgtcttctccctgccaggagtcgagatcaggccgacgatcggtcgtgtcgatgctgagaaggccggtctcaccgtcaccttcaccaacggctcgacagtggcagacgtagacaagctcattttcgcaacgggctaccgtctcgtctaccctttcctcgtgcccgaccccgtcaccccgagtaatcgggtggcgggcctctaccagcacattttcaagattggggatcccagctttgcaatggtcgggcaggtccgcggtgctctgagcttccgggtttacgagtaccaagccgtcgccgtggcgcggtactttgcgaaccacaacgcaaagccccttccgagcccggcggagcaggatgagtgggaagtcgggcggctcaagtacaagggtccgacgaccttgttccacgagatcaagccggacttcaaggagtactttgagtatctaagggagtttgccggcccgcctggcccagggacgaacgggtacgagctgcccgtgtttggtgaggactggccgaacttggggttcgcgatcctacaactaaaggacaagtactggcaaagtatcaaggctgcttcgcagaatgggaaggagaaggtccaggcgaaactgtga

SEQ ID NO: 24944 - DNA, 1464 bp, Emericella nidulans
atacctctgtcagcccgccaactactgatacgtctagactcagctgggcaacttcgatcttctactttggtcaacttgctggctcctatccgatgacatacaccctgcagcattttcagacgaaacatgtcctggggccggttgtcatgctgtgggcgatcatctgcgctgccacggctggtgtgacgacatggcaggggctctatgcccagcggttctttttaggtaagtagcgctcctacggcatagatggagtttggcagaaatgtttatcctgacggtgcaggcttcactgagtccatcatccccaccgggttcatggtgacggtcagtggttactatacgcaaagagagcagtcgtcgcgccagagctggtggttctccgggactggctggttcactatcataggcggtgctttcaactatggctttgcgcagatcgacggtggcgcattaaaaccatggcagtacatatacgtcttcgctggggtgcttacgttcctcttcggcatctggtgctttttcctcccgaacgacccgttgaatgcgtggttcctcacccctgaggaacgacttgtggcagtagagagactccgagccagccagaccggcgtcaagaaccaaacggtcaagaagggacagctcagggaggcgattcttgatatcaagatctggctcgttgccctgaccatggctgctgcgtatggacccctcttcttcgccattcttacacctttctacttcttgtgagcttgtaaaggaacacacactgacaaatgtaggtataccgtcaacggcgccgtctccggattcggtccactcatcgtctccacgttcggctactcttccctcgaaagcatccttttccagtttccgctcggcggcctctcggcgttcggaatcattgggactggctggctatgttctcgataccgcaacatccgtgtcctctcactcgttctctgcagtctccctgtgatcgccggcttcgtcatgatctggaagtccagctggggccacaagccggtgactccggtcgctgggtactcgctcatcgggttcttcgggcctgttgtgggtctcacaatttcgctcggtgctagtaacgttgctggcgagacgaagaagagcttcatggcggcggcagtatttgtggcgtactgtgtagggaacattgttgggccgcagttaatccatagtcagcagaaagctgcgcattaccctgatttatggactggccttataatctggtatgtcttaggttggaatgaaatagctaggtggttgactgctgactcttttagttattgcattactatcctctctgcctcggtgctgtgtgtgctgtggttccgcgaaaacaggcgccgggaggcgcttaacttagatgaaagcgaagctgatcgacttgcttttaaggatcttacagacaaagagaccttgcatttcagatatgtgtactag

SEQ ID NO: 24945 - DNA, 624 bp, Emericella nidulans
atggcagacccggaatcaattcgaatcctcaccctcaactgctggggcctcaagtacctcgccaaataccgccatgagcggctctcagagataggtcggcagcttgccctcgccaacccgccgcccgacattatcggcctccaagaatgctggacgcaacaagactacgaatcaattcgcacccaaatcgcccatatccttccttacggcaaattctactttggcggcatctggggagctggtcttgccattttctcgaaatggccaatcgagcagacttctatgcacgcgtatccgctcaacggccgcccaacggccttcttccgcggtgactggttcgttgggaagggcgtcgcctgtgcgcggattcggtatgggcagggaaagcatgatgttgcagaagttttttgcacgcatctacacgcaccctatgagcaggagccgcacgacagttacctcgctcatcgcactgcccaggcgtgggagattgctaagctcatgcgcggcgctgctgagcgcggacacctggttatcggactgggggacttcaatatgcttccttcttcgttcgcacacaggcttatttgtgcacacagccccgtcgtcgatgcatggcaggtgata

SEQ ID NO: 24946 - DNA, 528 bp, Emericella nidulans
atgcccctacttaggacgcccaccattacgggggcagccaaagcttcgaagacgctggctgcctcaattgatcccaagccacccaacccaacagcaacctactacaacgctgagggggtgccccagcagcccatgccggccccttacgtgccagccggaggactcgggacgaacggaaccctcccccggtacatggtcaacagcgactgggactttgagtccatcgccctaggagtctaccaggaatatatagagctagacctcttccacgatgggcttgctaggttctcggacgcggactttgaggatgctggattgggtccagagatgcgctcccttatcgagttcatggccaaccaggaggtcggccacgccaccctgctcagcaacatgctcggtgaggccgcgcccaagcagtgcgtctacaactatccgtaccggtcagtccgcgaatgggtcgactttatgcaacgggtcacccgattcggagagtctggtgtctggggttttctgtctcatctcgactcc

SEQ ID NO: 24947 - DNA, 1242 bp, Emericella nidulans
actatgagacccggcctcattagcctcctcgtcggcatcctaaatacccccggcctcataaatgccgccctcaatacccccctcaccgtttctggccgctggatcctcgactctaccggtgcgcgcgtaacattcgcgggcgtaaactggcccggcgccggtgaggccatgattcccgaaggactgcagtatgcctcggttgcctcgacaatatcaaagattaagtctatcgggatgaatgtgatccgcctaacgttccccattgaactcgtcgatgatatctacgccaatgatggcgatactacagtcctagcctcgcttatcaaggctctgggcgttacgaatggaacggatgtcttcaaccagatcgtaaccaacaacccattaatcacgaatacgacaaccagaatgcaagtgtacgacctcgttgccgctgaatgcgcagcccaagatgtctacgtgcacctagataaccatatctccaaagcaatgtggtgctgctccaccactgatggcaacgcctggtttggggatacgtacttcgatgtggacaactggaaacgcgggctgcagtatatggcctcccatgcggcgtcctgggagacgttcacgtctatcgggttgcgaaatgaactgcgacagccggccagcgcaaaccccagttatccgtacaactgggaaacgtggtatagccaaatgactgaagcggcagacctggtgaacgctgcgaatccggacgcgttgatctttctctcgggcctgaactacgatacaactcttgcgccgatcccgactgggagcgatctgggtgaggggacgagattctaccttgaagatttcagttacgctgataaactggtgctggagttgcacaactacgatacaggcgcatcgagctgtgccaatctctccggcgccctctggaacggggggttcaaggcgctcgatacgaacagttccgacatcgttaacatcatgcccgtcgtcctgacggagttcggtttcgcgcaggatgaaacgacatggcagagtgtctatgcttcgtgtattagggagtggattccccagcagcaggccggctggatggtttggaccattagtgggagttactatattcgctccggaggccaggactatgacgatacctgggggatactcgatcacacttggtcaggctggcggaatgaggaggcaatcgagcagggattgagggtcatggtggaggcttcgcttgaagcctag

SEQ ID NO: 24948 - DNA, 925 bp, Emericella nidulans
cagggccctgcgctggctccgccaaagacgatcaaacctgcgccagagacgtccaaagacttctttcgcaacatgcgggacctgcagaattgcatggccgacttctctgatctgcacgactcggcagtttccgctcttgctccaatgacaaacttctccaacgaaaaactgtcttccgctgtttttctctcgtgcacagtcctaacagccgtactatttctgactgcacatcttattccctggaggtatatcatgcttattggcggcaatgccgcactcttatcgaagcatcccaacattcaagaattccttcagggtctcgccgctgaacttggcagcgaagagttgacccaggtaccctctggcaaagcaccagccccgcatatgcccttcatgaaactgttagatgacatatcactggactcataccccgaggaacgtgaggtggagatattcgagatccaataccgttcactagccccttacgccgagcaggactgggaaacgtttcttttcagcgcggtaccatacgatcccttatccccctctcgcatcgcaggcgatcgggccaaggggtgccgattcttcgaagacgtccagcccccagccggttgggcgtggaagagcaagaaatgggagctagatctcgactgccgggaatgggttgttgagcgtatgatcacaggcgttggctttgaagtgccagggagcccttccgaaagcggtgccggctctgatgagattggtggttgggtttgggaccttccatcggcgtcatcccttaggagcgacgatgatgtagcgtctgcccttggatatgggacccttggtcagattggggagaaaaagaaaggcaagaagaagggcaaggaaagggctacccaggactacgaggagaaggggagtcctgggtccaatgttatgg

SEQ ID NO: 24949 - DNA, 234 bp, Emericella nidulans
atgcttgacttcttatcaattctgcaactatatatcggtcgactggggcctaccttcaaagctcagggtgtctacatctcgtcctgcaatttcgccgcagtgctggaatatgcagcgcccaatgcacttctaccgcgcgagttcctcacaaatgctgcccagtcaaagtctatggatgatatctattttgctcccaccgattctggacgcctgtgggagatctcaagaccatag

SEQ ID NO: 24950 - DNA, 470 bp, Emericella nidulans
atgcattcggcccaaaagacactcaaacaccgcgcgaccgttcaacaaccgctactctgctcggcaaccgccctggaagtcgcagcgacagcgaggacggtagtgagaatgagtatggcttgaagtcctctggaaagcgccgagcattggatcacgatcaccccgacgcctttgaactcgacattgacgatatacattccgatgacgacctgcctccggctgccccaacgcgaatgcgccgatcaccgtctcaacctccgcagcagtcatcgtcatcccaagctccacaagacagtgtgtctccgtcgcggcgcgaagcggggaggagtgcacgagaggcgatccgagatttattctctggcggaccctccggggatcacgtcgcttggttccgccagctggacgaagattatatcaagccccgtctcctcctggaccagtcgaaccacaagggccctggcgctgtctag

SEQ ID NO: 24951 - DNA, 610 bp, Emericella nidulans
atgaccaccacgaccaccacgaccaccacgaccaccctgccgtatgttccggacgccgttgcttcgatttcggaagatcaatttatctcaaagcgctaccctcagcaatttgaccaggttcaatctctacgggcgtagcatggcgacgcttatgaatcccgtcagggacccaaataccctgtccaactataacaactggctttgcactcatactactgccaacttcgagatcttttttgaggaaaagaaactcgtagggaacgtcgtccacaagctcagatcaataacgaacgctgagacggacgagatcatcctcgactctcatcatgtggacatacgcaatgtccaggtggcgggcttgcctgtgaaagcgtgggaacttctccctcccttgggcccttatggcacggctctgaaaatcaaacttgaaaatcccgtgggactcaacgagataatcgatgttgatgtgtgttgagcgagtcgtgtaggctgccttttgagctaatatactaaccactattatagatcgctgtgcagaccactaaggagtgcactgcactccaatggctgactccagctcaaacgtcgaacaagaaacatccatacatgt

SEQ ID NO: 24952 - DNA, 1302 bp, Emericella nidulans
ccatctgcccttgtccgccgtcaatccgtgggagacgtagagctgcgcattcttcccttgggagcatcaattacctggggtttgaagtcggagactcacaatggttaccgcaaatatcttcgggaccagctccgttttgacggctgggaagttaatatggttgggagtaaacacgacccagattcaacgatgaaggacaacgtacgttcaccacttgctataattcagtaattgctgctagcggtgcacatgtcttttctgtcttttgaagaggatccctgctgatagcatgttgcggaacacaggacgtcgaagcgcactccggcgatacaattgacatggttaccgccgcagtgcatggatcgctggcgtacaagcctaatgttgttctgatcaacgcaggtacaaacgattgtcgcctaggcattgagatacctgaggccggagcccgcatgcgctctctgatagagacactggtccaagcagaggacatgagccgtactttgattgtcctttccaccctgcttcctactgaaaacgcccaggctaaggctaatgtcccgagcgtaaatgcgcagtaccggacgctcgtgaaaaccatgcgtgaggagggtgtctccattgttctcgcggagatgaacagggcagacggctggattgctttccccaacgacttcgccgacgatactcatccgaacgaagctggatacaagaaaatggcgtctatatggcattcagcgatcaaggatgctgcgaacaagaacctcattgttgcaccggcagcgtttggaagcccagggggaagcgatgggcagtgcgagagggagtacggaactggtgtttatgccggtggattgacgcaacgtggcagtggagaagaggatgggatctactatcacgacagcgaggcaatgggtgaggtctttactgtgcttggcggagaagatgactttgacacgttcttcttcgcacgaatattcagtcgtgaccgcgacgatatgctcagatggactaaggccgacggcagcgtcaagtacctccttaatcgaaatattgacgggcagagcacaaagttcgtcgatgagcacatctctatgaccgttgaagataactgtaacccagctggtgttaatttcatcgatgttaatggttagctttgccccgttctttggcttgcctcgtcttctcctttcaagctgttacagcactgacatcactagctgatggtttggacgattttgtttgtattgcaaaagacggaacggcctacgcaagcatcaacaccggtgaagaccctcctag

SEQ ID NO: 24953 - DNA, 635 bp, Emericella nidulans
gtatcccctggctctacacttccccttggaagcggacgggtgggattcggattggatgctgacaacgtttaccttgcgagatccgccttcgactgcacaggaatgtcccatgcaagaccgttggaaggaggacgtcgtcgagcccacaagacggtcagaccggatgtcttggatgctcgtgagctcagcactggcgctcgcacacgagcttggcgtgttcaaccctagagaccatataactatgttaaaacgacagggcacaatcgcaggtcctgatgtcgagaattatcttcaggatctggagcttagacgccagcgccttccgtcgctgttgtttgtgactacaaacctgctcgcttccaggattggctgcacgtccattatgccggattatggcaaggagccgctcgaaagccttaagaccgtcgaccctgattgggcgagatttatgatttcgtgggtgaatttaacgggattgacccggaatctacgagaaacattcttcaccgcggctaagagtgctggcagccagcatatgaatttcgcatcactagagcagtggaaggcccagcttgcagcatggaaagacgatatccacgacattcagagtggggttcctaggtgtttgggcgaat

SEQ ID NO: 24954 - DNA, 609 bp, Emericella nidulans
ctgctgcagcctttcaccgacggccttactgatctcggcattacctacaacctctatgcagagcagtttcccagctatctggcccagttcaacggaatgcaggctgccatcgaggtcggcatcgcccagtacggaggttggctgatcccacggtccgtggtcattgagaacaacgcagccctcactgacggctatcgccacatcaccgagtccggagccactttcattggcgtcggcctcaacgtctccaaggcagtctccggagacgttcacaacgcggtcctccccgcctggcgagacgccttgattgacacgacccttacaacaccgtgggagtggaacgccgatgaggagatgctcgctcagcagcgcaagatgaccgaggactatattccgacattgatggcgctggcaccggattcaggggcgtacatgaatgagggcgatttccgccagccgaactggaaggaagcattctatggatcaaattacgataccctgcggaaagtcaaggccaagtacgacccgaatgatgttttttatgcctctaaggcggttggctcggatgagtggactataagcggcaatgggcggttgtgcagagcgtga

SEQ ID NO: 24955 - DNA, 748 bp, Emericella nidulans
ttttgtacgaactcacgagaaggcgctcgcgaatgcactgcagctgaagcgccaaccgacccgaaatggccatactactcagtcgggctcgtcctcgggctcgacatcctctacactcgctgcggccttgtcctttggcgcgctgaaattcacttcgcagagcgtcaagcccgcgaaacttactcttaccccacatcatctcttttacctcctctcccgctttgaagagatctccattgccgtgggccccatgaatgttagattggagaacatccataccgacgtgtcacaatcctacgtgtccttcctgaataaacctcaaaggtcaaagggtgacagagactcgattcactccgtgtctagcgtccgtagcgtcatgtctggtatgagttctctctggtcgtcgttcggtttggtttcaaaagagtcttcctccaaatctgaaaaagccaaggccgccttagaagcggatattaagtacctgtactcggcttttacaaagatcccctgcctgcgtctagcccccgaccgtcgcgcacgcctgatccgtggctacgaagaattcccctttgacactgccgttcctcttcattccttcaagaacttgagcgcgctagaaatcattgatatagacttccgttccttctacggctgggaccgactctcggaacaactacgaacattaaccctaaagagggctaacattgaagacccggcggagttgcttacaggcatcgtgttggatgac

SEQ ID NO: 24956 - DNA, 1396 bp, Emericella nidulans
cggctcgcagacatggccagcaagcgtcttctccctcgtgacgggcgcgtgcctgctcccgatcgcccggctggcagatatttacggcccgcgtcttgtcttcaacgccggcctcatctggtacatcgtctggtcgttcatcgcgggttggagcgttaattataagatgctcgtcgtgtgccgtgcactgcaaggactgggtccggctgcattcttgccggctggtatcatgttgataggaagcatctaccgacccggcccgcgcaagaacctggtgttcagcctctacggggcgttttcgcccgtaggattctatggggggatctgcgtcacggggttggcgggccattatctgagctggaaatggtacttttatataggctgtctgatagtggtcgtcgtcctggtcgtctccctggtaagtatgccgcttattcggctaccgcggcatacatcagacctcaagatggattggtgggggtgctgcaccatcgtgcccgggctgatcctgctcgtcttcgcggttaccgatggatcgcatgcaccggatggttggaggaccccgtacgttctcgtgacgtttctcctcggaatagcgctacttgccgcagcattttacatcgagggctgggttgcgtccgagccgctgctcccttttgatgtcttcaaggtcaagtcgatgagcccgctcttcgttgcgctgtcattctcgtacggtgtattcgggatctacctgttctacgccagtttctagtaagtcaatcctgatcgctccgcgatggcagctaatagggccagcatccaagacatccttggccataactctttgatttccgccgcctggttcgcccccatggccgccgggggcgtaatcctcgccacggttggcggtttcaccctgcaccatctgcccggaaaacttcttctcctgatctccggcgccggctacctcgtttcaatgctgctgtttgccatcattccagacaatcccaactactgggcatacgtgttcccggccatggtggccgcaacagttggcgtggatatcgggtacagtgtctcgaacatcttcattacaaccaacttgcctcaaaaccggcagggcgtagcgggcgccataatcaacacgatcgtattcgccgggatcagcttcttcctcggcttggcggatctggtcgtcgcggagacgaaggatttaggagctgctgggagctacaaagctgcgttttggtttggagtcgcttgctcgggcgttgcgattttgctgctggtgttcattcgcgtcggaaaggcgcagagtgacctaactgttgaggagaggatccagctggccgcgtcgttggctgtgggggatgttacgccggagcagttggctgcggccgggcattcgagctga

SEQ ID NO: 24957 - DNA, 1358 bp, Emericella nidulans
atgcgccatctcgttgccagctctctgctggccagcgcagcagcggtcaacctcccgcgacaccatcttcagatccgccaatcctccaacaccacccgaaccgcgcatacgatcccgctgacggcgacgctctacggctcacgctacaatgcgcccgtcacgatcggcaacaccgaattcgacctgctcgtcgataccggcagcagcgacaccttcgtcattgaaaccggctacgaatgtttcggccagtccgtgtacactggcgatatcgtcacggccgagcagtcgcagtgcgcctatgcctctgagacctataaccccagcgaaagcgataccttcgagccgatcaacaacgagacgttcatcgccgggtacggcgccggcgtcgcgaccggctcaatggcctatgaggatatcactctcggcggggtgacggtcactgaccagcgtttcgggttggtgaacaggtcctcgcccatggggctgggcgccagtgggatcctgggtcttgcgtacccggtgatcacgtcggcatatgaagtcaacggcaccctggaagactacgtcgacgatctcgcagaggacctcgatgatgatgatgtggacacgtccatcgaacaggaaccgtacagcccgctgttcgtgaatatggcgcggcgcggcctcgtcgagccgtacttctcgctcgcgctggagcgacttgacggcgactctgagactggcgacggcggcgtgctagttctgggtgggctaccggacgtcaagctcgccaacaacttcaccaccgttgcggccgagtactacgaggcggccgagttccgaagcgacaacggcaccagactgcgctcgtactgggcgacgaccgtgcagaggattagctacggcggcgacggcgagtacaccgcgtcttaccagacgatcgtcgactcgggcgctcccatgaactatgtcccaaccgaggtcgccgacgggttcaaccaggcgttcagctcgtccgcccagtgggatgacacacagggtgcctaccgcgtcgactgcgacgccaacgcccccgactttgccgtacagctgggcggaaccaccttcaagctcaacccgacggacctggtcctgcggtcgggcgtcgagtttggcggcgaggagatttgtgtctctgccgttacgcgcggactggagcagcagatcaacgagactgataccacggaactgtacatcctgggcgcgggattcctcaagggggtcgtggccgtgtttgactttggcaactcagagatgcgctttgccgagagggatacgagcgctgcttctgtgctggaggtgtttgggggccggaagttggccgttgttctgggggtgat

SEQ ID NO: 24958 - DNA, 437 bp, Emericella nidulans
acagccagcacttcatcctcgccctcagcgactacttcttccatctcgccgtcggttccacatggcagcgcttccgggataccctctctcaaatcgaggcatgcctagaccgcggcgatatcgacgcaaccatcgaagcagcccattccattcctacactgcgagcgtaccacgagaacaccctagaccagatgctcttcgcgctctttctgactaaacggcaggctgaagttgcgaggctgctagaagggatatttgacacgattctgaggtttgcgcctctgtcgcgcaaggatgggacacatggcgtgaggcacgagagtgaagccatggtcaagcggttgtatgcagtgtttaggaagcaaatggccgcttttgttgggtatttgcgtagcctagatggtgccaggggggcggtggcatcgtcatcaaaggca

SEQ ID NO: 24959 - DNA, 393 bp, Emericella nidulans
ggcacaatgaaccttttcatcgcgctgaagaacaaggagaccggcaagaaggagcttgtgactgccaatcttgatggaaccatccttgagggcgttacaagagactctgtgctagcgcttgccagggaaagactggtcccgaagggctggcaagtttctgagcgtaagatcaggatggcggaagtcgccgaggcggccgatgagggaaggttgcttgaagtatttggagctggcacggcagcaattgtcagccccgtgcgaacgatcagctaccgtggcagattggtaaactgcgggctgaaggaaaccgaggaggctggagagattgcttctcaaatgaagaactggattgagggaatccaatacggtgacgaggagcacccatggaggtaa

SEQ ID NO: 24960 - DNA, 249 bp, Emericella nidulans
ccgcgcccttctaccgtcatcatgttccgttccgctgtcgtccgttcattgagggcctctgtgcctcgtgccgtcaagcctcaggctgctctccaaatccgtagctctcccgttgctcgtccagctcaattggctcctcgctttgccttgccggctgtccgcttctattccgcccctgccggtcttaagaaggaagaggttgagggccggatagtcaacctcttgaagaactttgacaaggtcggttga

SEQ ID NO: 24961 - DNA, 552 bp, Emericella nidulans
agtggtgtctttgacacatctaccgaccaaacgctctatttatgggttgattccaagacatccggccctgagacctttgaggccgtcattgcggctctggagcctctgcgccgaaagggctacttgacaaccgtcaagaacaacgaaactctcattcagggaccggtcaccgtgattggtactggcaacactccctatgacatggttggacctgttgcagaccgcgactacttctacgacgggccccttgctgctctaaatgaaagcgggaatgagggaatcacgtcgctcatttcacccattgcttctaccagcttcacttctgcgattggcgaactcactctgggtgttgatagcgttttgagcgatgagcagcttgatactcttcgatctcagatctctaacgcaaaggagaagggcatcaaggccagatactggggtgcgccttcgtggccgatccgggctcgcaacatcctctggacgacgcttataaacgagggagtcggattgctcaatgctgatgatctggctgctgctgctgaatacttttag

SEQ ID NO: 24962 - DNA, 484 bp, Emericella nidulans
cccttcttatcgaatccaatggctgggatggcggtgactgtctttttcttcaatgatgaaaacagccagtcgaagaatattatgaccaatgattcaggccatttttcggttcgagcgtcgctgtcctttgttcccacacacgtgcgcgtgcttgcatcggaggacctctccgctgtgaagaacgtcgaaatcattgaacctacaggcgtcagtatgatcagtgacattgacgacacagtaaagcattcagccattgcgagtggagcgaaggagatgtgccgaaatatattcgcccgcgagctgtcggatttgaccattgagggcgtcactgactggtataatgcaatggccaaagcgggtgtgcaaatacactacgtctcaagctccccatggcaactatatccgctgttagatcgcttcttcaagatggttggcttgccgcctgggtctttccatctgaagcagtatagtggcctcttccagg

SEQ ID NO: 24963 - DNA, 692 bp, Emericella nidulans
gctgcttggcggccgtccttctcaccggggaacctgtgtttgataacatgcgcaatggccatgatgaaaactgccggctgaaagctatcgaagagctaaaggtgaagatgcatcgacttaatgtgggcgaccgagctcaagacttcgttttccggctacttcagcaagatgtacgcaagcgcatggatgtcaaacaagcactgcagcatatgtggttcaccaacccgtcgcacaaggccgatttcgaggcactctacaagcgttgtatcagagactggaagccgcgcacggctgaacaaccattaattgttaagctgaatacttacgtcaacggtcagacccagaaccagaccatacccaggatcaagaaggagcattctttcgtggctgaatcctcctctcaggctgatccggtcccaccatcaacaggcgagacagaagacaagagccccgagagcctttcagacattgtccattctccgtaccatgacaagtctcaacaaacgcgctcttcggctgaagtagcagtatccgtattgcaaccggaggaggactacgtaaacggtataaagcgatcccattccagcattgacgaggttgaggatcgagtttacgaggaggtaatgaacccggtaactggaaagcgacagcacttggtgtatggctactgggccacggccgcgaagaaatga

SEQ ID NO: 24964 - DNA, 468 bp, Emericella nidulans
accataatgcttgcgcctgagcccccggtcaagctagagggtcactgctctgtgatccacgacaacactctttacacgttctcctccaacgggttcgcttacattccgctcgagcgcaatggcacatggtctcctttgaacacggatggcgccgagctagtctcggatgcggtgtgtgttatggggggtgttgatggtaacgagaataagacggcgctctacgtggttggagggacatcctcaaaatcaaatccgccaggaatacagcggttctcgttggaggataagacgtggaaaactctgaatgtggcagtggacaacctagccaaccggacgggtcatagcgccgtctatttaagatcaatctcgactattttgtcgtacggcggcagcaccactgatggatcccggccgtcttctgaaactttcacggtgattaccaagccgacatacagccttgactcataa

SEQ ID NO: 24965 - DNA, 1229 bp, Emericella nidulans
gaacttgcgcaacaatgtgaagaagctggttagtagcttcggctgcgctaccttgcattttcatactaactcaacctagaacgctacctccaaagtggacgccgtcatcgccaacaaccccgacaagacgctcgacgagctcgttgcggagaagaagatcaacgaggatcaaaaggcacaggcactgaagaaacctgttcttcaggccaccattgcgcacgtggaggagcagattgcgcactacaaggagtttgcgacattctacgaacagcgtctggccagccagaaggcggacgtcgagaaggcgcacaaggaggtggaggctctgcgggagaaggctgccactgcaacaccggcacccgcagagcaaacacctgaagtaaagaaggaggatgccgctcagcaattgctgagcgtgacgaggttcctgagcactgctgccatcagaagacatcgtggtgaggacgagactacggctgagagtcgtgccttcgaaggtgtcctcgcccaggtctacggaggccacctcgatgcagttgcctcgatgcagaaactcattgatggagccgatgagaaggttgtcagtgttgacggcgagaagcttgaagtcacctgtaagttcttataccctcacttaatgtacttgagattgagactcatcaaaacgcagtcgctcgtgttaagcagctctccgaacaggagacagtcgcgtcaggccgttcgcagcccgctccagaggccgcgaccgatcccactacagccaacgccgcttccaccgaacttcaggacccggtatatgtcactgaagctgctatagacaacgccgccaccgcctccacaaatgaggctgagagcgttgtccgccgccgcagacacttgttggggaaggtgcaaacgcggtcgctgaatccgcatgggagccgaacagcgaccctcttgcctcttccacgaacactgagggctttgtagagatccctcgtgacccggctgagacggaaactggcctccaggcgactccggccaacataaccgccgacgttgcctccgaggacgcagaaaaaactgaaaacgactttgagcaggtgggcagccgccaccaaaggcagtctagcttccgaggtcggggccgcggtcgtggtcgtggaggcgataatttccggggtcgtggccgtggtgacttccgtggtcgtgcgcggcggccgcggcggccgtggacgtggaggacctaa

SEQ ID NO: 24966 - DNA, 642 bp, Emericella nidulans
caatgctccgtatacacaaaccacgtcatcatcacgctagcgtttaacgtttcgaccgacgttatgattatggccatccctctgcccctgctcatcaaagcgaaactgagcctgtcaaaaaagctcaccctgtgcgcgctcttctctctcggcgcctttgtcatcctctgctcgatcctttccaaatactactccatatcgtcgccctacgggatgaaatgggtcgactggtacgtccgcgaagcggcgacggctgtgattgtagccaatatcccgcagacctggaccctgttccgacgattattcaacttcaagtccttcctgcagcattcgtcgtacaaccgcagccggagcaagagcggtactaaatacgggacgcgcttcgacagctcgacgatccatctttcccggttcaggggcgataagtcgcaagtgcagtcgaccattgaccgcaccgagtcaggggagcatataaaccgcgagccgctagagatctgggcccaccgtcagttccacgttacgaatgagctagatgaagggcgctccagtacgagcagcggcagtgtgagccagggcagagagacgccagagttcgatcccaccaaggccgcgactgtagtgaccgtagggagaaatgaataa

SEQ ID NO: 24967 - DNA, 1973 bp, Emericella nidulans
atggaactctgccagcggtcgatcgaagaagaatacggcagcaccaagctctggattatttacggagagtgggtgttatacctgtacaattccgcgcacggcgactcgagccaaagccgttggtcggaggaagatcggctggtgggccgtgaagtcttcacctggcagacgatcttggacacatggcagaggggcgctgaggcaacgaggtggaggatccacgacagtcatctcgtgtgggaccgcctgttggaattgcaagtgcgagatctctctcgaaacccgtcccaggataagatcgcgcgagtacgagagctgttcgatatccgactgcaaacccctcacgccacatgggacttgacattccaggcgttctctaatttcatctcaacctactacaacgctaactacgagaatattatggcagaaactgcaggaaaatatgccactccggtcaaggatcagtatgcggctcgcgaggatctcgaaattcggctccgcaacgccgctgaatccggggaccgggctcaggagtgggcaatatttggcgaatacattgagtgggaacttaatcgcaaccgccggagacgaaatactaacttcgaactaatcaacgcaatataccaacgcgcggttttacgattccaaacagacgcgaatatctgggaggattatatcatgtttttgatcgatgaatcaatgcacggcaatgcacacccgacaacaatctctgcgctcgacagggcgactcgccactgccctggctccggcactctgtggtcgcagtatctgctcagctccgaaagggaaggacagccttttaccaagatcgccgatataaagcacaaggcaacaagcaccggtttactcgatgttggcggcatggaagaggtactgaaggtgcatacagcatggtgcagctaccttcgtcgacgtgcgtttttgtccgaagcaactgatgaagacctggacgtggccgaggtgggaattcgttcggcgattgagagcgtccaggaacttggcgagaagaaatatggtcgctcctacgaaggtgacccgcttttccgcttagagcgcatttacatacgctacctcagtgaaagtggcagctgggacagcgcccgagaaacatttaaggggctcatgggacgtcgtggcaacagctacgagttctggctgacgtactatcactgggaattggtttcgtggagcaagtttgtgcaaggtgaagcaacagttgacgctgctccccgaacacccaatcccagctttgccacggctgttctaaaacaagctatcaagcggacggacctcgactggccggagaagatcatgcaggtctacgtcgcgcactgcgaagactacgaggactcggaggaactgcagctcgcaattctggagactcgcaaggcaatgcgagctatcaacgcccgtcgtcagcgggaagcccaggaggctgccgctcaacaggcagcggcggcagcgaccgaaacccaggaggcttctcagtcggaaaagaggaaacgagaagatgaatcgacggcaaacggcctcccaactaagagggcgcgagcagacagagcgtcagttgaagcggagccagttgcgcttcgccgtgatcgtgaaaattctacggttgtggtcaagaacctgcctcaaggcaccactgagcacaaagtccgacaattcttccgtgatgtatgtttttcgtccttttgctaaatgcattagctaatttcatatagtgcggtgctattaatggtgtcaagatgatgcctggtgaagacggaaaatcggaagtggctatgatcgagttcaatactcgagacgatgcagccgctgcacagactcgtgaccagaagactttcgatggcaacactatccaagttcacttcggttccgagacgaccttgtttgtgaccaactttccccctacagccgatgaaaactacattcgagatctgttcagcaaa

SEQ ID NO: 24968 - DNA, 1572 bp, Emericella nidulans
atgttgacggttgacgagtcgtgggttaatgtgcagcagaagacattcacaaaatggtccgtccacccgaaagccatcccctccgtcgaagccggcctgctcacccgcaccgcccatgtttcggagctcgccaatgtgatctcttttgttctctatggctcggattcagctgacttcatcttctattcttgcaggctcaataacaagctaaaggttcgcgatatttttgtgaataatctggtgccggaactttcaaacggggtaagtcgtctatagctccagcgcgaagcccgtattgctgatactgcgcttgctgttattcaggtcacacttatccatttactcgagatcctcggcggagactcactcggtcgatatgctgccaacccaaagcttcgtgtgcaaaaattcgaaaatgttaacaaaagtctcgactatatcaaggggcggggaattcagatgaccaatattggtgcggaggatattgttgatggtaaccagaagatcatcctaggtctaatttggacgcttatcctgcggtttactattagcgatatcaatgaggagggcatgaccgcgaaggccggcctcttactttggtgtcaaaggaaaacagcatgctatgagggtgtggaagttcgagacttctctacgagttggaacgacggcctcgcattctgtgcgctcttagatattcaccggccagacctgatcgactatgactctttggacaaaaacgaccaccgaggaaacatgaagctagcctttgatatcgccgcgaacgaagtcggtatccctgatctactcgatgtcgacgacgtgtgcgatgtcgccaaacccgacgaacgatccttgatgacatatattgcgtactggttccacgccttttcccagctggagagggtagaaaatgcgggacggcgtgtggagaagtttgtgaacaacatgcacggcgcatgggagatgcagaactcttacgagaaaagaatgagggaactcttacgattgattcgcgcccagcgtgaagagtggaaaaacgcctcattcgaagggacatacaaggacgcaaaggagcaggcctcccagtttgccatgtataagcggaaccagaaacgtcagtgggtagcggagaaatcagacctcgcagctctcttgggaaatatcaaaacgaagcttagcacgtatcgccttcgtgcttatgatcctccgccagagttgtctcccgaagcctgtgatcaagagtgggaatgtttgacccgtgacgagcatgagcgcagtcagctcattaacgaaaccattcgagatattaagaacgctctgcgccgctcattcgcagataaagcgaacgacttcgcgcttaccttgaagacgctgtctcttgcaatctcaggccttgacggagacgttgaagatcaacttgcccacgtcaagcgactgaacgacaacttaccgccgctcgatgccttcttggaaactattgcggagcttgatgagcaatgccaggaagcaaatgttgaagagaatgactacacaacatatacattggacgaactggcttatgagttgagcctg

SEQ ID NO: 24969 - DNA, 1624 bp, Emericella nidulans
tgcatggtctatcgataccctttggcttgccgaggtcgcatccgatgaacagaacaggcaagcagacaagccatactctccagaacaacacgtacaggtggctataataataagttatcggctctcgacttcttgatagaatgctagcatgccatcaatcttgaccccattctctacaagatatgatttcagagacaatctatctcacacagaaccctatcgggaatgctgtcgctgcctctgcggtgacaacgttatgcatatggatttttgccaaattcctacaaaaatggaatgtattcaagtcgaagcctttgaaggtacctaattatcagaaatcaacaaggaaatatggaggtagagtctcctctctagtttcacaaacatacgatagggtgctaagcatcgctctggatgtagaatggacaccgtccaacttcaagagaccaaccgcatctccctaccccaactgggacgtccacaccacgaagccaattccgtaccgaccatttagatacggaccgtaagtgattctgaagcttcttggatgtctgtagagttaacgcgccacagcaactacttcattaccatgggcctgcgaagcatgaaatgggacgagtggatcggtaagccctgatctcatattcagccacacttactgacagcaaccagagctggacaaccactacttccgctaccacagagacaaatcccgtcggctcaaagaacgtggagacaaatgctgcgcaaccgcccccgaagcatgggacgccgctgtcgaacttcttgaagaactgtataacacccctgcctccatcgatcccttcaagtatagctaacactccatccaaaacacagtacttcctaccttcccgagcgctacccaagcatgttccgcaaaactccaactgggctcaccaaccttctcacaaatgaaaccttcgatatcacacagcgcccactccccgaagaccccatggctatgtgcgctcgcctaatccaggacgacctcgctctcatgattgaaaagcctgacggcgaatactacctcctagccggtgcgatcctcctcgccggcttctggcgcctctccgacaaatatggcatgcgactgtctgaaatccacacatccggcgacgtcccaggctacaaagagaaattagaaagggggatgatgaacttcttccgacgcctgaaggttgaggaccctgtcgtgcgcaataactacttcatccaggtcgacgacaatctagcctggagtcacagtattgggtcggaagatgcggacgtggtatcttggaacacggcgcagaaagataaggccattgaacaccactacttccggtccgagagacagtctctgcggcggttaccgaggacaggcgcagtggtgttcaccatcaggacgtatttcgagccgatcacaaagattgtcgaggagccatatgttgcgggaaggctcgcaagtgcgattcggagttggggcgatgatgtggcgaagtataaggggagagaaaagtatggggatgttctgctggagttcttggatcgaaaacatgcggaacaagttgcggctggattggatctcgagagggaggacaaggtgaggagttatcctttttag

SEQ ID NO: 24970 - DNA, 426 bp, Emericella nidulans
ctcctcagcgtgggctctgaaatggcttataccatggcagcgcgcgagatccttgcggccgagcacggtatcaaagcgcgtgtcgtttcattcccttgcgcacagctcttcgagcttcagtcccgcgagtacaagcactccgtcttgaaaccacgcgcgggcaaacccgctgtcgcgatcgaggcgtacccttctgttggctgggagcggtatgctgatgcggcaattgcgcagaaccagtttgggaagagtctgccgtgtaaggaggtgtatgagcactttggatttagtggaaaaatcattgcagataaggtgaaaggattagtggatgaggtgagacgcgatggtgttgaggtgttaagaggtgactttcgggatctgaatgggggtcctagtgtcggtgtggagcatccaaatgtgccttag

SEQ ID NO: 24971 - DNA, 878 bp, Emericella nidulans
gtgctgattctggccatggcggtcagtttcggaattcaatcgtggattgagggcggcgtgatctcagccgtcatcatcctgaatattgttgtcgggttcttccaggaatatgcagccgagaagactatggagtcgttgcattcgttgagttcgccaacgggaaccgtttcaagaggcggcgagaccttctcggttccatctgctgagattgtccccggtgatatggttgagttgaggacgggtgataccgtccctgcggatatccggtgagttaactcttattcaatgatggaggtacggggattgacctgattagactggtcgaagccgtcaacttcgagaccgatgaagcccttctcactggagaatccctccccgtgcaaaaggaatgcgactctacgttcaaggaagagaccggccccggtgaccggctgaatcttgcctacagttcaagcactgtcactcgtggtcgtgccagaggcgtagtcgttaatacaggcatggctaccgagattggttccatcgcggccgcgcttcgtgccactaacagcaagcgccgtccggtcaaacgcggtcctgacggcgagaccaagaaacgctggtacctccaggcatggacgctgactggtactgacgcagtgggccgattcctgggagttaatgtagggactccgttgcagcgtaagttgtcgaaacttgctatcttgctatttggtgtcgctgtgctctttgccattattgtcatggcagccaatctgttctcgaacgataacgaggtaatcttgtacgctgttggaaccggtctgagtatgatccctgcctgtttggtggtcgttcttacaatcaccatggctgtcgggacaaaacgcatggtggaa

SEQ ID NO: 24972 - DNA, 315 bp, Emericella nidulans
tccctgccaggcagccaattccggaccgtcttgatggaacgagctgcagcgctcgctgaacacgccgacctcggcagcttcggacgcatgtgtcgagttttgcaggaagtatggcgtgttaacgacgaattcgctgaacaacacagcagcttagacgagggtgcatcatcatcctcgcaaacggccagtcccgtgaaggccgagccgcccagttcccccagagagagcgagaacagctggacgacgaaagaagccaagaaaccccactggcgggacatcatgcagcagaacggttggaactaccttcttctttga

SEQ ID NO: 24973 - DNA, 407 bp, Emericella nidulans
atgttttggcgcttcggggggtatgcgagcgtctccgccatcgactcccttctggacaaacccgttgtcagccttgaagagctgctagacgaatccgaactgatccaagaactcaagcaactgaacgcgaaactcatagagtatctacgcgaagatgatgtcttgaagaagcttatggactacgtgatcgcccctagcctggtgaacgatgatgaagatgacggtgatgcggacacggctaatcaaaaggagggttctcgggcgaaggatgatgactccgcggccggagagaaggagactgatcctctcaaggatacctggatcctgaggaccttgagcgagcggattatgagcgtctcaagcgagcctatgttgcgtgcgagattctctcatccgaagtgtggtcc

SEQ ID NO: 24974 - DNA, 1275 bp, Emericella nidulans
atgggctctattgctgaccccgagaacacctacgactacatcgtctgcgggtatgtagcttcgatctctccgttcctgacctcgctataatggcagtgctgaagacccagtcagcggcgggacctcaggatgcgtcgttgccggccgtctggctgagaacaaggatgtgcgtatcctgctactcgaggcgggccagcataaccgtgacctcgagaacgtacacatggccggcggttggtccaacaacttcgactctgagaccgactggaacctgattaccaagcctatggcgggggtcgataaccgccaggtcaagctcagtcgaggccggttcctcggcggcagtagtgggtgcaatggcaccctctgcatccgcggcagcaaacaggactatgatgactggggcttggagggctggagcggcgatgagttcttcgaggcgatgaagaaggtacccctccctttcttttggctttcgtcatccccgcactcgatagatgaaacgtgctaaagagtcagtccgaaacattccatggcaagccctggttcaaggccgacgagtcggcccacggctactctggccctctacacaccgaaccgcacgacctcgcccccatcgctgaccggctgatcgactccttcgttgatcagggccttcccctgcaccacgacatgttttctacgggcgacgtcccccacggctgcggccacgtcccccgcaccgtctacaagggtgtccgcaccacatcggccgacttcatcaccaaggagtacgaccgcaccaatatcactatccagaccgacgcgacggtcgatcgaatcattatcgagcggaaggacgacggcctccgggcagtgggtgcgttaacccgctccgcagacgggacaagcaaagcctactacgcccggcgcgaagtcatcgtctctggaggcgcatactgcagtccagcaatactcatgcgctcgggtatcggagcgcgcgacgagctcgcccaatttggtatcgactgtctcgttgatctcccaggcgtcggcaagaatctgatggaccacctcgtacgctgccctctctgtctttctaccctcgccttctctttccctacctctgcctctgcctctctctttctcgactaacatcctcagattgtcttcatcttctacgaagcctccaagtctggcctcaccaactgcgacaaagtctaccacgacaacgccctcgaaaaggcgctccaagagtacagggagcacaagaccggcttcctgtctacctctccc

SEQ ID NO: 24975 - DNA, 918 bp, Emericella nidulans
agtaccctggactctccatctccctctggcacctctaccaaaatgaccacctctcctcgaaaatcccgaaccccctccaacccgcgcaccaccgacccctcagactccgatcctatcatcgcctcctacgacgtctacctcacaaattctgacattagccggtatgttctgcaatatctcgaccggcccaccgggcatgcctatgatgacaacaacgggcaaaagccgactgagctgcgcctgaagccgaagacgggccttgtcgaggttgacgtgccgattaacacaagagtaaactatgatctggcaaagggactgaaatatggtgatgcgctgaagaaaagtaagagtgctcgtgagggaggtgcatatggtatggcgggcgggtttagtgttgccggggcgcgtgagggaggcgcgcctggtgttgcaggaaaggttaaggcggaaaatggaggtgtgaaaagtgaggatgccatgcgtagggcggcaggagatcagacaccgctattaaaggtgcagacgttgggagggagaatcaagactccagaagatggtgatccagtttacatgcttgctgcttttaggggcggtatgttctcgtcttcctttcgaattcctgcgctggaactgatggactgttcgcctacagataaactacatctctctccagttagcgccgtcgttcaattacacccgcagctccaccatctcgacgcgatggacgagatgcccaaagcgcgcgccgggaaaagtcgaaaagaaggcgaggaagatcgagctgagccggaggctagagccgtcgacgtgaaggtcaaaggcgcagaggacagagaagtcatgatgccggggaacctggaccttctgaaaaagatgcaggaggagcagtggaagacgtatgattgggttgatgctgag

SEQ ID NO: 24976 - DNA, 2373 bp, Emericella nidulans
atcattagggctctggtcgaccgtaagctccacaggtcggaaccgaggattgaccgcagtcgctcaatcagagagctgtgtgcggcaaagtccacactacagaatgaactgattggcgagctggccaatgagttccagacctctctccctgatcgcgcgcaggacgtctccctagcggacttggatgctgccctgggcgaggtctcgctaggacccacgtcggtttctcttctgcagagagttttcacggcgaagatgccggcccgcatgacagtgtcgaatgtgcgtgagcgtttgaccgaaatctggggccttggatttcatcggcaaactgcagtcttggtgaccgcacttgcggctgagcctcactcccgactcacctccttggaggcggcatatcagtattgggacggtttgaccgaggcctacgggcagtcattgggtcttttcttgcggaaagctatctcacagcaagctgcacggagtgacgaccaaggcgctcaagctatagcccctgcagactcgctcgggtctaaggatcttgcacgaaagcagtacgaggctcttcgcgagtacctagggatacggaccccaactacgaaacaggatggtctagatcttgcagacctacagcagaagctggactgctggactgccgaattttcggacgacttcctcagccagatttcgcgtcgcttcgacgcacgaaagacgcgctggtaccgcgactggtggaactcggcgcgccaggagcttctgacaatctgccaaaatagtaatgtacaatggacagacaaaatgcgtgagcactttgtccagcgcgctgaggaaggccttgttgagattgctcgggcacattcactcgcgaaaccccttgtgccggacctcatccaggccatttctctccctcctgtcgtccggctagggcgtttggcgaccatgatgccacggacggtggtgacccttaagggggagattcaatgcgaggaacatgaacgggagccttcttgctttgtggagttcttcagcagctggatccaggcaaacaacattcgatgcaccatacaatctaatggggaagacctcacatcagtattcatcaacagtctggtacatgccagtcaacaaggggtttcttttgccaaccacacataccttataacaggggcgggaccaggatcgatcggccaacatatcgtccgtcgcttgttaacaggtggtgccagggtcattgtaaccacgagccgcgagccattgcctgccgctgccttcttcaaggagctgtatagtaagtgtggaaatcgcggatcgcagttacatctagtgcctttcaatcaggccagcgttgtggactgtgagcgtctgattggctacatttacgatgacttggggctggatctagatgcgatcctcccctttgctgccacaagccaggtgggagctgaaatcgacggactggatgccagtaatgaagcagcgtttcgactgatgctggtgaatgtactacgtcttgtagggttcgtggtatctcaaaaaaggcgtagaggtatttcctgccgaccaacccaagtcgtgctgcctgtgtctcctaaccatggcatcttgggtggtgacggtctctacgcggagtccaaacgcgggcttgagacattaatacagcggttccattcagagtcatggaaggaagagctctcaatatgtggcgtcagcatcggctggacccggtcaacgggcttgatggcggccaacgaccttgttgctgagacggcagagaaacaaggccgcgtgctgacattctctgttgatgagatgggagacctcatctcactgttattaactccgcagttagccacccgctgcgaagatgcccctgtcatggcggacttttctggaaatctctcgtgttggcgcgatgcctctgctcagcttgctgctgcccgtgcaagccttcgtgagcgcgctgacactgcccgagctctagcacaggaggacgaacgagaataccgttgccgacgcgcaggaagtactcaagaaccagtggaccaaagagtctcgctccatctcgggttcccatcactccctgagtatgacccactgctacacccagatctcgtgcctgctgatgcagtggttgttgtcggcttcgctgagctgggcccatggggaagcgcgcggattcggtgggaaatggagtcgcgcgggtgtctttctcctgcaggatacgtggagacggcatggctaatgaatctcatacggcatgttgacaacgtcaattacgtcggatgggtggatggggaagatgggaagcccgttgcagatgctgatattccaaaacgatacggcgagcggatcctatcgaatgcaggcatacgt

SEQ ID NO: 24977 - DNA, 312 bp, Emericella nidulans
aatgctggcgttagaagacgtctatgacgtgactgtggtcaaagacggccaagaggcttatgacaccgtgaaagccaatatggaggagggcaaagtattcgatttgatttttatggatattcaggtaccgcaccctctatactaatctcaggcttttgctaacgtttgtaagatgccaaacctagacggcattgaaagcccccgtcttatccgtcaaatgggctgttcggcccccatcgtcgcgctgagcgcattctcagaagccagcaatatcaaagatcgcatgaactcgggaatgcacatgtttatgag

SEQ ID NO: 24978 - DNA, 612 bp, Emericella nidulans
atgcctggcaaggctgcgctaccatcccatgtcatcaaattcaccaactgtcgtatcgtgaaaggaaacgagcttgttaaccaggatgtctggatcgagtcgacgtccggtaagatcctccgggcccaggaagcattctatgggctgcacctgtccccagatgaggtcatcgatctaggcggacgtatcctcgctccaggactcatcgactgtcagttgaacggtgctcagggtttcgacttttcgatcccgcaggcttccaaagaggaatacgatgaaggattgcgggtagtaaacaagggcctcgccaggaccggggtgacttcgtatctccctacgttggtcagctcaactgcagaagtataccacaaagtccttccgtcactcggcccggcaggatgcaagcatcgcccagaggatggcgccgagtcgcttggcgcgcacgtcgaaggcccgttcctgagtcccggccgcaatggaatccataaaacggatgtccttcggtcagcaactacggtggaggacctggatgattgttatggtcgcgagaacctctacggcccgaacaagactattagactgataacggctgcgccgaagtcggcaagatga

SEQ ID NO: 24979 - DNA, 555 bp, Emericella nidulans
agcaaagcctatctctatgacacatatcttgctccagaaacccacatcgaggctgcgcgacgccaggacggcggagtggatcattcgacactcatcttggatactctcaaggcggcgctagttgaattctcgaagcgaaaccaagtgcgaatgacggagagtctcagtttggaaatcgcggaagagtacatgcgcctgggttcttggattgaagcttatgagacgcttcgcccgctttggccggcccttacctggaggcgttctgggtggtggcttctcatggcgaagtttgcttggatcctgcgcgaatgtgccgcgcgagctcaggacagtgaaacagtattaagggtcgactgggagttgctaaattttggtagggctctttgtgtccttcaggtggctgttcattcttttaacgtcttaatggtcatctagctttcccaccgcgccctgattggaactacgatattcatcagagccttgcagaatttgcatcaaaggaacaaaagccatccatcgtgatcaaagccgaggatgttgtgtcaagtggtgagt

SEQ ID NO: 24980 - DNA, 417 bp, Emericella nidulans
gcaatgaacatgctcgaatccaacgtcgttcccggcaaaaccaagactatcatcgagtacagttccggctcgactgtgatttcgatgtcgatgatcgcccgggtcatgcacggtatcggcgatacgcgcgcctacctcagcaacaagaccagcgacgctaaactcaagctgatgcagttcttcgggctgaatatcagcctcttcggcgggccgtcccagccggaaccctacgacgagcgcggcgggatccagagcgcacgacgaatggctacagagtccgacgagatcctgaatcctaaccagtacgaaaacgacaagaactggcagagcatatccgctggaccgggccgcagatcttcaagcagctgcccgagatcactgttctctgtgctggcatggggacatcagggaccatga

SEQ ID NO: 24981 - DNA, 755 bp, Emericella nidulans
  unsure (1)..(755): unsure at all n locations
aaagaggtgatcttgctccagctatttggtggcccaaccaagtcttcccaaaagggtgataatccacgttaccgtggcgatatcaacgtcctcctttgtggtgaccccttcacatcggaatctcaactgctccgatatgtgcacaagattgcgccgcgaggtgtatacacncagtgcaagggttcatcagccgttggtcttactgcttacgttactcgtgaccccgaaacccgccaaatggttctggagtctggtgctttggtactgtctgatggaggtgtttgctgcattgacgaatttgacaagatgaacgaatcaacccggtctgtcttgcacgaagtcatggaacagcagacggtatctattgccaaggcaggtatcatcaccactttgaatgccaggacaagtattctcgcctcagcaaacccaattggcagcagatacaacccgaacctgccggtaccgcagaatattgatttgccacctacccttctgtctcgttttgaccttgtatatcttgttcttgaccgcgtggacgaatcggaagatcgacggcttgcaaagcacattgtcaacatgtatctcgaggatagaccggagaacgcgagtgagcgcgaggttttggtaagtcaacgcgggctgatattcggacctatccattgctgacttcatgaatctacagccggttgagtttttgacggcctacatcacctatgccaagaccaaggtgcaccccgttcttactccggccgcag

SEQ ID NO: 24982 - DNA, 1215 bp, Emericella nidulans
atggttgctcatatcccccaagtcatgaaagtattctctcagaaactggccaaagagcatgttcttggcgcagccaccaataatggccagaatggagctaagccagagggcgcaccggatccgcaggagtacgaaatcggcatattttttatctttaagtcgattgagttggtttctgcacgcatgtctcacctgggtgaacagcgtcggccatttttgagtgttcttgcccagcttgtcgagcgttcgcagaacgaaagcctttgcacgaaggtccttgatatggttgagacttggattttcaagtccactgaatcatggcctacattgaaagagaagaccgctgtgctccataagatgctgctcttcgagcaccgtcagagtccggagatgctccataagtttcttgaccttgtcattcggatttacgaggactcgaaaatcaccaggactgagttgacggtcagacttgagcatgcattcttgattggcacaagagctaaggacgtggagatgcgcaatcgcttcatgaccatctttgatcgaagtctgacccgcttggcgagctcccgcttgagttacgtcttaacttgccagaattgggacactctctcggactctttctggctcgcgcaggcgtcacacttgattctgggctgtgtggatatgacagccccggctcgtctccaccccgacgacttcaccatgtatcctctatcattcctattcggtaacgccgagaaggacccgcgtcgggcagaagttatggttgataatcagctcgaagcattcattgccgaccgcaagaggtttcttggtgaaattgctgaagtcaaggctcgtgatcttattgaaccacttacccaactccagcatactgatcctaatacgacgtacaagctatggactgcgctgttcccaattttctggtcgaccctatcccgggaagatcgcagtgacctggagaaggggatggtcagtctcgttacccgcgagtaccaccagcgacaggtagataagcgaccgaatgtcgtccaggctttgcttgaaggtgtcgttcgcgcaagcccccgtttcaagatcccgccgcacgttctgaaataccttagccgtactttcgatgcttggtataccgctactgcgtacttggaggaatcggccatcaacccaatcattgacacgccgacagtccgtgagagtaatctcgacgcgctg

SEQ ID NO: 24983 - DNA, 1414 bp, Emericella nidulans
gtcggctgcgcggcggcaccgaatatccgcaagactctccggaaagcgtcgtcctaagagaagtggtttgtgggaaccgataaaccagatgcggggaaattgctgatcgcgttagactgccttttgcgaaaagggtcagggtccgaaccaaccggtacgtcaatgaaccctctcactcactaacggcagctaataaatagcagcaaggagacgagtttgtccatctgcccagcattgtcgaaagtgccgagtcaagccccaatgccgcgcgtgaagccgctcatcttctccgaaaactgctctcgtcgccgaactcgaccgccgccaatatccagtacaatgcgttgatgctggtgcgcattttgatcgacaatccgggacatacatttagtcgcaatttggacgccagttttgtcacagccatcaaggatttacttcgttcggagaaggatgtaggtgtacagcggtttctccgagaaacgttggatgccttggaatttcagcgaggttgggatgaggatctcaagccgctcgtggagatgtggaagaaagaaaaggctaaaatgagtaagacgtacactccgaaagtttgtatggacctttccgacactgtaaggcaaacgctgacctggtacagagtcggtcgaacagttggcgagcgaccatgtcgcgtcagaattcggatattcaggttcgccccgagcgtgtcgataccttgccgccacccgacgagctggtttctcgtatatctgaggcaaagactacggcgaagctcctgatacagttcgtgcagtcgaccccgccgagcgagatgctcacgaacgaccttattcaggaattctcggctcggtctcgaagagcgcagcgcgccatctcgaactatatccatgcgacgaaccccgcacccgatgaggacaccttactgacgctgattgaaacgaacgacgaactatctgtggcactgtccaagcaccagcgcgccatgcttcaagcgcgaaaagccctcggtcagcaaaccccgcccgcagagacagctacggccacacagtcgccagagcacagcgatcagtcaatcacaggcacgtccgcatcacgcccggtccctccgcctcctgtgccgctacgaagtcaaagtcctccgcttggtgagccggtatcgcccatctctcccgaagcaaccgcccaccgcagcgccacaacgagaaccgaacagtctgacatctcggtgttaagcggcaccgggccaactgctcgttttgagtaccggtcggaagattaccaggtgcagaacccgtttgcggacaactacagtattccatcgaccataccgacacacacttatgacgaacgagaaatcgagcgagatcgatggaataagacccagcagccgggccagcagcaccagcattattaa

SEQ ID NO: 24984 - DNA, 874 bp, Emericella nidulans
atggctttgaaccagtaccctgccccggttgattaccatgggcagcttgaggccttcaaggatttcctcaaacacttcaaaagctttgagtccgcctctgcatcagccgcaacagaagctatcgaagacctacacatcgacgaagatggcatcagcgacgagtacgattttatggaggacgctgatgagagtggagcgcagagcagggcagggcgccgccgaaacaaggagcccaagctgaagtacatgcagatgttacaggacgtagctgaccgggaacgtttagacgtcctcgttgagctggatgatctcgtaaatgtaagcgcttgcttctcttcttactcattccagtcaatgtctaaccgcgccgtcttctagtatgagcgttcgctcccggaggaggttgacttgaaacttgctcagtccgtccagagaaataccaagcgttatattgaggtcatgtctcaggcagtggacgctgttatgccgaaggaaacaaaagaaatctcgtatgtcaggctgctccatgaattacgagtgctggaactgagttgcatctaggttcaaggacgatgtcctcgatgtgatcatgtcgcaacgtgagaagcgaaacgaagccatgaccatggctgctgaagccgacccagaagccgccctagatgcgtcaatgttccctcccgagcttactcgtcgatatacccttcacttcaagccccttactccttctggatccagcagcgaacgtgcttcgaaagctctcgctgtgcgcaacgtgcgcgccgagcatcttggtagcctcatcacagttcgcggcatcacaactcgagtatcggacgttaagccaggctgtccagatcaacgcttacacatgtga

SEQ ID NO: 24985 - DNA, 1968 bp, Emericella nidulans
gctctgccagaagacagccacgtcgtcgtggaaattatcgcgccaaagagcaagactgttcgaagcctggccatcttcttctgtactcctgaatacgcccttgaaaccgcaagccatgatctgctcttggacataactccagctcgaattcgcacggctgcccatgttaggagactagtccaggagagtttgcctctctacatggttcccaattttttcttcccagtaaagcagctgccatgcaacacgtcagccaaaatcgataggcggcgactgcgcgcaatggccgaggacctttccaacgaccagctcaaggcctactcctcgtccgtcttcgacaatgtgccgcgagagaccgttccggacagctcgcagtctacaagccccagtctaggcccaacccccttgacatcggaactcagctgccggtcaagtgtcagttcaaactctgatatggcagagaagtctacttcagtgacacagggtaccgttcagtctagactgcaactgttatggagcgaggttttgggggttgatcccagctcggtgaatgcggacgacagcttcttcggtctcggcggtgactcctttacagccatgagtcttgtgagtgcagctcaggacgacggacttactctcagcgttgcagatattttccaattccctgtgctggcggatatggtcaagtgttgccaggtcactgttgctactgagacgctcaccccgtctcccttctcgctcttgcccaacaataccaacgtggacgaactgctggacgaggtagccaatacttgcgaagtttcgaaagcctctatttgcgatatctacccttgtagcgcgctgcaagaggggcttataacagcgtcaatccagcagccgggggcttacgtcgccactccagttttcaagctttcgcgacatattgacatcccagctttcaaggcagcgtggcagaaaactgtcgacgaaactgaggtcctgcgaagccgaatcttgcacacggcgactgccaatttcgtgcaggtcgtcctaaagccttcacctatcaagtgggagcaagatcctagccgagtggccacagcagccggcggtgccctaaccggttataccattgcagagaagggcggcgtacgctcctttacttggtcaatccatcatgctctctacgacggctggagtgttgccctaatccttcgcaaggtggaggagaattatggaatctaccgcaacttcattggtccttctacgtctgatccaggagtgccttacagtctctttatcgaccatctccagaaacggaatttagcggcatctgatgagttctggcgaacatatctctctaatatgtcctctcctgcattccctgccagcaaaagcgcactccccaagacaatcaatgcgtcaagccgacaatgcgccaccgcgaacgtcagccctgtacggaaggacatcacccttcccgccatgatcagagctgcctgggctattgtcctttccatgcacacagagtcgagcgacgtctgctttggggaaaccctaatgggacgcaatgttgatctggtcggcgccacgaagatcgctggtcccttgctcactaccgtgccaacccgggttgctgttgactccagtataaagatcacggagtttcttgaccaagtccaccggactgccgcgagagttatttctcaccagcacgctggtctgcagcaaatacggaagctcaacgaagatacggccgccgcctgcgatttccaaacccttcttgtcattcaatccgccgaaccgcagctaaacgccgacatttggacaccgcaaagcactgagacaaatcatgagttctttacttaccctctgacagttgaatgtcgactggctgactcggttgagattacctcctatttcgatgacggcgtggttgccccctggagagttcagcggctccttggccaattcacagtcatccgttag

SEQ ID NO: 24986 - DNA, 492 bp, Emericella nidulans
aacgaatgtcaggggaaaggctatccggaccttgcaacccgctctttcgttcgcaggatctttcaaagtacattcccacgatcgaccctgacccaagctccccccttctatatcctcgccgatggtgatccggatgggatagccataatgtcaacatacaaatacggctctatggcgcacacacgagagaatgaacggctgaaccttccttgtctgcagtggctagggctacgcatctccgagataattggaggcttagagtctgacgcggacgagaccctaatgtcgctaacaaggagggataggagaaagattgggaccatgttgaaacggagtccgatttgggcagtagatgggcctgaggcagaatggcgggtggagttgcagcgcatgctgatcctgaatgttaaagctgagattgagatactgtacgaccgtgccggcgggctcgaggggtggattgatcgtcatatgaaaacacaggggcagtaa

SEQ ID NO: 24987 - DNA, 333 bp, Emericella nidulans
gctcgccattttccacaagaatctcccttcgaagtagcctcctcgccaacacacggtcaacaatgcgcaacccggctccacaacaccgtcatcttcctcggcgatctccagaattccggcttctttggcgatatttctctgccgaatggaatcttcatgaattccaccctgaatgggtatgcggcccttccgaagtccgtccacacagcggtccgcgcaacgctgcagtctgttttgggcgaatccggcctgaatggccttccagagaactccaaggctgatattacgacggtcaaattgcatcttcctgtggagatattggggtttacgggt

SEQ ID NO: 24988 - DNA, 622 bp, Emericella nidulans
acatcagccataatccatgcgcttctcgcgcacctcgtgcgcgtcccggccggcaccaaatccgtcgtcttctcccagttcacatctttcttagacctcataggtccgcagctgacgaaagccgggatctcgttcgtccggcttgatggaacaatggctcaaaaggctcgcgccgaagtcctggcccagttcacgaagtttgaaacatttacgcaggaagagctggaccaggccgaatcgacgtcagcgccgtagggactcaccccaacaccgaaaacacccaagcagtcttcttccccatcctcgccgacagtactactgatatctctcaaggcacgcgcgcgtcggcctcaatctcactgctgcttctaacgtcttcatgatggatccgtggtggtcttttgccatcgaggcgcaagctattgaccgcgttcatagaatgggccagctgcgtgatgtcaatgtcgtgcggttcattgtcaaggactcgattgaggagaggatgctgcgggttcaggagaggaagatggggattgctgggtcgctgggacttatgggagagggcaatgaggaggagaggaggaaagagaggatcgaggaattgaggttgttgtttgagtag

SEQ ID NO: 24989 - DNA, 300 bp, Emericella nidulans
gcgattactgcgatgtctacctgacgcacgactcaatgagcgtgcgcaaggcgcacaactccggacgaaaccacctaaggaacgttgtggaatattatcaacgtatgtcgcctgacatgccaatactaatctgtggtggcctgcaaactcaagctcacaactgcattgcagaaatcggacaggaaaaggcacaatcagtcatcgattccattacgtcctcatacgccgctgaagggcaggctgtgccaaacccagctatggttcccccgggtgcttacccgccttcgtttgggttcccag

SEQ ID NO: 24990 - DNA, 921 bp, Emericella nidulans
  unsure (1)..(921): unsure at all n locations
gagaactccgattcccagtcatggtcatattctgaagctgatcaacntgtgcctcgtcacgganaaccagtggagttttacgagaactgtagcgacgatctcctcgaatgccgtggcggtatctgtagggcgttgataccaccgtctttgttcgaggtaaaagactcttccgggggtgtcaaggttcgaatggattctgggattagccgcgcacgcgcagacgccgaaaaaatcaagcgcgtcaagctcgttgaccagtttggaaagtacatgatcggatcccttggtcgacatggcgacgagacgttgctcgacgacgcggcaaccgacggagcccctggacaatttattaaattctaccagagactaggcaatgtgggtgtctgggggttcggagatggggctttccagtttaacttcccagatcacacaaagctggtcctggcacctggtcgtacgaggaactcatcaccgtggatggacttctaccatctctcacctactgcagcgcgttacctcgcagcgaaaggcaagatgcacccgtctggattcgacacccgagcggtggtatcagacgaaatagccacgttcctcagcattgcttacggtacaagcactagcgccatggacgataaaatcagggaggttttggatgcgaattcgttcctccagaagatcgccttcatcaaagatgttctcaaaagctggatccgtcaaggacgattgggagggcggccttcgtcagacaaaccgggtactgagatgttctgggagggttcgcaggagcgacctcaagcaagcggcggtggcagtagcaaatttgtatgggtgacagtgggcgcgcctggaggcgatggggagtatcgctcggtgtcgcttagagacaagaaaggtaacagtgttggagagaacgacgagatg

SEQ ID NO: 24991 - DNA, 938 bp, Emericella nidulans
atgggtctgtggaatgcttcaggagcgcaggagaatggcgttggcgtaaagcgaccgtcgtttgatgtcgagagatttcagcagcggaagaagttcaagaccgaggagctacccttgactgctgcgcaacacaaagctattgaggaccttctacacagctttaagaagaagggagggttcgaccatatccggaagaaaatctggtcggagtttcatgatggagtacgaggatcgcagattctatttacctcgtttagacagaaacactgactacatgctaggaagggaaagcagaatttacaagacggcttacggagatcgcagagtcggagatagagcgcgaaccccaattactctcgagggaacagggcaaagccgcgacgctgattggaggcgctgtcgaccgcagtgatatgtacaattcggtggagaaaacgctatatgcgctggccgcacaacacctttcagctatattcgaatccattcaggagattcgtcgtcaagaggttggcgacgagcaggctacccgcgagtttatagcgggcaataggacagatgaggaatacgctttactggtcaaggctaagcgtgacgagcgcgagaggatctggcaggaggaggagcgaaagcgcagggaagctgaagaagcggaggcccgtcggaaagaggaagaggaacgaagacagcgcgaaatccaacgacagaaggacgaagaggaacgagctaggagacgagagcgtgaggaacaacggcgtgcagagcaacgcgccctagacgagcaacgagagaaagaacgccaggagcgatatgagcggcgccgacgtgaagatcgggagagataccgggactggggatatcgtgatcgagatcgcagccatacaagggacagggatctggagagggaccgtgatagggagagggatcctagtattctatag

SEQ ID NO: 24992 - DNA, 482 bp, Emericella nidulans
ccgctttcactcgccttattgggctagcactgaccaattcgacacggaggtatggctcttttcgagccgtctcatttagattggtggaacctcttcatgaagggttatgaagagtccttagcgacaggggcagaggtccgttgaggccgtgagaaaggttgaatatgatttaagctctacgcttgccagagatcgtcgtcagcctcgagcgacaatcgcttttaccatgttgtccaagacattccttctttcctctgccgtcttgtgggctagggtggctaatgcggcctttggcattaccgacaacggcagttcctacacgatcgacgccaactctcccaacccgctgaaattcactgtcaacaagtccagctgtgacatcacatcaattgtttactatggatccgagtttcagtattccggaaaagggagtcatattggctccggtctcggctcggccacagtctctgcgactcacagcg

SEQ ID NO: 24993 - DNA, 779 bp, Emericella nidulans
tatcgtccagttccccggcgattgatgacaccaaacacgccgtacatttcaagcgtgtactggcacacaattactctctcgcttttcacaatgtccaccctccagccagccagttctggcctaatcgccaaactccctacccgcctccgcaactttttcgcccgctaccctccccagcactactccgcggcggctgcaccaccccccgacccaacaacgacaccaccaccagcatccgagaccggggccctcccatcaccctatactcctaaccgagacgccaagggccacgaacgccctgacccgagtgccatctctccctcgcgggccctcttatggtcgaaccctgattacccgaatccgttcctgcctcgcaagaactttcgcacggggaaatggatcggaccgcggtatgggctgcggcagcaggcggatctggtgaagttggctatcaagtataatgttgaggcactgctaccaccggggaagaagagtactgagtacaaggagacgagacgcgcggagcgtggattgcaggttaagggtacgggtattggacagaaagtcaagggtcacaagtgggagaggacgatggaaggacgacttgaggataggaggaaggcgatgatggagatgccggagatgatccggttgtggaagcaggtgagtctagcgttgatttgttgctcttctgagctgctgagtggcttgctaatgggcttactctattcgtacagagaggtcatggtcgtggttggaagaagtggcccaagaggtga

SEQ ID NO: 24994 - DNA, 1050 bp, Emericella nidulans
ggctggggctgggcatgtgagcgagtgaaggcccatcatgttgtgacggcagagggcgaactgctgcactgtgaccagagtcagaacgaggagcttgactgggcagcgagggggtcgggttcagttatcaatcacatcccaaaagccctcccctttcactgccggacgatgggctcatgaccgatcttcttctcgcaatctgcaggctttcccggcatcgtcacacgattccatttcgaaatcctcccgtatccgaagcatggattccgctcatctggctacgtctatccgatcagcaagtaccatgaagcgttcagttgggtccttgcaataacccccgactttgaccgcgataccgagatcaccgtggtaagcatgtacccagaaggcagcgagcagatatgcctcttcatcctcctagtgactctcaaacacaccccatcggaggcagaggcagccctcgctccagcccagcagtcgcgtcctcctggtgcaatcgaggagtggttctgccgggaagatagtctggagaaccagtataccaaccaagccaaggccaaccctaagggccaccgctactgcgcagagaacgcctacctgcagaacgaagccgatgtccccagcgtgctcgaagaggctttcaccacactcccccatcgcaaagccttcgcgctctggtacgcaatgaatccatgcagtcgccgccagctgcccgatatggcgttgagcatgcaatcggatcattattttgctctatatacagtctgggaggaagaggaagatgacgcgcggtgcatggcctgggtgaagaacgtcatgaagagggtgcagcggcactctgtgggggcgtatttgggtgattctgatttccaggaacgacagacaagatactgggctgaaagtaatgggcgccggttaatggatatccgtcgtagatgggaccctacaggcaggatctgcggatatctggaccacggcgatgcttcgggaccgcgggggttagaaaacgttcatgaatgggaagtagaggtgccggcatcccagctatag

SEQ ID NO: 24995 - DNA, 518 bp, Emericella nidulans
  unsure (1)..(518): unsure at all n locations
acgcggcgaggaagaactttgctgactctattggcgctccaaagattcctaatgtcagctgggaagacgttggcggattgacgaacgtcaaggatgctctagttgagaccattcagttacctttggagcggcccgaactgtttgcaaagggcatgaagaagaggagtggtatcttgttctacggtcctcctggcactggaaaaacccttctcgccaaggccatcgccacggaattctccttgaacttcttctctgtcaaggggccggaactgctcaacatgtacattggtgaatctgaggcgaatgtccgacgcgttttccagcgggcgcgcgatgcacgcccttgtgttgtcttcttcgatgaactcgactctgttgctcctaaacgagggaatcaaggcgacagtggcggtgtcatggatcgaatcgtcagtcagcttcttgcacagctcgacngtatgaacngcggataggagaacagctgcngcgtgtttgtcattggtgccaccaaccgacct

SEQ ID NO: 24996 - DNA, 351 bp, Emericella nidulans
tacgggtcccctgtcatgagctcgaccattaagcttggatccgactcctagactggcgaggagatcaacatccccttcaatgacatgttgcccatggtccaccccaatgacctcgtcattggtggctgggacattagcagcatgaacctggctgactctatggaccgtgcccaggtccttgagcccaccctgaagcagcttgtccgtaaggaaatggctgagatgaagcctttgcccagcgtttactaccctgacttcatcgctgccaaccaggaggatcgtgccgacaacgtcctcgagggcagcaaggcctcgtgggctcatgttgagaagattcaggcggatatccgg

SEQ ID NO: 24997 - DNA, 377 bp, Emericella nidulans
gtgggctgctaagttcgcatctctttgctgtcggtgatcttcccattactcgttatagtcccccggagaaggaggcggcgtatgccaaagcctgggataagacgtcctttgccgccgatagtcggggaatcgcctgggataatgggtttgtgtacgatggtcaactgctccgacttgctgttgacctagcgaatcgcatcctaccggctttttatacccatacaggtctaccttatccgcgggtgaatctccgtcacggagtgcaccagcagcctttttacgccaattcaccgtagaatgcggatactgtacgtgtttgcgatgataaaaatggtaatgtctgtgatgcgtcatcagcggaggtcacgcagacatgc

SEQ ID NO: 24998 - DNA, 322 bp, Emericella nidulans
ccaatgacgagaaatcgctccaggagtatattcgcgctctgagagcccacctaatcaacccccgcgtgcggatctcattgcaggacctggcgtatacgctatcggagcggcggtctcggcatttcaatcgtgcatttcttatcacacagaccagtctcaatctcgatctccatggtttggtctttgggaaactgcggtcgagctccccacgagtaggttttatcttcacgggcaagggtctcagtggcctcaaatgggaaggtctcttttggatatgtttccttcaggaagggggcagttcgcttggttagacagggcactt

SEQ ID NO: 24999 - DNA, 436 bp, Emericella nidulans
actcctagacatccgctttacagatctctctcaccgctggaccctcgtcggctgcacttggctgcaatacatcattggtgcccccgttattatctcctggaatctcctctccactaacatagccggacacacgaagcgctctattgccaacggcctctggttcacgctatacgcgagcgggaacgttgcggggtcgaacattttctttgcaaacgaagctccccgatatttctccgctttgaccgggttgctgatctgttacgcgggtatgattttgctcgctggtgttgcgtacgccgttatgaagatcgagaatgtaaggcgggaccggaagatgactgctgaggagagcatcatgaggcaggatagggccgttttggatgggttcaaggatatgacggatatggaatcaaaggattttcgttatgcgctttaa

SEQ ID NO: 25000 - DNA, 1282 bp, Emericella nidulans
atgctcctctcacgcctcctccctctcgccctatccctagcgggcacgactctctccgccgtaatcccagagacagactacgatgtcattgttgtcggcggtggtccggcaggtctcagcgtgctgagcggcctcgctcgtgttcgacggaaggcagtcgtctttgactcgggtcactaccgcaatgatcccacgcgggagatgcacgatgtcattggaaacgacggtatgccccgtcccatttactgacgactcatgagatagagacgaaggtactaacttccatgcagggacaccacccgcagtctttcgtgccgctgcccgctcgcagatttccaattacagcacagcctccttcatcgacaacgaaatcacctcaatcgtccctgtaaacaacacgaacctgacgactttcttccgcgcaacggacagcacaggcgccgagtacacggctcgcaaagtcgtgctcgctacgggcgtcgtcgatatcctgccctcgactcccggtctgatcgagggtttcggaaagggcatcttctggtgtccctggtgtgacggatacgagcaccgcgaccagccttttgggatcctcggaactctcccgcatatcgtgtccagcgtacttgagatctcgacactgaatagcgatattattgcgtttgtgaatggctcgtacacggatgagtatgtctcggctctggaggaagactaccccgactggcaggcacagatggccgcgtacaatgtctcgatcgataacagaacaatcacctccttcgagcgcatgcaagacggtggtgagaaccggaatgacgttggccagcaattcgatatcttccgtgtgcatttcacagagggcgagcccgttgtgcggaacgcattcctgacgaactttgagacggcgcagcggtcgagtcttccctatgatcttgggctggtgatgaaggatggaaaaatcgatacgagtatcaaccccggcatgaggactagtcgtgcgggtgtttttgctgtcggcgatgcgaattccgatgggagcacgaatgtgccgcatgctatgtttagtgggaagcgtgcagctgtctttggacatggtatttattttcccctatctgtgtttactgaagatggagggctaacatacattgatgcagttgaactggctcgagaggagatggctgctgccatatcaaagcgttccctgtcaacaagggcactccacaaggaagctgagagggcgatgggtaatgaattggagacactgtgggagaaggttaatgcttaa

SEQ ID NO: 25001 - DNA, 1012 bp, Emericella nidulans
atacacagatttccttgtgaacgagatcctgccctcggggaaagttctgcatctgacgaataccactgcacctaataccaatgatgaggcgactccagtccaggcagataagaagccggccgaagataagccaaaagagcccgaaactcccgcagagaagttgcctgctccagttgagtttcaattagcggaggaagatgaggcgcttctggacactttattcggcacccaaaacaccaagaaaattgtcgccctccataagaaggcactggcaaatccaaagactaagccaagcgatctgggacgattgaacacagtcgttgtcaacgaccgcgatcagcgcatcaaaatgcaccaggcaattcgtcgcatcttcaattcgcagattgaatcttcaacagacagtgaaggaatgatggttatctcagtcgctgccaaccgcaacaagaagaatccacagggaggtggaggcgggcgtgagaggccgcgcgtgaattgggacgaactgggcggacagtatctgcactttactatttacaaggagaacaaggacaccatggaggtcatctcgttcatcgcccgccaactgaagatgaatccgaagagcttccagttcgcggggaccaaagatcgccgcggagtaaccgtgcagagggcatgcgcttatcgcttgcaagccgatcgcctcgcgaagctcaatcgaacgctccgcaatgccgtcgttggcgacttcgaataccaacctcacggcctcgagctcggcgacctctatgggaacgagttcgtcgtgactctccgcgagtgcgaggttcctggcatcaacatccaagaccccgcatcagccgtagccaagacaaaggagctcgtcaacacttcactcaagaacctctaccaaagaggttacttcaactactacggcctacaacgtttcggctctttcgcaacccgcactgacacagtgggcgtgaagatactgcaggacgacttcaagggcgcctgcgacgctatcctc

SEQ ID NO: 25002 - DNA, 474 bp, Emericella nidulans
atggctaggagcactccaggccggccattcgagtttccagacgggtataatcaagtattcggcgttgatcgctacagggttgtcgagtcgctgttcgacgccaaagccaccattctggaccctgactcccaattcccagcaccaacaccagcgcagactattcctgagctcatcaaggctgctttgaatggtgttgatgttgaccttcgtccgcatttgctagccaacgtcgttgttacaggtgcttcaagcttgctctatggatttacggaccgccttaatcaggagctcatgcagctgtaccctgggccccgagtcaggatctctgcgcccgggaacacgtccgagcgcagattcagctcctggatcggtggaagcatcctcgctagtctgggcaccttccaccaaatgtggatttcaaagaaggagtttgacgagcacggcccgatcatcgttgagaagcgctgcaaataa

SEQ ID NO: 25003 - DNA, 1447 bp, Emericella nidulans
atggatgcgcgaagtctaacagaatcccccgatttggctgctcaagatgaacggcagcgactggaggccttgataaagcgtgctgctgcaaaggatgccatgaaggattataatgctgccgcagaactttactcagaagctaccgaaatccaagcgaagttaaacggcgagctgtcgctcgaaaatgccagtttattgtttgcctacgggaaagctctgtacaacgtcgcggtaagcaagagtgatgttcttggttcgaaagttgcgggaaaggcgcaaccccagtcagcaccaaaagacaagagcgcttcgtccgagtcactcccagttgctgataatctcataaaaaatgccgtggcttcgagctcttcagtggcaaagatccaggaaaggagctcagaggataatcagagcaagccttttttccagtttactggcgatgagaactttgacaccgattcagaggaagaaaatgaagacaatgcggctgaaggagatgaggacgacaacgacgacgacgacgacgacgattttgccaatgctttcgagatccttgatttggcgcgggtcctctatcacaagaaactcagtgctctggaagagtccggtaaaggcaaatctacagatcctctccccgagctcaaggagataaaggagcgcttggccgacacatatgacctccaagccgagattttactatgaaggggagaatttttcagatgctgtcacagacctaaagatggcgcttgaactccgacagtcactattcccgatggaggacccgtcagttgctgaatgtcattataaactttccctcgccctagagtttggggctgtacagcatggtgataatccagaaggagaaaccaaacctgccaaggtagacgaggaaatgcgaaaagaagcagtaacacaaatggaaatggccattgagagttgccgggtcaggatatctcaagagcaggagaaattgaaaacggatggttctctagatgaggacaagcgggcagcactaaaacgaaaaatagccaatgtgaaggaaatcatatcagacatggagcagagagtgagtttctggcccagtcatggtctcgtgacccgagtgtttttgctagtgttttgctaattgattctttttcatctctagctgctcgacctccgacgtcccccagtatctgtcgagaaggtacttgataaccagggcgaaaacatgattaaaggaattctgggacaaattatgggtgaatcagatagcaacaagcagtctctactcgatgtcgccacacagaatgccacagaccttaccgcgtttgtgaaacgcaagccagccagcagcaagtcatctcagcgagcaagctcggctccgaagcggccggtgcaggaagaagcatctgaaggagattccaaaaggctgcgagtggctgacggtgatgaaaaggctacatga

SEQ ID NO: 25004 - DNA, 1719 bp, Emericella nidulans
atggccatttccatggctgcctgtctaattggaactctgaggtgtcttgccctggccctggcctttatctcctcctcccgcgctcttttcaatgatctgctgggaacaatcctccgcgcgcccctacgctggctcgacaccgtccccctcggccgcattctcaaccgcttcacatctgacatctacttgctcgactggcgactcggctacgatatcggacatgttttgtacaaactgctcgagttagtgggtatattggttgcaggagtagccgtctcccctcttcttctgttccttgcttgcgtcttgctggccctctgcatgcgcctctgtagcgtgtaccttgctggcgtgcgtgaaataaaacgcctcgaaagtacagccaagtctcccgtgatggaaaaattcggctccagcctctctggcctctctacaatccgcgccttcaataaagcagagacgtatattgccgacatgcataccctcattactcgccacgcacaagcatcctggtacctctggctcttcaatcggtggttggggttctggatggcgcttgttggtgcgctcttctcgacactcactgcttcactgttggtttatatgcccggtgtctcggccgcactggcaggctttgcgatgagctttgcgctgcagtacaactacgccgtggcaatgggactgcggttctatgccaatgtggagattgatatgaatgctaccgagcgtgtgctggagtacgctaatatcgagacggagagtcaatccgggtacacgccccctgcatcatggccgacaaagggtcggatcgaggtcgaagacttggaagtcagctacgcgcctgacctgccgcctgtcctgaatggggtgtcgtttgtagtagataataaccagcgcatcggggtcgtgggacgcacaggcgcgggaaagtcctccctaacactcgcactgttccgcttcctcgaagcccgacgcggccggattatgatggacggcctggatatcggacatgtcaagctgtccgagctgagaagtcggctggcaatcattccacaggatcctgtcctcttctcggggactataaggtcgaatcttgatccgttcggggaacatagtgacttggaactattcaatgcgctggaacgggtacatctgctgcggtttgaggatacgtcgacgcttgcctccagctctgcttcggcgtcttgttcgggatcagaggcctatcctccgtcagatggtagtcggagtccaactacgacagctggtacaagcccaactgaccccatgagcgcgagcataactctcactgcttcctcaacctctacttcaaaagccaaagaaaccggctttttcgcatccctctcctctccagtaaccacgaatggcggcaatctatctcacggtcagcggcagctcctgtgtttagcccgcgccattctaacccgtcccaagatcatggttctggatgaagcgacttccgcggtggacatggagacagacgcattgattcagcaatccatccgcaccgaatttggaaggtccgactcgagtttactggttattgcacatagactgagcacgattgcggactttgacaagatcctggtcctggatgccggaagggttgttgagtcgggggctccgagagagcttctaaagactgaaggtggtatgtttagggccctggttgaaagaagtggggagagagaagttgtt

SEQ ID NO: 25005 - DNA, 656 bp, Emericella nidulans
attgcatcctctgagatggagcctggaatggacatcgacgtccccgaggctcggggcacgaaacggcccattgatgatactgagggtcctcgtaaacccagaaagatcagagtaagctattaccgttcgtgaatgttcaggccaactaatgattgaaacaggcgttagacccagatgtcgtgaacaaaattgcggcaggggaaatcattgttgccccgatgcatgcacttaaagagttgatagagaacgcagtcgatgccggatcgacttcgattgagattcttgtgaaggaagggggtctcaaactgcttcaaattacagataatggtcacgggattgatgtaatattgtctagctctggtaatgatgcacctgctaatatctcctagcgcgatgaccttcccattctctgcgagaggttcactacttcgaagctaaaggaatttgaggacctttcgtcaatagccacatatgggtttcgtggcgaagctctggctagtatcagccatatcgcccatctcactgtcaccacgaagacggctgactcaagctgtgcttggagagctcattatgccgatggaaagctggtccctcccaaaccagggcagagcgcagctcctaaggccactgcggggcgtggagggacgcagatcaca

SEQ ID NO: 25006 - DNA, 465 bp, Emericella nidulans
tcacaggctgagagaatctgccgtgaaagcaactactacaaccctgagattgtttaaaatttcctcaaggaagctcgtttgaccgaacagttgccgctcatcactgtatgtgaccgattcaactttgtgcacgacttggtcttgtacctctaccagaaccaacagtacaagtcgatcgaggtctacgtgcagcgtgtcaacccctcacgcactcctgcggttgttggcgggttgctcgatgttgattgcgatgagagcatcatcaagaaccttttgaccaccgtcgacccatctgtgattcccattgatgagctcgtttccgaggtcgagacccgcaacaggctcaagctccttctacccttccttgaggccacacttgccactggtaatcagcagcaggcggtatacaacgctctcgccaagatttacatcgacagcaacaacaattcaaagaagtttctttag

SEQ ID NO: 25007 - DNA, 740 bp, Emericella nidulans
gacctcttcaacaccaacgcttccatcgttcgcgaccttgctaaggccgctgccaaggcttcccccgaggctaacatcctcgtcatttctaaccctgtatgcgtcatcggaactcggagacatggaactcgtgctgattcttccaggtcaactccaccgtccccatcgtctctgaggtcttcaaggccgctggcgtctacaaccccaagcgcctctttggtgtcaccacccttgatgtcgtccgtgcttcccgcttcatctctcaggtccagggtaccgacccctctaaggaggccgttcccgttgtcggtggacactctggcgtgaccatcgttcccctgctttcccagtccaaccaccccaacattgatggcaagacccgcgatgagcttgtccaccgcatccagtttggtggtgacgaggttgtcaaggctaaggacggtgctggctccgccactctctccatggccatggccggtgctcgcttcgccgagtctctcctccgcgctgcccagggcgagaagggtgtcgttgagcccactttcgtcgagagccctctctacaaggaccagggcgtcaacttcttcgcttccaaggttgagcttggccccaacggtgctgagaagatcaaccccgttggcgaggttaacgaattcgagcagaagctccttgaggcctgcctcgttgacctgaagaagaacatccagaagggtattgacttcgtcaaggccaacccttaa

SEQ ID NO: 25008 - DNA, 645 bp, Emericella nidulans
atggactggcagcagaaggctcagcgcaagcgagatgagcttgcaggaaaaattccttcgggatggcgaatatcgtcagacctgttaaagaaggccgatgagctggacaatattcttgatattcctcgacagagcggcatcctgaccgagcgcgagatcgacatcacggaaagctcagatgctaccgctctgatctcgcgtctgaaggatggtgaaatcagtgcttacgaggtcgcagtcgctttctgcaagcgagctgccatagcccagcagcttacttgttgtctgacggaaatcttcttcgatagggctattgagcgcgcaaaggagctagatcgtcaatacgccgtaactggagagctcgtgggacctttgcacggtatcccgatcagtctgaaggactcctacaatgttactggtgttcagtctacccttggctacgtttcgttcctggatcgacctgccctgacgttcaacagcccgatggtgaatatactcttggacgcgggcgccgtaatctacgtgaaaacccacctgccccagacgatgatgacggccgattctcacacaaatgtgtttggccgaacccgcaatccatatggtcgaaacctgacggataacggtagttgcgacggcgagggcgct

SEQ ID NO: 25009 - DNA, 843 bp, Emericella nidulans
atgcctaccaagaagcaccccaacgattcaacccatttaccgacaaagattaagaactttttccgcatcaacagctcaagcagcacaatttctcatcagtccagcaaccacgtcaacagctctgaccgggataccggttcctcgacccctgtcaaacatgagcctaaatccacttttcggcagtcgcgatttctcccaatgatcggtcgcaagcgctctgctacggttgccagtgagggaaatccattagacgaagcaatctccccgaccgcgacagcaaatccgtatttcgtccaccagggccagcccgccctgcagcatcgcaacgacggctcgataccctcttcgcctccagacaccccagagttacaagttgatggtgtttcagcggcggaacaagctaccacagccaacaaagaggaactcgctcggaaactacgccgtgtcgcttcggctccgaacgcccagggcttgtttactgctaccgattcagatggccgaccccagactgcagagctgggtaaggaacctctggtgcactcgggagctgcaggctcccctgtcggtctggttgaggtgagctcaaacacagaccaggatggaaatcttaccgttccgcaacctggctccggcaagcttcctgctgtcactcaagttcgaacttctagcggtggtttccgtcgaacatacagctccaactcgatcaaagtacgaaatgtggaagtcggacccgctagctttgacaagatcaagctcatccgcaaaggcgatgtcggcaaagtttatcttgttagggaaaagaagtcgacacgcttatatgccatgaagggtaagtttatgcag

SEQ ID NO: 25010 - DNA, 217 bp, Emericella nidulans
ttcactaggagaatagtgaaagactcaagtcgtctaccaaaaatgtggtcatggttcggtggtgcggccgcgcagaagcgcaaggaagcgccgaagaacgcaatcctccagcttcgaagccaccttgacatgctacagaagcgagaaaagcacctagaaaaccaaatgaacgaacaagaggccatcgctaaaaagaacgtgaccacgaataagaacg

SEQ ID NO: 25011 - DNA, 898 bp, Emericella nidulans
ctcgatctgggctcgcagaatattggcggaaaggcttttgatgagctcattgccgctgaagggaatgggacgtatcagaaccgcgcacgcaagcgcagagctcgcccatccgccgcggaactgcgacgcgatctagagaacgagtttctaaccccatcccctcggtttagctccgagtggttaaaccgcctgcagaggtagggttgatgacctttgatgttgttataatctatataatcttacctatggttctgcttcctctctgcagtgtgctaacgggaaactaggagatgggatgtatcaacggactacacggatctctttgagatcgctgatacacaaacccgaacaatcgttcgattcgaccgcgaaggcctagaggggcgtgtcactgggtatcatgaagtgacggttccggctaacagcgcgaacgcaaaaaactcgacgtctttgctacgcaggccagcaggaagggctgatttcgtgcggggcgctgcagggttctttccgttcgcgccagggggtctggatggcgttgaggcgatcgcggagatggaggctgaagttcagacagcagggccctctgggtctgctggaaaacaggccggcctggatcgcatcattaacttcgcgtctgaggggggtttattagaggtagctcctggattttcgcgcggactgaaatttgaagaagcaaagtcgaaagaagctgcggacgacgatgaagaagtcgaacagactctccaggaagaggaaagcaacatcaatcctgaacaggatgaaacagcatccgacgtgggaggtgtgaagatcgaagacgaggaatccgccagtgaggacgaggaagaagacgatatcgacaccctattacctgtcgagttcccgtctttggagccgc

SEQ ID NO: 25012 - DNA, 690 bp, Emericella nidulans
atgccctttcccacatcctcttctgccgccgagacgacgtcagccagcccgctcgcagactacttctggatcgctggtgttgacggctcggagattctcgacacattccgcaagctaggcgacgaataccgaatcgccagcagtaccactgcgcccggccccgcggtcaccgatatcattgaggaagatgccgacgccgaagatgctcacgatcgcttcgacggcctgctctctcgaagctcctcggtcattggccctcgcggctccttccagcgtctctccttccggtccgaagatgcagaccagaacgccaatggcaatgccaacggtacgcacagcaaccgcagtagcatgacaatcaagggaggcggcaacggcagtgctgcgtcaccgcgggcttctcaattcctaggtctggaggaattcgactttgataaagcgttggtcaagtttgcctccgagagagagacgtttctgtcggacctgagtctcagcgcgggtgcgatcacacccgcgtcccggcctcggtccagattacgcacacagaagatcgtgtccgaggagccacaacaatctggtttacttcgatcgagtatcggaagcgtgcgacgacatatgtcattccgagacatgaacagtatgaagaggcagccgtcggttgcgcgccaaggtgagtttctcaggtgggac

SEQ ID NO: 25013 - DNA, 1119 bp, Emericella nidulans
atgcatttctcttcgccacttcttgctttggtaccatccctctcatttgcattcgctgccccaacagcagagaacgttgacaacacgcctctactcccacatggtctgcctcatcccagtccggagcagcttcagcagatagagcaagccgcccatggcacacttcccggcctacctctgcccaccaacgtcagcgccgcggggatcacaaacctgcaactgctcgccttccaagagcacgttgaggttgctttcttcgaccagcttattgggaacatcagccggaatgttcctggttacgtattcatcaatgatgctgagcgagagtttgcccttcggagcctcatggccaccctcgcggtaggttgtctcgatctcctattaatttgtcataggctgactagctcttagcaagaggaaatacacgctcttacagccaacaatgccctgcaacacttcggcatcccaactattgagccgtgccgctactggttccctgtcacgaacatcgatgaagccattgctctggctaccacctttacctctcactcgcttgctaccctccaggacattacagagcgcttggcaactcacggcgacgcggaccttgcgcggatcatgacgggcataatcggcaccaagggcgcccagcaaggatggttccggaccttccaggacagtccccgcgaggtcccgactctgacaacaagcgatgtcgacttcgcctttacctgggcgaacagcttcgcccttcccggcacctgccccaacctcggagacatcaaactgcggatctttgagcctcttgagatcatgactcgccctgaaccccgcacacacaagattcagatctcttggagccacggttccgacgagtcgaaggaaagcctcctgtgggttgcatacatcaaccagcacaacgcgcccatcgttgccccgctgcaggttgtcgcttgtgacgggcacaagtcaactgctgatgtcgttgtcccattcgacgatttcctcatgaacgggctgacggttatggctgttgtaaatcgcaggggaccatttgccaatgccgaggcagtggctcgagcgacagtctatggcccggctttgtttattgtgcaatag

SEQ ID NO: 25014 - DNA, 523 bp, Emericella nidulans
agcaaaatgaagaaaaatatcgagattgcaggctatatagccctgcccctcaacctcccaagcactggcgctttttcaacaactgcaacacactacctctacctccgcccgcatgaaccacgcatccccgacgctgatacaccccgttcgctcttcctcgtcaacatccccattgacacgacagaaacacatatacgccacttatttggcacgcaactttctgccggccgcgttgaacgcgtcgagtttgaggccgcacgtacagggaagaagcatggcgccgcgcaactggccctcgtgcaaggcacgaatgttgctaagagcaagaaacgtaagcgcgtgacggcggatgaactcgagaaccggttggataatatttcgcttccgtcgacatgggaccgtcagctgcagcgcagcggatcgcatgcggtagtggttttcgttgataaggctagtatggatgcgagcatgaaggcggcaaagaaagcagcacggaagtctaccactattacctggggcgaag

SEQ ID NO: 25015 - DNA, 1473 bp, Emericella nidulans
atgcttcggatcctcaacgaagaaggcttccagataaaagaacgcgaattgatgagagtgcgggccaaaaaccgttggctactccgggttcccaatgggacgaaagcacaacaggtggcgctaagttctcctcaaactgaagacgacagtctattagcgttgcaagagtatcaaccagatcctcaggacgtcgcagactcgtctgaggctgcgcttaaacgcaaggaacgccttgatcgtctacaagcggagagtgccgaacgttgggctgccagaaagcggcgtcgacgcacaaggggatgggctggtttaccagccgaccccccaggccccccacgtttcccgtctgaaaccaccattgacgagagcaagaaatacctcaaacttgacaacgctgggtaccgacaaattagagaccaatttcagagtatttgcgagaaggcaggcttcatcaagaaaaccattgcggggcctgagaaatggcaagaggcaaagaataccttgatccagaattccgaacatctgcaacgtgttttctgggacgaccccgatcaactcgaagccaaatccctcgctcttgatgttgtatgtaccgatgttaccaaacgaatgaggacactggaaaggcgcatgaccattgctgaggcgaagaatgtgcttggtatcaacccagaggagagccgtcaaatccgcaatgcattttacaatacactgagaaacgatcacttcacaagtaagttggaagcgggcgatgagcattggaaggagctcaaggagcagtgggttcaaggttctgagcttcttcaacgcgttcttgccccgggatctgcagatcccaagcatgccacaaagttgagggcgctggaagtcttgtgtcgtgatgttatgaagcgccttcgcgatgatcaaaccaaaagagacccatcccgtaggcgactggccgctaaccctaacattcgcgtcgccgagagagcgagcactgatctcactggcccatttgactgtgacatttcaaatggcatcagctcgcttgcgtccgaggctcttgccagtgcacctatcacttccagcgaccttggcgatatgcaaattgatccttcgctcttgcaggctgcaaataacacgtcatttaccccgactgttcaccatgatcctggaagtgcatttggttacgttgattccattttggattcgactatcatgcccatgacagtttatcttagcatcagccccgaaagtgaattgcatgcggactctaagccatgggttgataagctgtcaactaaatcagcaactgaactacggcagctggtttctgccaggtttcccgattcaatcgtcgtcaaaatcgaggctttcgacggagatacgaacgaaaacaatgccacatatttcataaatgatgacgacgaactctacggatacatggcccatcttcaagggcgaaaagcagtgtttgtctttaggttgagt

SEQ ID NO: 25016 - DNA, 1503 bp, Emericella nidulans
gggtgtcgaagatcattgaacaaatcaagatcaccactacaatccgatcctcccgcgacacgttccgtgagcagatgtgcggaactattgttgaatggctggcggatatcgccgggtgtagtatcctcgatgacaaccagatactccgtcagctagtctgtgaggagctcctgggaccctggagacgcggcagtggcgctttcaacgccgacattggtcgacaaggcattgacgaccattctggaatggatttattagaaagattacgtgctattggcaccgtcatggtacgtgtgacgccgcaaggccagggtgttgccccggacgaagacgacgacgatgacgagatagagaatgagaatgacgaggcaaatgaggatgaaggtgaagttgacgaggaatttgtcgaggctcaagacgatgctgatgacggagacgacgagatggaacttgagctcactcggttgcgcgaagacattgcagacgatgatgtagacatggtgatgggcggtacagaggacgttttgcaaatggcccaaaccatttttggcttcaactctccactccaaggacaacaaactgagcgacaggagcggcaggaggagcagcagcagcagcaagagtcagtccagacaagcaatcctccccaggtttcctctggcggacaacacagtgaaaaccgtgacgcccaaggagtttcacacaaccaggggaacatgctgcatacgccaattcctaaaactcctcgtggcgtgcgccgtttcccttcgacaacgacgccgggctactggcaagttcgcccctccgctcctgtgaccggcgaaaatgtgcctctttatgaggatttatggcagcgcacccgacttgattggatgattctatttgacctgagattgtggaaaaaggcccgtactgatcttcgcgatctttatctcagcactgtggtgaacgtgccacagttcaagagggtcatgggtctacgtctatctaccctatatagcgcgctggcacagctatatttgatcgctgatagggaaccagatcattcgatcctcaacctgagtgtgcagcttctaaccaccccctcaatcaccgaagagattgtacagcgtggcaacttcttgactaaggtcatggcgatcttatacactttccttacgaccaggcaggtgggcgaaccgtacgaagtcaataccactgcaacgctgtctttcgatgcgggctccgtaaacaatcgacgccttatccatttcttcaacgatctacggttcttattgcagtcagagtatgtacagaaacgtgtgcggactgaggaacaatacgttcttcaattcctcgatttaatcaagcttactcagggcatctgccctaacgtgcgcgctgtcggtgagcacgtggagtacgagaatgatgcctggattagtgcgtcaatcctgatgcgggagatcaatcgactgtgcatcgttttccgtgaatcgttcaagaaaccagagcttgatgggg

SEQ ID NO: 25017 - DNA, 281 bp, Emericella nidulans
gcgaatcctgatgtgtggcccgaagcaacctgccgaccgactaccgcgacttacaccttgaaattagtccctcaacgccgtatgcgctcgttgaggtaagttctccttctccaaaacagatggctgaaggctaactagctcagtatcaagtcggggcattcgacccatggggaggacccgggttcgaacaatgcgccgctcttacgggctacgagtttgaaagagtattccacaagaacactttcagttttggtgtggggatcctgtcgctgtatatggta

SEQ ID NO: 25018 - DNA, 781 bp, Emericella nidulans
ccgtgtcctgtgcggcagaacaccgagactagccgaccggtccctcttgcagtcgctgtcattgactcgacgcggtttacttacacaaagctatgcgcgcggtccaacagaggtatgtactgaaactgggattccgactttccgactctatgctcctgctgacacttccagcctccgctattcgaaaccacaattggagagcactttgctaaaatcgtccaacagtatggagacaggacagcgtaagtcagtcttgtttcgagtcaaacagccagactaacgagctagtgttgtttccaaacatcaaaataacagggtcacctactctggcctcgacgctaagagtaatgcactcgcacgaggactgcaatccgtgggcgtcaagaagggagaccgtgttggagtgatgctggggaactcgatggaacatgcgactgtatgtcatgcaatgatagctcgatgtggcagaagctgacgggaataggtgacctatgcactgttcaaactgggggcggtcctggtaggcacatcggctgaataattctagacgaaactgacatcccaggtgccaatcaacccctccttcaatgcaactcaggtcgtcgcggccctgagccatctagggacaagccacctgattataagcaccgagtccaatctgcccaggaagcaaccacgcagcaacatccctctcctccgccacctagtccaggacctctacgcgtccaagctcgagtccgccgtcgttccaacgctgcagaagatcatcctcgtcgacaac

SEQ ID NO: 25019 - DNA, 448 bp, Emericella nidulans
atgaagctcagcacatttctctctgctctgggagctcttccccagctgatctcggctgccccgaatgcagtcgctaacaaacccaggcagtcctcggacgaccggcttgtctttgctcacttcatggtacctctagtggccttgttacgattctacagactgacgggagcagattggaatcgtcagcaaccgcaattccgcagccgactacgacgatgatatgaaacgtgccaagtctctcggaatcgatgctttcgcgttgaacatcggggttgatccctacaccgaccagcaactcaatctcgcctatcagtccgctgccaacaatgacatgaaagtcttcatatcgttcgatttcaactggtataacaccggccaaggataccaggttgggcagaagatcgcccaatacgcgaacctcccagcgcagcttaaggtcgacggcaaa

SEQ ID NO: 25020 - DNA, 336 bp, Emericella nidulans
ctccacccctggtccaagcaacgtgtaatcgagaagtattgcaaaaagcatggaatcattgtcgaggcctattcgccaattgttcggaattataaggccaacgatcctacccttgtcgagattgccaagaagtacaagaagtcgacacaacaagtcctgatacgctacgcattgcagaagggatgggtcccgttaccgaagactgataattcagagcgcattgtgtcaaatgccgacgtattcgacttcaacatcaccgatgaggatatttctgtgctggacggactggaccagggaagtgctggagccattgtggaggctgttgagaatgagtag

SEQ ID NO: 25021 - DNA, 429 bp, Emericella nidulans
cttcggctgcggcctgagaagaacgcccgccgtacgcgcgttctgtacgagctcctcgcaatcaacttgatcatcatcgccatggatgtcacccttcttgtcctggaataccgggggatgtggtaccttcaaacgacactcaaggcggccgtatacagcataaagctcaaacttgagtgcggagtcctgcgtaagctggttgaaatcgtccagcctacgcggcaagacacgagctccactgagcaggactcgttcccgacattcgttaatccggagtatatcgttggagatgttacccatgctgcaccacctcaacggaatgaccgtgaccggatacagtacccgtggcgcacgtctaccgacagtttcagtctgtcggatcggcgacgaccggtttcaatatcttctgcgctttcgagaccgccgtaa

SEQ ID NO: 25022 - DNA, 1113 bp, Emericella nidulans
aacctgttcttttctatgtttctaagccaggaacctgtgaagcggggccagccattgacctcgggggccaaagacccaaccggaagcttgctgaacggtttgaaagcgaagaaggaaactgttcgcgcgtttgccttttgggaattgtgcttcattagccagcagttccctgaccgacgaaaggcgatattcaacgacatcgaccgcgaaggtggatctgcttggacccaaattatgcaatcagccacggaggtaatccaaggcatcacaagccggataaatgagcaaaagttgggccctgcgaaatctaagccatcgccagctgaaaccaaatccgagcccacccttcgcaccctgccccgactcaccgatcctgttaaagagggcaacatcttcgccgcttctccgagatccactaccacaaacggtagactcggtgagggattcagtagcacgttgagatcacttggagaatctccggactggacacccaaggcccgcgcccgagcccgcgacgtgtttgaccgcgcctcgtctgctgttctcagcccagaacgcaaacaaaaacttctctcttcatcccaggacttcaaactcctcaccggtgcttcatccaccagacccgagagcatccaccccttcctcgcccagcttctccgctcccccatcggccttcttatccgccaacccttcgcccgccgtttgtcgggtattgtgctcggcacccccactgcctctctctcctccataatcgatgccatcgagtccatcacccgcctcctcatcgcctccctcaacgaggacccttacggcaaagtccaagccgacgtccctgccatcgtcagcctcttcactgaaacactcaccacgctagacacctacgcccatgtagagttagatgtgcactggacagatgctgcgtttccgccgtcaaatgaccctgctgcccaggctgctgcaaggagggttcctgatgtcgagctcattattgattcgcttagagcttcactgaagagtcttttgaccgcgtttagtccttactttaaggatgttgggcttgtagggaaggaattgaggttggcgaagggggctgcggggtttgatgaggagtga

SEQ ID NO: 25023 - DNA, 355 bp, Emericella nidulans
atgcggcctgaaattgaacaagagctggctcacaccttgctggtagagcttctggcttaccagtttgcgtctccagtaaggtggattgagacacaagatgtcattcttgcggaaaagcggacagaacgcattgtggaaatcggtccagcagacactttgggtggaatggcacgaagaacccttgcctccaaatatgaagcatatgatgcggccacatctgtgcagcgtcaaatactttgttacaacaaggatgcgaaagaaatctattacgacgttgatccagtggaagaagaaaccgagtccgcacccgaggctgcagctgctccgccaacgtctgctgctccggccgccggcc

SEQ ID NO: 25024 - DNA, 487 bp, Emericella nidulans
atgggtaccaaggctattcgcactgctgtcaaggtagacctgaacaaaccagcccgtgaacaaaagggcctccatgtatgtattgcacgcctttctctccacactccactaaccactgctatagaatcgatggcatccagatagtatgcgtctccaatctactttccattctacgcaacaaatctgacaaacttcaagtccctagctacggcacaatcgccaacaacgaagtcgtcaagattgaatgcctggactggaccggcggacaaatcaagaacgacgactccgcagacgacattaagaacgtcgacctaacacagatccactacctctccggcccgttcgacattgaaacagccgagcctggagatgtccttctcgtcgagattcaggatgtccagccctttgaggatcaaccgtggggattcacgggtgtcttcgcgcgggagaatggcggcgggtttcttgatgagatctacccagagcc

SEQ ID NO: 25025 - DNA, 607 bp, Emericella nidulans
cttgggatctacctcgtttcgcttgtgcctgttgtgggccgcttcgtgatgccggcagcctcgttctataccttccacagagccgtcggaaccacgccagcagccgtcatctttgggactggtattctgctcccaaagcgatacctggtaacctttttgcacagctattttgcttctcgcagtttgatgcgagaattggtacgtttggtaatcctcaccggggtagcgtgactcactaacattgcaacagctcgagccgtacttctcccgtatcccgttcacctcggagcaaaaaagccgttggttcaaggaccgtgaaggggtcctcttcggtttcgctttcgcatttacgtttgtcttgaagatcccaatcattggagtactcatgtatggcatagccgaggcctcaacggcgtatcttataaccaaaatcaccgaccccccacccagccccgcggagagtgagggttttgcagagacacaggttacttggaagaataagcacgacttcttgaggctgtccctagacaacattgataagctcaatgtggcagcgcacgagcaaccctctccgaagcccgcaactcctggccggaaattcgcttaa

SEQ ID NO: 25026 - DNA, 601 bp, Emericella nidulans
tacaaagacaccacgaccttctcttgcatctcccaccccgctatcaaaatcccgttctccgcagtaaacgatgatttttgcgactgtccggatggtagtgatgaacctggcaccgcggcgtgcgctcacttgtccggaaacaccccgttggatgtcgcccatctgcaggggccacagtggtgacggactcaaggcggctcttccgggcttttactgtaagaataagggacataaaccatcgtatattcccttccagcgggtgaatgacggcatctgcgactacgagctttgctgcgatgggagcgacgagtgggcccgtgttgggggcaagaaatgcgatgacaagtgcaaggaaattgggaaggagtggcgcaagaaggaggagaagaggcagaagtctatgacggctgctctgaagaagaagcgggaactacttgttgatgcgggtaggcagcagaaggagcttgaggaccggattgctgcgctaaagactgatatcgagggtaaggaggtaaggttgaaggcccttgaggctgatcttgaggatgtgaagaaaaaagaagagagcaaggttgtgaagggaaagaagacggcaaagtga

SEQ ID NO: 25027 - DNA, 1026 bp, Emericella nidulans
caattgagtaccaaacccgtccaactcttctcgtcgggacctcgactagttgtgaagttgaaatatggaaggtcaaatagaaagcgcgttgaagccctcctcaaattcactggtaagaggaagctttcccgtcaaagctcgcccttgcccgatgcagccgagcgtggactggctcattctatgagatctgatcagccaaggattttggtatctagtcaggccagcaagtctgttcaatcaactgccaagtcgaaaactgcggcgggcaaccaggcaaattcgtccctaaaagaccacccgaaagagccccggttaggcgctgagaaaccgcaaaccccgggggtgaatcaaacacaacaggagaaagcagggccagtgacgatatcgccggggaaagagcctaagtattcaacccgacaggaactgcttagcattgatgggaaagggcattctcatccagcttatcgaaaaccgcccgcggattactctctttcaagcacgactacgctttcaccatctcaaccaaatagcgctgatagaaatggtgagcgccgggcttggaaggaagagtatcagaaatatggaaatctgggccgggaattgaaacatgccgctgatcgacacacagccaaagacaaagtcacaagtaacgatgaaaagcttgctgcagctactgcaattgaggccatcatctgtttcgtacttgctttcattgcggaggaccagtccaaggcaatttcgcgtcaaatcggcgattcctcgacttggttatctatcatcgcttattggcgggttgtcaaaaaaaatagcattccatatccaccacttcacagcctctgtctcattctcggtgctgtctcttacgatgccatccatgctctcgacttagaacgcctggctgtcacacctgtgccaggcgagcacactccggttcccacgccggcaagtgacggacaacccgttaactcggaggagagtaaacgaagcttgaaagattttctagagctgaaaaatagactcccagag

SEQ ID NO: 25028 - DNA, 468 bp, Emericella nidulans
tggggccaggccctgcccttccccttctacagcatcattggctctctaatagggattttggtgactgctgcgacgcagaaccgcctaggcggcgaggcaatctggaatccgccgaccctgttcgcctctatattgcagaaagatccctctccggggacgcgggcggctgtcttcttcgcgggtctggccctatctgtttcgcaactgggcacgaatctgcccggaaatgcgctcccaggcggcctggaccttgcctctgtatttccaggttacatcaatatccgtcggggcgcctatatctttgcgctcctcagccccgtggttaatccctggcgtctcgtcaacacggcaacgaccttcctgactgttctttcggggtatggcgtcttcttggctcctatgacgggtctcatggcggcgcattatctagtagtctgtcgccaaaaggttaacattgatgatctattt

SEQ ID NO: 25029 - DNA, 417 bp, Emericella nidulans
atgggcatgagcgactgggcatctgtagaaccagtctcgtcaacactggcagcacaactggcaccgcgtctctcatcccagggaagccagattcatcatctaaccaaagaagcctttgcgcaacttcgacaagaacttttggaggggaaattcagtcacttaagccttgatgacagtgctaccgatgttagcagacttgtttgcatcgtgctcaaggccggccttgagccgtgtatgaacgatgaaaagccggacgaggcagacctgaacgggcaattgttggattgtttggacatcatcaaaacggcagtcagcaaagccccccacactctaacaaaggttcctgatccaaaaatcctcggcgaaaaggcttgcgctccgttatacgtttggctggcggtcccacttcaacacctg

SEQ ID NO: 25030 - DNA, 357 bp, Emericella nidulans
gacgccgcttacagcctggatggtggcgcagatgcgcagtaccatttcggtttatctggagaggaacccgcgccgcagctcatagtggctactggactgcctcaaaagacagctttggagattgccaaaatcaacgtcgcgaaacgcgagtaccagaaactgtacatggactactggaactcaacgtcagaggtcaccggcactgggaggccagtcgatgccgtcatttgtccggcagcaccccatgccgctgtgattccgactcagtatagccatgtgggatacacctcggtcatcaacgtgctggactacaccagtgtggtgattccagttacacatgcggataagagcgttgat

SEQ ID NO: 25031 - DNA, 2715 bp, Emericella nidulans
atggagcttctttcgaaccctgagacggtcctagccgatgtaaacatgctcagccctctcgatagagcatctctacgagattggaataaggagctgccgtttgcggtagaccgctgcatgcacgaagtcatccatcagaatgccaggaaacgtcctcacgctctggctctcgagtcatgggaggctgcatacacatatcgagaccttgacagggcatcgtctcgtcttgcgcgacacttgataaagcagggagtttcgcccgatgactgtatcccattgtgttttgagaaatcactctatacaatcattgctcttgtggcagtcctgaaggctggaggaggattcgtgcttctggaccccaaacatccggatgatcgtctcaagggccttctcgaggacagcaaggcgaagttcctgattgtttcaccacaaacccaggatcgttgcaaggaccttatttcatcgttggttgtcgtctcacccaagatactggatgagcttcctcacgccgatgaggacgatatccctccatcaacagccgtaacccctggggacatcatgtatgttcagtttacttccggcagcacgggaaaaccaaagggagccgttgtgcaccacagagcagcctgctcctccatcgagcaccacggaaaagtgatgaactacgggccgcactcccgcattttccaattctcctcgtataccttcgacgccatcattctcgaagcatttaccacattatatcacggtgggtgcgtctgtatcccgtctgaggaagaccgaatgagcagtatggtgcaatccatgcgcgagatgaaggttaacaatatgttcatgacgcccacacttgctcgcttgtttgggcccgcggatgttccgtccctgacgactctgatgcttggtggtgaaccgattccacaggatagtatcaatacgtggaaggaccacgtcgatctgattggggggtatggaccggccgaatgctgcgtgtactgctgttataatccgctcagctccagcgggttcaagccggatgttattggataccctgtcggagccgtcttgtggattgttgaggcagataaccatgatagactcgtgccggttggggctattggtgaaatcgtagtccatgggcataccgttggtcgaggctacttgaacgaccctaccagaaccgcagcaagttatatatcagcgccaagctgggtggccgattatggttatccgggtgagcagactttgtataaaacaggtgatctgggtcgatacaattccgacggcacgttaacaatcgtgggacgcaaggatacccaggtcaaggtgacgggacagcgcattgaactgggagaggtcgagcactgtatcaaaacagagtatccccaggtcctgcaagtggcggttgatgcactcaagccagaacatgccaacggacgccaaattttgtctgcattcctcgaattcgaggccgttgagggtagcgaggaattccagaacaagaacagcttccttcgcgccatgaacggcaagcttcgagagacgatgttcgagatcgaggcaatcctcgcccagcgcctgccaccgtatatggtcccccatttgtggtttccattggtcactatgcccaagtctgcatctggcaagacagaccggaaagtgctgaagcagctctgcaacggcctatccaagacagagcttcagcagtactccctcgcgagcggcagcaggaaggctctcgagacaccaatggaagaaacaattgcaggtctctggaaggatcttttcggggtgtctgacatcggttccaatgacaacttcttccgggtaggcggagattcgattgaagccatgaagctggctgccgctgcccgtgcgcagggcttgtccctctcagttgcggatatcttcaattaccccaagcttgatgacatggcaagaattgtggttgcagcttacggtgcgtctgccgtggcgcacaagtacgatgcacctttcagcctggtaggtggcgaggaaagtgcacgctcgattgtccaaaagcatattccacatgtgcagattgatctagttgaggatgtctacccttccacctccctgcaggaagggctccttgcgttgactagcagtcattccagtgcgtatgtcctccaagcacctttcttgctaccgcccaatattgacctggaccgtttccgcgacgcctgggcaaaggttgttgaggcaaatgccattctccgtaccgtgattatctccactgagacccagggtacctgccaggttaccttgagacagtccattgagtggtcacaagcgtcgacacttgaagaatacctggcgcaggatagagaaaggcctatgggctacggaacagcgctaagccggtatggcctgacattagacggatactttgtctggacagctcaccactccatctatgatggttggagtttcgcactgatgctggacgaggtcgagaagagatacaaggatgagtcggtagtttctcgtcctctttttgctgaatatattcgattcctgcagcggcaacagggcaagaccgatgcaactgcattttggaaagtcgcagctacaagatgctttctcgtcaagtgtattcccacagctttcaagctctctctacgaggtggacgtagaccgcaccttcaagtacagcttccctttcagacccagtccaatgtgacggcattcaccctt

SEQ ID NO: 25032 - DNA, 260 bp, Emericella nidulans
atgccccgcacgcccctccgcatcgctgtcctcgaatgtgacaccccgcccgaatccagcaacgccaaatacggcggctacgtcggggtcttcaagacctcctctacagcagcgttagagaactttataaacaagaagaagtcgacccgtcttctatcctcgagatctcgcgctttgatgtcgtcacggcacaaaactatccggatttggcgaatgttgatgcggttctgttgacgggttctagtatgcctacctcctcc

SEQ ID NO: 25033 - DNA, 344 bp, Emericella nidulans
cttggccgagagaacgctgctgcattgatgctctcctttggcttcttctacagcatctccatgactctagtaaacctcctagagcggacggagctctttggtgtctcccaagacatccaggagcagctcatcctcgctctagcggacctcgtcactctcgtcgcaagcgtttcgacccacttccacaaggcgattcgtgggatgacaacggcttcggtctctgtcaacatttaccggactttccctggccagattcaaaccttccagcaacgctgcgagaggattgccgagtccatgtggagacatcagcttctcagagagaatctggatggagataaaggcaa

SEQ ID NO: 25034 - DNA, 906 bp, Emericella nidulans
atggcaacgcgatctcaccggctgctgggcgtgctggtgacgagtcttctcgtgtgcctctcactcatctttttagaaagccccagctccttcagcaatcggaatatcgctccttccccaccatctacctctcttacccccttcctacagccgagtgagcctttagacgatactattgaccgtttcccgagcgatatccacccggtaactgccctcgtcgaagatgcagagcaacgattcaacaagctcttggaacgccaatccagaaccttaagcgatgctgttaaggaataccgccggcgctataacatgcaccctccacctcattttgataaatggttcagctttgctcgatcaaaaggcgtggaactcattgacgagtatgacaccatctaccactctttgctgccattctgggccctcacaccgcagactattcgcgctcgcgcccgtgaggctctgggatatgataatggtttgttcggcgttctcatcagagatggcaaggtatcgctggctgaagggctagatggagaacatgagtggcagcgtgaggcgacgcttggtatgatgaagaactttattcggtatttgccggacatggacctggccttcaacgcccatgatgaaccaagggttattgtgccgagcgaggatcttcaaaggctagtagcgatagccaagaatagcgtcattccgaatgcttttaaggcaaaatcgctggtgaacgaatggtcggctcggcccgaggacctgaacaaaggagaccgcattgatgaagtgcgtacaactcgtttcaacaaaatctctcatcagcccgcttggactagctcaaggatatcatgtcccgtcgatagccctgttcgatccctagatgaaaactcgccggatgacacaactggatat

SEQ ID NO: 25035 - DNA, 1027 bp, Emericella nidulans
atgggcgttgcagtgcccagtgcgtccgtcagtactggggataccgagagtacgaagaatgcgctactcgctatctgggataatcagacaccgagcgggctgttgccaaaagccgggccgccgtacttgagggccgacagtgacagtacgttcttcccccatattttcgccttgcagtagcagaccgtggtggagctgcagagatgattattgtccagattactgattaggacatcttttgcagcgtaccacctgtggacgattatcggaacgtacaattacttcctcttcacggaggactatgacttcctggctggcatctggcagaaatacgtcaaggcgctggactacagtctggccaaaatcactccccttggaatcatgaatgccacccagactgcagactggggtcgctggaactacggtactctcgccagctctgcgaacatgctgtacgttgtcctgctctcgtcccagtagcatcccactaatagagacgcagtctttaccgatccctcacgacagccgcattcctcgctccttatgcaggagacaatccagagaattacaccgatctggccagcaccctccgcagcgccatagtaacgcacctttacgactccgccgtcggcgccttcagagacagccccaactcgactctctatccgcaagacgcaaacagcatggccctcgccttttcgttcttttctcagtcgcctctcaactgcagctccagcttcaacctggccgaggcggcccgcgtttcctcctacctcgaatcaaactggacccccatcggcccagaggtgcccgaattgcctaacaacatctccccgtttatctcgtcaatcgagctagaagggcatttcgcctcaggccatgcggaccgcgccatcgagctgatccgcatgctctgggggtggtacctcgctcatcccaacggaacgcagtcgaccgtgccggaggggtaccttgtggacggaagctgggggtaccgtggcgacagagggtacaggaacgatccgcg

SEQ ID NO: 25036 - DNA, 645 bp, Emericella nidulans
atggcgagcatcgccgatataccccgcatgaaagcaacgacacttacaatcatgtccacacgagctgacgaccaagacctggtctttcaagtcgcaactcagcttgccaaagaatcaggcgatgggaatgaggacgcacggcgcgttcttccctgttttggctggcacccgtggttttcgcacctgatcatggacgacataacaccgtccaaagatgatcaaaaggaaattgacgagaacaccaaaaagtcacactatagccgaattctaaaaccatccccagatgaggctttcacatcttctcttccaacccccatacccctctcgcagctcctatcagaaacgcggtcaagactacaggccttccctgctgccctcgtcggcgaaattggtttggatcgagcctttcgactaccccagccctggacgcaagaggagcacgacgcccgagatggcgcgatgacgcctgggtcgcgcgagggccgccggctttctccctaccaggtcaggccggagcaccagaaagctgttctggaagctcagttgcgtctggccggagcattgcagcggccggtgtctgtgcatagtgtgcaggcacatggggccgtgattgaggtcttcaagggcctttggaaagggcatgag

SEQ ID NO: 25037 - DNA, 1352 bp, Emericella nidulans
atggctgtaggtcgactttactacatccacaatcctgctgattcgctaacaaagctgaacagtcctcggcatcacaagctcggccccgccgctcttatccatccttaaaccgcatctcactcgcgcctttaactccccattaccccattgacgacgacgacaatgagtcggacaaagacccacaggattatttcaccccgcgaaatgaggctattgacaaccccactagaacttcctacttgtctagctattcggtcccagggacacccggcgtcctctctcgtgcgccttcccggagtggctcacgcgcccgccaccacacccgaagcaagagctcaactcctattcattttagcgactccaatcttcaagagcagaatgtgaacgaaccactgcatcatcagtctagagacagcgctagcggaaatgtcagcaccagctttgacgctagcaggagaacgagacacttcactgcgcatcgtcaccaattatccgaagtgagagatcccgagtggatgcttcgcgcgggtgctgcactggcatcgaccgctcgtgaggagaagggccagagctggctagcgaagcgtgagagctcgaccagtctagtatctgaggcgggaatgtatgaagtcgatgctatcttccacgccctgcggacgggcatctctcggcggtcgaagtccggccgttccacacctgcagctgcgcactcgcgatcacgcgcaagccgtctacggaacagcaggcctgacctctccatgacggggcttgagatgtcgacgccttcacctacttcgaagcgaagtagtattcacatcgcctcagcgcctcgaacgccttctcatgtcccgagcgaagatgcgcggtccaccacatctcttcttccagacttcattgatgaacacgtccgtgctgagatgcgagacacaattcagcagcatgtcgatggcgattacgactccgcgacgtcatatgactcctgggactcagaagagcgcgaagaggatatggacgagcgtgagctccaacgcctgactcgcgagcgtggattcggcttaggaaactggattgaccgcttggtagaatggacgctgttcggcgtcgacgactggccgctctctactagcaccgatgcagtaacagagccacaagcagcagaactacatgcaggccacgaaaataaccacgagccccgcgagttatctgacaaggatgatgatgatgagacaagaagccaagtctcagatactaactccgatatcccccatttagaaagagctggggatcacggtggctgggaagatgcaggctggttcatccgcactttaaaacgggcattgatatctacttaa

SEQ ID NO: 25038 - DNA, 2005 bp, Emericella nidulans
atggcgcaactttggggatggatctctgtatactgcttgcttattctgtcgtttacggtgcgttcacttggacaggagcaatcagcgttctgtgaacacagttctctcgcgcgagaatgctggggccagtataacatctcaactgattaccacgccatcacgcctgatacgggcgtcaccagagaggtattctatcactaaccgtccaaccaccaatcaatcgaaaagacatatatggttgctcagatgagctaagtcaagaactgcagtactggctcgtcgcggagaatacaacccttgcaccagacgggtacgagcgacaagtccttgtcttcaatgggactctgccgggtcccttgattgaagccaactggggcgatgagctcgttattcacgttacgaatgggctcgagcataatgggttagttttgacctagactgtcgctccgcgcctgatgctgagactttgtagaacagcgattcactggcacggtatctggcaacgcggaacgaatcaatatgacggtacccttcctcccacccttatcttcctacctgagcaggctaatagaaaaataaaaataatacaggtgtcccaggcgtgacccaatgccccatctctccaggccaaacatacacctaccggttccgcgcaacgcagtacgggacaacctggtatcacagccacttcagtctccaactcgcagagggtctctttggacccctcgttatccatggcccagcgagtgcagactatgacgttgaccttggttccgtgtttataagcgactggtaccataagtctgcattcatactctgggaggaatcaacccgctatgggggggttcccgtcagagccaacgccgttccgccaacgggactctttaatgggagtaatgttttcggcggaggcgggaggcgctctgagatgattgtcgagaaggggaagaagtatcgccttcgactaatcgacagttctgtagacgggtggatgaagttctctatcgacgggcataaactgaccgtcatatcggcggacctcgtccctatcgaaccgtacgagaccgatgcggtaatcctcacctcgggacaacggtacgatgtggtcttcgaggcgaaccagaaaatagggaactactggactcgcgtgatttaccaaacagcctgtaacgggctggatatcaaggatcctgatatacgtggtatactccggtacgcaggcgctgaaatctccgaccctacaagctcgcagtggtcgtccatccgcaattcctgcggcgatgagccctatgataagctcgttccgtatgtgaaacggacagtgggaaaggctgccggccaggagaaccttaacgtgggttggtactatgacctgccagagctgtactttcactggacgctcaatacaaaagccctgacgatcgactggggaactccgacgaataaactcatctataataaaaaatctgtctttccagcggaatacaatatctacgaggtgccaaataggggtcgagtatgttccctatctgcatctccagcgcgtggtgctgaactagctagtggacgtactgggtcattcaaaatgttggactcgtcaacgcctatcaccctttccatctacatggtcatgactttttcatccttgagcaggggcgggggctttatacacctctcgtcaagctgaaccgtgataacccgccccgaagggatacggccacgatggcagggaacgggtttcttgtcattgcattcgaaagcgataacccggggtaggttctcatccacttcaaagaacaccgaagactaatgtcacagatcctggttgatgcactgccatattgcctggcacgcaagccaaagcctcgccctccagtttgtcgagcgtgagtcggagattgggcccttgattgagccggttattggcgagattgagagtgactgtaaaaaatgggagaagtaccatgcggaatccgtctaccatcaggatgattctggtatctaa

SEQ ID NO: 25039 - DNA, 345 bp, Emericella nidulans
aacaccgagatgctcaagcccggcgatgagattgtctccacctaccaccgccgctagacccacggataccccaccccctctctggagcgtgaaggcgcccttacccagattctgcctaagctgcagtcaatggacatctggtctcgtggccgcttcggtagctggcgctatgaggtcggtaaccaggaccactcattcatgctcggtgttgaggccgtggacaacattgtcaacggcgctgtcgagctcacactcaactaccctgacttcgtcaacggccgacaaaacaccgagaggcgtctagttgacggtgctcaggcttttgctaagaataaggcgcagtaa

SEQ ID NO: 25040 - DNA, 1471 bp, Emericella nidulans
atgacatttacgccttctgacgggattctagcctatcgccctaagattgcgaccccaagcgaagatgacgaagacgatgtcatggtcattggaatcgactttggcacaacgtgagtcccaaggcactctacacgcgctgattctaattgtaaagttattctggcgtcgcatgggcaacggtcgcagatttcgctagcgatcaaatcaatctcatcaccagttggccggggaccggcagagaagagggcaaagcgccaactgagttattttacgaagacgaccagattttctggggctatgagattcctgatgatgcagatccagtccgctggttcaagctccttcttgtcaaagacgaggacctgagtgaagagactcgttcgtccgagttccttcttcgtggacgcaagatgctcaaggagactggcaagactgcagttggcttgatcgccgattatctccgcctcttgtgggcgcatatcttggagtcggtgaagaagtctcgtggtgagtatgtcattgatgcgttgcggttccatgtcgtaattacagtgcctgccatctggaagggttatgcaagacagggaatggaggaagctgctcgacaagctggaatcttgagcagtcggcccgctggggagactatgcttagctttgttcccgagccggaggctgcagcattatctacgctttgtgagcctggtcgtaggactcagccaggtgatgtctatgttatctgcgatgcgggtggtggcaccgttgtaggttgcttctctccaacttcacctcctagctcacggtcgtaggacttgatcagttacgagatagcctcggtcagtcccatcgcaatgcacgaagccgtcgaaggaactggtaagtatatcaaccctttactcttattctttctaaactttctaggtggtctgtgtggtggtatctttatcgatgaagccttcgaacacgcatgcaaatcacgactcggacgtcgctgggatcatctcagcaaggctggtattaaagagatcctcaagggagaatgggaacacgccattaagccacagtttaaaccacaaagctccaaaaaggagtatattgtgagtataccagcagaagcatttgggaaaaacagcttggacgacatgagtcgtgagccgttcatcaagaagggacgaatccatttctcagggtacgctcaaatctcctgattgtgtctctgtctaacgcgatctagctcccatattcaagatgcatttactgagtcttttgctggaatcgacaaactcgtcgacggccaagtctacaaagcaaggagccaaggcctcgacgtcaaggtatataccttacccatcttaacagcatctctaacaagagcagggtatcatcctcgttggcggtctcggcgccagcccgtacctctatgaacatctcaaagagcggcactctagtgcgggaatcataatcctacagtctg

SEQ ID NO: 25041 - DNA, 870 bp, Emericella nidulans
actcacgtccagtccaggccagtcgccatggccgacacgccgaccctcaaaacagacccagatgatcggcatcgaaccaagcccctaacgctagatgaacagcctgtcgaggcgcaggcccaaaccggacgctcatggtataatccacgaggctggtccctgcgcacaaaaattatcgccgccatcatcgccttggctggaatagtcggcatcatcgtcggcgctgtggagggctccaaggccggccggtacccggaatactcgccgctggattatcggttggtggatagctattccggcctgtcgttctttgaccaatttcggtatttcgatgacgaggacccaacggatgggttcgtcaagtacgcattcgcctagatcaaacactgtgaacgattgctgaccagggctcgcagctacgtcaacaaaaccacagcccaacagctgaacctcacatatgcatctccaacctcagcaatactgagggttgacacggccacgagaaacgcctcgcatggacggaactccgtccggatcgagtcattcaagacctacgatgacggtcttttcatcttcgatatcatccataccccctatggatgcggcacctggccagctctttggctgactgacggctacaactggccggatcatggggagattgacgtgcttgaagccacaaacaatgcgacagacggcaatgcggttactctgcataccacgcccgggtgtaacatggacgtcagacgcaagcagacggggagcacgacgtatgcgacctgcgataacaatacaaatagcaacgcgggctgtggggtgcaggggccgagcttgacttatggagaggcgatgaatgagagaggtggtggt

SEQ ID NO: 25042 - DNA, 960 bp, Emericella nidulans
tctggactgcttcggccaacttcaacgtctcatcgtgacgctctctaaggaacacttttcgtatctaccaattgaccctcctcaagaggtcctttccaagctcccgccagagcttccttcgttccttgacaacaccccagcgtctcgcgaactccgctccgcttacgtccagcacgtcgtttccaaaatcctaacctaccgcatcttccacccctttctcttcactctcgggcgccgctacgacaaagcagacatcctcttccagatgctctcaatggacattcgccgcaagtccgttcgtcgcgaacgtttctggcgccagaaaccctcaaagcagcctacaccacctctgacgcaaaggagtccatcaacgttgtcgccgccgtgatcgtggacgagatcagcaacagcctcaagcactttgctgacccgcgccgtatggatggccttctcacaagcatccgcaaaattgtcaaacttgccgccgaaacatggcgacacgcacgagtcgagcgcgaactcatcatcgctgcccttccagcccccgaagacggcagtgtccccggtgaggactgggaagagtacggcgttcccaaagagaattcctcgggtcgaacctctccgaagacagcagattttgcccgccatgtggtcttgcgtcccttccctcgcattatccgcgaagcagcccacgaggactttttaggtgacgagggcaaggcgagcccgtgtacgtactctcgtggctccgtcctgtactctgactcgccaattattcttgcaagactccaggaattggcgggaaagactacagatgcacctgtgcgaagagaggactctccggcgacagggagactctcgcgagcatcgacttattatgaacccccttcgcctcggataccgtatgcccaggatacccttattgagggtgcaacaggacctaactttggaaccgcttag

SEQ ID NO: 25043 - DNA, 970 bp, Emericella nidulans
agacacagacacataatggtggactgggtcacacttattgtaccgtttgcgtacctcagcgttctaatcggctcccttgcaactttctcatccctctaccgcaagcgcaaggccagtacgtctcgtcaaatactctcaaacaaattcgatcaaatcactaaccgcatcccccacaaacaggaaaggccacatccctagaaccatggtttccgtcacatctacaacgagacatctacttttcccttctgcaccttgacccgcccgcctcagcaacagagaagaaggtcgcggtccccgagtcggtcctcaaggcggcgctactccgccgcgctcaagaagacattcgccgcgtcatgacccttcgcagtcagaagcaggctctttccgtacttcttcagcggggaagtgtgggcgacgacctttggcagaggtttctgcgggcggagaaggagatggaggatgaagtgcgggatgttgttactgaggtaatcgcccttttcgctttttctcggaattttattcagtagatgggatatgctgacgttactgatgaacaggcaaacgcgtacgcccccaactggggccaggtaatcttccagtcggcaaacgaaatggttaacaacgagattgtacgcgagcggttagataaacaccagaagaaacttgatgaggagaaggcttggtgggagaagaagaaggctagtatccaggaagggttcatgaaggagctggatgctgagaagccgggcaccgtcactactgctgctgctgtaccgcggcgcctgaggttgctgaaggtacgcaggttgcagttgggtcgaaggcatctgcttcagctgcggctccccccgcaccgactgttacggagagtgacgatgatgcggtgcttgtagaggctgatgaccaggccgggagcgcaggacaaaagagtcctggtggaggaaaaaagaagaagaaggggaagaaatga

SEQ ID NO: 25044 - DNA, 693 bp, Emericella nidulans
gggaaaccactggctctgccgtatgctcgcacgatccatgagatggttccaacgactcccttgtataatgatccacgtcggcaacgtgagaaccctcatgagtcgattaacgacctcccggcccatcgcctcactgatgctcaaatcttctaccctgtctcggagtcgcgccacttcactcgtattgatgctggtcgcgtattctctgccgctccagcccgtaaacacgaagtagttgagcaggagcttgcggacccctcaaaggccatgcaccgcatcacacgaaatccatctctgattgaaactgtcggcaagggcgacaaggaggaacccgtcctgcagccggccgacgttcgaatcccgcatccctctctcatctcttttgagcgcgaccgcctagccaacccgaacgagatctccaccgtactaaaggtccacagtgcgcgtctcaaggaggaggagactgctgaggaggagcgcaagcgtcgcgccgaggagcgtcgcgagagccggacgcagcatgtcaaacctgagtcatcccgcttcgagttccgcatcaaggacgttgtcgttagcaaagagactactggtattgatggtcgtggcgctaaggctcctggtcggagatacggtgtgcctagcgatgaccggaagaagggccaggttaagattcccactcgagtggaggtttaa

SEQ ID NO: 25045 - DNA, 1601 bp, Emericella nidulans
aggttttgcagagataattcacccgacaattggagccacaaagagagccaggtgcaagtcatgccaggataatgggagacttgcgatcgccctcgtcgcccgtcgaaatgtcggaacgatccccttctcccgaagaaacgaccgcgagtacgacggacccttctatcgcccaatccgcctcgctacaacctccagttgatcaagctctgtcatctgaaagcagatcgatagcgacaacgacaacgacaacgacatcgtccagcggccttgatcagtcggcgcctggtaccccgacgcaccaaggtccgagaatagaccgaggattatcgccgcatccagcttttgcgaagctcaaagggatatcatcactgcaagaagccgaacggtcaactgtgagcctgcggtctttgcgcagtattcccagtatagtcgtcaatgacggatcacgtcccagttctcggccaggctcaaggcccggatcaaggcccggctcgcggtggtcagaaaagaaatggggcaccttcagaagtaggaggtcgatggatcaccagagagacgaatcgccgccacctgtaccacagatagcgccccaattcagtggtatctcgttggacattccggatgcgtcatttgatgaccttggtgtctcggacatgaggttctctaagcgtgggagtctcatccgtacggagggaaaaccacaatcaaagcgcaagctcaaggagcaagacacggacccagatgctacgggaactgcggcaaagggaagtgaagcgacgaaaaccgtcgcaactggaacagaaacagagactctgggggcgaatgggatgtctcaggagccggtacaagacggctctgccgcggatagctttggaaccgcccgtgtccgtccgcggcctccgtcattgcttcgtgttagtcggaatagtatagccagcagggccatatctgcggatgaggatatgctatctcgaagggttaggttgatgtatgcgaaaggagacgagaatgttacagactcggaagtggcaagatcgtatgccatggaaaacggtactttgtgggaggagccaacccctacgaagtcagagacctttgaaaatagtgcctctgaagccgggtcaaaacgcgctgaaacttcgactgacactgacgctaacccttctggtcccaaacgtgagcctaacgagcttgccgggggtatcgagtactggcagaatataaaggcgggagatgtcgatagatatggcttcattcggtcctcaaactctgctgaaggtgcagagttcagtcccattcaacgagtttccaccagtttgctgctagcatcggagacaccaaggcggagacgaaccatacgacctccaactgccctagcaagcaatcgctcgtttacaggccggtccccttcgcggcagaactctgaggcttccatgcgtcctgcttcctcgcagagcacgtttagttcccccttgcgcagatctacctcgcggttccgacaagcgacaaaccacttaccccacaatcgcagtcgccgcttcaaggatgaggctggcgatatgctcactcttccttctgactctacggcgtttgacgattag

SEQ ID NO: 25046 - DNA, 841 bp, Emericella nidulans
ctgtggctttggatacgagataatgacgtgttttggttcggcccactgacgcgcctgatatcatttcgacgagcccagaaactcggtcgcattccccctcgcatgctgcgttcaatgttctccgcccacagcgcaagctcctccccggacgtccttgcgcctcctggcgatgccgagtatctgatctcatctcctttcagaccctttgccggtcgtcaaagcagcctcatgtcgcccgcgaaccgccgcatcctccagacccccggcgccgtgaaacggaaacgcatcaatctcagccctgcgaaaagcgcacattcgattcgcttcgatgatattgttctgcccggctcacctacgagaaataatgcacaacagcggtcttcgtctccggacaaggctcaagcggacggaaatgtcagtccctggcgcattcgagtgaccctcgaggcaacacaggacgagcaggagaaccaagagaaccaagacagcccgtcgcgcaaacggagccgaccaacgacgaccaccatgaaggttccgctgaaggatgactcagagcagactccccggcgaaaacgaggtcgtccaaggaagtcccgcggtcccgatgtaactccgcttgctggcagcgctggtaacactcccgggcctgggaacaccccaggtccagggagtacccctggcccagggcatacaccgggccctgtgaacagtgcacagaagcggcggccgggtcgaccaaggaagtatccaccgacgcctgccccgaatctaaataatcaacagctcaagcagcctcaaaagcccgaggtggatgcgcaggcggcgggtccggaatcgattg

SEQ ID NO: 25047 - DNA, 1016 bp, Emericella nidulans
atgaccgcgtccatttggacgggcgatgcgctctggctggggagcagtgtgattcctaaggaggacgggatttgtcatctcgtctgccaggaatctagtctcaacgccagccagtgcgagtccgaccccgcttgcgggttggttgttcccgacctgacgaaagatgatcggttcaacaaacggcagtacgtcgtcaaagcgccgcatctgcgcttcttcgctggcgtaccgattcgcagccgacgcgggatcgctatcggtgcgttcagcgacagcgacggcaagacgcggccgagcgatctagcgtcgctggaactcaaattcatgaccgatactgctgccgcgatcatgaaccatctggagatggtgcgatcgcacgagcagaaccgccgtggagcgaacatgatcgccgggctgggcaactttgtcgaagggggtatattccccctccagcagccttcgccggcgcagccggactcaatgtcgacaatgagacggctgccaaggacgattcaccgcggaacagcgtcttggtctctcgtcggattcacgcccggtctgaacagtcgacagctaacgatcgcgcgcagcgcgaaaagtcgccaatcccgtctgtgcccgaatccaaggagtccaacgaactgcagcctctctgcgaaccgtcgacaccgaaacgaaagcgcgagaacgaagtcaccctgacttcaggcacccgcgagatctttggccgcgccgcccgtatccttcaggagtcgctggacgttcagggggtggtcttcttcgacgccagcgtcaagtcgtacgccggcttggtccgcaattctgtcgaccgcccttctgatgctgagagcagcagcggttctagcgaggctcgtgaggcaagctccagcgacagcgacaatccggccacgggccactcgaccaccgatacggacgacttctccacatccgatgtgctgggatactcgcttgaggatccagaacagcccacgggcgcgatgcgcgagaccttcctc

SEQ ID NO: 25048 - DNA, 957 bp, Emericella nidulans
atgcaggaaaaaccaactacggtcgccgcgtatgcggctggagcatccctagcggccgttgctctgttctatgtctttgggccgaattacaccatcgatggagatgaggcaggagggaaccgcaaaaagagcatcgtgggcctctcgaatcccgcgaatgactgtttcatcaactccgtgctccaggcacttgccggtctgggcgatctacggttatatttgatccgcgagctccatcggcgggagctggacgggcctgaaatctacaaccagctgcccgggccagaggaggctgaccaattgcgtgagaagagaccggacaggatccgggagcttcagcagggtaccattaccagggcgctgaaggagatgctggatcggttaaacgagcggccaatttataagaagacgatctcggcgcgggcattcatccaggccttggagtttgcatatcgcactcgcattagtcgcaaccagcaggacgcgcaggagttcctgcagattgtggctgaaagactgtccgacgagtaccatgctggtgtgaaagcacgtcaaagggcggagaaatcaatcgaattcaatccctaccaagagcgcgagaaggcgccgtctgagattgaagtgcgactggatgacggcacagagaatggtcttccggccataatagacaccaagctcaaggagatcgacaacgagtatggctttccttttgaaggcaagttggagtcccagattgaatgccaattctgccactacaagtacaagccgaaccaaacttcatttgtcaatttgacactgcaagtcccgcagaggagctctaccacactcaatgcttgctttgacggccttctcaagaccgaatatatcgacgacttccgatgcgacaagtgccggttgttacacgcgattgaggtaaaatcaaatgcgctagtcacggctggttccgcaaccgacagg

SEQ ID NO: 25049 - DNA, 392 bp, Emericella nidulans
cctttccaaacgagcaggtttaccagcaagtagatcacttcgcaatcgaccgagacgaagaagagcccgttaacgaagatatcatcaaaatacgtgatccagaactcgagttcaggacaaggaggcgcgcttcatccgcagatctcccttcggaactcgaatacctacgcaagcataaagaggaggctggtatgaataggcgccattattttacaacgagaggagcatgcttttcaacgtgtgctgtctatcaaacttccaggaaatcgggcaaacctgcaaaccatgatgatggatgggacccaaactctccctttgcacaattaaggcaggcggctagcccgccgatgctcgggggtgatctcatatttccacaaagcctgactcctaaa

SEQ ID NO: 25050 - DNA, 432 bp, Emericella nidulans
cattacctgcggcctgttcattaacatcaccctgtacgattaccttcgcacgatcgtcaacctgaaccgagtgaacagcacctggtgcttggtaagtaacggttctgtcctgctattatgctctctaacgaaaagcaggaccctcgagctcagatggaaggcagcgctacacctgccggtctcggaaaccaatgttctgtcgagtttaacctggcctaccggtggcactctgctatcagtgccaacgacgagaaatggaccgagaaggtctacgaggaactgatcggcaagcctggttcggagatcagcacgcaggagctgcttataggtcttggcaagtacggtgctagccttcccaaagatccatcttagcgcacctttgcgggacttaacgcgtaagacgatggtacctttcaagttgaggagctagtg

SEQ ID NO: 25051 - DNA, 1727 bp, Emericella nidulans
atggccgattccgaattgcccgctcgtcccaagcccgaggagactcccgccgcggaggctggtgagggcggagaaggcaagctcagcaaaagtgcgttgaagaagcttgcaaaggacaaggcgaaggcagagaaggcagctcaacgcgctgctcaagaaaaagcccaggccgctgctgccgaggcaaacgacaccgcaaaggatttatacggtccgattcccgaaaccgcggacgtccttcccagtacgcaactctcccagatcaacgacgaacattatgaaaaggaagtcacggttgtggctcgtgtggacaatgcccgtgctcagagtgccaaattggcattcctgatgcttcgtcagcagggattgaaggtgcaggctgtcattgctgcggcggaacccatctcgcgacagatggtcaagtacactagtggtttgaacgtcaactctatcgtccaggttactggtattgttaagaagcccggggttccgatcgcgtccgccactttgagtaaccacgagatccatatccgcaaggtttacatgattgccgaagccgctcaacaacttcccatgcaggtcaaggatgcggagcggccgctccctgagacgaccgaggagggcttccaggttgattcggatggtgcacctattgtcaccctcaagactcgtcttgacaaccgtgtcctagatcttcagacggcaaccagccaggctattacctggatctctagcggagttgcagagctgtttgcggagtatatgatcaaaagtggttcccgatggatctctacaccgaagctggttggtgctgccacagaaggtggcagtggtgtctttgaggtcaagtacttcaagcgaaacgcatacctggcccaaagcccacaattgtacaagcagatgtgtatcgctggtgacatgcagagtgttttcgagattgctcctgtgttccgcgccgaggagagcaacacgcaccgacacttgaccgaggtacgtccatactaaaagttttattgacacagagaagctgactacgattcgttgtttagttcaccggtctcgattttgagaagactttcagctctcactatcacgaggttctcgaatttgccgagcagctcctcgtattcatcctttctcagctcaaggagcgatatgcggaccaaattgccattatccagaagtcctaccccaaggcaggcgatttcaagctccccaaggacggcaaggccctgcgactgaactatatggacggtgtggcgctcctcaaggaggcaggcgttgatgtgtcagaacaggagcgcttcgagaacgacttcaccactgctatggagaaacagctgggacagatcatccgcgaaaagtatgacaccgatttctatgtgctggacaagttccctatggctgtccgccccttttacaccaaggcctgcccccaagatccccgcttctctaactcctatgacttcttcatgcgtggcgaggaaatcatgtctggagcccagcgtattcacgatgtgaaggagttggaggcctctatgattgccaagggcgtcaaccccaaccaggagggctttgaagactaccttgctgctttccgccagggctgccctccccacgccggcggtggattgggtttgaaccgtattgttatgttctttcttggattgccaaatatccggttggcgactctgttccctcgtgacccccagcgtctgcgtccttaa

SEQ ID NO: 25052 - DNA, 513 bp, Emericella nidulans
cgcttaatgtacttccgcacgacgaccttgctgagcagaagctgccgttacctgcgctctcccgtctccgcgaaagcaaccttttctctctccgcgcgttctctcgcggccgcaaacgcagcaatggctgataccctccctggcgccgtgaccccggatctgctgaagagcaagttggttgagcagctgcaggcgcagcatgttgagattgaggatctttcgggtacgtcatcgcttgttcgagtccactttactagtactcaaccttggatgctttcgctttacaccgtgatcttgagtctctggactgcgctgactggtctgctgtgtctaggaggctgcggacaagcgttccaggctgtcattgtttcgccgcagtttgagaagaagaccatgcttgcacgtcaccggttggtgaactcagttctgaaggcggagattgcggctattcatgcttggacgcctaaatgctatacacctgagcagtgggagcagcagcagggttctgcataa

SEQ ID NO: 25053 - DNA, 561 bp, Emericella nidulans
agcgagcttaagctgcttggaaacttcatcaagtcctccccgggatacctcctggcgaccccaggcaaattaacgaacacgacttacaccaatacagccgacctaactgtgactccattgctcgggaacggcaccggctctttcttcgtactccgccacagcgactatagcagtcaagcgtctaccccgtacaaactgcggctcccgaccagtgcgggacagctgacgatcccgcagctcggaggctctctggtgctcaacggacgtgattcaaaggttcaccttgttgattacgacgtcgctggtacgaaaattctgtactcaaccgccgaagtattcacatggaagaagttccacgacggcaaagttcttgtgttgtatggaggacctggggaacaccacgaacttgcggtctcctctaaggcaaaagtgaaggtcgtcgaaggattgggttcgggcatttcttctaagcaaatccgcggtgcggtcgtagttgcttgggacgttgagcctgctcggcgcattgttcagatcggagacttgaagatattccttctcggt

SEQ ID NO: 25054 - DNA, 526 bp, Emericella nidulans
gggcccctcccgtcccaacctgaacctgccggcaaacactcttcttaccattgacgacgcgttgcgcaaggacgatactcatgttgttctggagctgctagaagatttgaagacggttgcggacgaagcgggtgagaacgtctttccaaaggtccttcgaagccttcttcagcgggccattcattatcgctccaaagcatgcatttcggccgttattggccgttctggctcccttgaggaagaagacgatattaataaacgcaactgtatccatcgtttagtgattgcgattggtcgcgcccagaccaccactgactctgagcagtcggcgtcaatggtcttggatttccccatggataccccaaactacattactcctgccgcccttccgacacttcagccccctcgttcatttgcgaaggagtcggatcatgtgcagcacttgactcggtctgaccctgcggtctcggttctggagtatttgctagaccacctgcgaccagaccaacgcgagtctctgctttcg

SEQ ID NO: 25055 - DNA, 324 bp, Emericella nidulans
gacattctgagctgcacatacatgtttggcgcagatgctaagaataatacacccgctcctgcgccagaggagcaaccttcacacgaggatagctccgcagatgaaaaaccctccgcacactctccctcgtcgagccggagccagaacgccccttctcaaaagactggacgtgatgttgtcctcgagggtctccggggagtgggtttgacatcgtccatggcccctgttgcagggaaggcgagtggcatcattgacgagacgaaatggtgcgctctgtgcgagcgggacggacacgagagcatagactgcccgttcgatgattaa

SEQ ID NO: 25056 - DNA, 1731 bp, Emericella nidulans
atgtacgcgagtcccgcacctgaggactggactggcgtcatcaaccgcagcctcttctggtggattaaccctctcttattccgaggcgcgcgcactagcctatcagtgggtgacctcttccaccttgaaagctgcatgctccccgacccggacggcaagcaccgtgtcgtgatgcactgggagaatgttacgaacaaggataagcgtggcgcgatggtcgtgccgatagccaaagcctttaaatgggatctgttggctggagtcttccctcgtctgtgtcagagcgggttcatcatctcgcagccgttccttgtccgcgccacggtcgagttgtttgtttatcgagaccggccggattcacgtagtaaggcgacactgctgattggtgcttatgcgctcgtttacggtggaattgcgatcgcgactgcgacggcgcagcataaaacgtaccgggtgattacgattgatcgcgcggcgctggtggatatgatctttgagaaaagcacagccatcaatgcgcataagaacgatgactcggcagctctaacgctcatgagcacggacattgagcgcattactcactgtggccggtacatccatgatacgtgggcgagtctgattgagattggaattgcgttgtacttattgtataatgagttggacacggcaggtatcgcgccgattattatcgctttcggtgagtttgaaccccttcccttcccgtctaaatcttagcatgcttacctgaaataggatgcacggtgacggccatgaagatcgctatgatggctggcgagcgccagaatctgtggattgaggctattcagaaacgagtagcaatcacagcggagatgctcggctccatgaagggagtcaagatatccggtctgacggatctcctgtttaacaagattcaagcactgagggagcacgagatcctagcttcccagaaattccgctcgcttctgattgctgttgttgggctttgtgtgtttccatcatgctcccttgcacatttgattttgagaatttagctaactagagacgccagccaattttaatacgctcatgacgcccattgtaagctttaccatctacgcgatgggctcaggggacgcaccaaacgagatcctcggcagtgcccgcgctctaacatccctgaccctcttcaacctctttgcggttttcatcggcactcttgttgagtcgatcagcgagacagcaatggcgctcgagtgtctcgatcggatccgcaactacctagcccaggaggcgcaccaagatccgcgcgaggtcaatagttctcctgtgactgagaagaccccctgtattgaggcattcgaagttgacgtcggatggaagaacggcgatgagtcgatcctgcaccgcctctcctaccggatcgagcgccacagtttgacaatgattgtgggtgctgtggggtgtggaaagacgacactggtgaaggcaatgctcggcgaggtaaattgtttaactggcaagatgaaggttaactgcgaccgcatggcgtattgcgggcaggatgcttggttgaccaacggcagtatacgagagaatatcctcggggggtcgccatatgacccgccgtggtattcgacagttgttgcggcttgcggactagagaaagacttcactgagctgactgccggtgatcagactgcagtgggcagtaaaggtgtttcgctgagtggtgggcagaagcaaagactg

SEQ ID NO: 25057 - DNA, 243 bp, Emericella nidulans
gctactgcatccttgtcttccaccaccgccgttgatccagaaagcttcagcgactcaacaatgaccctcttcctcgacccccttgacgacgactcggggactaaggccaaagcgccaatccgcagcaactcggcagttgtaccatcgggcgccacgtcgactctcccggggaagggaacacccacaccattcgcccctaacgatctatcacaagcgttgaacgctgtacagatctgttcatag

SEQ ID NO: 25058 - DNA, 1362 bp, Emericella nidulans
agaaggattgcaactatgctacaaaacactgttgaattcatcgacgagattccgccacagaagtcggtggtggacatatcgcagcgtcttcacccatcactgcaattacatgatattgaaactatggtcagacgacgtgtcctacagtgctttgcgaaactccttcatgcccatccactcagccacgcagatgtgatctcccagtcgagtctactcagcttggcgatttcctcttttgctgaccctgacgccacccaatcgagtcctctcgagagttcgatcgcagcgtcaacggcacagtttgaaaacctttgggagttgagtgataactatgggttcggggtaacggcctggcaagagactatgtgcgtgtaactctctctggaaagcatgagggtgaaagcggcccagcttggtcggcggtcgaatcaacagaccaggtcgtggatgatgctgtgagtaccttcgttctctttgtaatcagttactgacaattgcagttgatattccctatctgcgaagccagcgagcatgatccaatcctgctttactctgcaagacaaggagaccgtctttctgccgacccacacccgacaggagtagtgaatgctgctattgaactgttttcagtagcgctcgcgctgcacgcacccaaggtccaagaaagtagcgtcgagcagattgcgacatttctttcttcaaccggcctgcagcggaaccctgggcgcaaagcggctatggtcgtcaacatatctgtggcattacttcatgccctaaaggtcgctatgaaggagaccagttcagccgcaaggaagcttagccctaccactgagaaggttatgcaggagcttattcaggtacgagctctaggatgatcccaataccctacgaggtcacgactaactatgttagaaattcgtccttgatcccgacccaattgtgcggacggttggcgtagaagcacttggacggctatgcgagagctcaggaaataccttcaccaatacccagatcaactgggtggtggacactatcgttgcgaatagagaaccaaatgcgcgtgctggctgtgcggctgccttgggctgtatccattctcagattggtggcatggcagccggtctgcatctgaagaccattgttggggttttgatgtcactcggtaatgaccctcacccggttgtccatttctgggctcttggtggtcttgaaaaagtagccaactctgcgggcttaactttttctccttttgtctcgagcaccctcggaatgctggctcagctgtacaatgctgattctcataacgaggaggctgagtccctcgcgacatccaacatcgaaatgtcgttccttacacccgtg

SEQ ID NO: 25059 - DNA, 988 bp, Emericella nidulans
gacgagaatgtctttaaaacgaaaaattgctctcgttatcctgttcgctctatccctgatattggtcgctatcaccagttaccgggtaccgtccgtgattcagcacaaaggctctcagcagtatcgatcccttctggcttcattggagatattagcagctactgcggtcgcaaacgttgtcgtcattagctctttcgtcagagacaagggcgtcaagaaagttaagtacaaggatattctaggctctgcctcagtcaacgagggtctcgaccatagctctactcgccgtacaactatcacgcatcaccaatggggcagcgactccgaccttgctcgcgatctcggcattcgcctcgaccctgacctctactcccacgaccctatagaaccgcgtccagcccctatggccactggaggcctcaatccaaactggtccttcagccaacgagctattgaatttgacgacgaccaatcctccggaaacagcctcgacattaaagttagcccgcacgaataccttcgctcaaacaaaacaacccatagcccgcctgaaaactctcccgatcagcctgcaatttttgacgtcggcggcctccttactcagccctcaccttcgcccaccagccataaccacaatactcaaatacccaaccgccctggtggccaaagcactaatgttacagccgaccccgtccttcgagacgtaggaggattacttgccaactctggtgacatatcgccattgacttcaccaccttcccaacaccatacacaatcgtcactcaacacgcctcgtccaggcggtctccgacgtggctctcaacaaggtcggcgacactcaagtgtccatttcagcgattccaatgactccccagttccgtcatcacgaacacaatcgggcatttccgcgactatagttgaaaatgcggacgagttcgaacttcaggatgtagggggcttgctctcgaagagacaggatcgcgcgtga

SEQ ID NO: 25060 - DNA, 1590 bp, Emericella nidulans
agcaattgggctacgatgcgttacgggaagaccttgcgaaactcgatatatccaccatggagtaagagctacatcgactacaacaagttgaagaggctgctccgggaacgtgatgtcatcggcgacgacagtgataccgacgccacatggactgagcaggatgaagaagcatttgtccaggaacttctgaatgtgcaactagataaggtcaatgccttccaggtgcagacctctcaacaactgagggaacgcacctctgcgtgcgaggacaagctccgacctttggctcaaaccgaaggagatactccggctgttgcagaagaagataggatcaggatcgcctctgaggtgcttgcagaattggacagcatcaccaaggaggtcagtgagctggagaaatatagccgtatcaacttcacgggcttcctcaaagccgccaaaaaacatgaccggaaacggggtgctcggtatcgtgtgaagcctttactacaagtccgcttgtcgcaactacccttcaattcggaagactattcacccctcgttcgcaggctctcggtggtctattctttcgttcgagagatcctgagcacgaaatctccggagccagagcctggatttggccaggataattactcctcttacaagttctgggttcacccagacaacatgttggaagtgaaaaccctgattctacgcaagctgccggttcttatctacaaccccaagtcttcaaaggagctcgagactcacgccaacgaccctaccattacgtcgttatattttgacaaccctcaattcgatctctacacgcaaaaagttgcccgcagccctgaagctggttcgctacgactacgatggaccggaaacctcatcgagaagccgccgatttacttggagaagaagattgtgacgagtgacaacttcagcaacgaggtgaaggttcagttgaagcagaagcatgtcaaggagtttcttgatggtgaatatcatttagaaaagcaggttcatcggatggaagatatgggaaatggagagatggaacatgcagaatctctaaaacgggatgtggaagcattgcaatccttcatcaaggaaaacaacctccagcctatgcttcgcgccaactacacccgaacagctttccaaatcccgggcgacgataggattcgtatctcacttgacacgaatttggctctcattagagaagactctctcgacaaggagcgcccctgccgtgatgagaatgaatggcaccgtaccgacatagataatgctgccatggaatatccctttcccgccattaggaatggtgagatagtgcgatttccttacggcctgttggagataaagctgcgtggaagtgccgcgcataattcggaatgggtgaaggacttgatggtgtcacatcttgtcaaggaagccccgcggttctcgaaatttgtccatggtgtcgcgcagcttttcgaagaccatgtgaatagcttccctttctggctctctgaacttgacaatgacattcgacgtgaccctgaaaccgcattccatgaagagcaggaacgccaggcaaagaacgccgaggaagacttggcg

SEQ ID NO: 25061 - DNA, 621 bp, Emericella nidulans
tcagaccacaccgcggagcctaggccacgacttcgcgatgatcggcacggtaccagatgcgcgggagaagttgtcgccgcgagaaacgatgtctgtggcgtgggtgttgcctatgacagtcggattgctggaatccgaatcttgtccggacctattgacgacaccgacgaggctagcgccatcaactatgcttatcaggaaaacgatatttactcgtgctcttggggtcctcctgacgacggcgctacgatggatgctcccggtatcctcgtcagtcgggcaattgtcaatggtgtccagaagggtcgtgatggaaaaggttcgatttttgtctttgcagctggcaatggggcagcttctggtgacaactgcaactttgacggctataccaatagcatttacagcatcacagtgggagcgattgaccgagagggacagcatccccaatattcagagtcctgctccgcccagcttgtggttgcttacagtagtggaatttcggatgcaatctccaccactgatgttggtacagaccggtgctactccgtccacgggggtacatctgccgctggccgttggttggaggcgccatatctcttgctttgagtgttcgtcccgaac

SEQ ID NO: 25062 - DNA, 1200 bp, Emericella nidulans
aatgctgcccttattgccactcatacgcaagaactccaaacactgcgacagagctcggcgcgcgagatcgagcagttgcgatcgcaaaacgaacgtctgtccgtcgacctgcacgaacgcattaaagcagagatcgaaacggcgctgtcccagaagaatgctgaactacgccggctgcgcgaggagctggagagcgcgcgcgataaagtcaaggaactccaacagcagatctctgcccagatgaacgacaatgtcatcgcgttccgaggggaagactactttgaggccgcatgtcagaaactctgtggccatgtgcagcaatgggttctgcgcttctcgaagcattccgaccaccgtcgctgccgcaaacttattgaaatcaaggatgagaagatagccgaccggttcgacaatgctatccttgacgggtccgacacagatgcctaccttgctgaccgtgtccgtcgacgcgacgtcttcatgtctgtcgtcatgaccatggtgtgggaattcgtctttacacgctacctgttcggaatggaccgcgaacagcgccagaaactcaagtcgctcgaaaaacagctcatcgaagtcggcccgcgcagttccatccaccgctggagagccacaactctaaccctgctatcccgtcgacaagccttcgcaaaacagcgtgacagcgatactgaagcggtcgcgctcgagattttcgacactctctcccgccttcttcctccacccacccccgtcgaatcacagctcctcgactccctacgcaaagtccttcgtgtggctgtcaatctctctatcgaaatgcgcactcagcttgcagaatacatcatgctacctccgctacagcctgaatacgacacgaacggggacctcgcccgccaggtcttcttcaacgcatccctcatgaacgagcgcagcggcgaaactacatccaacgaagagctgcaagcgcaaaacgccgtcgtccgcgttgttttgttccccttggttgtgaagaagggcaatgacaccggcgagggagaggacgaggttgttgtctgcccggctcaggtactcgtggcgagaccaggcaaagacaagcgacttaacagaatgactagtagcgaccgcatgtctattgacgccagtcgctcggtgcatagtattgcgccctcgagcatgaatatgagcatgagtaacgtgatctag

SEQ ID NO: 25063 - DNA, 302 bp, Emericella nidulans
gcggaaaaggtggcaagggtctcggcaaaggtggcgccaagcgtcaccgcaagatcctacgtgacaacatccagggtatcaccaagcccgctatccgtcgtcttgcgcgccgtggtggtgtcaagcgtatctctgccatgatctacgaagagacccgtggtgttctaaagtcttttctcgaatccgttatccgtgacgccgtcacctacaccgaacacgctaagcgcaagaccgtcacctcgcttgggggggtctacgcccttaagcggcagggcctcaccctctacggcttgtgtggctag

SEQ ID NO: 25064 - DNA, 931 bp, Emericella nidulans
cggcgtgccgactggcgccgcaacgactccacccggcgagcaccgcagaagctctctggaaatcgagaagtgggcttctttgccgcaggacacatgaaggaccgtacgcttgttatgtacaagaagcgtgatggcctgtcgtcgacgttcaaggtttgtttgagtagaatcattgatgaacctgactaaagtgaaatagattctggaacctgttctgcagaaatctgcctcaagtcgaagtcgatttttcagttctcgccgatcgaacactgagtttttccgtgaatatgacgagttctacatccccgccgagagttacggcattaacctgttccattcgtcccttgctatatcgacccagaaaggcatcgagattctaacgctcgataaaaaacagacttggtctgtccctgagttccgcaccgacgcccaggaagcccaggctcacctcagtgagattggccgccggattagtggtcttcgaccgctgggtatgttccgtctcagcgacacggagtttctggttacctacaccgagtgtgcggtttacgtcaatcagcacggcgacgtctctcgcagtgtggtcctagaatttgtcggtcgcgctcactcggcttgtctttacggcaagttcctgattctcttcaacgacgactttgtcgaggtccgcaacgccatgaatggtcggttacgccaggtcattcccggccacaatgttgtctgccttgatgatggtagccgcctccctggctcgggagtgaacagtataccaaccagctctggcgacaccgtcaatctctccagtggcatctcgaatggagctccgttggctaaccaaggccgcacggtcaagatttgcatgcagcatcctcactacgcgcggaacctggttgtccttgagcttattgagaacgagggctcgaaagattaa

SEQ ID NO: 25065 - DNA, 435 bp, Emericella nidulans
caacaagaaaggcacctagaatccgacatgcacatcttcctgacccgcccatacctcggcgcgttgctctttgagaactctgcctccgatgcacgcgaccactgcgcaaatgaacgaacgttcctctcttggctccgcctctcgatgtaccttggcatcgtgtccgtggccctcattatatcctttaacttcaaggcgcagccgacgccgttggagcgccgcatggccctgccgatggggattatcttctgggtgctgagcctggtgagtctgagtaatgggctggcaaactatgtgcgcacggtcaagaagtatagtcgcaaggcggcgcttgtgcagagtgggtggaagacgcagctgacgtttattgttgtgggaggtgtcattttgggaagctgtattgtgttgctcgttacggatgcacatagatattga

SEQ ID NO: 25066 - DNA, 673 bp, Emericella nidulans
atgacagtgggcgcggaccgctcggtcactcttcacctcccacggatcctctgcttgcacgggggtgggaccaacgccaacatcttccggatgcagtgtcgcgtcctcgctcgcatgctccagccgtactttcgcctggtcttcgcagaggcgcctcttgctgcactaccaggctccgacgtaaccgctgcttacaaagactacggtccgtttaaagcctggctgcgtgttcgagacgaagacccggttcttgacgcacaccacatcgtcagcaagatcgaggactccctgaaagcagcccggatcacagatgactgtcgaggggcgacgggagagtgggttgggctgctcggcttcagccaaggcgcgcatctcgccgccagtatcctggccaaccagcaggagctgggacggcgcgccggagatgatgcggcccggccagtctatcgattcggagtgctccttgctggacgcggaccgctcagatggcttcatccggacttacctattccaccgggatttgtcgatgtatccaagtgcacgacgggaatggagagagaatacgagcctttcgtgaacagctcaccgtaccgcttgcagattccgacaatccacgtccacggactggccgaccccaatatagaactccaccgaaagctgcacgatcaatatt

SEQ ID NO: 25067 - DNA, 803 bp, Emericella nidulans
tcaccaacttcatccagcagcctctaccccccaactccaccactggcgctggtttcagtggtcagtccggagctctgggccatggccagcgtgcatcgaccgggttgaacacctgtatgctttccctcatgattataactatcaacatctaacaggactagtcaataccttctggtgttatctgatgccgatcctgggagcatggatcgcagatgaattcttgggccgtcttagaaccatccagatctcgattgcatttgccatgtttggtcacatcctcctaatcatatctgcactcccacctgtcatcgcccacgctcacggcgctctgacgatcttttccatcggccttgttatcttcggcattggtgttgggggtttcaagtatgtcgacccaacccagtctgacagttgggtgctaatctcacagatcgaatattgccccgttgattgcagagcagcatagaggcaatcgtccgtacatcaaggccgaccctgtgaccggcgaacgatatatagtggacccagcgcagaccgtctccagagtcttcatgtacttctatttcatgatcaatgtcggcgctctaatcggctcgatttccatggtctatgcggagaaatacattgggttttggctgtcctttcttcttccaaccgtcatgtttgcattttgtccaatggttctgttcatctgccggcacaagtacaacactacgccaccaactggttcggttgtaggcaaagcgtttagactgtgggctttcgcaatgaagccgcattggacctggaatcctgttagactg

SEQ ID NO: 25068 - DNA, 450 bp, Emericella nidulans
agacaatccggccgcattgcgtcaacattgcgttccgctttccaatcgcaccttcacacatatctgtacccacatagtacaatcagcattcacgtctctgttttgtcgtcggacggctcggttctcgccgccgcagtcaatgcctgcacgctggcactggtggacgccgggataccgatgcccgggttgctgtgcggatgtacagcagggatgagtggcagtgcctcgacgccaagagatccgatgaacgacaccctggaccctttgttggatgtctccttaccggaagagcaagagctcccattccttactgttgcaacgacctcggctcctgccgttatgacagatggcgatgaagatgacatgaaagtctcgatgctgacaatggattcaaaagtgcattacagttatatcgagacgatgctgggctgtaggggtgaatgggtgtaa

SEQ ID NO: 25069 - DNA, 1125 bp, Emericella nidulans
ggagattcgacacggcgttagcgacgtttcaatggcatctgagtttctgcgacctgcctgattctttcgacttggccgggttctctaatgaacttgtcaaaactgttggacccgtggctccaagtgagctagccgttgttaagcctaaatggccgtcttctcagctagtccggtctgcgctggaatatttcaaaaaaactcatctgtattcggtatttccgtcgttgacgtggatgagactgctcaaattataaaagacaatgagcttgatctaaacgatgcgtcaattgacaccagaagtcgcgcctgcctaggcgcctttacggcgctcatcactgggcttcgacgggacgagcccgtcttcgtcgcagctggagctgatcccatcgcccacgtcagggcagtccttacattactccctgatttagtcctgcaagatagaagtccacgagctctggaaaccttgctcatgacggtaagtcggtacctcagattgctagcaacgatctgattgtggtaggcactgtacatcacccccatgggcgaaccccagaccagcgaggccctattgtccctggcagtgcggattgtcttcaatactggagcgaatagagcagagacggagcggaagagtccgcatttgcgtgctatgttctggctcttatactcattcgacaaggaaaactcacttcgcaggtctcagccaccgctgatccacgatgcggactgtgacctggacctcccttctacctatctcttcgagtacactgactaccattttttccaaaatgagctgtcttcccacgccctcctgtatccatcggacctgcggatggccctgctcaaatcgcgaatataccgcctcctctactcggtcgaggcccagaggcagtcagaagcgaggcgtctccagcgtatccgtgagctggatcaagaattagttaatttaaaggctagttttccgcgccattgccagccagacgactttgcgaaaggccttgtcccggatacactgttccatgacctcagcctgcgaggtgcaaacatccatctgggatattacttttgcctaaccaagatccactcagctactgcaggtggcgggatgtcaccaccggcatctag

SEQ ID NO: 25070 - DNA, 1054 bp, Emericella nidulans
atggctatcgctgatcataagaagtttttggcggaagctgtctttcatgaacgtcgtacggtcagtaactgaaaattgcgactcaattcttaacctgacttgacaataggttacatatcgctcgctgggccgagcattgagagtacacagcaccctcgcgaagcagtaagtcaattaaatcataaaatttaagatgatattaaatgtggacagaatgctctatgagtttcacctcaatgaaaactccaagaaaccgtccagcgtgcacgccacctatgtcctcacgggggtgcccaagcccgtcgaacccgtgaggaacggagccactgccaatggcaacggtgacaacgaagatgatataatgccgagcagtccttatatcagcagctcgctgcccaacccggaaactgaatcggaccaagttcctgtatctgccgtactgctggcgcgggaggaagatctagaaggcaagtattgactcaccgtgacgggccggccatgcctctaatagtcactaactagcgctacagatgcaaaatccacatttgagtcaatatcttctatatacatttatagcctgcaacctaccatactgcaggatctcaatgtgctcactgatgtcagtcgtgagatgctggttaaccatgcgcacgaggatccactggagtacggaaagcagtgggggatggttcaaaatacgaatgtcatggtacgctccgtctacatgtagaaaactatcatgtaagccttgtcttgctgacttgaagtcgaacagaggagaacaggtgtacgaccaccacctcccccttcgagtacggtgccagcaaaaagacctgcccaatctgaacccttacaaccgggaaaagctgaaatcaagaacgaggaaccacccaagcctctgcaacgccagaattctgcttcgtcagcgaagacgaacgaaaagatccctccggcaaaaaaagaaaaaggcagcttattcagttctttcgctaaagcgaaaccgaagctcaagaaagaagatcctgccacatcagctgtctttggtgctgagtcc

SEQ ID NO: 25071 - DNA, 270 bp, Emericella nidulans
atggaagccctcgcatccggtgccaaatacataaagacactcatccccgccgtcgtgaatctcgtctaccgcaagcttctcgagtacgacataaccgcgcgctcatttcacaccaaagacacggcatcggaggcaccaattgaagatttctacaacgaagacagcccgccaatcatgcggaggaagatgttcctgcggtggtacctgacgaagatcgtcactgatccgatgcagatggatttctggaggtatttgaataaagtcgggtga

SEQ ID NO: 25072 - DNA, 993 bp, Emericella nidulans
atgagaaggagcctctccagcagcagctctgagtctgaatccgagtcggaatctgagtctgattccagctctagcgagagcgagagcgaggatgaaaagccggtcaagaaggaggtgaagaaggaagctaagaaggctgaatcatcttccgagtccgagtccgactcgagcgacagcgatgaggagatgaaggatgcctccagcagcgagagtgatagcgagagcgagagtgaggaggagaagaaacccgctaaatcggccaaggctgaacccaaggtggttaaaaaggccgagtctagcgagtcagagtcttctgactcctccgattctgattccgacgatgaatcgtctgaggaagaggaggttcccaaggccaaggctaaggctgctgagtccagcgacagcgaggactctgactctgaaagcgaagaggaagccccggccaaggctaagggcgacgccaagacctccaaggaagagtctgattctgactctgacagctcggagagttcttccgattctgatgaggagtctggtagctccgggtccgagtctgaggacagcgacaagccagcggattctaagaagcgcaaggctgaggaagagcccgctgctgcttccaagaaatccaagactgaggagggtgcctccgctaacctctttgtcggcaacctttcctggaacgtcaccgaggagtggcttcaccaagagttcgagcagttcggtgagctgtccgcgcgtattatgaccgaacgcgacactggccgctcccgtggattcggttatgttgaattcaccaacgctgccgatgctgccaaggcttacgaggccatgaaggaacacgagattgacggccgcaagatcaacctcgactacgccaccggacgccccgccaacaaggaccagggcggcttcaaggaacgcgctcaaaaccgtgcccgctcttttggcgaccagaccagcccggagagcgacaccctctttgttggcaac

SEQ ID NO: 25073 - DNA, 977 bp, Emericella nidulans
aatgtcttctctcgtgtcacattccagtcgcttctctcatgtcgcagtatggtgatgtcggccgcaacagagcatagtatctcgaagcatgaggcgccggcggtactgaccgaccatcagccctcgtcgggtcaacagacatctactgcatccccggtacccccgatttaatccatcgacgatatgtccaacccggacgcgaacccgaactacccaaaaggcactaaattctggttcaccatcctcgccctctgcgtgattctgatccttgacggcctggacgccaacattgtcgcgacgaccgtgccgagcatcacagaccacttccatacggtagccgatgtcggttggtactcgtccgcctttcgactctgcacctgtgcgtttcaattcggcttcgcaaagttgtatcaaattttctccatcaaagcagtcttcttgacgagtgtggtgatcttcctggtcggctctttactctgtgctaccgcggtgtcgtcaatgatgttcgtcatcgggagggcagtcaccggcctcgggttcgcgggaaacctggccgggtgtttcgcggtcgccgtgcagattctgccgctggataagcgaccagtgtatgtgggcttgatatcatgcgttgaatccttggctatcatagccgcgccgatagtgggtggtgcattgacgcagtccctgggctggagatggtgtttctggtatccctcttacgtcacaggctggcccgcggtagcttcatattgatctaactcttgactaggatcaaccttcctattggcgccgtatcactcgcagccatggttttcctgctttcagatcctccaacccgtcgagagggtaacttcacattgatccagaagatcagagcactagatctagtcagcaactgcttgttcatcccgtctctcaccacgctcttcatcgcgctctcctgggcgggaacgaagtactcctggtccgatgggaaa

SEQ ID NO: 25074 - DNA, 706 bp, Emericella nidulans
  unsure (1)..(706): unsure at all n locations
acccgaagactggattggacatttcctaccctttctccgtcaagggcaatggcaaatctcgagtcgaattggtacggagnatgtagctccagtcggaaacaactagctgacgtggcctagacatggaaggaccttcccgtccagttcctctctacctccgaaccgcttgatgcgagaatcttgatcggatcgttcggaagctccgctgcatacaacaagcccgcgtttcagctgtctctagcccgtaatccgaacgagcctgtaccgacatacgaggtctcgcgatacggacagctccctgagatccaccacatcttcaagagcgatcctcagagcccgcccgttgccgttacgcttttattcattgcgatagtgttggccatcttccctgttctcggcggcgtggtaagtaccctctatacatctccttgtgcaaccaccgcggcgtggctgacttgtcttttagtggctctacctcggtgccaatatcaaccatctccccgtagcattgaagtcggctcctatccctcacgccgtgttccttggctcgctcctcgccattgaaggcatcttcttcctgtactacacttcctggaccctgttccagatcctcccggccgttgctgccgctggaaccgttgcatttattagcggtagccgtgcgcttggagaagtccagggcagacgtctggctggtctccggtga

SEQ ID NO: 25075 - DNA, 372 bp, Emericella nidulans
cgctgcggctggttcgatctcgtcctccttcggtactctcagtcaatcaaccactacacggcgctcaacctcaccaagctcgacatcctcgacgactttgacgagatcaaggttgctgttgcctataccttgccggacggcactcgtctggagaacactattccagcggacgcggaggttcttaacaaggtcgatgtcgagtatgttacattgcctggttggaagagcaacaccatgggtgtgaagaaatatgaggaccttccggagaacgcgcgcaaatacattgagtacattgagcgcgagctaggcggcgttcctgtgaaatggattggtactggccctgctcgtgacgacatgatttgccgtgagtag

SEQ ID NO: 25076 - DNA, 593 bp, Emericella nidulans
gaggggcatcaggcaaggcgggcggccttctagcgctgtgggcatatcccagcaatattgtcccattgagctacaaactacatgcagaactagccaaagaacacaatggaaaagatagatggggatatagggaagtcgggtgcgcacaactggtcgctcgaggccgcccgctcagcgagaagaaagagaaagatggtgctggtagctccttatcgctgcagaaacgcagcgcatccgccatggggaaactaaagaccgcaaagataccccctgagcttgactggatcgaaccggagcttgtcagaggctacgaaagcatgagcgaccccggcgaaactgcgcaggtgcatccgtacctctttacaacgtcaatcgccaagcttgcggaggagaagggcgccaaagtgatactgggctcagtcacagacatcgactataaaggtggctcggttaagtctgtcacttacacagagaaggaaaccggtcaggcacaaacgatccctgccaccgacattgttgtggctgctggcccgtggacaagctccatccttccggatgcccaatatctgccatgcgcgcgcatagtgttgtga

SEQ ID NO: 25077 - DNA, 698 bp, Emericella nidulans
atggattaccaggtacgtcaatttgcattacactgctctgagcacgtttataatccagtatatacgaactaacgaaactgcagaaccgcgcaggttccaagttcggcggtggcggcgtcgcctctcactccgcaacgaacgcagaccgccgcgaacgactccgcaaactcgcccttgagaccatcgatctggacaaagacccttacttcttcaagaaccatgtgggcagcttcgaatgccgtctctgtctgacagttcaccaaaacgacggttcctacctcgcacatacccaaggccgaaagcaccagacgaatctcgcgcgccgagctgcccgggaacagcgcgagggcaaaaatgccgatcccgcgtctttaccaggtgcgatgggcgtgcaggtgcgcaagcagacaatcaagattggaaggcccgggtacaagattacgaagattcgggatccgctgacgaggcagtttgggttgttgtttcagctgcagtatcaggagattactcctggtgttaagccgcgggtgcgattcatgagcgcgtttgagcagaaggtggaggagccgccagacaagaactttcaatatctggttatcgcggcggagccgtatcagacttgtgggtttaagttgcaggctagagagattgatcggcgcgaagggaggtattggacgtggttcgatgaggataagtag

SEQ ID NO: 25078 - DNA, 612 bp, Emericella nidulans
attgtcatttttggtgctggcatgcaggccctgaggcacacgcgccttatcctgaccttaagaggctctgaggtcagaaccattacctttgcgaatccttctcgggaccgggtggatgcactcattggaacggtgtccagagaaacgtagcccgctggaaatctgactgctcttttcgctttatcgacacctgcgttagattaccaggaacagattaaaaccctcctcagcgcaactgattgcgtcttctgcaccaccccttcccgagaaccacttttccccgccagctacttgactgagcggaggaataacggccgtctacctttcatctaggccttcggctcctggcaatcgaacatgatcgagctggatcccaaaatactgcatcatattatcgctgccgatggtggctacaacccgatcagcggcgaggacacgggggtggtgctggttgacgaccgccactacgctcttcaaaattcaggagaggcggttcagagcaagctcaaggccgaaaacatggttgagctcgaccagatacttgccctgatgaactggaagattggatttgtcaatgaccggcagattaagcagacacagtggtttatctaa

SEQ ID NO: 25079 - DNA, 876 bp, Emericella nidulans
catcagatgcgcgtctgcccaaggtgacaatcagcattgagaatctccttgtgaaccagagcctcctgcaaacgtcttgtgagagcgaggccaaacgggctgttttgcggcattctggcgtcacgcaagccggtccaccagaagggatgaagtatgctgcagttgcagaggtggtaaatcctcgatcttctgtgacaacatgtctgggcgagggtgcgcttcagatctcctctcgcaagaagcaactcacgatcatcatcggcgcggcgacgaattacgaccagaaagcaggaaacgcgaagagtggctggtccttcaagaatgcaaaagacccagcatcaatcgtggatggaattgcctctgctgctggttggaagggttatcagaggcttcttgaccgtcacgtcaaagactacaagaagctaatgggcgatttctcgctcgaattgccggatacgacagactccgcgagcaaagacacatctgagctgattgagaagtactcgtacgcctctgctaccggcaacccgtatctggagaacctcctcttggattacgccagacacctcctggtcagttcttcccggcccaactccctacccgcaaacctccaaggccgctggaccgaatcgctcaccccgtcatggagcgccgactaccacgcgaacatcaacttgcagatgaattactggctagcagaccagaccgggctcggggagacacagcacgctctatggaattatatggcggatacttgggttcccaggggcacagagacggcacgcctgctatacaacgcaagcggatgggtcgtgcataacgagataaatatctttgggtttacggccatgaaggaggacgcggggtgggcgaact

SEQ ID NO: 25080 - DNA, 1093 bp, Emericella nidulans
atgtctgaatacaccaacctgcccgactacgactccctcccgcccgtcaaaggcatgccccgtggctgcgcatggggtattttcgacaaagacggcaagaaagaccatatcgggtgtctgaacctgcttacaccgtctgtggtgcgctcggcctttgaagaagcggagaccgaccagtcggtctcgctgaactggcccatcaacgctttccataagcctgggttccagcgcgcgggactcgagcataagggctctttggtccaggacccgccctttaagttacatgggttcgacgacgaggtcgcgttcaatactcagtgctccagccagtgggatagcttggtacatttcgcgcaccagccgtccgggttcagctataatggagtcaagccaacgaaggaggcgctgctgcaggcagacgcgcccttccacaaagacaccgacctgcccacgcttgaccactggcattcgcgcggcggcctcgtcggtcgcggtgtcctgctcgactaccaagcgtacgcagacgcgcacggccggaagtactctccctttgagacgcacaaaatcactgtcgccgatctcgaggctgtggctcaatgggagaatgttgagttgcgccagggcgatattgtcatcatccggtccgggttcacaaaggggctgcaggaagctgccacgccagagaaacaggcagagtgcatggccagccaccgaactgtcggggtggaaggcaacgaggctacggcgaagtggttctggaacaagcattttgcggctgttgcgggcgatgccatcgcgttcgagtgtctgccgccgtcgaaagaagatgggacagaggggtcgattggagatctgggtaagtctgccttgtctgtcggtgatggatctgtgtttatgagtatgctaacggcatctagtgctgcatcagtacttcctcggcctgttcgggctgaatatcggcgagctgtgggatcttgaggcgctgtcgaagctttgtgctgagaagaagcgatactcgttcttgctcacaagctgtccgctcaacgtgccaggcagcgtcgggagcccaccgaatgcgcttgcgattttttag

SEQ ID NO: 25081 - DNA, 592 bp, Emericella nidulans
atggcacccactacccaaaagcaatggtccgtcaagggcaaggaaaaccgcttcgacgagctcaagttcgaggaaggcgaaatccccgctgttggagataatgacgtcctcgtcaagctgcacggcgcctcgctcaattaccgtgatctagttatcccccaagggtatgtttctttttccttaaaatatatcaaggagcaaggctaaaggagctgttcacaacagaaagtatccctttgccctcaatttccccgttattcccggttccgatggtgccggcgaagtcatcgaggtcggatccaaggtcacccagttcaagaaaggcgataaagtggtcacactcttcaatcagcagcaccagtacggccccatcgatcccgcgggagctgcctccggtctcggcggtgccgttgacggcaccctgcgccagtacggtgtcttcaacgagaacggcgtcgtccgcgccccgcgaaacctgaactaccttgaagcggcaaccttgtcttgtgcggctcttacaagctggaatgctctgtacgggctgaagccgctgctgcccggtcaggctgataatggcagggcacagaacggt

SEQ ID NO: 25082 - DNA, 599 bp, Emericella nidulans
gacaactacagaaaatgggcatcttgaaagactccaaatcgcaagagacccctggttcagccaaacgccgatcgcagcagcttgatttcgctaaccttggcccgctaaaacctggaggaacagtgggttttctgaatttccgggacaacactgaagggcgacggaagagcaagaaggacaaaggggtggtggacgacgatgatatggacagtgatgacgatgaagacgaccggatactcaaccaggcagacgaggaagaagacaaggaagatgaccaacacctctccccggatgatattagacgacagggcgagctggcagagggcttgcgacagatcaaggtatgatttctcaacttttaacgcctcatgactaactcgtattagcttaaacgccaacactcggcccgcgtcgcttgccggcagctctcgtcgggatacggcaagtcccaagacaaccggagccactccgacatcaacgaacacttccacaactcctccggcggcgacagcaacctcggcgcccacgaccaccgggacattggaagggcagtcgacgaatacgttgaacggcgaggaattccttggcagcccgcttaa

SEQ ID NO: 25083 - DNA, 863 bp, Emericella nidulans
aagcctcccgctgccgctccgcaacaaactgcacgtcttgccccatcgagcgggactgcatgtactccgccatccggatctatcgcgacaaccagctaaggaagggcaagtcagggtggccggttaagatcgtctgcccggatatagaagactacctaccttcgccccacggcaaggacgggaatggcaccgaagatggcaatctcgagaatggagctgaaggtgatctgaatgcagcagagcatcatctcctctccacccttcaacaagactacgacgataacacgcccgacgaagtcatcaagcggagaccctggtacggtcgctgcgtctgggagtccgataacgacgttgttgatgaccaattcgtctcacttgcctgggacgtcctgccctcgtccccatcctcccagacgacctttagatccacaactaaaaggaatggccccggcataacagcaaatcttcacatgattgcacccacacaggatcaatgcgtccgacggggccgtatctacggcacacacggcgagataacgtacacctcgtccagcataacaatttacacatttgctgacaacgagacccggattcttgaaatacccaagcaaccgcccgaggaggaagaggcacacgggggcggcgactacggactcgctcgtgggttcgtaggtgccgtcgagaaggtcattaatgaggggtgggaggctgagaaggcacagagaatgtttgtgggatgtagccttgacgacgtgatcaagagtcatggggttgttttcgcggcagaagagagtcgaagacacgaaggcgtcgtgaaatggggtgagtggtgggcagggaaattggctggtgttgggttataa

SEQ ID NO: 25084 - DNA, 1657 bp, Emericella nidulans
gagggcaatcctgtccccttggagccatcgaactatttctttggcccgaaaccctttgatccggacgcgctacaaggtccagacgagacaagcgttagcgcagaccaaccgccagcctcaccgacaggcaagattgcgcaggatggggtcttgaccaacggtcattcgaccgctgatgttgccgctccgcagaacgtcaaggcttcccgcaaaggcgatcgcgcggaagccaatggagaagaggtccccatggagatcgaatccacgaacggcgttccgaatgagagcaaaccagatattacaaaatcaccatcagtgggaaaaaccgccatggtggacggcgacggggatgtggacatgggaattccgccggcttcgcaggaccaggaaccaaccgcggcgccgatttttaccctgaccaccggacacagcgttggcgttcagatcacccccgccaaggctgctgatctcagccccaacaccgccattatcgatgtggctggtgatgatcacgtgacaaccacaatctggcggccgcacgaccctactgtagttgtggcagctggtgttaccttttgcagtctgtataagctgtcttcgacctcatcaccggtgcacgaaacgctcgttgaaaacaaaggggacaatgtatgggtctctgcggtagcctgggacccctttggccagaaattggccgtcgctacttataatgacatgcgaggctctattaccatgtacgatgtgaatgggaacgctgtggatctcttgccagaagttccccgaatgatttcaggcttgaaatgggcagatagtggttcacaattgattgtcgtcgcctccgacagcaaaatgtcagaacttgtcctctgggacgactcattacggccggaagtgttccctactcctcagatagttgacgactctattctcgatgttagctggcttgggaccagccaggttttcgcgtgcggaggcatatcggttttccaatgtgacgtcaaatcgagtattcacctctccaagacatattcttctggcgaccccgagcacccttggactttcattcgctgtgcaagcgccggttcattgtctgtggcagttgcagcatcctactctaatgcctcgttttggattccaactcacgacatgcacttgaaagacgtccacgatggccatatcaccgccattcaattgaaacccgaaccgtccgagcagccagatcagccgttgattcttgcctcatcatcaacagatgatacagtaaagctgtggcacatagatttacaaaatcagaagttcaactgcatacaccgtttgtcactcggtcagtcgttaccaatcctttctagctgtttctcgcccgatggatacgctctggccgccgccagcaaggactctttatcaatatggaatgctcagcgtggaggtactgccatggctacgtggaagtccccgagcgctgacaacaccgagtccggggaaggggaagctcctgttgtcaatggacgcaatggaaacatggaggacgcgctggattgctcgctaaactgggacactgacgggaagaagttagcatttgggtttggcaataaggtatgtatcatcctatcccttggttttgcaggaaactgatggaattcgcagctggcgattataa

SEQ ID NO: 25085 - DNA, 1551 bp, Emericella nidulans
atgatcgacccagccgtccttcggcgccagcatgacgagttatgcaaggccgagagcagcaaggatgaaattattaaagtctgttgccttctttaacgcccctgaaagacttgacaagctgactcttctgctagaaccttttcgagcatattgaagatcttgaggaaaagcttcagattgaaaagaatgaggtcgattctcaaaggcgggcggttatttcgctcagagacgagcgaaacgaattcaaagctcagatggaggacctcgttgatgagaaagtgagttgctgcctcatatttcctgataggctcctgacgcagcgatacagcgtaaattagattatgtatctgttttagtagatggtgatggtatgaatgtaggtgatatgcatctatccagagaggccacgactcctaacagatatcagttccaggaccggtttatccaggatggcaaaaaaggtggccacgacgctgcacaggctttgatttacgcggtacaggagcatatcaaagagattgaccccaaggcgagtccaattatcaactgcaatatccgggtctattcgaatgtgcatggcttgaccaaggtctaccgcgagaccggcatcatccgttctgactcagacttatctgcttttattcgaggtttcaatatggaaaacccgctgtgtgactttgtcgatgcgggtaatgggaaagaatgtgctgatgtcaagataaaaggttatcctatctggtccccctcatccaggagtactaaccaacatggatggggttaggtttgttcgcagaagatatcaacaacgtccactgtcgccgcattatcttctgcgcgtccgcagatagcggctacgcgcgtgtattaggtccccatcgtggatcgagacgtatctctatcgtcaaggggcctcctttcccccgcgagatggccgagctggctgcgagcttcgagaccgtgacattctcagacgtattcaaatcgtccaagttgttactcccagtcaggaaattatcgtcccaagacatcactagcccagcgatagcgtccgccaacatgcccgccatagtgcataatcataactccatccccaactacgcctcggcagcgaaggccgctgcggcggctacaattgcaccaacgaaggacagcaagactaaatcagagtctaagcctcgactattagtctgtcttaatgcccgcaaccagcgcgtcgatagtgtcctcaaaaaatcgtctaaagaggccatcaccgcactcaagcgacgcaaactctgcaaccagttccatatcctaggatactgccacaacatggctacgtacggcagctgcacgcacgaacacggaactgagctcagcatgcaggagctcaatgatctgatgcgcgttgcacgcttgactccgtgctttagtgggcttatgtgccgcgatgttaactgtatctctggccaccaatgtccgtatcaggactactgtacgtataaaagtgattgtaaattcaaggatatgcacaacgtgaacacggttattgtgagagaattggaagtttaa

SEQ ID NO: 25086 - DNA, 510 bp, Emericella nidulans
acccctaacaaccatgacgcaacgaagaaccctagcattgcagagatcatgaacagccctctaccagttgcaacgccaacgccgtccccattacctagctcgaatcaaaaagtagccgagatcatggaaatgttccgcaaagcgtacacctccactcaggcgttaacaccgcacccaacattcgaaactcttcaagatgccatcatccgcgaaatcaactcccacgaggcctttcaacgggttcccgtccccgagcaaggggccccattcactccgtcaccctctcaagactcgttcgagagcgccacgccaccgaagccaattgctctcaaggagggccaacggcgacgccgcaagggctcgttcataaaaccccgccgcaactcagaagcacggaagagtatcttcacgagcgacccgtccaatgctttccgtcgggatctcaatgttcccagccgccggcgacatactgatgcttcacccccttacctggctttttcgagacattaa

SEQ ID NO: 25087 - DNA, 758 bp, Emericella nidulans
tcaagctgatatgctcgcgcaaaagaggatctttacattcgccggcaggacagaacttatccttcaggccgttgctatccttgctgcatgcgcctctggagcaggaattgcgcttcaaaacctcatctttggccagtttgtcaccgtcattaccgatttcaccaacggaatctcaacgccggcagactttcgtgacaatgccgtctagttggcgtatgtatcctctctgagtgctggttacagagctgacgaggttcagcctctactttgtatacctgggcatcgcgcggctcgtcctctcctacacctacaacaccctcctaacctacgcggcctaccgcatcgtccgcaatatccgacacgcctatctcaaagcggcgctgagccaagaagtggcatactacgatttcggtagcgggggctccatcgccgcgcaggcaacttcgaacggcaaactgatccaggccggcgcctcggataagatcggtcttctcttccagggcctcgcagcattcgtgacggctttcattatcgcgtttgtggtgcagtggaaactcactctgatctgcatctgcatccccgtagccacgatcggcacgacgggggtggtagctgcggtcgaggctgggcacgagacgaggatcttgcagatacatgcgcaggcgaattcgtttgccgagggtattctggcgggtgtgaaggctgttcatgcttttgggatgcgggatagtctggtcaggaagtttgatgaatatctg

SEQ ID NO: 25088 - DNA, 750 bp, Emericella nidulans
aagtggtatcatatctgtgtggtgcacaaaaaaccaaaaccaccgtctcactctcgtgctttgctcttcgttgacggggagttcatcgagcagcagaagatcgaatatccatgcgtacctttaccgagtgctcagaatcgctcgccgcgagttcaagctttcttcggcactcctcgggatctggccatgaaactcggaaggggagtgtcgtctagccggtggtctttggcgaatgctatcctccttggcgaggcacatagcgacgatatgatagcggttttctacaaccttggccctcggtattacggtaactttcaagattgtttaggttcttttcagacctacaaagcatctgcaacactaaatcttcgtaacgagcacttacatcctggcaaggaagaacaatcggatatcgttattgcgatccgtcggaaagcaagcacgttggttcgcgaaagtggtattctgatcaacgtttctgcccggtctattcttgatgatgacgacagcaacgctatggacggatcccagcttgtcaagtctctttcaaaacaagcaaggaaactgcttaatcaattcacaaaaggcggaggtaacgcaatagctattaatggcgccacgcctgcaatcaatgatgctctaatccaacctcacggtgtcggcatcttgacgggcgatccagttgttacctcgccacactctctcgatgacatgagctggcgcatcggtggctgtgctcagttcatctga

SEQ ID NO: 25089 - DNA, 2088 bp, Emericella nidulans
gtgcgaccatgtccatcgttacgcatcctccctcgcgcgcggttaccctcactctcaacgaatattgccgcccctctatccagctctagcatcagaaactatgctagtggtcgaccgcaccctcccggtgggacgcatcggatgaatctgggcggcgagccggagaaggcagcattggaacagtatggcgtcgacttgacggccaaagccaaagccggcaagttggacccagtcatcggaagagactcagagattcatcggacaatccaagtgctatcgcggcggaccaagaacaatcctgtcctcatcggtgccgctggtactggaaaaaccgctgttttggaagggttggcgcaaagaatcgtgcaaggcgatgttccggagagcatcaaaggcaagcgcgtcattgctcttgaccttggatcacttattgctggagcaaaatttagaggtgactttgaagaacgattgaagtccgtcctcaaagaagttgaggaagctcaaggcggcgtcatcctgttcattgacgaacttcacactcttctcggacttgggaaagcagaaggaagtattgatgcgagcaatctgctgaagccagcactctcgcgtggcgaacttcaatgctgtggtgccaccaccttaaatgaataccgattgattgaaaaagacgttgctttggcaaggcggttccagcctattcaagtcggcgagccttctgtcgccgctactatctccattttacgtggtatcaaggacaaatacgaggtacaccatggtgtacgtattacggatggtgccttggttgctgctgcaacttatagcaaccggtacattaccgaccgattcctgcctgacaaggccatcgacctagtagacgaagccgcgtctgctttgcgtctgcagcaggagtctaagccagatatcatccgagagttggaccgtgatatcaccaccattcaaattgagctcgaatctcttcgcaaagaaacggacatcagcagtcgcgagagacgcgagaaacttgaagaagacctgaaagctaaacgggaggagtccagaaaattgacagaaatttgggaaaaggagaaggcggaaatcgagagtctcaaacgtactaaagaagagctagaacgcacccggtttgaactggagcaagcgcaaagagaaggaaactttgctaaggcaggagaactacgatactccaagatcccatcccttgaagcaaaactgccaaaggaaggagatgagcaaaaggatccacagtcaactcttatccatgactcggtcaccgctgatgacattggtgccgttgtttcacgaacaactggtatcccagtcagcaagctgatggctggagaagttgagaaactgatacacatggaagatacccttcggcagtctgttcgcggtcaggacgaagcgctgtcggctgtcgctaacgcagtccgtatgcaaagagcaggacttagtggcgaaaaccggccgctcgcgtctttcatgtttcttggtcctaccggtgttggtaagactgagctttgcaagaaaatggccgagttccgtttctcgacggagaccgccgttgtacgattcgacattagcgagtttcaagagaaacataccatcagccgcttaattggctctcctgctggatatgtcggctacgacgacgctggtcagctcactgaagctgtcagacggaagccgtatgccgttcttttgtttgacgaattcgagaaggctcatcgggatatctccgctctattgcttcaggttctagatgaaggcttcctcacagacgcgcagggtcacaaagtcgatttccggaatactcttattgttcttacgtctaaccttggcgccgaccttcttattggcgctgatcccattcattcgtccaaggcctcgactgatggggaaatcactccggagcttaaaaaggccgtcatggatgtcgttcagcaagcctatccgcctgagtttcttaaccgcatcgatgaattcattgttttcaagagactttcacgggaggctctgagggatattgttgatatcagaatcaaagagcttcagtcaagattggatgaccgc

SEQ ID NO: 25090 - DNA, 525 bp, Emericella nidulans
caccccaaggactgggcgaatccagggcgagttcgtgtgcaattacaggacgagaacggggaaccggttacttcacacatcaagaatagtatgtctactttatggcgcaccttcaatctcgccggtttcttcgacaaattgagccccgcgacttattgctaaccccacccagagcaccacctctatatcctcatcgcgcagtacctcaaagcccacccgacaacggatcaatcgccctaccgtttgcgcattcgaggactcccaatgcctgagaaactaccagatgccccccccgcgcctcgcggctggaaaattggtaaaatcctgcccatacactccgccgcatatagtggtggtggggttagcgataaccctctaaaagacgctatggccgagatgcagaatatgcagggaatgcccggtatgccgcaaatacccggaatgggaaacttggcaggtatgatgggcggaggtgagccatcaggaggcagcgaaaagaagaagaaggataagaagaagaaatag

SEQ ID NO: 25091 - DNA, 862 bp, Emericella nidulans
cgcaggaatatacaactgatcttccgcggcgtatccaggcagcactcggcgacttctgagaacgactctttggtcacaatcagagtccggcccttacatgatcccgacacgagcactgccagcattaaacaggaagacggtccaagtctcctcttttactatatctttgacgattgggtctcgagctactcactagtcgcaaagcgtgagcatgggtacagtgtggacctcgaccgtctggtactgacaaccttttcacataaaatcaatgaatgctgacctattgacagaggcgccacatgctaaacaaaccagaggtcgacttgatagacgaactgcactggctgggacggcagctcgcagttctcaagcggttgtatcaaagctatgagcttatcatgacccgtctcctccaaagacagcggttgctccaggacgaagcacgcgaaaaccaccaaaggacgccgtttggacacaccttcgacccagagattcatagacagatgaccgaaagtttcagtgcctcgactccagaaacatctgtgggtgtccgcttgagcccacccgctgtcgctagatttgagcgattgctagaccgtatcaagctgtactgcctgtcggagattgagagttgcctgacagagaaagagtcactcacattcctcgtacgttaccaccgtccctcggcgacgaggcactgcttataaccgagaatagaacttcaacttgatcgctctcaaagactcgcaagccgtcgaaaaactgacgaggataacgattctgctagccaaggtcaccatcttgttccttccggtcagtctgatgaccggatacttctcgacagagctcgccggggtcaaag

SEQ ID NO: 25092 - DNA, 988 bp, Emericella nidulans
agcggcacaggtcctgaaccgagacgaggccactcatgtccccgacatcttcgagggcaaaggccgcggtctcgtcatccttcttcatggcgcccccggcgtcggcaagactgccacagcggaagcagtggcgctagaattcgacaaacccttattccagattacttgcggcgatctgggcacggggcccgcggaggtggaaacgtcactgaaggcgattttccgctacgcgaacatgtggagctgcatcttgctcctagatgaagcagatgttttcctgactcagagaaaccggacagatgtagagcggaatgcgttggtctcaggtacgtatccattttgtcaggcagtgctggtggaccagttgtgctgcagatgcagatatgtaaatatgaaggcatcctcacactcacaccgcaatagtgtttctcagggtcctagagtactacagcggggtcctcttcttgaccaccaaccgagttggcgcactagacgaagccttccggtcgcgtgtgcacctcagcctgttctatccgcatctgaaccgcactgatatggcgaagatcctagagagcaacctacagcgactaccgcgggacgacaaattgagccctggagccactgcaggcccaaaccatgtcactgtgatggacagtgagatccgggagtttgtcctgcagcagttcgacgagcactataagttgcacgagagaggaccctggaatggacggcagatccgcaatgctgttcatattgccatgtgcctggccttctttgagaacggcaggaagggccgcagggctccggccattctaaccgcggagcattttcgcaaagtccacgaaactattgccgaattcgaggactatttgagagccgctcgaaccgtggatgatgagaccctggctcagatggaaggattgcgatatgataaagaagggcaggcgtacaaaaggcaacttgtcggctctactaaatttcacagatg

SEQ ID NO: 25093 - DNA, 339 bp, Emericella nidulans
ggatagacgccatgtccaaccgtttgaacgatgccatgtcaaagctcaatgtcgacagttctcgaaactctctgggtcgccctcctccttcgccgggcgccaaacgcaactccggacttgactcttctaccattaatgccatgtttcccgatgcagctgcagctatcgcgaaaaagaaggccgaattcacccaacagactggaaacgcgccgccgtccaacaggaacagtgcggtgttcaatgagcggacatcttttgttgctcccactatctctgcacctgacaacagtgcagacaacctgagccagccaccggtgtcgccctgggctcagcgcggtg

SEQ ID NO: 25094 - DNA, 300 bp, Emericella nidulans
atgcccgtatatactcctcaatcaggctcactgccggagtactccaagatgaagctcctttactttagcaacgaactcccgaaggatgatctccaaggcctcttccgccgtctgtacaaccacagcaaagatagacgatatcccctcctcgctaggtttatccatgaagctacactcgctgtccgtgaagaagtgcggcagttaccgacggctgtaaaggctcttgttcctgcctttgaaacagtcttgaaccttgccgactaccccgaacttcggaagggtcctctgggcggatcctag

SEQ ID NO: 25095 - DNA, 492 bp, Emericella nidulans
ggggttcatcatgcaggcggaatcttttctgcgatcatcactcacaaggcgtgaacgttatcacctccggtcaggttccttgcgcagctgctctccgtgccagtcatggacaacacagcaacagtctcaaataatgaatcctaccgacggtatgagtttgtgccagctttgccggccgcgaagatgctatggtaccgcaaccactacctacccaatgagaaagactggtcacaccctgaggcaagtccgctattctacacaggtgattggtcggcgctgccccgggcgctgatcatggtaggtgagctggacgtattacggagcgagggagagcagtatgcggagaagttgaagcaggctgaggttgaagtcgatttgcaggtgatgaagggcatgccacatccgtttctggccatggatggtgtcctgaaggagggaaagcggtcaataacgctgatgtgtgacctgctgaaagaagtcttctccagttag

SEQ ID NO: 25096 - DNA, 1266 bp, Emericella nidulans
atgctaggaacgaccggactgctggctcttctgtccctcgcctcggctacaactgtcatccctagacagaccagtagcgattccacagcttgcaataacgcagccagcctctgttcaaaatcctacggcgacattactcatctcggcgcgcacgatagtccttttctgcgagacgagtctactggcaattcgatatccggcaaccagtgagttggacaatctcttaaattaattccgaagccgcgaggagctctttatccgtactttgggcactaactttggccgcgtcttaggtattacaacaccactgttcaactcgatgccggtgtccgcttagtatctgcccaggtgcacgacagtgattcccaatggcgactgtgccattcgagctgcgaccttctggatgctgggaggcttcgtacgtggttatccgaaatcaagagctggttggattcaaatccgaatgaaggtacggcttgtcggcggttattgcgaattgggatatttatactgaattttgtcttagtggtaacggttttgctggtgaattcggacggcgcgacggcctccgaccttgctgcggagtttgaggccgcggacatcaccgactatgcctatactcctacatcacagtcagcgccatcttcgtggccaacattacaagagttgatcgatgccgggactcgtttgatgactttcgttgcatcattagacgacaactcaggcgctacatatctcatggacgagtttacctacatcttcgagaactcgtacgacgtgacgtcgccatcgaacttttcctgcactgcggataggccttccagcgttaagggtaatgccgcctccgccatctcggccaacatgctccctctgcagaaccacttcctctaccagacgatccttctggattatcaggcccctaatgagagctacgtcggcaccaccaacgccccctctggcggcgaaggaaatcttggtgatgcagcatctacctgccagactgcctggggccgccaaccagcctttatcctggtagatttctttgacaaaggtccggccatagaaaccgtggataaactcaatggagtcaccaatcctgttggccgcacaaatatcaccgctgttgctgaggacgaggagagttcagcctccacctattcgaacgtgttcaaagggttggttgacctcgtccgcagcgcacaggctggagctagtaccagtatgggtgactggatctgggctggcggtgactgggggagattttag

SEQ ID NO: 25097 - DNA, 348 bp, Emericella nidulans
atggtaccagcacggttcctggtcgtggcaaacattgctagtgctttagccttcgtgctccccttctttagccaaacctcaataccaattggagcctccaattccgactttacgtgcgatcttccattccctttggaccctgccggtgatggattgccgtcagccgccagcctattctcgtcggacgaggccctggaaaggcaggtgaagcgccaccaaggcatcgtgcaggtcccctcagtctcctacgatgacctgggcgaaataggtgtagatgaacggtgggagcctttttacaagctgtatcccacaatagaaaagacatatcctgtgctgtaagttgatctt

SEQ ID NO: 25098 - DNA, 321 bp, Emericella nidulans
atgccttctaagccttccaataagaacgctctccctgagcctcaaggcctcgtatacgacgaatccgacatggcactcttccgcgcaaagctttcgtaccacgcaacaatcgaaagtcggcttgcctcaaacgataccaaccttatatccatctccgagcatcaggcccgtatcatcaagcgctgggaaatgctgaagcaggtggagaaggatatgacagagaaaggcaaaatcctttctccaggggagaagaagcagctggcccagtatgagtggcggtataagatgttggaggagctcgccacgaaaagcagcaaatga

SEQ ID NO: 25099 - DNA, 703 bp, Emericella nidulans
aatgagccagtactgaaagtctgggccctcgataaccccgagaaaaagacagggattccgcgctgtttgtcgactacacccgtacaaaatgcgcggaggctgtttcctgtaggtcgttcctacattaggcggtgtagctcacagctgagatactcacccataggtatccgcatttgcggcgcttggagatttgtcccaagttgcggttggtttcggcaacggctccgtcgcgattattcgaggcgacttaatacatgaccgcggggcgcgacaacgtatcgtattcgaatcggaggagcccatcaccgggcttgaggtgcaaagtgggccggtcactactctctatatctccacgacgaaccggatcctggcgctcgtgatttccggtcgaggacagggacaaccggcacgagtattggaagacacaggatgcggccttggctgtatgactctggacagagaaagcggcgacgtccttgtggctcgagaggacgcaatatatacgtacggtccccatggacgaggccaaagttatgccttcgaaagccctaagagctccatcaacattttcaaagactatgttactttggtttgcccccctagaggtggaacgccagggtcaacaggactgccgactcttggtgttggtagagatgaactattcagctctgccacttttactctcttagatactgacctcaag

SEQ ID NO: 25100 - DNA, 480 bp, Emericella nidulans
aaaatgggctggttcgactgtcggtcctctgtttcgacatctggggcctatgtccggaagcgctcagatcggtccccttcacgccggtccactactggctattccacccatcacagccgtcattctgcgccttcgatctttgatttcgggagtactcgtggacgctcaagcccgtctgtgttctcttcctcgtcgcgaagggcacgtcctcgctctgggttcattcaccgtgtggtccgctacatcaggcgcttattccgtgacatcgtcaattatgcccggcgtcatccggtgaaagttttcatgcttgttgtcgttcccttgatcactagcggtgtgcttgtcaagctcttctccatgatcggaattcatctgccgaagcatatattcggaggcagctcttcgcgctccggtagtgggggcggcggcatggccagcaacatcaatggactgatgaacatcgcgaagatgctgatgtag

SEQ ID NO: 25101 - DNA, 2020 bp, Emericella nidulans
  unsure (1)..(2020): unsure at all n locations
gaactcgatacctctacggcgattctgaagaagaagaagaagcccaactccctaatgtgagtagccgctccattctatgtgctagtgtgaaccagcttggacattgctaactcctgtttctcagtgttactgatgccgtgaacgatgataactctacaatctccctctccaacaacaccatggacacccttgggctcttcagaggcgacacagtcacagtccgaggcaaaaagcgcaaggagactgttttgattgtgcttgccgatgatgatctcgatgatggaagcgcccgcatcaacagggtcgtcaggcataacttgcgcgtaaagcacggtgatatcatcacagttcacccttgccctgatattaaatatgtgagtttcctcgaaaataagggacgtgaatagcggctaactgctcttccccgtccacaggctaagcgtatcgccgttctccccattgccgacaccgtcgagggcctcacaggttctctttttgatgtctaccttgctccttacttccgagatgggtaccgacccgtgaagcaaggcgatctcttcacagtaagaggtggcatgcgacaagttgagttcaaggttgtcgaggtggatcccccagagttcggtatcgttgctccggacactatcattcacagtgagggggagcccatccagcgtgaggatgaggagaacaacttaaacgaagttggctacgatgacatcggtggatgccgaaaacagatggctcagatccgtgaattggtcgagctgccgcttcgtcaccctcaactcttcaagtccatcggtatcaagcctcctcgtggtatccttatgtacggtcctcccggtactggtaagacgcttatggctcgtgctgtggccaacgagactggcgctttcttcttcttgattaacggtcctgagatcatgtccaagatggctggtgaatctgagtcgaaccttcgcaaggctttcgaagaagctgagaagaattcgcctgctatcatctttatcgatgaaatagactcgatcgcacctaagcgtgagaagaccaacggagaggttgagcgccgtgttgtctcccagcttctgactcttatggatggtatgaaggcgcgctctaacgtcgtcgtcatggccgccaccaaccgtcctaactctatcgaccccgctcttcgccgcttcggccgtttcgaccgtgaagtcgacattggcattcctgaccctaccggccgtcttgaaattctttcgatccacaccaagaacatgaagcttggagaggatgtcgacttagagaccatcgctgctgagactcatggttacgtcggttccgatcttgcttcgctctgttccgaggctgccatgcagcagatccgtgaaaagatggatctgatcgatctcgacgaagataccattgatgggaaggtctggactcactggtgttaccatgagaacntccgtaatgcccttggcgtttccaacccctctgctctccgcagggttgccgttgcgaggtccccaatgttcgctggaaggatattggtggtttggagaaggtcaagcgcgaacttatcgagagcgtccagtaccctgtcgatcatcccgagaagttccagaagttcggtctgtcaccttctcgcggtgttttgttctatggtcctcctggtactggtaagaccatgcttgcaaaggccgtcgccaacgagtgcgccgcaaacttcatatccgttaagggccctgaattgctgagcatgtggtttggtgagtctgagagcaacattcgtgacattttcgacaaggctcgtgctgctgctccctgtgttgtgttcctcgatgaactggactccatcgccaaatctcgtggcggctccgtcggagatgctgggggtgcttccgaccgtgtcgtcaaccagcttctgactggtaagttatattaattcgtcctatcttatcgaagataaattaacataagttcagaaatggacggaatgacctcgaagaagaacgttttcgtcgttggt

SEQ ID NO: 25102 - DNA, 1033 bp, Emericella nidulans
atgcctgccgctcctcttgtagcactgtcaacggccctaacgccaacgataacatcacttcgtttgagcctccagccgagtgcgctctcccttcgccgatgccctcttccacaacaagacaagatgtttcgtatagtgagtggaatgcgatcctgggtagtcaattgcataaactgacggcaatcatagcggtatgcagccccgggctgtccagggtatgctggatttcgacttcatctgcaagcgttccactccttccgttgccggtatcatctacacattcggcggtcaattcgtcagcaagatgtaggttgcatatacaaggatcgatgctggttcatacagctgacaatatgtccgtaggtactggggtaccagtgaaaccctcctccctgtttaccaggacaccgcaaaggccatggccaagcaccccgacgttgacaccgttgtcaacttcgcctcttcccgttccgtctacagctctactatggagctgatgcagtaccctcagatcaaatgcattgccatcattgcagagggtgttccagaaagggtatgtgagctgtgtgctgcacaattgaagagacctcggcgctaacatgaaaacagcgagctcgtgaaatccttgtcaccgctaaggagaagggcatcaccatcattggacctgctacagtcggtggtatcaagcctggcgctttcaaaattggtaacactggtggtatgatggacaacattgtcgcttccaagctctaccgcaagggatccgttggttatgtgtccaagtctggtggaatgtccaacgaattgaacaacatcatctcccaaactactgacggtgtttacgagggtgttgctattggaggtgaccgttaccccggtactactttcatcgaccacctccttcgttaccaagccgagcctgagtgcaagatccttgttctgctcggtgaggttggtggtgttgagaaataccgtgtcattgaggctgtcaagaacggtgtgatcaccaaacccatcgtcgcctgggccatcg

SEQ ID NO: 25103 - DNA, 694 bp, Emericella nidulans
atgcttcaggaacccggaggcccggtacccccaaacacagatcatgtatgtatttaccccgcgtaccccgcgtgcatttgttatacatgcaattacctgttcaccaggagcctcgacatcaattgattccagtgctcagctgatactacccaggctgtgagcgtgtcacttcccacatgggaagcgaacgtggcgtacgaagagggggagctatggcttgtaaataagatgcaatgcggttatccccgattctttgtccatcccatcatccaggagctcgcccaagaaattgttgctcgatttgggaatccagaatatgaggcaacgacccttttcccttctccgaacactgcgcgagtgtgtcacacattcatcctatcaagaatttcacgcgaagaagcacataaaattcgcgtccttgactttgttcctaccaaggagctggaaaccgagctgagcaccattcagtcacttctatcgtgcgttatatatcctaaggagcacgcaaaaatcgcgaaacaagcgtggcaacatacgggtgacggcgtttcaagcaggcggggtgaattctgtcttggtgctctgaaggatggtcttcttacggaaaggaaaaatgttacaggagatgcaacgcgccaaatcatccacaagggccctcggagatatcagggaaagggttcaataaacgggatag

SEQ ID NO: 25104 - DNA, 1143 bp, Emericella nidulans
aggataccacctcagttgactgttcctctcttcgaagtatgcgaccatcttgacctacctccagtcgccacttacgctggcttggttctttggaactttaagccgattttttctgacgagcctatggatgacctggataacctcgcctgtatcaacaccataaccgggaccctggacgaacaatggttctacctcgtgtccgtcgccatcgaagcccgcggtggcccggcgatatcactcgtactccaagccattgctgcgcgggtcggaaacaccgccgtcgttatagaatacttgcaagctcttgcagagatgattgatgagatcggagccgtactggaaaggatgtatgagcataacgacccttacgttttctacaataagatcaggccttacttggcaggaagtaagaacatggccgatgcgggcttgccgaatggcctactctatgatgatggcaagaagccggagtaccgtcagtacggaggagggagtaatgctcagagttcgttgattcagttcctcgacattgctctaggaatcgaacatcgacccactggagagactcgccctagctcgtcagagaatggtggcgtcgctgcaggcccacgtcacggtttcatccaggagatgcgttcctacatgccaggtcctcatcggaagttcctagaacacatgggcgcggtcgccaacatccgagagtacgtggaggcccggcgctccaataaacctctcagccttgcctacgacgcatgtttgtcaatgctgcaatcaatgcggactaagcacatccaaatggtgtcgcgatacatcatcactccgtcgcaaaaggcacgcgagaagccctcgcgcccggcgagcttgaatcttgccaccgctcgccacagcgagaagcccgatggcagcaaactacggggcacaggcggcactgcattgatcccgttcctcaagcaggctcgaaacgagacgggcgagccgatgattgactcctgggcacgacgtctgctgacaaccggctccgtggaacccagctgggcctcgctgagcaaacttggtgagcaacctgatggagacctgaaagtagtgggcctggctggtacatggactgcggctgacagtgaaggggggatttgccattggtag

SEQ ID NO: 25105 - DNA, 1946 bp, Emericella nidulans
attgtactgaacttgtcgaagatgaacgctgctaccgctctccgggcccgcatggctacctccttcgttgcccgccgtggcttttccaccacccgcagccagctttccagcccttaccactacgctgagggtcctcgctccaacatccccttcaaccctcttaccaagtacttcttcttcagatactgggctttcatgagtgagtattcctcaatacctgcagtgggtagattgattgttggtgttgctaactccgtgcctatagtcaccggtttcggtgctcccttcgctattgctggtatgtttccgaccatcttcgttattaacttacaacgccgtctaatagctttctccagtctggcaaacctacaagacccgctaaatccgcctccgcgcgcccctggggtatccggcaatggtgggatcgagctgtcttggggaattcgtataatgtgtataaatttagagaatccattcggccttgagcctttaacccagaattttctccgtaccctataatggcaatgggatataatcgggagctgtacggttggtagcgcacgaagactgtagatggatagcattagtttatggatgaagtcattggttgattttttgtcgcgaaaatcaaattctttttgatattcaggctacaacagcaaaactatcggaacacatctactacctggatactgttctgctctaatggagaggaagttttattgattttctttcttccttcccgccgagtcattttcattttcttgggaagaaccttgtcgatggcagtggggtaaccacatattcactgaagatgcgcaatttgaaaaacgtgcgcctcgcagaggtgcagctccaaaatggacttcctctaacagcaacagcttgggatacagcttccgatgctgtcatttgcacatttggccctacgcccacaaaccctgtcatcgagctccggagaaaacgcgcggatgtgtatttctcggatgccgtgagcccagatgtctttgacactatcgcatcttgggatgcaccatgtccgctgccacatcttgattgtgatcacgttctctcgctacattacttcgcggacactctgacggcatgccttgtcttgaaaggaggtgacattatcgttgtccgtgaagagcccctccctggagaggataagatcgagattgtgggctcggtcgatgttggcattacggctgccgcctggtcgcctgacgaggaactgctggctcttactacctcagcccatacatttttgtacatgactagggagtttgagaatgtcgccgagatcacttttactcctgatgaccttaaggcgtcgcagcatgtctccgtgggctggggaaagcgtgagacgcaatttcagggaaagagagccaaggctatgcgagacccaactgttccggagaaggtggacgaggggaagctcagcggtaatgatgacggtaggacaactattacatggcgcggagacggcgcctttgttgcggtgaatagcatcgttgaagggattcgtcgtgcaatcagggtctactcccgtgagggaactctggatagcgtgagtgagccagttgatggcctagaaggggctctcagttggagaccgtacggaaatctcattgccggcattcagaggctcgatgaccggattgatgtggtcttttttgaaagaaacggcttgcgacatggccagttcactcttcgtttgaccgaagaggagcgatctacgtgggcatcaaacattcatctgagctggaatgtggactcaacagttcttgcagtacagttcaaggacagaattcagttttggacctcgggcaactaccactactacctgaaacaggaaattcctgtgatagtaagctctgagggcccctttgcgtacaaatggcaccatgaaaaagctttgcgtttcgttgcaggagcctctg

SEQ ID NO: 25106 - DNA, 264 bp, Emericella nidulans
atggcgaagatcgctcacagcgttaagcaggcgggactttacgcagcaaatgatactcagaagaaaatgctagatgcttacgcactgtcctttggagctggttccattgaggccatcaaagagagtcagcgcctctgggtcaaggatcagaagccggtcctggagacaaatctcgggtttgtcgagacatatagggatcctcatggagtcaggggtgaatgggaggggtttgttgctttggtttgtttcaataagacctctaaa

SEQ ID NO: 25107 - DNA, 1608 bp, Emericella nidulans
ccgccaggctgcctcgcgcaatgctagcgtgcgctccgtgtttgccggtgccagatgtgcttccacctggtccaatgttccccagggtcctcctgtaaggctttgacgcatcgagattcatcaaaacgatgcatttttttttctgacattgcggctcgtttaggacgctatccttggtatcaccgaggcctacaaggccgacagtttcaaggaaaagatcaacctgggtgttggtgcctaccgtaaggaaccccaatcgagctctaaaacgttctttttgtcagatcttcggcttgtcttgatagccgtgtctgccaacctgcaattataaacagtcgctgatctatgctcttttacaccaggtgacgaccagggtaagccctacgttctgccctccgtccgcgccgccgaggacaaggttgttgcatcgcgtttcgataaggaatatgctggaatcaccggtatcccctcgttcaccaaggctgccgcgcagctggcctacggagcggactctcccgttttgaaggaggaccgtctcgtgatcacccagtccatctctggtaccggtgctctgaggatcggcggcgctttccttcagcgtttctatcccggcgcaaagaagatctatctccctactcccagctgggccaaccacaacgctgtcttcaaggactcgggcttggaggttgagaagtaccgctactacaacaaggacaccatcggcctcgactttgagggtctcgtcgaggacctcaaggctgctcccaacaacagcatcatccttctccatgcttgcgctcacaaccccaccggtgtcgaccctacccaggaccagtggcgccagattagcaacgtaatgaaggagaagggccactttgccttcttcgacatggcttaccagggcttcgccagtggaaacgccgataccgacgcctttgcgcctcgacacttcgttgagcagggccacaacatcgctctgtgccaaagtttcgccaagaacatggtaggctcagttatctggttgcctcaaggcatgcgcgttaactcaatttgcagggactctacggtgagcgtgtcggtgctttctctctcgtctgcgaatccgccgaggagaagaagcgtgtcgactctcagatcaagatcctcattcgtcccttctactccaaccctcccgtgcacggtgctcgtgtcgcctcgactatcatgaatgaccctgcgcttaacaagcaatggctcggcgaggttaagggcatggctgaccgcatcattgagatgcgtgctcttctcaagaagaacctggaagagcttggcagcaagcacgactggacgcacatcaccagccaggtacgtagttctgtggaatcaaagaagcgcatcaatactaacattcacagatcggcatgtttgcttacactggtctcaagcccgagcagatggaggctcttgccaaggaggtacgcaccacgtcttaaccacaatgtctcatctgtctctaacgcataatagcactccgtctacgccaccaaggacggccgtatctcagtggctggtatcactacgggcaacgtcaagcgccttgccgaatccatctacaaggtgactggttaa

SEQ ID NO: 25108 - DNA, 584 bp, Emericella nidulans; identical to SEQ ID NO: 21840

SEQ ID NO: 25109 - DNA, 707 bp, Emericella nidulans
atgagaaacaggacaagaaaatagaagaacctgtgattgccttgggtgcaccggagagtactcaagcagagcccaatgcgggggcccaggacacttcgcagactgcagacacggtacacacacagggacaggaagggaagaaggaggatgagcccggctcaacacagaatggaggcctcccttcatatatcgaggatcgtcggtcgcaattttctaagcagttcaccacatggatggacaatctgcagtcaaatgtcttcgtggcgggccagcggctgaacgacttgactggttactcttccatcgaagccctcaaaaggaatatacaggagcaaggttggtcatcgtaacccatattagtgttgttcacccggccgctgctaaacccttaccagagaaacgcctccgagccgctcgccatcgagtccgaacagcgaaagaagcttacgcagccgcaatcaaccgacggtcaacatcgcaacgtgaggtaaacgaactactacagcgtaaacacgcctggtcgccggcggatctggaacgattcacacatctataccgcaacgatcatacaaatgaggttgccgaaaatgaaacgcaggaagcgctctcagcggccgagcgcgagtcggaagaggctgctgccagtctcaccaacagcatcctttctcgctatcacgaggagcaagtctggtcggataagatccgtc

SEQ ID NO: 25110 - DNA, 621 bp, Emericella nidulans
cgtctcccgcccaaaagacaaagatttctcaaactcgaggccttcaagaaaacgcactacgtcgcgacgctgaccgcggtcttctttttgaacgtgggcattttcacccctttcttctacctcccgttatacggccaatctcatggcatgagcactggcctagctttctatctcatagcgatccaaaacgcatcctccttcttcggccgtctagtcccgggcgtcatcgcagacaaaatcgggccgtataacatgctgtcgaccgtaagcatcatcaccgccataatcaccttctgctggatccggatgaccacaaatgcgagcatcatcgtcttttccgtcctctacggcttcttctccggcggtattatcggtataacgcccgccgccattgccaactgtgccgggcatcctcaggaaatcggcacttacattggaatgggtatggctgttatgtcggttgcaactcttattggtccgcctataaacggggcactgcttaatgagtacggtggcttcctccaggttcagatctttagtgcggcagtgatgatgttcgggggcgttctggcctttggagcgaagatggtgggagggaagaaggcttttgcaaaaggatag

SEQ ID NO: 25111 - DNA, 626 bp, Emericella nidulans
actatcccgcttcgcaagcagcgcggatggagaagctcgctcacctcgatctaagcaacatcaagatcgctcctcctccagcaccaccagcaccagagtcggcaccggcagccgaagagccagtcgttaaaacgcctcctacaatatcggtcgcggtttcgatctccttggctactgttctccgtgctcagaaaaagcttcagaagtctgttggtgtgacaattcctctatccaccttcgtcgcccgggccgctgacctggccaacgacgatcttcctcggtcaccgtacgctaagcaatccgccgacgaaattttcgacgagcttctgggtgcggagcccgtcaaagtctcgcgcggtgaatacatccctgagctcaacgccgttgacgttactcccgaggtgcgagctggtcatacggcgaaggaagatctcatcgatttccttagcggttccaaaacgacaaagcgcagtccacctgcagccgcgatcgattcatttgaacctgaacaagctttgaatgttttcagcttgactgtcccggtgggcgaggagaagcgagcccgaaccttcctggagcgcgtcaagactctcctgaccgttgaaccagcccggctggttatatag

SEQ ID NO: 25112 - DNA, 544 bp, Emericella nidulans
ccctatgcttttcaatcccgcgaattcctccgcgaacttcttgtcggcaaggttgtccaatttcaggcgctgtattccgtcccgtcctcgcaacgcgaatacggaaagatcaaacttccaacatttgaggttacgttaccggagatcgtcgttcaggagggatggagccgtgttcgtgaggaagccggcaagcgaagtgatgactctgaggaaactcttgcaatgctagaacgcgttcgcgctctggaagaccacgctagaaccgaaggaaagggtgtctggggaagtggaaacggccgcatcgagacccgctatgatcttgaaaatgccaaatctctggtggacgagtggtcaggtaaacatctcgagggtattgtcgagaaagtcttgactggggatcgtctggttgtcagactgcttgttgtccagaggagcacctccaggtcattgttgtggttgccggcgttcgggcacctgcaactaagcgggtaggtgctgatggcaaagagcagcctgccgagccttacggtgaggaagcccagca

SEQ ID NO: 25113 - DNA, 911 bp, Emericella nidulans
ctgtcctttgtccgccttcggacctacaacctaccagcaccttgcaacttccctgctgctgtgctgacgatttacgatgtggattctcgatgtaagtgttcagatcctgaaaattttcatcctgaacatatctcttcaggaaccggagttgatgtcattgcttctagcaactggcgcgtctactggaccgccccttcttcccatggaagaacgtactcgtcggcttttctttaggccagttcattcttgaggggattctctcgttccgtcagtataaggttctccagcgaaccaaggcccctaaggtgcttgaaggcgaagtgtctcaaaaggtttatgatcagagccaagtaagtacctaatcaggtctcccatcgaatagcaacggctcggctgactatcattgtcacgattctcaggcgtacggtcgcgcaaaggcaaaatttggtttcatctctgggttatatggtcaaattcagaatctcgcattcatctacggcgatgtcctccccaagctatggggactcagcggctttttgttggcgcaatacctcccagctcggttccagggcgaaataccccagactctcctgtttctttttggatttaaccttataagtactgttctctccctcccgatctcctactacaacacattcgtgcttgaggagaaatttggctttaacaagcagacggttaagctatgggtatccgacatgcttaagggccagatgttgggtattgttctgggcgcgcccatcattagcgccgttctgaagattgtccagaagactgggacttcatgcttttactacctttggctttttggtgtctttgttcaggttttcgccatcaccatctaccctatcgccattttgcctttgtttaacaagctttccctcttgaacctg

SEQ ID NO: 25114 - DNA, 355 bp, Emericella nidulans
acgggcctggttttgtaccaatgactgcaaagcaattgtcgatcgcaagctctaaatctgggtttgtttgcagggccgcaaacatcccgtagaaaagttgcgtcgtaaacagatcatcgacttttggaactagaaaaaatcaaagaccccatcatcggctcactcaatgtcgagcaaaagaagcgcgtcaccattggtgtcgaattggcggcgaagcctagccttttgctcttccgtgacgaaccctaccagtggtctggacagccaggctgcgttctcgattgttcgctttttgaagaaactgtctcaagctgggcaggccattgtctgcaccatccaccagccctcctccatg

SEQ ID NO: 25115 - DNA, 1589 bp, Emericella nidulans
aatagaatggcatgcagtaaccatgttcacctccacaaccctaggcccaacgaggccccagagcggtccgtacaacatccagctgtcggccgatgggacacccgggaacacgcatgtagatggcttgacgcagcagagcgcagaccgcgtctctgagttgctgatgatcaactatgcccgctatcataccctctttgatgcggtgggcttccatagtaagtggaatcatctggaaaagtgcagaccctgaacctgtacagatcacaccgtccaccacctgctcaccctgtttgccctgggagccaccccagaggagatccgggccatgtatgacctcaacattgggtatcagtcactcgttcagtaccgtccagcctcagtcgtcgtgcagctgaaagaccgcaccttctttaagcagtgtattggcgacctcagctactacgacagctttctgcgctacttccaggacgagattgcgcagagaggcgtgcctgatgtcatcaacgagtatttgttcgcgaatgatgagatttccaatgatgtcctgggccgcatgcactctggtaggtaacctcctcgagtggtaatctttcgctcaatgagaggcaggttttcttcacccgatgatccatctcggatgcgcgctggagttcaatcagcccctgctcatagcagaagcactcgcagccggttgcgtgcacgatgactggcccaattcgtttttgttcccaaccgaggagatgcagactgcccattcgaaggcgccgttcaagtcgatgctagacatcatggatgaactacatagtgacccagtcatccgcaacgcagtgcagctgacagatccgataaataaaatcagtgacgggctgctggccaaggtccgtgacaagctcattccgtatctcgctcagtactgcgtcagtcccacggaagaggagctggcacagcagacaacagatatggtgcacacctgcgcatacatggtgggtgcagcccagagccctggcaaagtcgaagcattggactttgtcatgttgcatacgctcaccctctccatcttctacacgactttcctggcgcaagactggatctcaccgtcgaataaagctcggctcctgcattttaaagtttggggcgatcttgtgacgtatgcaggctgtggatgtcctaccctctacgcagaccgcattaccgggtatacgcccaagcgaccagctgatggatggatggagctagcgcatcgcgcgtcgatctacggcgacgacggccatatttcgaaggtgacacgggctctcctccatgcccaaggcctccctgacccgcgtccggaatttccactgcggaaggaggattttatcaaagttgcgcatatgggtcttgattctgtagaaaggatgcttggaccggagcagtataaggttccggagagcattcggaagaaggtaggggaagagatgcgccaggacgaagagatcattcgcgtcatggtaagatgggtgcgttggtgcggcgtcgagggggcctgggatgagtttcctgataagcctgggatgggcaatgttgcagcaagattggtaaatatggattag

SEQ ID NO: 25116 - DNA, 1196 bp, Emericella nidulans
atgacactgcaatccattcgctccatcaccgagtataatatctcgaccttccgacggcattatgtctctgagattgctggctcccttggagacctggggactttcctcccaatagcgctcgccttagctgccaacggcacggtctctcttgctagcacgcttatcttctctggtcttttcaatattttgacaggcctcttcttcggcatcccgctgcccgttcagcccatgaaggccattgccgcagtagtatcgcgcgatccttctcgccgggatctatcgctgcagcagggatatttgtcgcagcagttctctttctaggaagcatcaccggtctgctgcagtggtttacccgcgttgttcccatcccagtcgtcaaaggcatccaagttggggctggcctgtcccttgtaatggcagcatgcaccaccttgcacggcctcgggtggactcacccttcatgggccgacaaccgtctctgggccattggcgtcttcgtggctctcctgctcacgaactctacacccaaacgactgccttatgcccttgttgtcttcattatcggtgtggtcctcgcaatcatccgcagctccctaaagtccaacctcccctcattctcgatctggcacccatctatcgtgattccagttggcagtgaatggtcggaaggtgccgttgatgcaggccttggccagcttccgctcacaacgctcaactctgtcgtcgcggtcgtccatctagcagccgatttactcccgtctgttcccacaccatccgtcacagccatcggtctcagtgtctctatcatgaacttgattggcgtctggttcggtgcgatgcctgtctgccacggctccggcgggctagcagcccagtaccggtttggcgcgcgctccggagccagcgttgtctttctaggagtctgcaagcttgttcttggcctggtgtttggcgaaagtctagttaacttgctgcaccggtttccgaaggccctacttgctgtcatggttattgcagcggggctggagctcgtccgggtgggtgagagccttaatacctctggcgctagggatctaggaagacaggtggaagatgagagtggagagcaggtgcacttgtctgaggaggagaggaacaagaggtggatggtcatgatggtcacagttggcttgctggtgggatttaggaacgatgct

SEQ ID NO: 25117 - DNA, 1353 bp, Emericella nidulans
gcgttcctctctctaaccagcagcaatgacggcagccaccctctcttcccaagggtagcctatgtggagggtgataatggttcggggctcgatattgatcctctgccggaggagcatcgcaggggtctggtggctgttttcgtcatggccattctctctacagtcgctacttttatgttgatttcgttcattacttacagactgatcttctggcgcgggagctaccaacggtacattggttacaatcagtatgtcgttctcatttacaacctggtcatcgcagatatccagcagtcactcgctttcttgatatgcgccaagtggtatgcggacaacaaaatctcggcaaatacggcagcctgctttcttcagggattctggctccaagtcggagatccagcaagtggaatttttgtgctcgctatcgctttccataccttctacctagtcgccttgggcaagaagctgagctaccgagtctttgtttcaattgtggtcggcctttgggtgttcgttgcaatccttgtcataatcccgattgcggctcatgggagacaggtgttcactccctctggtgcttgggtaagctctctcttttgctctttttggcctcgtggataacctgtaaagtgctggattgacgagagctacgaacccattcgacttggcacgcattacttttggattttcttcgcagagtttggcacggtttccctatatgctattttatggtttcaactccgtcgacgcatcaagcagtccgccattttgggaagcagtcatattgagagtctaaggcgtcttcgtcgcgtggtcggatacatggttatatacccaatcgcttatattatcctgtctcttcctctagccgcaggacgaatggcaaccgcacgaggagacactccgagcgtcgtctacttctgcgtctctggtgcgctcattacaagctctggactagttgatgtcctactctacacgctcacccgaaagaatctgatcatcgaatccgagcccagcttggacaagagctatcagaagtttgccagcggcaagaaccgactcaacaccactacagacctgaagaacatgcggaccgacattagcgctctacacacgtacaagggcaacgacgaagaagagcaaacccgagacggctcaacggacgatatcgtgaagaacaccggcggcggtgtcgagctggctcctataggaaaagtgtatcagcacaccaccatcgagatcacgtccgaacctgcatatccttcgaatggcgacgccagtggccgatcaagtgccgattctctacagccaacaggcaaaatgtcaccaacggcaagaagatggggaagatag

SEQ ID NO: 25118 - DNA, 705 bp, Emericella nidulans
agggcaccggatgggcgccgaaaatacctcgactgtgagaatcgaatgactatgccggtcgaagtgcagtacatctacaacgctatttccctttgtcggccggcggatcccgatcagctcaccgaagacacacagtggccaccgccgaatatccccagccagcaccgtgtttatcgcaacccagaagtgcattggaaggaatggaatcgcgtacccaagcaactgtctcagatttcagagcacgcatttcgaatccggcgatgggcgcactttcgcttgggcatgccgatgttcacccctggacagcaagagactatgtccacgtacagcactctcgatccgagcctatacaccccaaccaaggaaaaaccataccaaggaatctgggtaggtgattactccgcgcatgggtgtgagtttctccttttcctccaacgggataaggagagcgacgaagatgatgcccgcgacccccggaatgatgatatcatccagaagggaagcctagaggccgtgaaactcactggtgatcccaacgtcccgcgaggccaattctcgtttgtgtcagatgatattgggcccggcggcactgttcgcatcgcaacagaagctctcttccaaggcgcaagggtagtgcgtagtagaggccatgttgcggggcttggctttagagatggtacgtttactagtgcgaaccaatattcc

SEQ ID NO: 25119 - DNA, 690 bp, Emericella nidulans
cctggtcgatatggccacttgcttgtctgggtacaatggacttgtatcgcgcacggaggagccttggcaggaaacaaggatctcctcaagcagatgtccactctattcaaagtaatggaccagcgctcctcaaccctctcctctcttctcttgctcaagggcaaactagacatgttagacgcccagcttggcctccgccagtcgctccgcgaaaacgcagaccacatggacagcgaagacgaggagaatgtaatctacgttgaaggctatgatgaggacgaggttgaagatagcgacgctgaggcaacaaagaacattgacacgccccggacaaaggcaattcgcgaccagaccgatatctccatgatcgacgaagacgaagatgcaggaagcgaggacgacgaagaagacgaggaagaagaagacgaagaaggccctagcgccattttcgacgtcgaagctgaagagtccgccggctcttcagatgccgaggaatcccctaatgacgacgaggacgatgatgaagatgaggatgcggacagcgccgggtccattgcggatttcatcgcggatacggaggacgacgactcagaggtagataatctctcgcggcctccaccgtcaaagaaggccaggttaagccaaggaggtagaaaagggaagaaacaggctgggtcaggaaggaaatag

SEQ ID NO: 25120 - DNA, 383 bp, Emericella nidulans
ctaacggttcggttgtagaggcgggcaattacgcaatagacgtgtttaaacgcgcgggggagacagcgagtgatgctgcgtcgggattgttccaggggatacaaagcgtcgctgagcagacgcaacgagggtggcagaaatccacagaggacatcgaggcacccgagtggttacagaaaatactacggtttgaccagaactcgcaggatggcggctcgtctagcggcggtggtgggcaatcaccgaaagagagccggacaggtgtcgctgctgcaggtgctgctgttggcaccgtctttgggcaggaggacgacgatattcgggccagaagggatgcggagaatgaccagatgatgctgctcactcggaagatgattagatag

SEQ ID NO: 25121 - DNA, 291 bp, Emericella nidulans
atgagcgtagagtcagatagatctgaggaatcttttgacgcggtcgacgccaccgattctcaattgctcactatcaaaggcgacagcgacgaggatacagtagcagatgcccaagcagatgtcgttgctgacgatgcgccgtccgatagcgacgatgattctacggaagccgggggcacggtgctgcgcacgaccaacactctccattattcccagcgcgaccaaaaacccttactccgctgccactcgacacggttcctcggcggaataacatccctgcaccgacagtga

SEQ ID NO: 25122 - DNA, 1242 bp, Emericella nidulans
atgccgctactgtttgccttgttcacccgccgatgggcgcatcgccgccaactggcagctctctgcggcacagcgatcgcatgcctcagtttcctgctatctgcgtacagccagaccatcggtcacctgctggctacgcaggggattacttcggcgctgggctgcgccctcatctacagcccgaccacgctctccctgggtgagtggtacagcaccagcaaccgcgctatcgcatacggcatcgttctctcctgcaagaacatcgtcgggacgacgtgcccgttcatgattcgcgcgctaatcgatgcgtacggctaccggaggaccctgcaagcctggacggggatcgtcgccgggacaagtatcgtggcggtctctctgatcccaacacacccttcgacggccggtatccatagaacccgtggacgcaagatcccatggaccttcctgaagcaccggtcaatctacttctacagcagtgccatcatcttccagagctccggctacgggatcccgcaaacctacctcagcagctacgccaaggatattgccctactctctcagacttccggaacgctgctactggccgtcttcaacacgccagggatcatcagctcgaccttcttcggctggctgagcgacaataagcggatccggctctccgctcagacggtgtcggccattccccccatcgccagtgcccttgcaacgctgctcttctggggcctgaccacccagggcaacatcgggctcctagtcctcttctctatcacgtttggtttcttctctggcgggtatagcgcgacctggggagggatgcttaagcagatggagggcgagtctgcggagcgcaatgaagccatcgatcccgggatgctgtacggtctgctgaacggcgtgagaggcgtgggctacgccagcggggggttcgccagtgttggactcttgaaagcaggaactctgccggccagtcagcggttcggctatggcacctcgtatggaccgctcattctctttactgcgctctcttcagcccttggcggttgggtggttctgtggaagtggaatccaagacgactcttgctgtttgggcgaggataggcagggaaactgaggaagtggaagaaagagagagacagaggaagggagggaggtatgctgacaatgctgcagcattacagccactgattctattgcccttatattttattattatagaataccccgcatgccacattcccg

SEQ ID NO: 25123 - DNA, 555 bp, Emericella nidulans
cacacaatcctaacacccctttccgtcattgtttgttcgctggtcgaccacttggacgcaggcactattctcgcaaaaacccacatcttcgaaatgatctctgctactgtcggcaaagtcaccaaccgccttcgccagatcgtcgcggctcgcatccagccaggtctctatgagcctcagctaagtgtacttgatgaaactcttaaccgtgagaagaaggatatgcacgcccttttccaggtcattgaagactccgtcgtttctgtggccggaggtagcaacgaccagctcatggaacgtggtgacggcagcggcgatttgcccgaggacgaaatcattcgtgagtggggtaaacgctggcttcgcgcgtttcgtcgcaaggccggcgtcgaggaagccttcattagccaggctatgtccagcgcaacacctgtcgggacgaaagccccgaccccacctccggctgctgctgatggaagtgtccctggggatggagcgggcgatggtgatatggatattgccgatgcggatgcggataggacggctggtatctga

SEQ ID NO: 25124 - DNA, 591 bp, Emericella nidulans
gtggagatgcggtttgaggacggcactgctgcccgtgcgagcgtagtcatcggctgcgatgggatccattccaaggtcaaacagtttgttctcggtgcggacgagtacgcagctactcagcctcggtactcgggaatgtatgggtaccgtgccgtgctggacatggagacgatggtggaagccgtcggcgaccatcgcgcgcgcgtctcaactatgtatgttggcgacggagcgtatgcggtcacatacccgatcaaacgggcaaagaaggtgaacgtgggcatctaccccttacactcggaatgggaccgggagagctgggtgcggccggcgagtaaagaggacatgcacaatgactttaagcatatggggcgcttgataaacagcttaatcgaggtgagccgttccccagtttgtctcgtcggcaaatgccagtccaagctgggcgagatcaggatatgagctaaccacggcggggtgttgaagtacatgcctgatccaactcagtgggcgctctacgagcacccgcacatctcgacgtatgcgagggcccgagtggccattctgggagacgcggcccatgcctcgacg

SEQ ID NO: 25125 - DNA, 285 bp, Emericella nidulans
catggccattcgttcagatcaacgccggtaccggacaagacggtttctccgtcaacagtaccggcttgcaatggtcgcagcagacgggttttggtggctggctaggtacgataacctgataacccggcagatttctgtatggtcgctaatctgatctttctgtcttcgctagtatgcgactggtggcacaacgcaccccaattattctacctctaccggtactacgacgcggaataccccgcctcttgcagtgaggtgaagcttgtgaccgaacccactgcgtga

SEQ ID NO: 25126 - DNA, 1174 bp, Emericella nidulans
cccccgtgccggtgttggcataaatgctacgatgacggagttgcccaacggtcagatatctcgtcccaccgatcctggtagccttgttctggaggcctggggccagggattaatgataggctcgctgatcatcatggccgcggtgatcctcgccaacatgaaagggcacatccttctccacaaactgatttttgtcgaggtaagctctgccttggaaaataaagcgacggagtccctggtgcagctacgatggataatgggtgacctgaaatcggcagctgctccttgctatcccgcacggcacattcatcttcaacaaacctcctgtctacgggtggtacctctcggtcagcgccgttactctcaacatctcgtggagcctacataatgtcatctcctggatgaaaaacaggccctttttctcgagaaaggtatccatagcatacatcgccaccgtcctgctggtccagccgtattgggtgctggagatctatgccaactttacatattttaacaacatcaacagaatattcgaggttactcgaccgctggaaccgctattccggtatggatcccgcttttgcctttattctctcgttttgtccttagaagtgattgaggataaaaatcgcagtgctgaaaatctgtgtctcatagtgatccgtggtggatctacacggcctgctcgctgttctacgccattaaatgcagctataatttcggcatcgttgaattggtcaaagtcagcccgcggctgggtatcatgttggcttccatgtgtctctccattgtgtttatcatcgtggatacattcagcgttcttggggtgttcaatagcgcctctcttcccattggggtccagccattctggaaggtatgtgtttgatcaaacataggaaaggttctcgcattctcaattgcccccacacagctatcactcattttcaaatgcctctgcaacaccatcgtccttgatgacttcaagacggccctcgatagcatccgctcctaccatcagcagatccaagcgcgaacccatccgtcgaatagccacatatacggaacgaatcgccgcccgcagggctcggtttcagcgtgccagctcacattggaggaagttgaggagggggtctatggtaatgagggcctgcgcgtcacgaggcatctcgcgtaa

SEQ ID NO: 25127 - DNA, 2286 bp, Emericella nidulans
atggagtacccgtcttccgggggcctggaccctctagtattggacgcggaatgtaggctcgcttccccccacacccgcatccagctaccaccactcctaccatccaacgacagctcggccgctaagcagccgaacagacgcgctggcgcataccctcgtcgcagggctgtgagagcatgccaggtgtgccgagcccgtaggaccaaatgcgacaacaagaagccgtcgtgttccttttgcgaaaaaatcggcgccaaatgcgtggtcaacgaccctgctgacctgtctgggtacgactatcccggtcaagactgcgtattgttgctcttcgctggtctcgatgtatgaacagagaaactgactgcgaccgaaggtttgacactgccagtttagtgattattcaacgcctcgatcagatcgagtcgcttatccagcaacagcaacagcagcaatctcaacagatccaacatggaaggaccgtcgttgaccacaccaatggcatgcaagccgcaacgagggtctcggcagtcgcagacagcgagtcgccgacccttcatggtagcccattgtaccaggcgcactgcgcagacctcagccgacttaccatcgaaaccgtcctctcctggaacgtcttcaatggaagatacgacgcaggcccaagtctttacgatctggtctcatcacagacaaccttgtcccaggagccgttcctggcaaacaacgacccgcgtctcgaacggctggacctggacctgaaaacatgcacccggctgctccacacgtttctcgaggaggtgcatattgcaaacccaatccttgacgtccatttgattaccgattacctataccaagcgtgcgttcacggaatcgggtgggacgcgccctcgtgccttgtggtgggactcctctcacacccatatcgttccgttccgcattgctcatcgagaaccactggctaatacacttacagctactcatctgcgcaataggggctatttctgagagttttcaggagcaccatgaatcgagctcgatgacggcgcggcggtcgccgtcctttcaccttggtcaaagatacttcgaagcggcccagatgcggctgggagtggttttccggacccatggagtgctggagactcagtgtttcttctattccggcgtttacctgatggctgtgtttcagcctgtccgcgcctggaggtgttttgtgcagacagccgcagtggcagagatgatggtcttctcgtccaacgggtccagtacaaccgcgagcctccagagggaccttcgctgtctagagaccacacactgggcttgtctcaagtctgaactgtgagccccctcttcacggtgtgctaccagtatcaccgtcgctcttcaatctgatctgctcacacgatcagggagctgcgcttggagctcggtctgaaccaacctgacccgcttcgatttacgtatccgacctttttcccatccctgcccatggaaaggcttaatcgtgatgagtctcgggtgtggtatttctatcttgctgaaaccgctattcgacgattagcgatgcgggtcatccagttcttcttctggcaccagacacaaggtagattccctgacgcccataatatgagagaagcctcactagactttgaaattcaagcctctgaatggtaaggcttcactttccccgttcttttcagttcaaattcagtccctttgccattcaagcgatccttctaaaaactcgcttgctcccactatcctaagcagaagcccatctgactctcggccaggacctcttccctgccgccagtgctctccctttcaacccctgaaatggaagacgatgtcctgaaattcgttctacgaggccacctccttgactgctacgagtggatctacttcccttacatgctcgaagcgatcgcacacggcaaccgcgacccagagacggaggagttcgtcatccgcgggctgaaaatgtccgttgagcgcatccacaaaaatcgtaaggggttcaggcaccgacaccacggcgtctggttgatgttgcgctcgtgataccggagcgcgcttatattgctacgggcgagccgcagttcggcgacacacgacctcttgccgctcggttggaagggggcggtcatgaatgcaacagatatgttggcgtattggaaggatgaagcagaggatgcgagggatcggctgagaattctgcaggagtttatggaggagtggacaagtgaagaagagcaggaactggggagctttggtgtgggttgcggagggtag

SEQ ID NO: 25128 - DNA, 1782 bp, Emericella nidulans
atgattgctcgacgcagtacatccctccttgcgattgttttcttcgtcgcggttatattagtgattttctcgtcttccccaaagccggttccggaagccgtcagtgaagagatatcagcagccgccaaatatgtcccgaaattcccttcgttgaacgatctgcacctgccgacctttcagccgccggcgcataaaccccccgagctacagcaagacagttcaagcggtgattcaaagtggttcagtcactgggaatggctcaaccccttctcgtcctccattacccttgacgagaatcggtccgtactccctccgcttcccaatcggccgtatatatttacatactataacccgaagaagggcagtgatagagaggaggagaatgccgatgcccaacttctttttgcctggcgtcgtgcttggtacgctcagggcttccgacctgtggttcttggtcgtgcggaggctatggccaatccattatatgagtcaacgaagcaattggatttgagccttgagctagaagaggatcttctcaaatggcttgcttggggtcatatgggagatggtctgcttgccgatcggctttgctttccaatggcgagatacgacgatgcaacactctctcacctgcgtcgcggtgcggattcagatttcatcacccgattcgacaagatacataatgccctgctctttgggaagaaatctgttattaacgccgtcattgaaaaggcaagcaaggagtttgacaaggcaacaaaggctttgacggacttgataccagatgatctgttaaagtccgaacagaccaactctctagcactttatgactcggctaccattgcggcgtattaccacgagcttactgcagaggctataccctctccgtcggtccgccggcatgccctagtagatctcatcaattcccatctgcagaatacatttgtgaactcgttcccgggaggaatagccgtcctgaaaccttatgctgagcacaccactgcgttggttgaaccagccttaagacttgcgaaggctcttggccaatgtcccgactctgttgcacccacttcttgccctccaaatctgcgaaactgccacccgtgcaacacacacaaaccaatgaaaatcagccaacccgccacatacaagaataccacccaggtcttcacaataggcatcttgccgcacccatacaccttcgtcagcttactacaaaactcttcggaagttacaacgcggtacattcgacgcgaaacttcccgcgatgcctggctcaaagaggtgaccggcgaccaaatgggccgccaactaggcggtggggcgagggccgtcttattcaagaaagtcgtcgctgacgagccagctatcggcacatcgctatggatgacggtcgagtcactccccgctgaggccggccaggccctaccaagcgaactcttggacgagtttgaatggcagtttggattccggatcccacgtgacagcaatgtagacgccaagaacgaaggcgatgccaaggaatcaatgcagcatgccaacccgagcaaaaagggtgttgagagagagtataccatcatccaaggagctagggatatgctaaagagaaagaccgactccaaccgggtcaatatccgcggtgtggccgaggcgtggaacatggccgatactgaggtctggcgatttgtcaaggcgtacagagcgcgaagtatcgtcgaacgtaagaagtgggaggaggaagagaagagcttctttggagcgcgtccgaagatataagacact

SEQ ID NO: 25129 - DNA, 342 bp, Emericella nidulans
cttccgtatcatgaaaaaaattcgagcgagcagagaatcactcatgcttggatgtggcccatggttgggcaatggctgaaggagaatgacattgtcattaccgagactggaacggcaaattttggaatctgggacactcgcttcccatctggagttacagccatcagccaggtcctttggggcagtattggttattcggttggcgcctgtcagggtgctgctctagctgcaaaggaacagggcaatcgccgaacggtgttgtgggtgggcgacggcagcctgcaacttactctgcaggaaatcagcaccatgatcaggaataatctcaacccaattatgtaa

SEQ ID NO: 25130 - DNA, 371 bp, Emericella nidulans
atcgcgtgggaggacgacttcgacgggatcgaccagcagccgcgcatggattatatcaactgggacgactacgtgttcgaccacacctgggagcaaggcggcgacttcaactggaagatctggcggataactacaacgagtgctaccactgcgcgacgacgcacccggacatccccgccgtcgcggacctgtcgacctactcggtcgacaccaaggacggcagtatcatacacgacgcgcactcgaagcccgagcaggttgccgcgggtttgcaggttgcggcaacttactacttcccgaacgccagtatgaatgtgacgtacgttttgatcccttctaaccccttccagccccttccaacaccctccccc

SEQ ID NO: 25131 - DNA, 429 bp, Emericella nidulans
tacgttcagcaaatgcgatatcacctacgtgcccgttctcctgggcgggatactgaaggccactgggaatactccacccattaggattaagagtatgacggtcccatgctgcagtagcacgtcagctaacctgtgcctgcagacaaggataaatggattaatcaagagcgtatccgctgggctcggttcttctccatcccgatagcagaaacatcgccggagggtttcccgcccaatacagtcaccgtgcaacgtgcccttacagccatctctcagcaatctcctaataagttgatccctgctactgaggcagtatggcgggatttctgggtgaagggggacggcaaggcaacgcagcccgaggtgtttgtaccaatttttgagaaaatactaggatcgtcgcagacaaaagccatcatggaagcggtg

SEQ ID NO: 25132 - DNA, 510 bp, Emericella nidulans
atgacggcgtctcccaatggaacagactacttggcatcatacaccaagctttcctcctgcatctatgttcatgaaccagaccactcagccgacgacgttggcgactatccccggacaatcgtcattgcattctggatgaacgccttctccagatcgctagccaaatatattgttggataccgacagctggctcctcgagccagaatcatctttattcgaacgtcctctgcagaatttattctgcgtcccacaaagcgggcccagtatgctcgtcttgcacctgctgttgaagacctgctagctcttcctgccgacagccctgtgcttatccacatgttctcaaatggaggtgtatttgccataacacaccttctcgaagcctatcaacaagccacagggcatccgctccgcatctcgtccacaatcattgatagtgcacccggaacagctacacttaccgccagtttcaaggcgttttcttttgtgcttcccaggacatggattctccgc

SEQ ID NO: 25133 - DNA, 2440 bp, Emericella nidulans
ggtgctgcaatcctagctattgggcttcgagactgggtggactttggcgtgatatgtgctctccttcttcttaacgccactgttggcttcatccaggaataccaagcaggatcaatagtggaggaactcaaaaagtcgttagctctcaaagctattgtggtccgcgacggtcgagtaactgacattgacgccactgaagttgtaccgggtgatgttctgaagatcgatgaggtattacccatattgtggctgattgaagacggcgaaggctgactcctagcagggcacgatcgttcccgccgacggccgtgttaagacgaaccatttactgcaaattgaccaatcctcagttaccggcgagtctctagccgttaacaaatgcaagggcgaagtttgctacgcttcatctgtggtgaagcgtggccatgcgtatctcgttgttacggctaccggtgattacacatttatgggaaagacagccgccctggtcaagtctgcgtcgtcgaattctggccattttacagaggtactcaaccgcattggtgctactcttcttgtgttggttgtactcaccttgatcgtcgtctgggtgtcgtctttctaccgttcaaacgagaccgttacgattctcgaattcacactggccatcactatgattggagtacctgttggcctgcccgccgtcgttaccacaacaatggctgtaggcgctgcctatcttgccaaacgacaggcaatcgtacaaagactctccgccatagaatcgttggctggggtagaggttctctgctctgacaaaaccggaaccctaaccaagaacaaactaaccctctcagatccctacacagtcgctggcgtggatcctaatgacctcatgttgaccgcttgtttagcagcttcaaggaagctgaagggcatggatgctattgataaggcattcattaaagcacttccaaactatccgcgcgctaaagaggctctctctcattacaagattcagcaatttcacccatttgacccggtctccaaaaaggtcaccgccgtggtgttatctccagaaggccaggagatcatctgcgttaagggggcgcctttgtgggttctcaagacggtttcggaggagcagcagatcccagagagtgtcgagaaaggatattctgacaagatggacgagttcgcccagcgtggctttcggtcccttggtgttgctcggaaacctgcgggtggggaatgggagattcttgggatagtgccatgctctgaccctccacgcgatgacactgcggcgaccattaatgaagcgaagacgctcggactatcgataaagatgctcactggggacgctgtacccattgcgcgcgagacttcacgtgagttagggttgggaaccaacgtctataattcggataaactcggtcttggaggcggcggtgacctgactgggtctgaactttacaattatgttgaagccgcagatggatttgcggaggtttggccccagcataagtataatgtcgtggatatcctgcagcaacgaggatacttggtggcaatgacaggggatggtgttaatgatgcaccatcgctcaagaaggctgatactggaattgccgtcgaaggcgcatcagacgctgctcggtctgctgctgatatcgttttcctcgcgcctggcctatcagcgattatcgacgctctgaagacttcccgtcaaatattccaccgcatgcatgcatatgtgatctatcgcatcgcgttatctctgcatctcgagatattccttgggctctggattgcgataatgaacgaaagcctgaacctgcagcttgtggtcttcattgcaattttcgcagacattgcaactctggcaatagcttacgacaatgcaccgtactcgaagacgccggtgaagtggaatctcccaaagttatggggcctgtccgtcatactgggtattgttctagccgtggggacatggattgcactgaccactatgatgaacgcgggcgaacatgccgggatcgtacaaaattacgggaaacgcgacgaagttctcttccttgagatatctctcacggagaattggttaatatttatcactagagccaatggcccgttttggtcttctctgccgtcatggcagttggcggcggccatttttgttgttgatctcgttgcaagtttcttttgctacttcggctggttcgttggtggacagacttcgattgtcgccattgttcgtatctgggtattttctctcggcgtattctgcgttatgggaggtgtctacttcctgctgcagcgttcccagacttttgacgacattatgcacttcaactttctccagaaaagggactctgtatctcagcgtgttcttgatgatcttggtaagcttctccaaacagcccttctaagggtccgtgctaaatatgattctagtcgt

SEQ ID NO: 25134 - DNA, 554 bp, Emericella nidulans
gaccatgggatggagtcctgcccaagagaatcggaaaaactgaaacttgtttttgcccggtgggggagaggttctgtcccgggtgtggggtatacaacaagcgcattgcgccgcatgtcagggtcattggtgtgaagacccaggacgccaacgcaagggcccagtctcttgatgaaggctctcgtgtgttgctgaacaaggtcggcctctttgcagatggcgctgcggtcaagagtgtggggtcgaaatgttggcgcgtggccccgaaggtagtagatgagattatcttggtttcaaccgatgagacttgcgctgcgatcaaggatgcatttgaggatacacgctcgatcatcgaacccgctggtgcgctggccattgcaggattaaagaaatatgtcgccaagcgccccagccccaacaccagccgtgaactggttgcaatcacctcgggagcaaatatggattttgaccggatgcggtctgttgcggaacgcgctgccttgggggaaagaaaggaagctcttctgagagtaaaaatccctgaacacccgggc

SEQ ID NO: 25135 - DNA, 477 bp, Emericella nidulans
gaccttgacccaaccgaatggaagcccgtaatacccacggacgaccatgcttcttgcattatggcttcggatgcctggaagtacctgtcaaaattccacggcgacgagtctgtacttcccatacgccgtgcaaagggccgtaacacgagctcaactagtctgtcgactcttccttcattaagcaatactccgtcgacgccatcttctgtgagcagcgtagcgtcggactacatgagtcacatgtacgagtctgctcatcgtcctctgcctcctcgccataaaccctgcttctctggtagcggcagtgtcaccaaaggcgtggatatagtggttccccacatatcagttatccccgactcgccaatggacacagccagcaccggatctatcgtccctgctggcggcggtccctggaagacaaaagttggagctattccggccatcaaggtgcttgagggaactgggaatatgcactga

SEQ ID NO: 25136 - DNA, 511 bp, Emericella nidulans
tctggtgtcttactctttatcgtcattgtctcattgcgcctcgtcactctttacctggccgcaaatgtccgcctcgcttcccggcgatcgggagcttccccactcgcaatatgacctaaacacctactggggtcgcgtgcgccatgcggccgacatttccgatccaaggtaattcatatcgtatgctgcttgttaactgcaggctaacagtgcaggatgctattcgtctcttcagcgggactggagcaggcaaagcgccttatctcctcctacaagcagaacgaggtcccgacaatgaatgcggagttatggagggcgaagaaggtggtggattcgacattacacccgggtatgttccagatatgaaccctattactggctcactgttcttttggctgacttgtgcttgctaatagacacgggcgagcctgtcttcctccccttccgcatgtcatgctacgtcctctctaacctggtcgttacggcgggaatgctcacaccgggccttaag

SEQ ID NO: 25137 - DNA, 530 bp, Emericella nidulans
acaaatggaggtctgctctactgcgggccttcgacaactggcgacgcgattttgacgaggcactacaaccaggcatggcctcgtaccctaacggatatcgcggtcggtacgcgctcgacgaagacaacgtgtttgagtcccgtgacgtgctgcacgggctggcccatatggcttcgcacgttgatatcgtagattgccagatcttcgccggagctcgtcgactgatgggacgtgctatcaccccgcgggattacaacgccgcacgcgagaagatggtcgagcgctgggctaccaaagcatccgcccgcgacgccaccttttatgctctcaagttcctcgctgaatgtcttttggaccaccaaggggcccattatgaaggagagttgtattgcggtcgggaagattaccttctgaatcgaccgtgggtgatttatgtggctgccctcgtagtctggtgctatggatacgccttggaaggtccgattgcgggcgccccggcgctgtcaacggtcgcggagcagaggcaagat

SEQ ID NO: 25138 - DNA, 622 bp, Emericella nidulans
cccccgcggttgcgtcctccaccatttatctcccgaagaggaagaccgctacctcgccctagagaagagcatctcctggaccatcgactccttccaagaataccccgccatccccgtcaccgaaccggatgccacaaaccgcggcggcgtcgtggacgcccttttcgccacgcctgagaacttcaacctctgctgggttgacgaaacttccactggaggcatttccgcacaatctcccatctccgttcactccaccactgaaggaggcaccctaacgtcaatccctcccaacgttctctccgccatggaagcagacagcacacgcaaccacaactgggcaatttccaacgccgccgagctcatgaatgcaacagcgacgtcggtccgctcgtttgctgccgccactgcaaaacacatgcttggtgctgctggcgtggttattgggaatattcctgaccttgacgatgttgtcggtatgacagatgaggagctgcgttcgttcgcggttaagagccagaaagaacttgaggcgtcgaggaaggagctcgatgcaattgacaagaagctcggagcgttggtgaaaaggaacaggaagctcgcgcagcaggctttagctacttag

SEQ ID NO: 25139 - DNA, 1782 bp, Emericella nidulans
cgtgctgtctctcaaagtccgcccagcgtgcctgtcctgcggcaggagcctcttcgccgagccatagagcggcgttcacgtgcacagcgcttgaatctcgccgatagagatcataatcgttctgttagtgcttcatctaacgaaaccgctcatcgatcaacggatgacgccgagcatgattttagcatatatcgcagaggctcagacgctcgctcagtcagaacaatcgggatcccaatgcatccgaaggatgcgcgcaacaagaacaccagcacagcgacgatatcaacagcaaaccctggtggcgcagttcccgtccctcattttgcttctcagggacgggaaccatctgaccagacttgcggggaaggggtggacagcttggcgtctgagactctgttgaagagcctgcaaagaagcgaaagctcaacgaacagtgccaatagtagcgttcctactactggaggtcgttggggtagtctctttagcggtctctggagctctcgtcaggagtcgtcgactgattacggtactgctggccagccacttgagcaccgtcgacgttccacctcggtccttaatgtcccgaaacggaaccctacgacgctccaacaaatggttgaagaggcttccaacgaagaaactcaccagatcgctactagcgcgactatttctattccgcaacctccaaacgcccaacgtaaattcgaagaagatgcgccggacctatcttcttccacaactgacaaccctagagaaacttcgctcaaactagccgtccgggaagaggatggaatagtagatgttgagctcccattgcctgggtttgtctctctgtcttcgtcgggtgaatcgaccatggcttccccgaaaaagactcgcacgtcgataacaagccttgatgctcttggatctactcatagcagtggttcaggattccattatcagacgaaagatgtcgatgggccgactctcaacgtcgctggatggttgaaaaacttccatgatgactttgttcttcaaggggtgcgaccttactcgagcctagagtcagagatcaggcgagccatgcagtccgagcccactccaagcaacgcggtagcagcggatactgatggatcagagaagtgggtagatgttgccacaactctgattgcagatgtgcggacctttagcgtcaagcggctgcgtcttaagcgccgagcaattggcggcggctctgtgagatcaccgatgtcgtcatctgggatgtctactccgggcactcctcgccaagtaccaggctgctcaatgtctacttcacagcttagcggctacttctcttcttccatggcctcggcaacgccctctccgagaccacgcttcgatgggtacaatgccggtgaagtggaggagcgctttgtagaggaaccggttatggatctggacgggaccctggtcgacgctctcgaacgtgtgctagctcagagcggcccgtcctctttagcacctactcgggcgtcatctccatcgcgatctcggaaagagaacgacagacccgctgagtatacggccacccgcgacgaagttccctctcttgaagccccgcggaccgagtgtcgccggctagtcctgggagcactggaagaagtagtccgcagcgtgaccgccgagcattgccgtgaggatgatggagagcctaatctggcggatagagagcgcaaacgtgtgatgattggggtggataacactctaagagagggggttcgaaagtggctcctcgacgtcgaggaagcttggtag

SEQ ID NO: 25140 - DNA, 328 bp, Emericella nidulans
cggcgaccaagcttgtcgatgatgttggcaaggaaatcgaggagatgagaggggagttgatgaaggttattacggattccgatcatgccgaggctaaagctacaagaagcactgggctcccaaatccagcagactttgacgatcatggtcttgatggtgatgccaaggagaagactattatgcagctatggagcagcagcggcaaatggagctcatgcatgagcaggatgagcagctggatggggtatttcgaacggtggggaactgaggcacaggcggatgatatggggagggagttggaagacaggcaattatgatcggagagatt

SEQ ID NO: 25141 - DNA, 1055 bp, Emericella nidulans
tccacaatgacattcgatagagacaactcgcagctgcgggtcattatcattggcggtgccgtctcgggcctcacactcgctcattgcctggagaaagccgggatcgactatgttgttctcgaaaagccccgagatatcacgacgaatattggtggctctgttgccctccagccagctggatgccgcatcctcgaccagctgggcgtcctcgatcatttgtggaaatatatgaatgatatacaggcagtcaatgtagggctacctgagggatatacccatcgacacgcgatgtttgctcaaaatcttacggagtgattcctcacagtctttgtcttgatagtgctaggactaacttatccaggattggttacccattctccgcgctcacacgtcgaaacttgctatacgctctcttcaatactctagaaggacgctcaaaggtgaaagttggggccaaagttgtcggcatcgaccgcagcacagaatctaacggacaattaacggttacaaccgaaaacggggagcattacaccggagacatagtcgtcggcgcagatggggtccacggaatcaccctgaaagagatggagcggctaacagagcccccggcctcgccggccctagtcaaggacaagagcaaaatgacggtcgactacatgtgtcttttcggcatgaccaccccatcaaaagagatgactgccacgatgaagccaggagagatctacacccggtcgtacttacacgccttctggaccattatcccaaactttgacactaccatcaactggttcgttatgatcaagttggatcggacttacgtccatccaaatgtaccaagatggccacagagagaggtcaaagcgaagctagaagagctcggtggttacccgctctacgggcaaattaggttccgcgacctatgtcagagaacttcgtcagtcgcgtcaactcccacgccggagggtattctggagtcctggacatctggccggattgccggtgtcggagaaacagttttcaaggtcccgtttctgttatccttgcagaaagcctga

SEQ ID NO: 25142 - DNA, 699 bp, Emericella nidulans
atgggacgcttctatcaggctgtcctcaacttctctaccgtcactcgttacttgatctatatcgctccccttgctgctcttctcgccatcccgatcattgttggcgcaacagccgctgaagacgctaagatcggtggtgtctcacttccttggttcttttgttgggtcgaggttgtctgggtatcgctttgggtgtgcaagctggtcgccaaagtcatcccgtttgtcttccagttcgtttgcggaatcgtcagtgctggaacgcggaagtatgcccttattctgcggaatctggagattcccattacgatggtgctgtggatgatcgtgtcgctcgttactttccttccaatcatggtctacaatccgagaaacaagcgagaaggcgatactgagacgaagagctgggagaagtctgtgaaaaacgtcctctttgctttcctagtttgcgctttgatcttccttggtgagaagaccctcgtccagcttatttctatcagctatcaccgcaaacagttcgatgcaaggatcaaagagtccaagcgcaatatcaatcttatcggtattctttatgatgcttctcgcagcatgttccctatgtactgcaaagagtttcgagaggacgatgcgattatctcggactccattcttctgggaggacccgaaactggcaggcctggccattcacggtcaaactaa

SEQ ID NO: 25143 - DNA, 506 bp, Emericella nidulans
gctacttttggtcggatcaagtcgacgacgagacagctgccaaggaatgggcgctcaagattattgtcaaccggctccgggccaaagatggctcagatagtgacgacgatttccgtgcccacgcagagcctgtttatgatactctgaataagcttattgtgaactcaggcgagttgtcaaaaaagaaggacactccggctacccagaagtcaagattgcggcttctggccgccaattcattgctaaagctatgcagctcacatgctctgtgtgagcagctgctcactccgcaagatttcaattccatagctcttgtagcgcaggatccacttccagaagtaagaagcgggtttatcaaccaactgaagaagaagcttgtacaggatacccggctgggcgcacggtggtatgtcataccgtacttgcttgcattcgaacctcaagttggtttgaaggatagcactttgacatggctgcggtctcgggctgcattcttctcccaacag

SEQ ID NO: 25144 - DNA, 276 bp, Emericella nidulans
atggcggacgctactattcatgctgcgatccctcgtctcttccaagagccgcctgtgatccgtgacacactcatcaccgaaacaagcgagctgcaggctgagaccatcaacaagtgcctaccctttctagcaggcgctcacagcagtcaaaagggccctctcaatcgtcatggcgtgccttctctcatgcgcgatgtgcatattggctatctgtgcgattctctagaagactacccccagggttcgttgcaatggatgccagtcggccttggatga

SEQ ID NO: 25145 - DNA, 231 bp, Emericella nidulans
atgattctcaaagctcttgacattgacggatctcgctatgacaaagccacgcaggccacagtggacgcccttggagacatgtcgagtgcttatcgtgagtgtgcccgtgaggtcggtcaaaacaactttttcctcccaggtgagattactggtggaaacaatttcggctcgatctatctcggacgaggaagacagcccaaccaatacccagactctgctatggattctatg

SEQ ID NO: 25146 - DNA, 324 bp, Emericella nidulans
atgtttcggctcacccaggcagcgtgcctcctgcaggcgctcggcgccctcattcaaggcagcttagcttttacccctgctgcgactgacagccatgaagccgaagctcttcatcgccgctcatacttctacgtcggcggggagtacgtcaacaccaccgatggctggatgatgcataaccagatgtacgtcgagaagctctcgccggcaagggggaccacacagctctatccgattgtgtttctacatgggggtgctcagaccggcacggtgcggccctctcaaccatatctctccggtggtgtcgagacctacggatgctaa

SEQ ID NO: 25147 - DNA, 237 bp, Emericella nidulans
cttgctcaagacgatgacgggtttgagattcgttctttcaatggagctttggacgaagaagacgccctcggtggacttgatgaacactccgcttctgagccgcgtcgtgacttgtcgccagttccgcctaaaccagttccctctgccgctcggactcgggagtcactggatggtgagacgatcttcgccgtcggtgaagatggcgacaaatggtctgatgatgaggatgagtcgcgc

SEQ ID NO: 25148 - DNA, 654 bp, Emericella nidulans
atgttctccgtcataattcccggccggccctgcctaacagacatcgtcgccgttgaccctcagccaaatgggcaagccacaaaatttgcttttaacttcccgctatcaccatccttttccgaattagtcgtcttcttccttccgggcaccgtcctcccgcaagacacagctgctgctatctacattcaatatcctggctcggaattccgtttcattggcgcccttgcaaatgagaagccgtcgtctgttattaaagtcagcccgtcggtccgcacaggtgcgcaggggggagaccagatggtagacgccgggaatggtggcatggtgacgctagggatatcaattgagccggtgcaggtagttgcgccgcagcttgcgcagcttgaggctgcgaatggaggcaatggaggggcatcaacagatttgatcaagcagacgccgcagcagaaagggattactacgaaggtgctggcacagagaatcgtggggaacgcgttcaatttcctggcgagcttcgcgtcgagtgatccgtcgaatcgggggcaggaagtcgtgccgcttaaggcttttcatgactggtggacgaaatttgagaggaggatcaatgtcgatccgacgtttttggagagggaggaccccagcgcgagtggttaa

SEQ ID NO: 25149 - DNA, 1025 bp, Emericella nidulans
atgtccgcctccccgtccgcgttacaatcgaccaaacgtcctcttgaggacccttcgtctccgtccggacccaatgaccagcctgaggccaaacgtcctgctctggacaaagtagttaaaggagaggagtccgagaacaatgcagaggtgaagaccgagtctggtgccgcgaatgatgcagatggtcagggtgatactgttgtcccagatgccccgaagggaggcgtcagtgaaacacaaccgattcagtcgactgcttctcatggtgaagcggcgggcaaccagagcgagcagcagcggccccaggacgagtctaactggatccatatccgtgctgtaatatccagccaagaggctgccaccgtcattggtaagggcggggagaatgtatctcaaatccgccgtttgtcaggtgccaagtgtactgttagcgactactcccgcggtgctgtggagcgtatcttgactgtgagcggcccgcaagatgccgtcgctaaggtttgttttaatccgtggtaccttcttgagcaatctcactgaccatttgataggcctttggtctgatcatccgtacattgaacaacgagccccttgatgctgcttccacggctcaatcaaagacctaccccttgcgcttgttgattcctcacatcctcattggttccattattggcaaaggtggtactcgtatccgggagatccaggatgcctctggagcccgtctcaatgcttcggatgcttgccttcctctttccactgagcgatctttagtcatccttggtgtcgctgatgctgttcatatcgcaacatactatgttgctgtgactcttgtggagcagcttacagaacgttttggaggtccagcagcctctgcttatgccacccggagcggcggtcctgctggagccgtcccaggtggtatgcaggttgtaccttacgtgccccagccagctggtggtcagtatggtcatccggatacaatcaagaaacaccacccgggccaggccagagccggtgctggagcc

SEQ ID NO: 25150 - DNA, 733 bp, Emericella nidulans
gcccttcgatactccctacatccgcctaggaccggggagggcgtcgatatccagggcctgcgagtaaaagcacctcctgtgcggatctttatcctaggagcgcgcgctgaatcatctctacctcgcgatgtgtggcttcaactcagccatattttcccacggtctctcatccatctcatcttcatcggccctgagagcatggcgaaccgcgacgaggagtttcccctgcccgagcgcacgcctgagaaccctttcggaggaattgttgaagacagactaggtggtcagatgaaaataacaacatatgtggattatttccacacgatgtataaggcacaatactttcagcctttcgacccctacctggactgcattgtgctcttccaccccggtcttggacaccctgccagctcccacgagtgggaggaaacattgcctctgctgctggagaccaaggttccaatcatcaccactggctatacacagtgggatatggagagagatatcaactgggtgcgtgagaagtgtgccggcgaatttgacattctactcgagcccggtgagaatatattccgtagtctgcggtgggatcttaatgaccttgacccacatgacatttcttgtggcaactggggtttgtgggcgttcagagggaagaggtatgatctttgtcctattcaaggttgctgatggctaatgagttcatagatatgaggcgacgtttaaagcttag

SEQ ID NO: 25151 - DNA, 1372 bp, Emericella nidulans
atggccggcggcgagtcgaaagccgaatgcgaccaaagggtcgccaggctctggtcgcgccttggcgcgaaaaagaaggagcatctggactacaatgggttgaagaagggcttaaggaagatcgatcaccgtgagctgctccatgacctcatccatcccgtgctcttaatggcacctgactcgcagtaatggtggtgctaactttcgtgccgccattcagctctgaagaatgccgatactatgctgcaggctatcttccggtcggtagacaccaacggggatgggattatagagtactctggtaagatcacacgtcatcggatcgtgacgagtcctcgacactcgagcacctgccgccaactggtgatttgatcaacctaattattcctagaattccgggccttcgtcgatcgcgctgagcaggagctttggcaacttttcaaaagtattgatcgcaatcagaatggggaaatcgacaaaagcgagctcaaagccgctttctccaagtccggcgtcacggtttcaaattctaaactcgatgagttcttcgcggacgtagatacgaaccaggacggcgttatcacttatccagagtggaggtaagtgcattccactaggcgttgcttgtgattatttactaattattcgtgtcatgcagggactttcttctctttttaaccggttactcctcctccgacctgcatgccgttctatcatattacagtgccacgggaaatctaaacccggaaaggagatgtccacatcaacgatctgcagggtttaggtacagaccactcgtttcttagacattatattttggccatcagaacatttttgcacaagtttttcccagcacatattttgacagcccttctctcgtcagcccatgcggaaaccccgcagtccgcctttgcgagaggtcccccagtccgtgacggcgaattagaattggagtggttgcccatacccaggaccgtcgccatgtggatgtcctttcgatattatgaacagaagttgaccgagaatactcctcaactaggttattttattgctggtggtattgcaggcgccgtatcaaggacagccactgcgccattggaccgtctgaaagtgtatctcattgcgaagaccggatcgccatctcctgtcgtcaccgccgctaaagatggggctccattaaaagcagccgggagggcttcgagatccctgatggatgcgttgaacgagctatggaaagctgggggcattcgcagtctcttcgctggtacgtgaggttttcatagcaataagaactaaactgactggtgaaggcaacggattgaatgttgtcaaagtcatgcctgaatcagccattaaatttggcgcttatgag

SEQ ID NO: 25152 - DNA, 357 bp, Emericella nidulans
gtcggtcttaatatgtacaactcgccttctaaccagactgttggttctgccctgctgctcgacacttttttcgtcaacacacccactggggtcgtgaccgtctggggcagcgacagcattcccgttggcgccggtacgctcgtcctagataatgtcgacttcagcggcgctaccaccggtgttgctggggtctacggcactgctatccttgccggtggctctgttgaagacaactgggttcagggaggtatctaccgccccgtgtccggaaacacgcgctccggagaccccacggccgacgctgaagccgaggatgatgaacggatacataccagcatcgagaccgattacgagtga

SEQ ID NO: 25153 - DNA, 396 bp, Emericella nidulans
aaggatcgtggtattacaagagatcttaaatggggtgttcccgttcccttggatggatttgataacaaggtgctttacgtgtggtttgaagcgtgcattggttatccatcaattactgcaaactatacgcctgactgggaactctggtggcgcaatcctgaggatgtccagctttatcagttcttgggcaaagacaacgtgccctttcacagcgtgattttccccggatgtcagctgggaaccaaggagaaatggactatgctccaccatttgaataccgccgagtacttgaactacgagggtggcaagttcagtaaatctcgcggaattggtgtctttggcaacaacgccaaagagactggcgtcgccccgacgtgtggcgttactatcttttaa

SEQ ID NO: 25154 - DNA, 1388 bp, Emericella nidulans
agcctcagaaaatgattatgtcaacgctgtctgctgttgaccctgctttcaacgggcgtaccctagcagagctggtgagaatcgagccaatcttgatcgcgtgcgaccttctaaaaggccttggtgacagtgaggatgagaagggagcaaaggtatgttaacccagtgttctgtaaaaccaactatggggcatgtctctgatgaaaatggcagttccaacaagccctacgcattctagcctctctcgtgccacggaaatccgcatatgcgtcgaaaaagtcaaatttggtaggccacttcattgaggagcatgtccttggaataattacccaatttgcgcacgccataaatgatttccagataagacagccgctcgtggagaagaaaaggaacatcatggctatcggcgcgatgatcaaagttgcgcccgggcatgtcagtagtgctttgcctcaggtctgtttttcgaccccgccacgactagactgaccagacatactgaacccgagcagatatgtgcttgcctgcggtcggcattagagatcaaagaactgtgcaataatgccttccgggtatggggtgtgttagtgagctctctgcataaagaagaggtcgagcctcttctcgaccagacactcgctatcgtcatcaagcattgggtgacctttactgaggataccaggaagtttgcttacgagctggttgagcatatcttggagtctcaccaggaacttctgcgagatatctttggtatcatgccgtccttggcttctatacctgtactctctcggttcgaggctagtattaatgagttgaaagggacactggatgttcggagtcatttcatggctttcgcccgtcgttgcctgagtgaaaatgccactgtcgttgagcaggccttgacggaacttgtctcgtaccttgagagacacgaggagttcgtccacagatctgttctcagcgagcagccagatccagctgtcgcacatttagttaggtctctacttgactgctgcgtgaagttcaacattacgtcggaatccatcaccttgctttgcgctcgctgtcttggccatatcggctgcctagatccaaatcgggttgacacaatcaaagagaagaaagggatccttgtattgtcgaattttgataagatggaggagacattcgacttcgtactttttttcttccaacacgtgttggttgacgcctttttatcagcgttcaataccagggcttaaggtttcctagcatatgccatgcagaatttactgatgttctgcaacctgaactccgccgttacccagcgttcacgcggtgtcccagcttgctagaaataccaacggtggttagagctttccgaaccttgcgaattacctgcccccttt

SEQ ID NO: 25155 - DNA, 931 bp, Emericella nidulans
acctcgctagacctcgttagtaacacatccaccattgtatgtcccacgagcaatcctcacgccgctgagccgcagagtgactggattgggtgtggctagaacgagtgctcctgctgtcccgagtacctgaacaagatggccgacaaagctgctgttgaagaagtccccgtgggaacgagcgcgaaacccagcttcggcgctcgcgtcaaggcccatttcaagaaatggtggtgggcgcacctcatcgcttttattgtggtggtcttggtcgttgtgcttccagtgtaagtgtgcactactccaagtctcaattgccctcggtattgaccatgtcttgcagcgtctatgtcggctacccgaacatcgcccagcacgatatcgatgactcgacgcttaccgtcgagtccatgcaaatcagcgatccttcccccgatgggttccatcttacccagagacaggttattggcagcgacagcatgttccaccccaagatcttcgagttcgatgccgacgtcagtcttctcggctcgcccgtgtttgcaacggtcaaggtccctcaagtcaaggccgatgacggcgccgtggtgaatgttgaccagtggctggacttgactgatgcgggggcttttggggatttcgcgacggcggtcatgatgagtgaggagttccacttgaacgtttatggcgagcctcgcttgaagcagggaggcctgccgacaattgacgtcgactacaataagacggtcactatgaagggtgagctggagttaaccgatttttgctggtggtcatgtactgaatacgcacagggctcaacaagctcgacggcttcgacatcaagtctctcgaaatggtcgacgaccgtaacgacggcaacaacgccgtcggctccgtctacattcccaacccctccgtgttgcagttggacatg

SEQ ID NO: 25156 - DNA, 401 bp, Emericella nidulans
atggctggcactagaaactatgactttctggtaagtgttgctagatgagttattacaacgtcacccgcgctgagactaatttgccacagatcaaattgctgttgataggagactctggtgttggaaagtcgtgctgccttctgcgcttcagtgaggattcgttcacaccatcgtttatcacgacgattggtatcgacttcaagattcggactattgaattagatggtaaacgggtaaagcttcagatatgggacacagctgggcaggagcgatttagaacaatcaccacggcttattacaggggtgcgatgggtattcttcttgtttacgatgtcaccgacgagcgttcattccagagtaaaataaccccatcttacgttctcccatacaccggtcgctaa

SEQ ID NO: 25157 - DNA, 912 bp, Emericella nidulans
actgcggtggctggaggcacgaatatgatttttacccctgatgtacatactggcctggataaggggtttgttctttttcgaacaggcaactgcaaggcttttgacgatgcatcagatggctattgccgtgcggaaggagtcggtaccgtcttcatcaaacgtcttgaggatgcattagcagaaaatgatcctattctggccactatcctcgacatcaaaacaaaccactcggccatgtcggactcaatgacacggccgtttaagcctgcgcagattgacaacatgtcggctttattgagtacagccggaatcagcccgcttgaccttagctatatcgaaatgcacggtaccgggacgcaggtgggtgacgccgtcgaaatggagtcggttctgagtctctttgctccggacgagacatttcgaccccgagataaaccgttgtacgtgggatctgccaaagcgaacattggccatggagaaggagtttccggcgtcaccagtctcatcaaggtcctactgatgatgaaaaacgacaccattcctcctcactgtggcattaaaccgggaagccgaatcaaccggaactatccagaccttccagctcgcaatgtgcatattgcttttgagccaaaaccgtggcctcggacagatacacctcgacgtgtgctcatcaacaactttagtgccgctggagggaacaccgctgtcctggttgaggacgctcctgttcgtgatcccgtaactgcatcagatccccgaactagccacattgttactgtttctggccacgttgggaagtccctcaagctgaacttggagaaattgcgggatcatttggtgaagcggccggaaatcaatccttcggagctctcatatacgaccactgcccggcgatggcaccaccctcatcgg

SEQ ID NO: 25158 - DNA, 663 bp, Emericella nidulans
agggatctctatctctgggcgtctacgatatttgtctcccgtgcgttctcagagaaagtgctttctggcgtaattccagagcacgagatgcccgagaacacctctgttctccttccgttcatcgacattttgaaccaccggccactcgctaaagttgaatggcgcgccggtctacagaacgtcgactttgtcgtactggaagacgttagtgtaaacgaagagattgccaacaattacggcccacgcaataacgagcagcgtacgtgtaaccgtacattatgcgcatcaaatgagctgaccaaaacaaaacagtgatgatgaattacggcttctgcctcgccaacaacccatgcgactatcgcaccgtcagtctccgcgcaccaccaggcagccctctccaattcgcccgcgagcagcagaaacagctcttccccaactccagcaagaatgacatagaggaccccttctacgtcttcaatgtcttctatccccttctagccccagacatccccatggagcactcagtcttctccccagccctcttcaacgccatctcagttctatcagcaaaccagcgcgaactcgaaaaccttgagatctccgagcacgcgatccagatttccaacacatacgggaactctcgcgcagccctctccgcactaa

SEQ ID NO: 25159 - DNA, 545 bp, Emericella nidulans
aagaatacattaaagtcgcctacaagctgtgggaatcatcctggcggtccgacgccgtcatcctcgacaagcagcgccgcgtatacacagagccctcgcgcgtacgggaaatcaaccacgtcggcaagtattttaacgtccccggtcctcatctctgccagccttctccacaacgtacacccgtgatcctgcaagcgggaacctcaaaggcaggcaagaccttcgcggcgcagcacgcggaagcgatcttcgtcgcaggacacagcccgagcgtcgtcgcaaagaatgtcgccgagatcagagagcttgcgaagtcgcaatacggacgcgatccgtcctcgataaaattcctggccctactctgcccggttctgggaaagacagaggaggaagcgaaggagaagtttgcatactaccgcagtctgggttccattgatggtgcgctagcactattcggcgggtggacggggatcaacctcgacgtttacggcgacgacgaggaactgcgatctgtgccgagcaatgcaaatccgtctgccgtcgag

SEQ ID NO: 25160 - DNA, 767 bp, Emericella nidulans
ggccaaggccgatgctgagaagaagctggaagatatccggcaggaaaacaactttttgaagggaggaaaggcccgccaaagggaacgagagagccatggtaaacgctacgaggttgaacagaacgactataagaaggaccgtttgatcaacgagaaccaaagtaggctagccccgtgtggtttgagctttcggtgctaacgactttctagagttggaatcaacaaacctagcacttcaaaataaagtggatcttcttgagcgcaagagcgatattcaagaagcagctttgaaaaagcttagtaaggagcgtgatatggccgtctctcagctgggtgtggcatacctcgagtctcaggacctcaagagtgaaaatgaagtcctacgggaggagatcgctgagcttaaagctcggtttgcgcagctcttgcccggctcgaagacaagggacaacactgcacaatctgaacaaaacactgccagcgatgccagcgcagaagcagatgatagccaagtggatacccgacgaagcaccaaagacgccaccgctaaaagcacgcggtcgagatcaaagagtcgcaaagaagataccaggactagagtgtcaagccaggttgacagagagatctctcgtcttgagagggaacgtgccgacgaagaactcttctcgatcgaactgccacgagtgagggaatcctccatgtccaagaagcagaaagtaaatcgacctcggtcaaccagcgcacaaaccaaaaagcagccaaatacg

SEQ ID NO: 25161 - DNA, 435 bp, Emericella nidulans
atgcggccggaccgccagcaccgctccagcgctcaagcgggcgcccgctggcgctctcgcgccagcagaggtatgagcttgagcatgaacaagggcccttggcatgatccccaagaggagattcctctcgagccgacaatgcccatgtcaatgcgcatgacgcgccgctctctctttatgctctccgaatggccgggcgccgactcgcgcgaggagattctcacggattcgggaccgatgcgcctgaaccgccagtcgatgctgttgctttcagacgtgcaaaagcaggttcttgaggcgcaggttgccatgcccacacccaaggtcgggtactttagaatctacggctacgcaactgggtgggatcttgtcctgcttgtgctaggagctgtctgtgcagttggcgggggagcagcgttgccgctttttactgta

SEQ ID NO: 25162 - DNA, 471 bp, Emericella nidulans
atggtgcagatcatcaaagcccaagaagagtctaacatccagcgctgctggacctacctctctctcgcgttcaacatgtgccaaacgctggggcttcaccggaatgcaaccaccctcaccgatcccgctccgctggcgaactccaagcgccacgccttctgggccctgtatacgattgacaagaacgtttcgcttaacatcggtgtgacctcgcactttcaggaccacgatattgacacggcgctgtatactccgtcgacggatgaaaaacagcaggcatgggatttgatcaatctcatgaccgttgagttcgcaactatccagggaaacgtctatgacagactctatttagtttccgcgatgcgaatgactgagcaggagaagatggaaagcattcggggtctttcaacggacctcatgcccgtcggggtcgaatacttgcggaccgcaatacccccaagttacaaatag

SEQ ID NO: 25163 - DNA, 514 bp, Emericella nidulans
  unsure (1)..(514): unsure at all n locations
ggacacctcgcccgccgatgaggatgccaccctccagtcggtgcgtcaggatatgcaacgacagttaaagcgacagaaagagcagtatctggataagctaagggaatcggaagcgtccccgagtcaaggcatcgacgaattgcggtctgaaaaggcccgcatggaggatgctcttcgagtagcaaaagaagaatacgaagagcaacttcgaaagcaaaaagaagcgtttgagacgcatatgaaggcacttggtcacccagtgccaagaatctacgagaatggttacccaaagttgtcccccagggagctagaggttgcgcgctcagttttccgacactggtctcagcaaaattatgtccgcatggccgaaaaggttttgcagcatgcttcgctgctaaaggaggcccaggtcatgagccatataatggacaagaacgtcgtcttccagttcgcgattgttgaccatggacataacatggcatcgtcgtacgatcntcttctcaatggcatttcg

SEQ ID NO: 25164 - DNA, 276 bp, Emericella nidulans
  unsure (1)..(276): unsure at all n locations
ggattgctattccccttagtctcgagtgggacttgcactctacgggaagctcacatcgtttcctcgtgatcggcgcgtctctttccggtcctacattcggcggcggcactgctaagatgtgtgaccttgccgccgaacaatccatgaagtcattagaaagcacccgtgcggggaatactttattcgagtcttttagagaagagtacgccttccgtacaagtcatngatgctcttgtcttcatttctgcggtccgtgcgccgaccagcgaggattca

SEQ ID NO: 25165 - DNA, 444 bp, Emericella nidulans
ggatccagctaggtggcgtgacattcaccggctcgatcgtagcgttcttgaaactcgctggccgcatgtcttccaagccgctaattcttcccggtcggcatctgctgaactcgactttactcggaactaatgtagccactatgggcgcatttgtatctatggctcccgccaacccgatgatcgccgctacatgtcttggggcgaataccgcactgagcttcataaaaagctacaccacgactgcggccattggtggcgcagatatgcgtacgtaccttgatccctttttttgaaacctgaacccatctgataaattcagcccgtgttatcacggtcctcaatgcgtactcaggcttcgccttggttgcggaaggctttatgctcgacaacccactgctcaccagtgtgggatctcttattggcgtgagcgggttcgatttgtca

SEQ ID NO: 25166 - DNA, 283 bp, Emericella nidulans
ctacgtgattgcccctaaataccgagctgttcttgccgccctctggcagctaccggaaattcatcattggtggcttccggacggcagagattatccgtcaatcatccgtgaggtgcgcgaaatgaccgaggagcgaacaactaaccctcgagataacttccgggagagcgtgcgcgatatgaaagccgtatttgggaaactcaaccttgatgaaactgagagcgaagctagcccggcttctgtaagcacggatgtcccgcagtcaacgggttcaaatcagtag

SEQ ID NO: 25167 - DNA, 786 bp, Emericella nidulans
atgacgttcacacacgattcctacactattgcgtggatatgcgccttaccgatagagttggcggcggcaaagatattcctggacgaagttcatcctcgacttcatcaaccaaaatcggatctcaatgtctacactcttgggagtattggcggccataatatagtggtggtctgtctccctgcgggtgtctatgggacaacttcggctactgccgcggtggcatacttgaagtctacctacccgaatatccagttcgccttgacggtcggcatcggcggcggggtcccattaggaaaacctgatatacgtctgggcgatattgtggtcagcaagccatctgataccttcggcggcgtcattcagtatgattatggcaaaacggtgggcaatggacacttttaccatacaggatcgctcaacaagcctccgccgatactgctcaagacgatcgcccagatggagagtgattatatgctcggcaaaatctcactttgcaatatcatggccagcagcctgcataaagaggaagtgcagacacagtttccgcgaccatcaaaagatcagctcttccaatcaacttacgaccacgttgggaacaagtccgactgctcggcttgtgatacgagcgagctagtggatcgccctgaacgcacgacagaagagcctcaggtccactatggtctaatcgcttctggaaatcaggtaatgaaagatgcgagaacacgcgtctctgtcgctcaaggccggaacattctgtgttttaacatggcagctgcaggtctcatg

SEQ ID NO: 25168 - DNA, 1101 bp, Emericella nidulans
atgtctctacctaaaccctctatatcgccctctatctcctcatcaccctcaaaccagtcccttcgccgtccgttgtcccgtccacacagcatcgaccaagccgcgcatccgcagacgcaaccgcagtctatcgatcactatgagcaggcaagcttgaacaccggcgcaaccgtcgactcacacctcgcagaacacaatgaccaaatttaccacgagaccgcgccttcatttgcatcgcaaatgctctcccagccattcttcaccctgatcgaagacacccacacctctgaatactatcacccaacagtccactacatcttttcggacgacgacacagacatcgtaacggaagctgcgctgcgctcgcttgaatctgagcaggatgcccttccgaatccaagtattaagggcaagtcaaaagcggtgcaccggcatccttcaagggtgggagagcacgagtcagagaccccatacgaggacgataatccggcaaggaaggaatctctccttccggatccaatacccggcgtacgcgataattatataatcctcgatatcgatcatgtaccgtccagacaggagaacgaatatcctgcaggaatgtctcctggaacgcacccgcaagaccagccgcaaggcccgacaccagatatagccaacccactaatcactgaacagcagctacctccgcaaggtcaattcagaatcacgtccgcacatagcctctcaccatcctggcaaatcctgaacactcaactccttccggcaccgacattcgaaaattcttctaagaaaccgctgaacggcggcctcatgctccaaatccagggaacatctggcctaccatttggtatacttgacagggacaaggaagcaagcggtcagcggttggaggacatgatggatcagtttgcgaggcgaatggaagaactgagaatggttatcgagaatggagagcggggaatggcggttgggagagaagggccagtacaagagaccagcctgctcggagagccgagtgcccgggatatagcggacgttgcccctgtggtagagagtgaagaagtccaaaagacagaagctgtccctggggaccagtag

SEQ ID NO: 25169 - DNA, 488 bp, Emericella nidulans
ctttagggcccgcgggcgcaattgcctcaaatgtcaaacacaatctttcctctagcacaagcatagtcgacatccgtccccatgagtggggcacaacactcaccacagacccatgggccctctcgaacaaaggctcctacacgcgcataatagcagcggactgctactggatgcggtcacaacatgagaacctcgtgcgtacaatgaaatggtttcttgcgccagagggcaaaatctgggtggttgctggcttccatacaggtagagagattgtggcggggtttttcgagactgcggttagcctaggcttgaagatcgagagcatatacgagcgggacttgaactcgagtgctgaagagggaggcgaggttcggagggcgtgggttagtttcagagagggcgagggcccagagaatagacggaggtggtgcgttgtggccgtgctagggcatgctcctgctgctgcagggactggagctgatgcgtag

SEQ ID NO: 25170 - DNA, 576 bp, Emericella nidulans
cgcggtcggaaagcggccgctgggcccgatgaactagtcgagatgcgtttctacattcccggaactgcggtcaagacggagaatggtattaaaggggagaacgcggacgagaagaacggaggagaaggcgaggagaacggcgaggagcagaatgctgccaatctgttctacgagttgctcatggaaaaggcagagattggagatgtggctggagacacatttgctactttcctggatgttctccaccttacacccaggtatgttttatgcagcagctttgtctccgaatggtactaataatctgctcagaggtcggttcgacatcgatatgtacgaatcttccttccgattgcgcggaaagacatacgactacaagattcaatattcctccattaagaaattctttctactccccaaaaatgacgatacacacactctcattgtccttggtcttgagcctcccctccgtcaagggcagacccgctaccctttcctggtaatgcaactgaaattagatgaagagatcagcctcgagcttaacatgacagagttcgttgtcacggctatttttaaatg

SEQ ID NO: 25171 - DNA, 432 bp, Emericella nidulans
cagtttgcctgcgtgaaagaaatgctcggtctccccgacgtcgccctgcatttccaaactgctggagtaacggtcctcctctacgatccgcgctcaaccggcctatcggacggtacaccgcgcaacgaaatcgaccccgtcaaacaagcagccgactactccgacgccttgacctttctttcaacgcaggcttcagtatatccatctcagctcttcttctggggcatgtcattctccgccgtcgtcgccctctgcgccgcgacaacggacaaacgaatccgcggcgtcctcgccatcgcgcctctgacagacctcacttacaagcccgagcatagacgagccaaggtgctgcagcagtgtatgcaggaccgtgcgtcacagtcagctggtaacgagccgtactatcttccgctgctaaacgagcaaccgtaa

SEQ ID NO: 25172 - DNA, 466 bp, Emericella nidulans
gtcaaacttctatgcggtcactcatccctctcaaccaaactactgcgctgcagcaggaggcgatacatttggcatggatcatgacgatttcctgcgaattccggccaatgtttccactgtcgtagatctcctagataccaagtacatcgcctgggctgagtaccaggaacacatgccctaccccggctttgaaggattcaactattcaaaccaagagacctacgccgacgattatgtgcgaaagcacaacccgcttatcttgtacgactctgtcgctgagaatgacatgcgccggcgtcagatcaagaactttacacatttcgacgatgatctagccagcgagaagcttccccaatgggccttctttacgcccaacatgaccaatgacgcccatgacaccaacataaccttcgctgctaattggcttcgtggctggatttcgcctctgctcgagaacgactacttc

SEQ ID NO: 25173 - DNA, 850 bp, Emericella nidulans
gttacaaaagcaggagttcatacaaacaaaatctatgtaggggagtccagctacgggcggtcgttcctaatgagtgaggaaggatgcacggggcctgactgcttcttcgaaggggaccggctcaactctccagcagccaagggcgtctgtacagacaccgggggctacatctccaatgccgagattgaccagattgcgttcctcggcgacaatgtgcaaacctggcacgatggggcctcgaactcggatatcatggtgtaataatggtacgtacccacaggcttggtgtgcaacaacggatcttctgctgataaagctcagacactcagtgggtggcatatatgtccccgacaacaaaaaggaccaggcgcattcactggaggggctataattttgcggggacgattgattgggctgtggacctgcagtcgtatacggatgacgagtactacgactacaaaacgggagaggggggcgaggatcttctacccccgttgcccgatgacccagaatgcactgccacatatgatggtttagaaggcatcgaaaaggactttggtcgcatccatgagctctgcatcggtcaatatatcctcgaagccctccagaagaacttcaccgcgtcgctaaccgcgtacgacgcgttgatggaagatggctacgacggcaagttcaaagcctacgccaaagccgtggtctccgcgtccaacaaggtcgtcgaggactttatgtacaagaacggcgagaactactttagctgcattgtcacggagacgatcgagtgctgtgagttgtgcgaggactcctatgccaccaaccacccagagatcaactgccggtactgcgagga

SEQ ID NO: 25174 - DNA, 219 bp, Emericella nidulans
acgggagacggagcctccgttaaagtttaccataagaacattgctggtcaacgtatgcataaccagagggctactcgccagcatgagttcccgaacaagaatagtggacccaaagattttgttaatcttggggagtgcggagatccggtattatttgaagaggaaccgacaagccgccacaattgagctttatgggttgatttaaaaggtcaatcgcga

SEQ ID NO: 25175 - DNA, 381 bp, Emericella nidulans
atactacaagcgtgtgcgcgcctattgcgcgctgagataaagggtactcccatatttgcgatgctatcaatagaccgcggctaatatatgtatctctggatagctttcgccgaatgcgcggtcaaccgcacggtcacagcaacgtgggtgtgccgggcgcagcgcctcgcgatgaattcttgtatgattgagcatgcgaaaccagaggaggaggatcgggcgcgggaagagtggtttgcttcgcacgaagagcggcggcgagcgaaactggaggaacaggaacgggtagagaagaggagggaggaggttattcgcatgatgagggaggatgagcagcggaaatcggaggcaaaggcgaaggctgctgggaagtcaagctaa

SEQ ID NO: 25176 - DNA, 787 bp, Emericella nidulans
ttgcgccaactgcttggcactccggcggataccaacgtcatctttgaacgctattcggatagtgccggttcttatgtccagctagacagcaacaacccggcagtttttaaacagctttatcgggctgcgaaagccaagctgaagctgcgaatcaaagctactgtcgtccagcctacgagccaaccagcagtatccgagagcattagcgaaccaagatacagctacctggaaaccgttttgagtcaccctattcctgagaaagcagttgatacgaacgacagttctaccacattagctacaactcttccagtaagtgcggaacggaccacattgttcggctctcaagaccccttctgctcggccaccgaaatggaaggatcgaaatccgtcagccacagagaatttatcttgggccctgacagcccgagtgctcccgtgatctctcacacctccactgctggtgtgttctgcatcgactgcgatcactgtggtcgtcctattccaaatgaacactaccattgcaatacctgttccgacggcgactatgacctctgtccgcagtgcattgactcgggcgttaactgccagggcgaggaccattggctggttagacgttttgtaaaggacggtatcatcaccaacagcaccactaagactctcgcatcacataaaattcaaactcgcgatgagcataaaccccggtcggagccagttttggaaagtgctcccggattagctgaaaatatcgcaatcaaccgcgaacgtgtgtgtaacaactgcctcaaag

SEQ ID NO: 25177 - DNA, 429 bp, Emericella nidulans
cagttccctagtgtgacaagtactatggacgaaaagcaagaactgggactctcggatgtcagttctctatcgcccgccccagagggcttgggccagtcgcagcaagcgttgacagtgccgccactacagcccctagatgaaccccagtcgaccaagggcacgctagaatcattcgcaattgccacctatcggtggctgcaggagacgtttcctacggtgacggcggtagtctcacatatgcctttctcacttgttccgtttgcgtttgctatgttcatcctcgtacaagctctggccactaagggttggattgaggtgtttgcgcacgggtgggaccactgggtaaaccgaacaggtacagtcggggcaattggagggatgggatttctttccgtcatactttgcaatgagagcatctttgagctctga

SEQ ID NO: 25178 - DNA, 2233 bp, Emericella nidulans
agcccattgccatcgtcggcctgggctgtcgctttcccggcggcgcagacaccccagaaaagctgtggcagctggcatacgaaggtcgacagtgctgggaggaggtcccctcgaaccggtacaactggcatgccttccatcatccagatccagaagcaagagggacgcataacgcccggggtggcttttttctccagcaagaccctgcagtcttcgatgccaatttcttcgcgatttccgccgccgaggcagccgccatcgacccacagcagaggctgctcctagaagtttcatacgaggctctagaaaatgcagggatgccgctggaagcaatccgggggacccaaacaggcgtatatgttgcgttggttagtcgcgactacgaccgcatgatctacaaggatccgagccagatcccgaagtaccatctaactgggtgcggtgatgcaactgcctgcggacgcatctcgtatacctttgacctgaaagggccgtgcgtgagcatggacaccggctgctcgggaagtatggtcgctttgcacctggcctgtcaggctttaagattgggcgagaccaatgcggccatcgtggcagggacgaacctgttactgggtccagatatgaccatcgcgatgagcgctcttcagtaagtccctctcagctttgtcctgaattgtctatatcgcggaagactctggctgaccattgattcagcatgataaatgagaatggccggtgctacccattcgacagtcgtggcgctgggtatgggcgggctgaaggtgttgctgcattggtgctaaagaggcaggcagacgctgtaagagacggtgatcccattcgagctgtgattcgaaatacgggcatcaatcaagacggcaagacaaatggcatcatgcttcccagtttcgaggctcagcagcaattgacaagcacgctgtatcgccaggcgggacttgacccgaactatgtgtgctatatagaagcccacgggacagggacgcaagccggcgatgctgcagaggtgacttcgatcaaacaggtgttcgcaagtgcggcacggacaagagagcgcccgcttttcctgggctcgatcaaggcaaatttgggacattcagagagcacgagcggtttggccggtgtaatcaagacggtcatagccctagaaaacgctactatcccgccactggccgcactggagactcttaagccggacctgcatagtctgctggagtcgactaagatcatcgtatgtcctccgcttgtataaagcgccccccgggcctagctaatattgtgctgtcttcagattccgtcaaagccggtttcatggccccatgaagggactcgtctggcctctgtgaatagctttggctttggagggacgaatgcccatgttatcctggaatcggcaccatcattcgagttgcagacccagcctactaacggattccacacagactcggactgcatctgcgtagatactgactcggacagtgcggcaaacggtgtggtgacgccgtcaagtgattacgagcatggtcccccagagccaaatgaagacggccggcctcagcttttcatcgtctccgccaaatcaagggtgtcattagaggcagcaatctacaatgtaagggactgggtctcgaggcacggagcaacgtatataaaaaggcaagagctagtcaaaacactctgccaccgacggtcgattttcaattggcgtgctagcattgttgcgtcttcgcagccgggcatcctgtcggcgctggagaagcctcacaccactaagtcctggacgaaggtccaggttgtcttcctcttcaccggccagggtgctcagtacgcgaggatgggaaaggaacttgtaggattagatagcgtcttttcccactcgcttgatcagtctcaaacaatcctcaccgagcttggagcttcctggcgccttttggaggaacttcttcgcgaagagtccgcgtccagcatcaactcgagcgagctctcacagccagcaacgacagcgatccaaatagcccttgtcgacatgctggccgagatgaatgtccgcccgagtgccgtgctcgggcattccagcggcgaggttgccgcagcttatgcagctggcatcctagggcgaagggaggcattgacaattgcctatcataaaggctttgtggcgggctggtgcaggaacgccatctcatctcaaggagcgatgttggcggttgggctg

SEQ ID NO: 25179 - DNA, 405 bp, Emericella nidulans
agcggaatggcagacggctgcaccaagttccacaaggtagaaaaggacgagggctgccagcagattgcggatgattacggcatcgctctctccaacttttacgcctggaaccctgccgttggggacgactgcatgggcctccagtacgactactatgtatgtgtgggcaaggcagccacaacttcagcaccagcgactactacgtcgagtccgacggtctcgaccagtgctactccaaccccaacgcagagcggaatgacagacggctgcaccgagttccacaaggttgaaaaggacaagggctgccagcagattgcggatgattacggcatcgctctctccaacttttacgcctggaaccctgccgttggggacgactgcatgggcctccagtacgactactac

SEQ ID NO: 25180 - DNA, 523 bp, Emericella nidulans
gcgaagactcccaagtccttgttgactccttctcttgttgcttcctcggggatcatgggagcaacccagaggggctatattcacctatctcaggaacggcttaatgatgtgcaatcacgagacccgcaagagaatgtgcgaaacttcctcaacttccaacggctcagtgctcttcagccgcattacagaccctgccactcctcctgcagagcatgatgcatccatggagaactcacctactacttcacaaaaaggaactccaactctggcggaaaatctccgccaccttccaaagctgcggatacccagccttcaagccccgaccgaaaccactttctctccaggctactcagcgcagcgtactattaccccctctggcctccgcaagtcacggcagttttccactattaaccgaaaggagtcaccgaacccgcacagcgggcttctatcgccctcggacttctatcgtgtgaccctcactacgcgcagggcaccccgttgttcagcggtgacgcacccttga

SEQ ID NO: 25181 - DNA, 324 bp, Emericella nidulans
acgatgagctcgacgaactttgccgctgctcagcagcgcgttctcgaacgccgacggaaacgcgagaccgaagcccagagccgtctcgcagaacaacaacggacctctatcgtaaatcatcccgccgtgcaacgacttccttatccactaaatacagtgtcgcgatcaggactttcaatatgggatgcaatcaaaggccgcgaggggacgaggcctgcatttcgtgttggtcaggttgacgcggaactgttggacgaggagttacttggcctgctgaaggggcaagtcggagatgcgctcacatactttggggtaggcttctaa

SEQ ID NO: 25182 - DNA, 347 bp, Emericella nidulans
agagcttgccactaccgacccgaagaaagcgaaagaacatgcagagactgccgtcaaactcttgcacaaagctcctcaatatgcaggggccaaaaaattcatggcgcgacagttgccgttcgatatattcgtcgtccgcaagatcgccaaatgggaagctcgagccaaagagtggaacgtgccgttgatagacgccgtgggagttgatcctgtggaggagatgattttcctatggaacgggcatagccggatgacacaggcgcagcttgaagagtccttaaaaagactatcatggtccgagagcgatgcgaacaaaacatggtctcgtgaggggccccaagagaagg

SEQ ID NO: 25183 - DNA, 520 bp, Emericella nidulans
atcttatacgacttgagggatgtcgacccaaccgtctttgctgccttcattccagacgatcttcccctgctagccgaatattggctcagactgatagacttgagtaagctgttggggtccgtagtgacactgagctacaaagcagttcgcccgagaccctcctctgaacaaatcaatgctcttgagacagagatcctccgttataagcctccagagcaaggcgctccgagctggagcagaaccactcggttttatctgcatcatctacaactccattacgagtgcgcaagcaacgttccttgaaccagagaacccagggccttctaacattctcagagcaatccttatcgttctctatcggccgtgtctgacggaaccttcggatgacctctcctctacaaaccagcagtggcaggaaagtatctggcacaaagctgactccgcagcctcccacacaaatgacattctcgaggccatggcccaagaaggcctactcgaatatgcgctgccaatgacgtga

SEQ ID NO: 25184 - DNA, 803 bp, Emericella nidulans
tgcttctctccacaaccgtcacctctttcacggttccgacgtcagatataaccattcgccatggcaacctcatcagatccgcctctgaacccgtagatctcgaaggcagagatctggaaaagcgtcgtggaggaggcggcagaggcggtagtggaggtgggagcagtggaggcggaagtggtggacgtggtggtggtggaggatccagctctagctcgagcaatcatccaggaacccgtccaggctcaacaagtaccaccagcaacactggaggtacatcgcgcggtggttctggaacacggccgacgtatggacgtggtggcggttactatggtggtggtgcgactgttccttatcaatcgggcattcggtcaccattaggtattgtgcccttcttcttgcctctcgctgccctggtggccttcttccctggcccctggctctacggggcacacatctatccttacggccacccttaccattacatcaacgacaccacgaacaagaacgaatcaatgccggttatctgcttgtgcgcggagtactcgacttgcggatgcgacgacaacaacaatagcacgtactatgaatcgctcttcaatggaacacaacctaaaaacggcagcattgtcagagttaccgacgtcaacggtacgcaaaccattgccatcaatgggaccctgcaaaacgggactacggcggacgaggatacggtagattcggccgctgccttgacggtaatacaggccagtgggtactgggtcatggctgccgtcgctttcagcgcggcgtatactctgtga

SEQ ID NO: 25185 - DNA, 513 bp, Emericella nidulans
gaagttgcagggacccaagtttacgaggcacgacgtgcggagtctctaaaaatcatgcacgagacgaacagcaaacgggagaaaattgatgagctattagatttcattaacgaacggctggcagagcttgaagaggagaaggacgaattgcggaatttccaagagaaggataaagagcgaaggtgcttggaatacacaatctactctcgcgagcagcaagaaattgctagctttttagacagcctcgaagaacagagacaaactggtgtcgaggatactgacattaatcgcgaccgtttcattcaaggagagaaggaaatggcccaggtcgatgcagagatcgccgagtgcaaacagcagattgaatttctcaaggttgataaagcacagctggaagacgaacgacgcgaggcgtctaaggcacttgctcaagtagaactacaagctaagtcgctgtcggataatcaggctgctgcccaagagtcaaaagcacgccatgacgaaagcttgaag

SEQ ID NO: 25186 - DNA, 716 bp, Emericella nidulans
gcgggattggcgctgggcgcagacatcgttctcgatgccaccggtgctgaaccttgtttgaacagcggcattcacgcattagcacctggaggaacgtttgtgcaggtgggcttggggcgcccaaatccttccctgccggtaggccagatctgcgacaaagaaattgtcttcaagggcagtttccgatatggcccaggagattataagaccgcgatcggtcttgtgagctcccaccgcatcaggcttgaaggtctcgtcacccacgaattttctttctcccaggcggaggaggctttccataatgtcgccagtcgcgcaggagtcaaaagcgtcatttacggaccaggggtagacgagcacgtggccagagccacattatcatagaccagtttaatagggctttcgcctaaaataaagtttcagcccgcttgtggcctagaacgagtagccggctgtagtgcaagaaattgcttggcctctaacttaaagacccgccccgttccaggacatgtcccagagccaatacagcccttggtctccgctgttgtcctgggtcggactaaactgatcattgctctgaatattggctatttcccactcggtctcgcaagagggcggccaggtatgagtccgtcctgggggttgggccacggtgtcgccaaggtgaccgtctctgccggcataccaatcagatgggagagtatcatttcccgaag

SEQ ID NO: 25187 - DNA, 522 bp, Emericella nidulans
attgctcccgcccttcctgttcttgccaagctcatttacatgcttgatgacgaggtcctcattgatgcatgctgggctatctcgtacctttccgatggtcccaatgagaagatccaagccgtcatcgaagccggcattccccgtcgccttgtagagctcttgatgcacgcctccacctctgttcagacccccgcccttcgttccgttggcaacatcgtcactggtgatgatgttcagacacaggttatcatcaattgcggggctcttcctgctcttctctccctccttagctcaacaaaagatggtatcaggaaagaagcttgttggaccattttcaacatcactgccggtaactccagtcagattcaatctgttatcgatgctggtatcatccccccgcttgtgcatctccttgccaacggtgactttaagactcgcagggaagcttgctgggctatatccaatgccacaatccggggggttgagaagcccgaccagacccgcttcccttgtactcagggg

SEQ ID NO: 25188 - DNA, 1246 bp, Emericella nidulans
gttggatgacttgcacgcagccattgagctactatcactaaccaagaggctgcatagaattggccgttatggaagcgcgatctgactatttttgctctctccctcgttgcagttctctgcgctacaacaagttccgtaatggcggcaggaactgtcacgctctcgagatactacagaaaaagcttcatgtccatcgccctccttacaggataccacctctgcggaactggaattgcggggatccttatcgttccgactgccagagtatggggcaagcgccacctctttgtgcttggacatacactcatggtggtgagctgcgtatgggctggagccagtgggttgaactaccagagtcttctctgggctcgtatctttcagggcgttgctctggctccgttcgaagctctaacaaatgctgttgtcgatgacttgttttacgtgcatcaacggggcaaaagaatggccttatccaacgttgcggtattcggagctgcattcctcacaccagtcgcagcgggtaagatcacaaaaactttaggttggaaatggacattttatctccttgctattttcacagcggcagccttgccgctcacgatattcttggtaccagagacagcctttagacgcccaaattacttagaactggattttcaggaccgtgacagaacagagagccgccagcacgccgaatttcgaaaagcccaggatgaggccgattcgcgagagccaaagcagtcatcagctagcaatggggagtcttcactagacgttgctagccaagagccgccgacgcaaaggagtatacttactaaggtctcctatgttcaaaccctgaaacttttcaacggaagaaagaccgacgaacattggtggaaacttctgctgcgtccattcccactgttcttccatcccgcagtactctgggtaagaccgtcaccgcatcgaagaatgctcgttctgacttgacaggcttgcttgatacaaggtgttatcattggatggacggtattcatcggcgtcactttggctgctatatttatgagtggtccgctttggttcgaagaggataagactggatacatgtacgcaggtgccttcattggtgccatggtgggactcgtgttgtcagggctgttgtccgattttatgaacaatatcatgatcaagttcaacaaggggagatacgaacccgaatttcgtatcctccttgtgatcttccaattgatcttctgcggcatcg

SEQ ID NO: 25189 - DNA, 223 bp, Emericella nidulans
tatcaatgccggatctgtttaaagcggtatagacgcagagagcatctccagcgccacaatggcacgcataccgcagaccggccacacccgtgcgccagctgcgacagtagcttccagcggaccgacgtgctcaagcgacacctgcggacgtgtcctggtagggtctcagatgcgagccagacgaccggacggaaacggtcctgtaccaggtgcattcggctga

SEQ ID NO: 25190 - DNA, 243 bp, Emericella nidulans
ctaactggagcagttgagtttataggatatatcggccgagcgatatcatctgcccagacacctgactggacgctggggccttatataatgcagagcgtgctgctgttggttgcacccgcgcttttcgccgcgagtatctacatgtacctgggtcgcatcatcgcgcttgtgcggggcgagaaattctcctttattcgcgtcagctggatgaccaagatcctagtattctatagtgtcacctaa

SEQ ID NO: 25191 - DNA, 1310 bp, Emericella nidulans
gcgtgtgtctcgatgttggtaattctaagcccgtctccctggtgtacgtcccagttttattctttggggagaaaaaaatctcattccaacctccatctcacctagcgccacatccttgcccaacagatcacagtacaagtcataccacgattcttgctggttttctctcacaggatattattccagctaccagctcaggactctaagcgctgcaccaaggatggagtaccttatccgcttcgctcaaacccatgaaaccttccgacaaccggaacttcaggcactggccaacttacacaatattgaacttgaaatccttcattatgaccagatagtaagtgtttgtcttctcgatttttccgaggtcacaaaagcgcttttcttagctgagtgcggggctatactgaaatacccctctcttaacactgggaaggataaaatcatgaactaatactttccagtctccgtactgcatcgtccggcttgcaaatgaagaaactgcgcgtattctcatttctcgcagcattctagcaagggacatcttcgagctctggggccacggtactacctatgaggccctgcatgccgacgtccgcaggcggacgcagcacctctggaagcaatacaagcaagcatccttcaaatttaacgtggaaagcttcgccggcaagcgtagctcggcccaaaagacagagatcatccagtcgttctcgtatttgggctttgagggtcccatctcaatgaaaaatgctgaggaagacttttgggtcatggagcagtactacgatcgcacgcataaccctaccgctgctactggtatgtcgcagcatccactgccgtccaagctggattcggctcctgtgaacatttacctggcgcgcaagcttgcggagagtagtcgtgaggtagtgaataagtatgatttaaagaagcgacgctatatcagtaccacatctatggatgcggagctgagcctgattactgccaatatggctaatgcggcgccgggaaaattattctatgatcccttcgtcggtacgggcagtttctgtgttgcagcggcgcatttcggagcaatcacgttaggctctgatattgatggacggagcttccgtgggaaggagatgcataagtggaagatgacgggagtacagttgaacttccagcagtacggtatcagcagcaaatttggcgattgtttcacttcagacttgaccaatacgccgttattgggcaagcagtttctagatgggattgtctgcgatacaccttatggtgttcgtcagggtctacgggtacttggatcctag

SEQ ID NO: 25192 - DNA, 414 bp, Emericella nidulans
atgtcttacattgaggaagaagaccagagatactgggacgaggttgctgctgtcaagaactggtggaaggactctcgatggaggtacaccaagcgcccttttactgctgagcagattgtggccaagcgtggaaacctgaagatcgagtacccctcaaacgtccaggcgaagaagctgtggggaatcctggagcgtaacttcaaggttggtctttcgactctgtcttggctatgtgccggcaacgtctgcagtactaacgtctcccagaacaaggaagctagtttcacctatggctgtcttgacccgacactggtcacccagatggccaagtacctcgacaccgtgtacgtctccgggtgggagagttcttctactgcctcgtgcaccgatgagccctctcccgatcttgcagac

SEQ ID NO: 25193 - DNA, 558 bp, Emericella nidulans
ttctccgtccgccatcctacgaacacacccaacttgaaggaattcatccagacacagctgaaaaccaacgggactctgcatgccccttcagaaacaaaaggccttgattttgggtcgcggacgccgaaaaacccttttggcactttgcccgccgaactcatctaccagatttgcttgtttctcccggggtcttcactcaaagccctcatccaggcatcaccctttatccgttttctgaccagcgatgactacttctggcgctgcttcattgagtccgatatgccgtggctgtggcaaacccagactgccacagacgctgaggaccaggcacagtcagagccggagaatctgtctgtctcccaggtgctaaggagcttggccacgagttcaggtctgagcctcaatcataaacaggtatacatgtggctcgatgaggttacggcgccgaagtacggcctcgaagacccgaccttgatgggcattgcgaatcgaaggaggatctggggcgcttgtgaggagttgtcgaggggctatcgcgcctgggcggcagcaggatga

SEQ ID NO: 25194 - DNA, 911 bp, Emericella nidulans
tgtccggtctcagtgccgcccacaccgtctacctcaacggtggaagtgttctcgttcttgacaagcaaggtatgtcgcagctgttgctgctgtcactacgctctgttatcatttccccgggcgaaagctgcagtcgtcgaggcaatacgcagtccatgaccagccgaggctaacattcaccagcattctttggtggcaactcaacaaaggccacgtccggtatcaacggtgctctcactcgcacccaggtcgacctcaatatccgagacagtgtcaagcaattctacgatgacacattgaaatccgcccgtgataaggctcgccctgatctcatcaaagtcctcacatacaagtccgctgctgccgtagagtggctgcaagatgtcttcaacctcgaccttacactggtttctcgtcttgggtaagtcgattctggagtctattcggtccagcattgtccgtttgctgactgtcctagtggccactcgcagccccgaacccaccgtggtcacgatgccaaattccctggtatggccatcacatatgctctcatgcagcgcctagaggagctctccgagtcggaccccgaccgcgttcagattatcaagaaggctcgtgttacggctgtcaacaaggacggcaatgctgtcactggtgtcacatttgaggtggacggtgagacgaagacggccgatggtgttgtcatcctggctactggtggttatgctgctgatttcggtgactcgtcgctccttaagaagcaccgccccgacacgtttggtctggccagcaccaacggtactcacgccactggtgacggccagaagatgttgatgtccatcggcgcccacggtattgatatggacaaagttcaagtccaccccaccggtcttgtcgacccaaagacccca

SEQ ID NO: 25195 - DNA, 409 bp, Emericella nidulans
agtcttgtgggccggggaaacagccaaaagcaacatcaaagctaagatttaccttgctgaacctcagccaagagtcatggagggaaatatcgtggtcgagaagcagaaccaattgcacaaccccgtgcttcagcgtgaccgagtgcagatttccgactcgcagggcttacaagaacgcatttgttcggtgcgctctaagaataatgcccgcatcttaacagctgttgaggatcgcttgaaacgtcttgcttatgcacgtggacacttgcggatgcgtgttaatcttgggacttttgtgctcgaaaattaccagaagcccgaaaacaacaagtcctggtatgtttttgatgaatttaaagtatatgctgtgctcgagcagactcaaggtcgtctgatttcagggcttgtc

SEQ ID NO: 25196 - DNA, 841 bp, Emericella nidulans
ggcctactaattccttctcttcacctactgcgaagttggaagctctttactcggtgcggtgcctgtatcgcttcccgacatcgagtatgggcgataacatgtccgaggcggataaggttagtttgatcttcatgctgtttattacatgtctgtctatcctagagctaataaaagctattctacagatccgcagcaaacgcctagcaaagcttgcgagtgcgaatccaccaacgtccgcggaaacaagcagtgagccgtcatccgcggccttgacccctcaggccccagaagcatcgcgaccacagtccggcgagactgtcgcaccttcaacaccaaggttagaacgagaaggatcagaagggaagcgaatcaaaatcacgccgacgtccgcagcgcccgccgagcagcgaccgcaatccggaacagtgacacccgtctcgaacaccccacctccgcccaaacaagaagacacactcgaagcatttgaagaccggacattaagcgccgtcttcaagcttacattagatgagagccgtcaaagggatattcatggacagagattgacgttcctttcggggttgcggagtgagttggaagaccagaacctgagcttgaggattagtaccgccgttctggatcaggctctgctggaagcggcgtcgagtcagcctgatgggaagccgctggattatctactgccgtgctggaaacgggtgacgcggctgcacaaaggctttcgaaaagctcgcaataatgatcccaagttcgaggtgatttgtgaggcgcggcggttgtgtatgagctatgcagcgtttgctcttactatgccggagatgttcgg

SEQ ID NO: 25197 - DNA, 501 bp, Emericella nidulans
gggtttgtccggggcgttatcatgcctcagacgataacgggcgcgcaactctttgcgttaggcgtcgtttacggtattattaccattcatctgcacgaaaatcactggatcactccggtcaagctgaaatatactcatttctacgggtcgtgggaatatttgggattctggggctttactggtgttgccattgggaatgtgcttccctggctggattcgtatctaggcggagctatcgcacaagagaagcagtcgagcaatgattccgcggagcttgctctctcctggtctgcggttgttcgtagcgttggagcttttgtgggaattgcatttgccatggtaaattttcctgttatatggacattatccaaacccaagaagctaacatatgtttctgtttattcagcgtcgcaccccctgggagtccacaacccaagcatctttaacactagccctggccaaccctgtgctgtggtatcttatcgaccgcaccaagaccgg

SEQ ID NO: 25198 - DNA, 350 bp, Emericella nidulans
atcggtatttcgcccacgagtctcttccgcctgaccgtccgctccctagctctgagctgttggagtccatccactcttacacggccgacttttacgatcaagcagtcagcgtaaacgggcgcataaaccactacagcatgaacgggaagtctttgttgtttatgggtgtacttctggaggagctggcaaaggaatcgctgggtgacactggcgatttggcactggtcgagggagacgatatgccgacggatgacgagccagtcgagaaattcggaaggaggaagcgacgcaagcgagccagcagtctcagcagcatgtatgccagttccggagaggatcttgatagcgtg

SEQ ID NO: 25199 - DNA, 615 bp, Emericella nidulans
atgcgacacatcagtcgagcgttcgggtcggatgatgacagcggcaccagcaccgatgtatcgtgcatcttctctgacgagagcaccgatgatgaaaccttggacagtgcacccgaagaagaaagtgatgatgatctggaggatgattctgacaatgattcaatcctggataatgaggacgaacaggaacgccctgcagcgtactaccttaaagaggctgaatgccttgatgtctcgcaactccgacagaagcgatacagtccaagaacccaggctagcttagacaaaacacgggattactgggaccggtgagaagtcattgggctctacactccaataatactcctaactaatagtctttttagattctgctacgaaggaaaccacgatccgattgaacgctttcactggctttctgactctgaggaaaccatccgattcttcaaagcgttcttctcctggcgatgcgatcggcgacgaaacaagaagggaggccggacaccaggaatacaatacaaaagctcgttagagaccttctggaaatggtggcacctggtttacaaggcggaggttgggcagggcctaaacaaagacctcactgtgaagattctggat

SEQ ID NO: 25200 - DNA, 890 bp, Emericella nidulans
ataggggggggctcgtccgcgctgcaggctctcacgcccaatcaaaccaccaccgcatcgctttctccacaactacattcccattcaaagacccgtcaccggtagttgatggcgagagcgcaaaagacgcgaaaaatttactaggtgttcgcattgatatctgcgtgcggaatggtcgcttcacgaaaccatattacatcctcctgcgcaaggtgcgcgtgcccgctgaagacgcggagaaggatccagcggatataaggctcaaggttcatcgacatacaatacctgcattcataccagtcgagcggctagaacggatattactatctggtcacccgcgtggaccgggtgacggcgacgagaacggcgatgacagtatagaacagctaaagaagaaaccgacttcgccagtgcgcaaacagaatctccagttattcgtccgtgaagtgagacggcaacttgtggcgtggcatatgcggctggatgccatctactttattcgtggacagataggtattatccagcggggtgttgactcttatccagatgacgaggatgggccgtgggatcgggatgtccttattgatgtgggatttgattctggtgttggggagacgaggctgaagaagaatgaattcgggattgcgtcgttttcgccgacggcgttggaggcggcatacgtcagggtagaatgggaggatggccgggtaggacggttcaagatttccgactccgggaaggttgagcgggcggttgttattggggacaagggaagagacaaagttctggaagctgcgcttacagggggggataggaacgtgctcactgtgttagatcggttaagggatgcagctcatgaacgacgtgacgatgcgatgtcgaacaggtag

SEQ ID NO: 25201 - DNA, 815 bp, Emericella nidulans
aaagcacaagaaggatctttccacaaatcgcccgtgctctccgccgtctccgcaccgcttgcgagcgtgccaagcgcaccctgtcctctgctgcccagacttccattgagatcgattctcttttcgagggcatcgacttctacacctccatcacccgtgcccgttttgaagaactctgccaggacctcttccgtggtaccatggagcctgtcgaacgtgtcctccgcgatgccaagatcgacaagtcttccgtccatgagatcgtgctcgtcggtggttccacccgtatccccaagatccagcgcctcgtctccgactacttcaacaaggaggccaacaagtccattaaccctgatgaggctgttgcctacggtgctgccgttcaggctgccattttgtctggtgacacttcctccaagtccaccaacgagattctgcttctcgacgtcgcccctctgtccgtcggtattgagaccgctggtggtgtcatgactccccttgtcaagcgaaacaccaccatccccaccaagaagtccgaaaccttctccacttactccgacaaccagcctggtgtcctgatccaggtctacgagggtgagcgtgcccgcaccaaggacaacaacttgctcggcaagttcgagctcaccggtatcccccctgctccccgtggtgttcctcagatcgaggtcaccttcgatcttgacgccaacggtatcatgaacgtctccgctgtcgagaagggtaccggtaagaccaacaagatcaccattaccaacgacaagggccgtctctccaaggaggacattgagcgcatg

SEQ ID NO: 25202 - DNA, 1711 bp, Emericella nidulans
atggtggagtcgttccatgttacaagcaatgatcgaaagattgccctctacgctggtctgatcacctcgtcctttacgttcgcggaattctccgccggtatgttttggggtcgcatgagcgacaagattggtagaaagccggtcctgatcatgggcctggttggaacagccattagtatggtcgtgtttgggttcgctcctaatttagcgactgccatgattgcccgagcgttaggcggtctcctcaacgggaacattggggttctccagacaactgttgcagagattgtcaccgtcaaggaacatcagccacgcgcctactcgatcatgccgttcgtctggtgcttggggtctatcattgggcctgcaatgggcggggcgttgtcacagccatgcgacaactatccctggttattctcgggcgaatccatattcaaaaagttcccgtttctgctgcccaacttggtctgtgttgtcgttctgatgactgggatcgtggttgggttgctgttcctggaggagactcatccggagaagaagtatcgtcgtgaccgtgggctggagctgggcaattggctgattggcagatgctggggttctcgcgtgcaggctgtggaggagcaggatgtcaaagcggattcagccgatgcaggctattttgacgactacgacgaggttcctccgccagcttatcggagcacggaaacttccccccgtttgggcccagtaagggaagtcgatgacctggctgtggatgacgacattgaaaagcagatgagcggtgggaaacccaaggcctttacaaagcaagttatcttcaacatcgttggatatgggatccttgcatagtaagtctgaccttcggatgcaacttgaggagtagcgccggggggtgcaccgaagtttgcgttcactgtatgctgactcggacaatagccatagtgtttccttcgaccaactcatgcccgtcttcctgagcacgcccaagtccaaggaagatgccgtcttacccttcaagtttacgggcggcttaggattgtcgaccaagactatcggcctgatgctggcagtgcagggcgtatactccatgatcgcgcagctctggctgttccccttcgtcgttcgccactttgggaccctgcgcacctttcgcttcgtcctcctcgtttggccgccgctttatttactagtcccatacctgatcctcctacccgagaagcttcaaatgaccgccgcatatgtcgccctgatctgcaagattaccttccatgtcatcgccttcccctccactgcaatcctgcttgccaacgcagcaccctcctcgaaagtcctcggctctatcaacggcgccgccgcttcgacagccagtctcagccgcgcctttggcccgagtgtaaccgggtttcttcactccaaaggtcttgacagcggttactctgtcatatcatggtgggcttgcggtattgtctgtctgatcggtgccatccaaagtttctggatggaggagtccgagccccagcggttcatggatgagaagaagcctgagcccgacacgtctcacaccaggaatgtcttgcggggttcattcgctgcagacagggaagacggtactgcggatgaagtccggcgactgctttcctcagcacggaccagtgttgacgaactggaggttcccagcatagccgccgacttgaggcctgtacggggttaa

SEQ ID NO: 25203 - DNA, 640 bp, Emericella nidulans
aattgacgatgcaactttccgcaccaccaacgccgcgctcctcaatgccaaccatatccaggatgaatttcgctgtgacatgtgggcgcaaatggcacgaacgattgggatatttgctaaggtgaataatgtattacgacgtctgagccgcaatatgatctcctttgatgactattgtgtggaagcagcggaactggaagcttccttggaccgatgggccgaaagcctgtccccgatgttgacgtggagttttgaaaacctcatgttgctggcgggaaggcggctcggtcagttatatctggctatgcatgttggcttcttccacttcaagcaaatgctctttttcccattcctggatgccagagcctcgaagaatccaaaacccagcggagctgacaagtgcaaggacagcgcgtctgtagtctcgtctatcctgcaatattccaaaaacatcaaggactgcgaactggagaacttcatatatggtcacattggtgtcgtcagttcgtgtgttcatctccatacgcttttattcagcgatgattaccgagaactctctatcacaagacagcgtctagtatccaactttcagtatctgatggcgctcaagtcatattggccgattgtggagcattttgta

SEQ ID NO: 25204 - DNA, 2420 bp, Emericella nidulans
atatctggggctggacggaggaggagtacgtcgacatctatgagagctgcgttgagatcatcaacgctatcaagccgtctctatgcgcgatcgatttcttcttcctccaaggccgcgatgccgcctataatgcgggacagacgacagtcctgctcaacactacgtccctgagccatatcgtgctgggtctgcagaaaaatgccaagtgggcatggaaatatcctatgtaagcgccccggctcgatgctcagagagggtgactggtgtctaaccaggtcgcaggcccggaacagggttcccgtaccccctgccgccacatcttatccccctcaacacgatggccgtcctgaagacggcgaagatgtaccatggcagcggccgtcgccgcgaaattcgcgactggcgcatcaagcacaagatccatggacggttccccttcgctgactcttggatgccaaaccggctgcatctctcacccgccctgaaagagctggactggccgtttgacgtgcccgacaatgttgttccctgcggcccaatcctgctccccgtggcgcctgtcaagacgcaggatcccgagatgttcgcctggctgcaccggggcccgactgtcttgatcaatctcggaaccctctacgcaccgaaccccagcgtcgtcctggagatcgccactggcgtcaaaacgttcctggcttcttgctctgatcggaagatccaagtgctctggaaactgcccaagcacccccatgaccaggaggagatctacacgcagtcggtcaccccgctacagaaagagatggaggccgaccaagtacggatccgctcctggttcgaggtcgagccgctcgccatgctccagacaggccagattgtctgttcggtgcaccatgggggggcgaattcgtggtatgaagctatacagtatgtccccattgcatccaccacttctccaaacccatcccctcgcttgtatctaagacaacaaactgacagaaacagaaatggcgtcccccacgtcgtccttcccgcttggcaagactgctacgagaacgccgcgcgcgcggagtggcttgggattggcgcctacgggaacaagagtcgtgcccctgatatcggcggcaaagagctcagcaaggccttgatcaaggtcctagggaataaatcgtacctggagaaagcgtcgaagctgcagaagctgtgtcagaagaaggagggccgtctagaggcagcggaccgtattgccgaccttgctgcacggcccgataagagcatgattgccgtccctgaagtcgatgaaaacgatccccgagttgtgacggtgacaaatggcaagggagagacgctgcagactgtcaattcagtggacgaaggcgcagtcaacaagtgagccaccgtgtcccataccctaaactgatccacccatgggagaggaaattgctgacaagacccaggtctatactacgacgcctcctcgaaattataaccgttgctttcatttcaaacacttggttcctccttccgctcctgggctactctctgctgctcgtcccccacaacgggttccgcattctcgtcctctcttacatcctgcacatcaagttcttctccaacgcgcacaaaaccagcgcccccaagccgagcaagtggcttcgctcctccctgatgtggaaactgcatgcatcgtacttccccataagactctaccgaagtgcctccctttccccgcgtcgcaaatacgtgatcggcgcgcacccgcacgggatcgcctgccacgggatcgcaggcgcattcacggcggatgcaacaaggttcgagacactttttcctggaatcgtcaaccggttcctggtgaaggatgggatgttcaccgcgcctcttctgcgggagtacctctttgcgcgggggcagagcggtgtctcgaaggattcctgcatccagcatctcacgcgcggaggttatgatcttcgggggatgggcaaggcaatcactatcagcgtgggcgggagtcgcgagtacaatatcgcacgcccggggacgatgggcattgtggtcaagctgaggaagggattcatccgccttgctgtcgagacgggggcggatctcgtcccggtgcttgtgttcggggagaacgacctctttgcgcccattcagttctctcggtattcgatcaagggcctcatcgcttgggcgtgggagaaagctgctggtcacaaggttgccttctcgctgggacggttctgcatgttcatccctttccgacggccgctgcatgtagtcgtcggcagacccatcagtgtcaagcagcagcggtttgatgtcagcgagaagtatgtcgaggagttgcagggccagtatattgatgagctgaatcggatctgggcggactggaggaatgtgtttgaggaggatgcgagcgtgaa

SEQ ID NO: 25205 - DNA, 659 bp, Emericella nidulans
ttcgttgggctttgcgaatgctgtactctatttcaagttgtcaaaagagaggattcaaaaaattataccccagatatcaaagatatcaaagccatcatgtccgacccttcaccgaaacgtttcgagaccctccagctccatgcggggtactcatccctctctgtctcatatatcgattccagcacgtactgattaatccaaagccaggagcctgaccctgcaactaattcccgggctgtcccaatctatgcgacaacggtaggcctacgtagtggctcccatacttgaagacgacatgaagtcactgattgcttatagtcctacaccttcaatgactccgcacacggcgccaggctttttggcctcaaagagtttggcaatatttacagccgaattatgaatgtaagcaatgcttggtcctttgcatttcgactgctcgttgtgactgaatgatctactcccagcccacagtcgatgtcttcgaaaaacgtattgctgcactcgagggaggtgtcgctgcggtggctgcctcatctggccaggcagcccagttcatggccatctctgctctagcccatgctggtgacaatatcgtttccacaagtaatttgtatggtggtacatacaatcagtttaaggtccttttcccacgactggga

SEQ ID NO: 25206 - DNA, 235 bp, Emericella nidulans
agtccggacgatgctcgagtcagagccggggcttgtcgtcgaccacggctgggtcctctacgccgcctcctggccgctatttggcatctgcttcctgatcatctccctccgcctctgggttcgcgcgcacatggtccgctcccttggctgggacgacgcgttcatgatcctcgcgtttctctgtgcagcgatcaacaccatactcgtcacaatcagtgttcaatatggcaccggc

SEQ ID NO: 25207 - DNA, 4458 bp, Emericella nidulans
atgacccgagcaagcgcctctgggtcaggccacgaggcctcaacagtcttcctatttggcccgcatgtcggtacattcacaaaggcatccatggacaagctcgttcgtccactctcacaatcgccacaacgcgactggattttgcgcacaatcgccgacctaccaacatactgggatgccttggcagccaagatgcctgatatagcccgcgatatcgacgggccgacctccttgtctgaactggacagatggcttcggcacagcctcgacacggccgggctctcggtttctgacgacgagtctctgccgagcatcttggttggcccgttagtggtgttaatccagctgacgcagtactggcggcatctggagatgatcagggacggcagtgccccagccgtagatctgcaggcggagctggtgcagcagacacagtccggcagcaggccgacggtcatcctgggcttctgcgctggcctgctcgctgcgctttcagtggctagcgccagaaaccaggccgggttcgaggaatacggagccgtcgccgtccggctggcgatgctcatcggcgctctcatcgacgcgcaagaagtatgggacaaggcatccggcaagggcagttcagcgtcctacgccgtcgcctggcgcgggccagaaacaggaggacgagatgaaccgaatcattggggatctgtcaaacgacgcgtatgttgctgtccggtatgaccaggcgcgggcaacggtgacggcctcagagacaattgcgccactgctcatgaagcgcctcagagctgcaggagtcacggtggccgaggttggaatcaagggccagatccatagccccaatgctgatcggaaacaacatacgaatgccctggtggagctgtgcgcctctctgcctgggctgcagtatgcagaggtgtcgaagctcgctctgcagacttacgacaaccagggatcgggcattccggtttctggctcagggaacatgactgagatggtggtgcggtcgatcctggtgcagcaatgccggtggtttgacaccttctcggccgtggcggatgccctcccagacccttacgtggtcacctttggcctggagagatgtgtccctccaactctgatgagaactctcggaggaagacaggtcttttacgaagaccttcccaaagaccctgagaagccttcattctggcttacaccgcaatcatcacctcccccacaaccccagcttcaaccggtcctgcaactgcagcagcagcagaccacccgcgtcgagccagtcatgcccgtctcgccccagtctgagcccatcgccatcgtcggcatgtccgtcaagaccgccggagccgacgatctagatgagttcgtcgccatgctcaagacgggccagtcgcagcatatccccatcacccgggacagactcatgcacgacatgctcttccgcgagaacgcagatgccgacccgaagcgcaaattctacgggtgcttcttccgcgacggcgatgcctttgaccacaaattcttcaagcgctcgccgcgggagtcggcagcgatggatccgcagagtcgcatcgtcctgcaggctgcgtatcaggctgttgagcagtctgggtactttgtcgaagaccataacgggtataccccggacgggcgtgacaagatgcatgttggtgtctacttgggttcatgcggtgtcgactacgagcataacatctcgtgctacgacccgaacgcgttcacggcgactggtgcactcaagagtttcattaccggccgagtcagccaccatttcgggtggacgggcccctgtatgacctttgatacggcgtgttcctcctcggcggtggctatccatacagcctgcaggaacctgctctctggagagtgcacggctgcgcttgcaggcgggtccaatacggtcacaaacatgaactggttccagaacctcgcggcgggcagctttgtgtctcctactggccagtgcaagccctttgacgacgatgctgatggatactgccgcgctgagggcgctgcattcgtctacctcaagcgtctgtctgatgccctccgcgatgggaaccaggttattgcaaccattgccgcgagcgccgtgtaccaaaacgagaactgcacgcccctgttcgtcccgaactcgccgtccctgtcgcacctgttcaaggacgtcatgcgccaggccaaggtcactgctaacgacgtctcgctggtcgaggcccacggcaccggaacgcccgtcggcgatcctgcagagtacgagagcatccttgctgcactgggtggaccaagccgcaagaagaagctgccaattgggtctgtcaaaggccatattgggcatacagagggcgcgtccggggcgattgcgctcgtcaagataatcatgatgatgcgcgaggggttcatccccccgcaagcgagtttcaagacgatgaacaagaagatccccgtcaaggcggacgacaatatcgaggttgtgacaagactacgggcctgggaggaggagaggaagacggccttgctgaacaactacggcgcttgcgggtcgaatgcaagcatgatcgtcacccagcccgatctccgaggccctcactcgagaagccacgctgttgcaggagcacgctaccccttttggattcctgggctcgatactcgagcaataacggcgtattgtgccaaactcgggccctggttgcgctcgcgcgccgaagagccgaccctggcggacatctccttcaacctcagtcgccaatccaaccgcggtctgcctcagggattcatcttcaatgcccgctcgctggccgaactccacgagaagatcgaacaggccgttgccgcggctccgagcagcaaggatgccgccgcgagtgtgggcattgcccccgtcaaggccgaacgacccgtcatcctctgcttcggcggccagatctcgcgctttgtcgggctggatcggggcctctttgacgcagttgccctctttcgcaagcatctagatgcggtggatactgttgttaaggcgcaggggctggtcagtatctacgccgcgcccgatatattcagccgcgagcccattgaagataccgttaagcttcagacgatgctctttgcgatgcagtacgcctgcgctcagacctggatagactgcggcctcaacggcaaggtccaggccctagtgggccacagctttggagagatcacggccctatgcgttgccgggaccctgagcctggatgagaccgtccgtttggttgcggcgcgtgcgaagctcgtccgggacagctggggcgctgaccggggcgccatgatggctctggaaggcgatgagggactagtccaccagctactgtccgaggccaacggagcttcagggtctgatggctctgcgagtatcgcctgctataatggcccgcgcagcttcacgattgctgggtccaccagtgctgtcgatcaggtccagcagacgatctcgcggcccgaattcggctcgatcaagggcaagcgtctcaatgtcacgaacgccttccactcctcgctcgttgacaagatcagtgacgggctggactctatcggcaagacgctgaccttcaacagccccctcatccccgtcgagcgagccactgaggtggcctctgccagagcgacagatgcctccttcgtctcgcagcacatgcgccaacccgtcttcttcaaccacgcagtgcagcgtctcgcaaagagacacccgcaggcgatcttcctcgaagccggctctagctcgaccatcaccgtcatggccggccgggccattgctcagggccaggcgtcgtcagagagccactacttccaggctgtcagcatcaccaacgagacagccctagactctctcgccgataccacaaccgcgctctggaagcagggtctccgcgttaccttatgggcgcatgatgctgtccagaccgctgagtatgcccacctgctgctacccccataccagttcgatacttcttcccgccactcggctcccgatagaagtcccccgttgagaaagttaaggaagccgctctcgccttgatcgctgccaacggcggctccctcgctggggcagggctgcagggtcagcaggccggcacgccgcaggacccccggacgctgccggtgtgggagttcgtcggctatcaagacgacgagacaaggcaggcccgattccgggttaatacctccgcggacaagtacaaccgctacgtgctcagtcacgtcatcgcacagactgcgcccatttgcccggggacgctcgagtgcgacatcgttatcgaggccctcttcagtctcgagccagggtggaggcaagatggggtgcagcacgttgtccgagagatgatcaaccacagccctatctgcaaggatcccagccgggtcgtatacctcgatttgacggcgacaaacaagagacggacaaactggacg

SEQ ID NO: 25208 - DNA, 690 bp, Emericella nidulans
atggctgacaaacagaagggagcgaaaggaccaaagggggataagggtgataaaggagacaagggtgacaagggcgataaaggtgacaaaggtgacaaaggcgatccaggaatcggagggtcaggcaccactggtgcggggactgaaggctcaggagccggagcaataggcacctcagtcgggggaggtgacaccgaaaagggcattggagagggcggcggagagaagggcgaaggagaaggaatcaagatagtgcctcctccaactccaggagagggccggactccgggagaaggtcgggtatccgggtctcaggacaggcgagcctcaagacgcgtatctcgttcctccgccaagtcgcaagattatgcaaaccttgacgagtatggtaagctcgtcaagtacatctcaactttccgcgacaaaggtgaagaagagggcgaggagcatttcgaggagaaacgtgtgtggtatgcgccttggaaaaagcgcaagatccgcctcaaacctgaagacaaagaaccgggtaagtacccggatgactggctcattacggacatccatcagggtttatcttcggccgaagtggagaacagacgacgacggtctgggtggaacgagttagtttctgagaaggaaaatcccatagccaagatcctatcgtatttccggggtcctatcctatacggt

SEQ ID NO: 25209 - DNA, 2174 bp, Emericella nidulans
ccaccgcaccctgtcaagtaccatgacagcttcttcagattaggtggcgacagcatcacagcgatgcgacttgtccgcgcggcacgggatgaaggactgaaattgagcgtggctgatgtgcttaagaaccctgtatttgagaatatgatggccctgatcaatgacaggaagaagtctattcccacaacggtgacggagaagcgtgcagacagcattgagaaacgggttgaagataagcccatactaacgaagtgcgaatcgtcccaagatatctccatcttaagaccaatgtctctagagttcgatgatacgtccctgcgagcagcaatctcaccaaaggttggcgtattcaaagggggcatcgtcgatgttctaccagtgacagactttcaagctctttcactcacggcgactatgtttgagtcgaggtggatgttgaattacttctatctggacgggaagggttcattggatattcggcgattaagggagagtttcctgcgtgttgttgacgccttcgacattctccgaacagttttcgtgtgttttcatgggcaattctatcaggtggtccttcgcaagatcaagccggatatctttgtccacgagacggagaagggtctggatgagtacaccaactccctgcagcagcgagacagggaacaatctccaggacaaggtcaacaatgcgtgcaattctacgttgtgcggaagaccaatagcgatgaacaccggatactcgttcggatgtcgcacgcacaattcgatggtgtctgcctgtcaaaaatcatgactgccatcaagatggcctacgaaggcagccccgtttcgccctcatctttcttgaactatatgcgacttcttcctggaaacatcacccctgagcactaccagcattggggaaacctgcttaaagggtcaaagatgacacagattgtccagcgggacaggccgaacacattccaacatataggaggtttcacgcagcagtcaaaggtcatcgagataccttccactgcgacagagaatgtcaccattgccaccgttatgcaatcggcatgggcagttactcttgcaaagatctgtgcccaggacgacgtcgtttttggcctcaccgtcaacggacgaaatgcggttcccggagcagaaaacacaatcggaccatgcctcaactttatcccaattagggttactttcaaggattgctggacagggctggatctattccgctttctccaggaccagcaagtagcgaacatgacctacgagtcgttagggtttagggagatcgtccgccgctgtacagactggccggagtcgacgttcttcaccacgtccgtattgcatcagaacgtcgattacgagggacacatgcaacttgacaacaatacctacaaaatgggcggtgtcggtgtaattgacaatctcacagacctcacgctcttctctaaaccagttgctggccagcccgcccagatcaatgttgccctaggttactcaacaaagggccctatccatccaagcttcgtctccactgttctagacatggtttgcgacacagcacagagcctagtcgcgaatcctaacgtcgcactgccttcaccatccaccatccgctccttaccaccccaactcgtcgaagacatacccacgaccggcagcactgacagcctcctctcatccctaaacaaccacagcctctctaagatccttgtacactccgaccttatcacccgtatctggcagcaagtcctcccgcctaaattgaacacaggcaaaccgccaagctcataccagctcgattcctcctttttcggtctgggcgggacatcgtcaacgtggcgcaggtcgtctggattctggaacaggaaacaggtctgcatatccgtcttgaggatcttctggcgcattctacgttccttggccatatggctgtgttggcactgaatatgacaaagcgtgactctgctggtgttgactctgatcgtgcgcccgcaccggcttatgcgcctgtcgacgctagggcgtcaaggaatgtttctacttccaggcaacaacaggagggattgccattgccagctgcaaatgcgaagagcgagtggagtgctcttgatagagcgagagttttggcgaagaaaatcaccaggcttgggggtctgggtacgcgggtttga

SEQ ID NO: 25210 - DNA, 976 bp, Emericella nidulans
cgttaccgatcgtcattcaatatctaccttcaagcaacatatagataccctttcccttggtaaagagagcactaaagacaagatggtctcagaacaagacatcaccgtcacatacaaagaccgaatcgcgataatcacgctcaatcaaccaaagaagctcaatgctctgagtggagaccactactacctcctcggggagcggctccgcgaggttgacaagcgcgatgacattaccatcactgtcatcactggcaccgggcgtttcttctctgcgtatgcacccttcctctgatcatattctgcctaggcaagtttctaatgatgtttttatgcctacagaggcgcagacgtaacctccgcccgccccggcgctggtcttggcacaaacgtgcgccgtgaactcgtccgcaacttcgtcgtcaacaacatcgacattacgcacactttctcccaccactccaagatcctggtcgcagctctgaacggccccgccgtaggcctctcagccgccctggttgccctcgcagacttcgtctacgccgcgccccacaccttcatcctaacgcctttctcgtcacttggtcttgtcgccgagggtggtgcttccacagcgtttgtcgagcgcctcggaattgcgaaggccaacgaagcgcttatccagagcaagcgaatcacgtgtgaagagcttgtgagcgctggtttcgtgaataaggttatatccgcgccaagcgggaagcccgaggattcggatggcttcttgaagaaggtgttggaagaggttgaggataggatgggcgcgcatttgagccagagctcgttgttaagaatcaaggaattgattcggcggccaggcagagagcttatggatcgacaaaatacgatcgaggcgttccaaggcctggagaggtttttggcggggattccgcaggaggagtttaggaagttggcgactggcgagaagaggcataagctttag

SEQ ID NO: 25211 - DNA, 900 bp, Emericella nidulans
aaaaaaatttgcacattcaatcatcatggaccagcaacgattcctgcagcaactgcaagtcgttcttaatcgtgagtacaatctatgcataatatgtgcaatgcgtgcatggaatatgtcgctaacctggtcacagctactcagggcaacgttaaggaggcaactgggattcttcagcgcgagtactacaaacaccccgaggcgctcgtccttctcattcaggttgcgactggccatgatgacgcgcagttgaggcaactcgctgccgtggaggctcgctccttggttggcaagcactgggctaaggttcaagctggccaaaagcctgctctccgcgaacaactccttcgctctggtgtcagcgaggccaacgaccttgtccgccactccgtcgctcgtgttatctcagctgtcgccaaagtcgatttggaggatggcgagtgggctgacctgcccaacttcttgatgcgcgcggccgacggtggaaacaaggatgagcgtgctgtctcgctctatatcctgttcactattcttgagaccctcggagagggcttcgaggagaagttccaggatctattcactctgttcggcaagactatccgtgacccagagagtgccgatgtccgcatcaacacactccttgccctgagcaaattggccatgtacctcgactccgctgagaacatgggacccgtcaaggcattccaggaccttgttccttccatggtcgctgttcttaaggacgccatcgaccaaggcgaggatgaccgcatcatgcaggcctttgaggtcttccagaccctgcttggtttcgaccctgctctcctcacagttcacctgaaggatctcgttctcttcatgaacgagattgccgccaacaccgagattgatgaggacacc

SEQ ID NO: 25212 - DNA, 1062 bp, Emericella nidulans
cctccctgtctggctctggccgcaattcatcaccacttttatggtgcttggtgcgacattgtccaatgactacaaaacgtttacggcctttcggtcccttcagggcttgttcgggaccgtgcctcaggtcgttggtctgccgattatccatgatatgtatgatcctaaaggtaggtttacatttcgtcaaaaaaagtcagatctgtgcttatggcgcacctagattggccgcatatgatcaacatctggtatactcgctgtcactccattcaattttggcaggcttaactggtcacaggggtaccacattcttgattggacctttccttggccccgcgatagcgggatacatcagcgcaggaagcaattggaaagtttcattcggcatgctgaccctcttttacggactgtcgacgatcctcatcttcctattcggacacgaaacttacttcgtgaagggccgacagtgtcagtgcaacacccgcttccaggcgatttttggcatcaagagccataatctccctgtcttttccacagtagctctctggacgaagacgcttgtggtctatatcttcaagtttccgctgcttctgactggcattgccactatggtcaacttctgctggcctattggtttgtctcacaatagggtaatatccatcacgctctaacattcataggaataaccgtaaccgtatccacatttgttgcccagccaccttacctatttgacactattcaatcatcttctcttcgatgggctcctattctcggtggtctgacaggtcagcctcccatatattttacactcattttaaacctctttcctgacaacttgaaccttgtaggcttcagtttcggctacttcttcaacaactggatctaccggtcccgccaggagaattggcgacctgagtatcgcctccacggcgtctggtttgcgatcggtacaatggccgcgggccttctgacctatgggctgacgcttcatttccataaacactggattggacttgcattcggttggggaatggttgttgccgggatgatcgctagtactgt

SEQ ID NO: 25213 - DNA, 295 bp, Emericella nidulans
aggctgtcggatatcagtggcgaggagacgcggtacgttcagttctttatctggagcatctcgcagggcgaaccccgcttacacaaggggtcctccgtatctgattggcgcccacttatgattcgagcaatgcactgcgaacctgcagtgcgtcaatgtgtggtggcactgagtgcactgatccaggagcgtgtggcccacagctcgctggaactccatgggttcggcacccgccgcgaacaaggggtatgtttttgcgctggagaagtatgggaaggcgcttttgtcactacaa

SEQ ID NO: 25214 - DNA, 1537 bp, Emericella nidulans
gattaggactccttccatgactcttcggaagccccaaatgccgttaataacctttccctctcgatccctcagagcgcttcgactcgatccctgacggacagccccccgagcgcttctaatgcaacatcaccgcagttcacagaggcaacccagctcccacgaacccctgacgacgatagtaagactgatgatgaatttcatgaaactggtgcagatggacagtctgaggctgaggctactccccgcaaacaaaaactacagaagtcccccttgttgacagcacatcggctttccacctcatctctggacgaggtgaatttgactggcaacctcaataatgatggttctcttgatcatttcccgtccaaccaggagaccgagttaggctcccctcctgctttgccatccagggactccacctccacgcagagctctctcctccaggggttatccggcagtctcccctccgtgccatgggctcctccaccacaaaataagctcccaccccccgccgcacccccaccgcctccgactcgaaaaatcacaagcccttttgcctggctttctcgggcttctacgggaagcaaagatgctgtacagtcagggcgacggaacactgctgcttcaatctccacgattggtagcaatcctgacattgctggtcgatcacaggacctagaagtggatggctcaagcgtaggttccagaaagccccagcgaaatagcttgaaggaccagttcaaattgctcaggatgcgtgaggaagggcatggcccggagactgatgaagcaagtgttgcgtcgggacgcacatcgggccgcgcgagcatcagccattcagttgcgagccctcccagtattcctgaggaaggagagaacgatgttacggccgcgcttccagcagtttcaccttctacaccgccaacctcaacagtcaatccgaatctcccgccgggaaccgtatctggggtttcggcatctgcgagtgacgcagctgcacccgtggactgggagctttggcagcaactggtaaacgaaggaccacaggttctgaaagggacaaattctgaagagcttaatgctgctatcaaacgaggaattccgcagaccattcgcggggtcatctggcagatcctggcggacagcaggaacctagagctggaagaagtttataaggaacttattgcacggggtacggatagggaaaagtcgcgggctaatggcatggccaacggttgcgcagaaagagactcagccgcctcttcacgttcgtctacgcgatcagagcgatctatctctgcggcaccatcgaacagtaattcatctcccagcactccccacgagcaggatcctgagaagttggcaaaagaacaagtcgcgcaggaaacggctaggaagaagcaggcgaaggagaacgcggcagcgctccaaaagctccagaaacttgagaaagcgattcgacgagatctgggtgcgcgcacgagctactcccgttacttcgtctcgcagggcaaccaggaaggccttttcgggctat

SEQ ID NO: 25215 - DNA, 447 bp, Emericella nidulans
aacaacgcagaaacgatccacctaccacgcattctctgccttcacggcggaggcacaaatgccgtgatcttccagatgcagtgccgcgtactcgaaaaacgccttgcgcattcttttcgtctcgtctatgcacaggctccattcacgagtagagagcccgggccagatgtaacgtcggtctacagagactatgggcctttcagagtctggttctgcgatcacaacatgtctcacaccctcaaatcccgggatgttgttacagcgattgacgccagtcttgcacacgccatggctgccgatgacgccaagggggctactggcgactgggttggcctgttgggcttcagccagggcgcaaaggtggcagctagcattctctaccggcagcaaaggtgtggaattacccatttcaggttcgcgattctctttgctggtcggggccctctg

SEQ ID NO: 25216 - DNA, 1164 bp, Emericella nidulans
ccactcgctctcttttcctccaccctggggaccttgagcatcgtgtcatggctgttcgcccagcttccgcaaatattcaagaacttccagctgcaatcgacgtccgggttatctatattttttctgataatatggtgtcttggtgacatgggcaacctcctaggtgcacttctcactcgacaggctggttggcaggtcataattgcaggttactatgttctcgtggatgtgacgctcgtattccaattcttctggtacacacactacaaaggacgagggacaaatggattcgccacactctccacatacgatgacgacactgtgcaatccaatattatcgagggtgtctctttttcagaggacggttcgtcgtcaattggtccttctccacagattcctgctgcatcggattccaaggacattcccgatattaaagatcgatcggttggtggtgtggacaatgcatcgctttcatactcgaatgagaagccaaggacgtcccgacggtctatcgtcagatctggcagtggtctgggcgtccaaaatactgctgcacgcactattctgttagcctcgacgctctgcgccgtcgtagcaaacgcagcaccaacagatgccgatccaattcctccatcttcctcactgacccttgagttcctgggcaccatcttctcctggatgtctactgctttgtatctcggttcacgccctcctcagctatacaagaattaccgccgcaagagcacctcgggcttgtcccctttactgttcatggctgccttcagtggtaacttcttctactcgtcgtctctgatcacaaacccgaatgcttggtataatttcgctccgtatggcggtggaggatgggcggacgcggacggcaacaatcggctagactgggtgaaacgcgccactccttttttcctcggggccttcggggtgctctttctggacggcatgatgggcgtacagtttcttatgtacggttctgacgacgaatccgtgatcgaagtcgaggatcccaagcgcggacgtagtcgctggaagcgtgtccgcggctggatgagaggctggattccttctcctgcgcggaagcaaacagagtccggccctgaaagccaggctcttctcgttgagggccaactaagatatggggcggtttaa

SEQ ID NO: 25217 - DNA, 1167 bp, Emericella nidulans
atgcataagctatttgataatggcgagggcaagacgactattgcaggaggccagggaaccatgtggacgactctactgcagatgggcgagctaatcgacaccgcaaatcgtgtttacgacccgtcggagactcgtatctttgttacccacgcctcaccggcccgtgaaggaatgttgaaccagctttccgtgaccctcaaagccgacttctcgatctccgccggacttcacttcaggtacggctcatcttacaatgagttctctgtcaatccctcgctcgaccactaccggggcaagctagccgcgtctaaggcctctttcaacgatgtgtgggaaaccgtgcggggtgaagtcgagtccgctatatcccagaacgacgctcagaagactctattggagaatgcccttggtgtcgttgagaagatgccatcagtggccagtggtggaaacccctttggaggaccgaccaaccctggtagcggcagtggccaggtagacgagagcgctttcaagaacatgtggaacttcaatttggccgatgctgctttcggattcttggtccttgaaatcgaggctggacgtattggaacggaaatgcgtgctcagggcttcaacttttctcacaggaccggcaaacctccagtctctggagctccccagcctgccgctcaaatggccagtgctcctgtcagcggtccctcccctgttaatgctgtacgtcccaacgttgccacccctcaatttggccaggctcaggctatccctactcgtgcggggcctcctactcagcagcccgcacaaggcaaagggcccgccgctcccgctcgtacgtctcctgctcccgtcatccctaagtctgtgacgccccagccctcgacgactccggctgtctctcaatccgttgactccgccgaatcttcagctactcttgacgccaacggctccacgcatggcgagaagcagagtgaatctccggcccctaagccggagcgcaagcagagcaacgccctcttcatatcaaatgtcgataacgagcaagccgcacgtgatcttttcagtgaggaggacaaagctaagctgcagaaggtggagaaatggggcaagtataaccatgtcgccacattttcgaccgtcgaggaagcaaaggcagctcttgatcgccttcca

SEQ ID NO: 25218 - DNA, 586 bp, Emericella nidulans
gctgggtctcttctaatcaagaaaggaaaatcacacgattcgaagaaagacgacatagagagcaattctaataaagtaactcctcctgcacttacccgaacaaactcggatttcggctcaggcttggatgtggaattcgacgatgacaatattgtcgtaattcggacacctaccaaccctgcgcatcccgactccaaccagaccaccggtgagactgaatcgtgggcatctctcgagaactcgtggaaaccacgaagcttctatgagcaggttacgacgcccgatactacgagtcctgtgattgatctggatgcggcccttggaccttttaatacgcccgatctacgctccggtcgtgttccagaaagcggtttctctgcagcaactaagcgaatgtatagtggcggacggcgcggcgagtttgttggcccagaaatgcggtatcaccggcgtgctgaaagcgcaccggaaatgcctccgttcgatcgagcgtttcttgggagccaccgctttccaactacctcttccttggagaatccagacgtcttctatgaagaggaggaggatgccttcttagcagccacta

SEQ ID NO: 25219 - DNA, 2538 bp, Emericella nidulans
ctcacaatggccacccccgaacgtcgacctggccaaacatcatgggcgcgtcgccaacaacagcaacacgagtctccgttctcacgggcgcgccgtgaacgtctgcatttggacgcgctcagtcctcctcaaaaatcacctgcgcggcgtcgttcaagcttcagccaaacaaaaacactagcgggtgctttcgcgcacacggtctcgcgcctgccgttaacggagatcgaagacgaccttttcctgcccgagtacgcgcgacgaggctcaccccgcaaacgagggcagagcaccagcacaatgtctggacgttcgaatccgccagacttagaaaatgcctacaggcaggtggaggacgcagtcagtcttactgacattgatccgtccgacgacgaaaatgtcgtgtatatggccggcaaggacaagctcaacaagcgaatatccgccacggctgcacaaagagagcagcgattatccaccgtgtccgaatcgagtttcggaacccagtcgccccgtcgtcggtttgatttcacaatggacgaagagcggttgaagcgggctacatcgagtcggtctccggtgctagacaaggctgctctgggtagtgcaccttcgtcggaacatttacaacgacgagactcagaggataacagtacggaagcggaggaggaggaggaggaggaggactatggcattgagccaccaatgaaggcgccttcaacctgggggagtagggcaaaatcgggtagtgcctggatgaagagccttactaggaaccatgaacgggcgtcgactctgcatgagtctggagacacttcgtctcggttgtggggcgaggtaagttcgaaacgcgctcaacgggctgcagagagtcaggaagagggcgtggagaacccaatacgctcacatcacgagcttcctccaccctctccagcaccatcttctgagcgaaaagaggagtttccgtctggtggccataggattccaaacacacccatttctattttcccaagttcaacctttactaagcggagtccaacaaagcgggactcgcacgacttgatccgcaagctttcgcggactgggagtccgggtcaaaatgcgacagaggcaactcagactccagaacagacgacaacgggacgacgtatctatgacaaaacgccagttgcgccgggtggctggatcgatactccgatgacacagcgagccccgccttcacaacctgtcatcaaagcactggggtcgaagttggacaatgcatggagtctcgggagattgattgaggaagcaagtaacaaaaaagaggacgcgtcaacactgataccaaatttcgaaccgttgaatgatatagaaaaggagaagccgccagcagagcaaccgaatgacgaaacgaaagaaaagtcagcaggacaggttaaggaaacattcgagcttgagcacgttgaagagaaacaaccacagaaaggtggaccgacgccgagtctctccacccacagcacacgagaaatgaaaagggatttggagccagtagaactgcctcttcctgatcaccctaagagcgctttggaaactgtcttgcaggaacacagggataacaaggactctctggacgtcggtgatgatacgatcgagtctctccaagcccttgtggatcagcagccaagcgaagacaccgaaactcaggaacaagatgacgccgcgtacgagcagcaagtgatgagcgaactcgaatccgcccagtcttcggaaatgaaagatttcgaacgtatagaagggaagctgcaatcgttgtctgacaacatgtcccatttaaagtcgggccttaaccagttggagggccgcatatctcaagacaccgagcagattatcgcttccatcactaagaatcccctcgatataactgagggggctacgcgaccacaggaaagctgtgagacatgcaagaagctcaagaacgtcgaggtagtccatcagtgcattccgcttccacacttatgggatcggggccgcgttcggtggttaccccgaccaacgcgcttggggtggtgtatcctcatcccgctggcttggtatattttggagaacactatgtgcgacgaattctgccatccagttgtcgctgaaacgtgcgaaggctattgcctggaaccagatgcacctcgctatccatttgtcatcccgacgttgttatggcgctggttacacctatctgatattctagccccgttatgggctattcttgtcgccttttcccgaattttctcacagctgctgggactgtcagatggatatgtagatgatgttgaacttccaagactcaacttgtccggcaaggtttggatcaacggtaccaggatggaagacattcctccgcttgaaacatcaacaaacaaagtcttcgctccaccggtagtcaaatttgaatgggagaaaacaactcacattccaaagccgatttctgatattcactctgacacaaactctgagagcgaagactgggaggatatctccatggatgaggacgagtttctttag

SEQ ID NO: 25220 - DNA, 378 bp, Emericella nidulans
gcggcgatttgcggttcagatctccagtgagtctagcaggaaccctggatacgtggaggcatactcacccattgcagtatgtacgaagggcgaacagcagcagaggctggcattacgttcggtaggtcctggaaagcacccctcttcctcagcggcactgacgctcgtgcccaggacacgagaacctaggcattgtcgaagagctcggcgatggagtgacactgctcaagaagggagaccgggtagtcatgccattcaatgtcgccgatggccggtgtcgcaactgtgaggacggaaagactgctttctgtaccggcgtcaacccagggttcgcgggcggcgcttatgggtacgttgccatgggtccttaccgcgggg

SEQ ID NO: 25221 - DNA, 1037 bp, Emericella nidulans
agcgcccgccaatactccaccgaagcccccaagagcaagtcccttgcccccgtctatgtggctgtcggtctggctggccttggtgtcggattgtaccgctaccagtccggtgctgccaccgcagaggctcctgctgagcgtcccaaggttttcacaggcggagaccagggatgggtgaacctcaagctctctgacattgagattctgagccacaacaccaagaggctgcgcttcgaatttcccgacaaggaggctgtctccggtctccacatcgcctgtgagttctccgagcgcacgtattatggctagatgaacttacagcactatccagctgctcttttgaccaagtattctccccccgatggctcgaatccagatatccgccctacactcccactagcgatgaaggtacgctactgatacaccactcgtctggcgctggcgtcatttgctaactgaccattacagatcagcccggttacctcgagcttgttgtcaaacgctaccctaacggcccgatgtctgagcatctgcacaacatgaatgtcgaccagcgtctggacttcaagggacctcttcccaaatacccctgggaagccaacaagcataagcacatctgcttggtcgctggtggaactggaatcaccccaatgtaccagctagctcgcgagatcttcaagaaccccgaggacaagaccaaggtcactctcgtctttggaaacgtcagtgaggaagacatcctcctgaagagggagttcgaggacttggagaacacatacccccagcgattccgcgcattctacgttcttgacaaccctcccgagggctggaccggcggcaagggctacatcaccaaggagcttctgaagactgtcctccccgagccgaaggaggagaacatcaagatttttgtctgcggtcctcctggcatgtacaaggccatcagcgggcccaaggtcagccctaaggaccagggcgagcttaccggtatcctgaaggagctgggttacagcaaggaccaggtctacaagttctga

SEQ ID NO: 25222 - DNA, 2214 bp, Emericella nidulans
aaattaccaagttcgtccccaatatcaaagttttgccttactggggtaacgccaaagaccgcaagattctccgcaaattctgggaccgcaagcacattacctataccaaggaatccgagttccatgtgctggtgacatcctatcaacttgtggtacttgacgcgcaatattttcagaaagtcaagtggcagtatatgattctcgatgaagctcaggctattaagtcatcgcaaagttcgcgttggaagagtctgcttggcttccattgccgtaaccgtctcctgctgacaggtactcctatccaaaacaacatgcaggagttgtgggctcttctccacttcatcatgcccacgcttttcgactctcacgacgagtttagcgaatggttttcgaaggatattgaatcccacgcacagagtaatacgaagcttaacgaggaccagctaagacgtctacatatgattctgaagcctttcatgttgcgccgtgtcaagaaacatgtccaacaggaactgggtgacaaggtcgaaaaggacgtcttctgtgatcttacctaccgtcaacgtgcactctacactaatctgcgaaaccgggttagcattatggaccttatcgagaaggctgctgtcggtgatgagacggacagtacaacactgatgaacctagtcatgcaattccgtaaggtttgcaaccatcccgaccttttcgaacgggctgaaaccaagtcacccttttccctcgcgcactttgcagagaccgcctcgtttgtaagagagggacatgatattgacgtcgcatactcgacacggaacctgatcgaatttcctgtgccgcgactgctttgtacatctgacggccgcattgatatcgcagggcctgacaaccaaaaggcgggattccgtgccaagtatttgtctcatatgatgaatatattcaccccagagaatatcaagcaaagcattgaggacgacggcgcgttttccttcttgcggtttgtggacacgtcggtcggggaggcgttcaactactcgcatcaaggtgtatttgagcgcgctctccgtcgccgtggacaaacaaataggttatctcgtctcagcgtggtttatgatgaggatgaatcatccactgcaactttaccccatactctgttcaacatcgtcgaccgcaatgaccgacaggctgtatacgatatcgcagtggagggacatatgcgagaattaatgaatgtctctcggtcagtatttgagcaagagggccttaacgtcattgagccttgtgctggccccgcagcatccgcgcctcccatcactcttgtgtcctcaggccaagaagctttaattgagacgcaagatgccctgttcaatgtccccgttcagcatgccttgtttggcactccttcgaaggccatggaagagcaaattattgagcagcagctggatcctacaccttactctcttcctccgatgttgcctgagccaatttcaactaagggtcgctatacccatattgaagtaccctctatgcgacgattcgtcacggattctggcaagttagctaagctggatgaactcctgcgtgaactgaaggcaggcggtccccgtgtgcttctttacttacaaattacgcgcatgatcgatctcatgtaggagtacctaacctaccgccactacaagtacttccgcctggatggaagcacaaagctgcaagatcgtccagacacagtggcggatttccagcaacgtcccgacatcttcgtgttccttttgtctactagagctcgtggtctgggtatcaatctaactgctaaaaactctgtcattttctatgactctgattggaatccgacaatcgactcgcaagccatggaccgagcacatcgtctgggtcaaaccagacaagttacagtttaccgagtcatcacccgctccactatcgaggagcgcatccgcaagcgagccttgcaaaaagaggaggtacaacgggttgtcatctcaggtggtgcagccggcggtgttgacttcaacacccgcaaccgcgatagcaaaacaaaggacattgctatgtggctggccgatgacgaacaagcagagcttatcgagcaaaaggaaagggaagcccttgagcgaggtgaaacattcggtgcttcaaaaggcggcaagaaaaatgcccagaaaagaaagagagatgtcacattggatgatatgtatcacgaag

SEQ ID NO: 25223 - DNA, 493 bp, Emericella nidulans
ctctgaacacccacccctcttgaactatggtggtgagaacgaacagttcgtcgagtatgacgagactgaagcgttcaagggcgctcccaagaaagcaaccaagtccaaataccctgaagatattctcacgaacaatcacaaatcagtctggggtagctggtggcacaatttccaatggggatacgcttgctgcttctcaacggtcaagaacagttattgtactggcgaggaaggaaagcgcgcattcgaggaagcgcggaacatgttgctactgccaggggatgagaccgagcagccgtcgctggcagtcgagtctgctagtcgccaggaagagccgagcgcagaaagtcacaaccagcagcgagattctaagaagcgaacgctcatggaggtccagtcagggattactgaggaggaattagagtcatataagcgcagccgacttgcagctgatgaccctatggccgcatttattgaaaaggacgattcctga

SEQ ID NO: 25224 - DNA, 1688 bp, Emericella nidulans
tcggggtttcgatttgcgcgccactcggcggtgcattatctttgggagattctagtaacacttagccaacttcccgtagacgattagccgaaacataccgatccttctccgtttattactcctctccagctccggttcatcgtctgggggaatgtcaaaggtggaccgacggggtgggagcttattgcgcgcgcttcctggagttcgcacgggttggtctcgcaatgcgccaaaggcatttgttcgagtaggtgatggcgtcgactgggtctggatggcgtctgctgttgacggcgctggaacgagagggggagcctctagtaaaggaggttgaggcgctgatgctggtttgaggtcattgttggtgggctgggacgcgggttgagatgattcttcggcgggcgctccgagacctagagagaacccgaaatcgacttccttaatcttgcgcgtcctatgagaatcccaagtcagcggccaggctaggaagacatagattgagggtgcataccctgctccgcgctgccgcatctgcagccgctctactctgtctgtcaaggacattgtcagatataccgagattggagcgcagaccatggagaaggtacttactggaagccatcgccaagcgacgcgtcaatcggacgcgaaatgggtatacagatggaaaatgggtgttgtggtgaacgatggagagcgtttacttcgtgaccttccgactggaaacgcggagtccgcccaattgggtttggcgccaaatcttctgccactacactgcgtttgttctgttccaatgtccagctcggtgtccacccctcacgatcgctctacgacatactatccctcaacgcaccttgaataacgaccagtcgctcattgcgccgattgtatcaaatgggttggttctggggttcgaacaacgaggacccggtcaagaagcttgaccccggccttcgcgaatacctcgaaaacgaagctccgaagaaatacgtccccgcctctcagagcccgccagcagcagaagaaaaagcttcaccatctactacatcctctgacgacgcctcatccgcctctcccgctgttccctccgcatcgctcttccccgacggccggtatgcacacttatggaaaacctacaaacctccttctcccggcgaagtcggacccgaaacgacgggagttccgtcattgaaagcgcactctaagcagcgccaagctatggtaaaacgggcagctatggaaaactgttcgatcgaaaacgagatctatcatctttgcttgaaaagccctcctactatgagcgatcgacttactgcctgtcaagacaagaacaaggtgttcactcgttgtttcacaacacaatctgtgggtgctatatttccgcacggtctatcggagccttgcagacccaatcagaaattcttgcaagcattaggatacgcttcagcacaccaatgggacgacgagcgggaggagcggatccaattgcacgccgataagctatatcacgagatgctcgactacgagaagcaggtggaagaagctcgggaggccggtcgagaaccgccgccgttaacctctcttttcaacccccaggccaagccgattgagcgtgctagcgttggccccgcggagctggaaattcccggaggagagccaatcccagagggcttcacccagacgaaacc

SEQ ID NO: 25225 - DNA, 480 bp, Emericella nidulans
atggaccccgctcaacccccggtcgccgaagcgcctgtgcctgaagccgaaccacaacaccaggaccagtaccaggaaaaccagccagagcatcaacatcatcaaaccgagctagatcaaccagaccagatgtcgcaaggattgtcgcacatgtcggagacggaaactccgaccatcgtcccaaccgccgcctcagaagaacctaccctcccctccaccagctatcacaatggctacagcagcgactcgcgcgcccactatgaatatcatactccgactcaggacccccagccgcaaccaccgacctcctcacggccaagctccgggttatcggggacccagaaacagccagctcagacaacaaaaaacagtgtggtgatcaaggtcgggatggtcggagatgcacagattgggaaaacgagtttgatggtcaaatatgttgaggggagctgggacgaggattatattcagactctgggt

SEQ ID NO: 25226 - DNA, 522 bp, Emericella nidulans
atggccgctcctcgctctctgatgcggctgggctctggccgctccctggcgtcggccgcccggtcatcccgcaattgccgtgccttttcttcgacccctctgcagcaggtagccaaggcgacaacggctggcactgatacccccaacatgcgtcacgcagcgcggcctcgtacgtcaattgctgccttttcccccaaacccatactttggtgactgatttgctgatcgattccagcccccggtcctctccgcgctcccgtcgtcaacccggccgacaagtaccaggacaaggccgatagcctgcaccagtacggtcaatacataatggcctgtctgcccaagcacgttcagcaattctccgtttggaaggatgagctctgcatttacgtccctccctccggcattatcccaacgttcaccttcctcaaatatcacacctcggctgaattcacgactgtctccgatattaccgctgttgattacccaactaaggatcagcgctttgagaaatctcaatattaa

SEQ ID NO: 25227 - DNA, 801 bp, Emericella nidulans
ccgttctccacgcccttcttcacctctgcagtaggtgatttccactacctcgaccggccggtatccgaaaagcgcggtggccgctctctccaaaattactacaatattgacccggagtccgggcttgtggaagaagatctcagtccgggaggagaccatatccgacttctgttgctgccgaagctattctcccccgaattccgaggtaactgggatgactatcgcaccgacttttgggataaagaaaatgaacgacgtgctcagttgcgcgagaaattgcgacaaagagagcgccagatagcccggcaggagggatcatggttttggtggattggacttggcaggaatgcgtcgcgacgtcgtcggctcgccgccgccacactacataggtccattgaaaacgataaaggccaccgtcatgcccatcattcgcacccgagcatttccaagttagcccatgaatcgaaatcaccccttcgacgctcgacgcgttccgactcacattctcgtacaccctcacgcagcaccaccccaatagacacggatgaccggccgccgtccagatcatctggctctggccgtccccgacgaggtagcctcacaccatctacgccgggctcgagcatcgaacagtccccacgtcgaaaaaggaccggatcgaagacactgaaccgtggcttgtctcctttgacgcaagcacagattcgggagggcgtatacccgccgtctattgcgtcagacgactcagcctcaacgctgggactggctgtaaacaaggagaagaaagaagacgatatctga

SEQ ID NO: 25228 - DNA, 828 bp, Emericella nidulans
catatgagaaagattactgtacctgtcatccggaccatcctaaactcagcggaagaatactactcacttgaggctgaagaggacagtgatggtgatattgatgagtctgttggggagaaggaattgaaggccctgatgagcggagttcttggtatgcttgcggagtggacggatgagcgaagagtgatcggacttggcggcgaacgggtccttgctgggggccctgctagctccaatgtttgtggcattatccacttgcaactgattaaggacatactggaacgagtgctcgggatcagtgaaggcagcaatcgctgctctaaagaagaacgaaaactcctgttttcactcatgagcaagctctatattgcgccgccaacggcaccttcgcgctcagcgtcccaggcccccgaagacgactcgttccgttccagcgtgcgaagctcccatggcgaactcaatcccgaaaaccttgccctcgcgcaggaagtcaaggagctacttgaccagaccatcgaagaaggtgtggcggctgatgctgctagccgaaatgccctcgtcaaggtgaagaacgtggtgctcaagctactggcggctcccatgcgaccttctagcgcacgcggccgcgagagcagtgtcgaaagtgacattggcagtgttcgatcttccagaagtgttcggccgtccgtagagcctggctttgggcgccgcggtgtatccgtggagcccagtatcatggaggaggatgagaatgaggatagccgggcgactctggacagtagaatgactgttatcaaagaggaggatgccgacgctatggaggaatga

SEQ ID NO: 25229 - DNA, 912 bp, Emericella nidulans
ttatcgataagcgaaccttgggaggtttttcccgcctcaaattttcaaggcccctccatcacccatgaaacggcattaactcattctcacatcttgtctcgaggataatctcgttgcacaaaaatggctaccccttcagaaccagcaccgaccaattgtaaggtcatgctctcgaagcatgttgcgaatggcctgctcgcagaagtttctgagggtatcaagaccctagagaagccgcctcatctggtcggattcctggcgaacaatgatcctgcggcgctgatgtacgcgcaatggaccgagaagacatgtcatgaaaagtgagccttcttttgttcgttcgtatcctgctcccctacgcccattggtcgcggcgtagtgttgttcgtgtcatgtccgttttgttgtgttccctcaaaatcacctacatcccgggccctgtatctcgtagctaacgtagatctatctcatggatatagtggattccgatattccctgcgcgaagttcaccgtgataaccttgaagaagcaatcctggccgcaaatgtcgaccctgacgtcgacggcatcatcgtctattaccccatattcaacaaccgtcaagaccaatacctgcagcaaattgtggacgtgtccaaggatgtggagggtctcagccatcgttacattttcaacatgtaccagaacatccgcttcctcgacccggagaccaagcgccagaaatgcattttgccctgcacgcctctcgcaatcgtcaagattctggagcacctaaacatttacaacacagttctgccgtatggtaacaggctacatggtcatactatctgcgttgttaaccgctctgaggttgtgggccggccgcatgctgcgttgttggcgaatgatggtgcctgcgtgtatagcgtcgat

SEQ ID NO: 25230 - DNA, 606 bp, Emericella nidulans
tacgcgtctcgctctctgagatgtatcgctcttgtgcaccgggacttcgaaaaatggccccctcatgggataccaacggacgaaaatgaaatggcagtttttgagccaatcttcaaggacatgacgatgctaggcatcttcggcatccaggaccccgtccgcgaaggagtccctgacgcagtccgccaatgccagcacgccggtgtttttgttagaatggtgactggcgacaatattatcacagccaaagccattgcccagcaatgtggcatctatacgcctggcggtgtcgccatagaagggcctgaatttcgcgagttgagccatgatcagatgaacaagcttatcccaagactgcaggtcatcgcgcggtcaagtccagacgacaaaaagattctggtcagccagcttaaggaacttggcgagactgtcgccgtgactggggatgggacgaatgatgcgcaagcacttaagactgctgatgttggctttgcaatgggcgttgcaggcaccgaagtcgccaaggaggcgtcagatattatcataatggacgataattttacgtcaattgtcaaggcgatagcaaagggtcggccggttaaataa

SEQ ID NO: 25231 - DNA, 537 bp, Emericella nidulans
tcgttccagacgccctcaaaagatgaagatgttcttaaggttctaggcgacggccgcgggcgcagctttgcgggatcaaaacttaatactccgcgtgcgactgccggcacgaaatcaaccagaagcgcgttaaattcgcggcaacttccaacaatgggggcaaagggcgaatttacaccaatgttgaagagtgcgatgaagaacaattacatgaagaatgtgtctacgacgagagggacgggcggacctaagaccccatcttacgcgagagggggctaccggagcaatggcaacaccccaggattaaccgtcatggaaatgacagggattgatgaagaggatgcgacagctgacgaaccaacgccagttccgcaagtggccagcagcagcgtggctggcacaccactcccgggactcacgagcagagataatggggttctgggcgacggaagtaatatgacactcaaggaacaagagaaggtaggcaaatacaccacagaaggctacgaacatttggtaacctttgcagataatcga

SEQ ID NO: 25232 - DNA, 1112 bp, Emericella nidulans
ctaccaccgacccctccgatctcgccgcgctgaacctctcccgcctcgtcgatcgtcttgagtttaatatcctttcaccaaatgcagatctgaaatccttgcggcgctcggagtaccagcggatcagagtgggcgtggtatgttcgacccagacagacattacaatcccaatcttacctatctatacgcaaccccgggtggatccgcatccatttccatatccatgagaggggctctagttaacattaccattcaagaacatagagtacgctcgcgccacccttcaggccctcgaacgcagcctaccccagatcaaacctgttgaccgacggcacgagctccagtctagtctttcgcgcaaccggcagacactcaagcaagtccagaacgtcctcgacgagatccaggctgaggaggagtcccgggtgtcggcacgcggagatgagtgggatcttggtgaagacgaggacgatgaggatgcagactcagagggagatgatctcctaaggacgccagacacggctggtgaggctacgccggaagatagttttgaggcgccggaggctgctagggagaaatccgatatagatgtcccagctaccaccatagtcgacgcaggttcatcaccatcacctacatcaacagcacccgtgcctggtcctgcactccgaaacagacatcagaacattgcaaccgcttcatcaccaacatcaaatctcaaaccaacagcaaccgcaacgggcacctccttgcacgacgctgcgaaaacttcagaacctcagactgcggatactgaagaggctctcgcaaccgaccgcctcgaacaagaaaacctcacctcctcccttctcgacctcgcgacacaactcaaaacctcctcccaacaattccaggcatctcttgaagccgaaaaatcggtcctcgctcgtgcagcggagggccttgatcgcaccacgggaaacctcgctgctgcagagcggcgaatgggcatgttgcgccggatgacggaagggaaggggtggtgggggcggatgatgctttatgcatggatttttgcgctgtgggtggttgcgatattgattgtgtttgtcggacccaaattgaggttttaa

SEQ ID NO: 25233 - DNA, 777 bp, Emericella nidulans
atgccgaaaaacaatcgacccgcgacgtctggttatgctcgtttggcccaagaggaagaggatagacataacgacccctacgaatactcggatgacgatgatctgtaccatacttccagcacagttaatccctacggcacacattatgaaccgatctcaacccgaggctcgatgcccccaggcgtcgcaacgacgccgcccgaataccgacggagatcgagcgtacaacaccgccgaggacggaggaattcggccgtggacatcaaggctatcaatgcacgtcttgagcgctgggcagaggaatttgcctctaaattcaagattcatcgcgtgaaaggaaagacactcgaggaggagaagctggagatttaccattcggtttttcaaccacctaatggcgttcgaccgatcacagcggaagagctggactcggaggaagctgagatggctacgcgaaaggctcgggaggggtttgaggaagttgtggagagcgtgcggttggctatcgagctcggcgttcacccccgaatgatctcccaaggcagctcaggaagttattttgcgcgcaatagcgaaggaaaagtcgttggagttttcaaacccaaggatgaagaaccgtatgcatcccgcaacccgaaatggaccaaatggatacaccgaaatctattcccttgctttttcggtcgcgcatgcttgattcccaacttgtcctatgtctcggaagctgccgcctatgtactcgactctcgtcttcgcaccaacatggtgccttaaaca

SEQ ID NO: 25234 - DNA, 718 bp, Emericella nidulans
aagaatatggcgagtattttggctgatcaaaaacgccctcaattacagcccatatgccagaattgcggcacctccaagactcccttatggcgtagggacgaactcggctcggtgctttgcaatgcttgcggtttgttcctaaagctccatggcagaccgcggcccatcagcctcaaaacagatgtgattaagagccgcaatcgagtcaaaactgcaggccagggaccaaagcgcaaagtgagtcctcaagctgaggttttctcaggccttctgcaccttatcatgcggatagtggtcgctaatgctcaagtgtgtgcaatagtccggtagcgcagtcgacggaaatgggctttcctcttcgagatcggaagctggcacccctcctctgggggtttcgcagggatatcgtcgcgcgtcgcgtaagatgtcacccggacattcagaccgatccaattccccagtgcctccgaccgatgctcacggactttccggcttgcaccaggcggtcgcgcagtcttattacaatttcaacattgcgccccagcttttgttcgacagtgtaacggccggagaccacacgagtcaacttccttccgtccagcttcgtatgccttaccctacgagcccgaccgcgccggtagaccgccatcatgagcctccggagacatacgaggacctcctggcggcacaacacgttcttgaagactcgcgtctgtga

SEQ ID NO: 25235 - DNA, 762 bp, Emericella nidulans
cggtctgtcagtcctgtgaagacttactcagatccggtcattgaaatcaacacgaatctccctacgagcatatcttggggcatgtcctatcaacccgttattcaagatatgatgaagatcattgagggtttcactaaagtcgaaattgacccgtctgaaagagtcgggttctgggacaagatcagactgagctttcactcgcgtatccgagtcaagtggaaggaggatggtgatgtccatctgcggttgaagggctctcgtgatccttacgtcgtaaccggttttggctgcggattcgtgatgtgctggcgtaaggatgtccagtggaatatccatacaactgatgatccgaaagagttcatgagcgtaaccagcggggaatacgtccttgcaatccccgactacagccatgaagccagatatttggccgaggcaacagcggaagaccttgaaacgagctcaatgtctagtgatcagaaaaacgccgctcagttcaagaaggtcattatgaagttatcgggtgacgtgaaatgggcagccggtctggttttcgaacgcaatgtcaacgagaatgagcgctcgacggagtttagaccccactatgatgttgtcctgcggaatccaaactatatcaacccctcagaacgagaggtaagtgtatacgcctaattgtaagtcgcaatgcactaattggtgtaggattacgatgcttatcgcggtttccggagcaatcacattcacctttccgtcgcaatcattgct

SEQ ID NO: 25236 - DNA, 345 bp, Emericella nidulans
cccgggaactccgatgctggggcaatgaacacctggctcctctggtgcatgctgggaacatatcccatagtcacaacggacgtctacctgctaggttcgccgtggttcaatgacctgaacatgacaatcaacggtaataacacgctaagaattcgcgctacggggttagaggatggggtctacgtgcagagtgtcaagatcaacggggagaagtggacgagaaattggtttgagcatggggacgttatgcggaccggcggggtaattgagtttgagcttggaagcgaacccgtcgtctgggaagaaggagacgtgccgccaagtcccggacatgtcgaagtctga

SEQ ID NO: 25237 - DNA, 1506 bp, Emericella nidulans
  unsure (1)..(1506): unsure at all n locations
tacgatgttcctgttggaggtaatggattcgttcacctaaggtacctactctggaaatagggtctgtattacagatgatgtgtctaactgagtgttagtgtggttcaaccaaaaattgcagatcgggccactgcaaatgtgattatcaaccttcccagagggccactcttccacgctgtacatgttacagataagcctcagagtaacggatccgagactaaccctagtcgtcgtccagacgacgcggtctctgaccaggcgctagcggataaaacctcttcgactgtggttacaatcaactaccgtttgggtgagatgccattcgatgagaaccaaattccgctgcactcaaggttgcaaatacagcgtggtgaagccgaaccccaacccctttactaccgctacccaactccagtccacgacaccctggccggactcgactgggtcttgggaaacctccagcccacgcggctaggcgtcgtcggcacacacattggcggctctctagccctcatgctagctctcaccgaaccacgttctatacatgcagtcgctgcaatagagcctgtctgtgactggaccgccctggatgagtactgcacttcaactaattctcccgccactagccgtaggagaagacatgccccagtggatttagttccgcttctagaagctcgcgaaagattctttgcgagccatgagcggtactttgattcatgtgcttcgccgatcctgttcctgaggtctccggggagggatacacccngggtgtttccgcggtatcgaaccggtcccgaatacccgattcctgtgcgtgtggttggagaagatgaccctgaagaggagcctgatctatgggacccttacgagctatacgatgagatagacctttcgaacagtaagagctcggctgtcgattattcgggccaagaagctcaaccgcccgcccgccgtcgcaaggccctctcccgatggcctccatatggcttggactatggtaattccggcccacccgaaaggtacagccgccagcctgttaagcgactcaatgtcacccttccctgggttcgtatctttaccttcgccgatcaccagtctaaggagagcacaagcccgagcgcaattaagtctccgaaagcatcaactccaacatcgcaagtaagcgaggtagacgaaacacaaggacagaaagcgccgactagacgcagacggacgcgaaatgacactgtactctctcaccaagctacggaaatggtggacgtaatgcgccgtgcttgtttctttgggaaggaaagtggtttcggtgagaagagggttactctctcttctgtcggtgtttctagctctgatacctctacatctgatgccgcgaccagcgctcctgagcagcgcgaatatctgtccgaggctataacaatgcgcactgggagttggcttgcagagacacttgatttagatatcaaagaaaacctcaaggcggataataccaggacacgcgaccgatga

SEQ ID NO: 25238 - DNA, 351 bp, Emericella nidulans
atgcaaacataccatcgttcaggtagcggcgggtcccgaacggggcgcttccaattctccagctcgaagaatcgttctcgacactcgtctccgttcgaccccgaggcaccgccaatgtcccgccagcgcgagcctcgagagaatagcgatttcctccgcatagtcgtcttggagatgaacatgagacgccgaggcaaactccgtgatgacataccaactcgagcccaggtctggttacctcctcgcaagggcagtcaggccagattcgttccatacgttttcgacccggaggaggagctcgagtctgaaatcccggcccggtggataggagtgtccatcgagtctttctga

SEQ ID NO: 25239 - DNA, 432 bp, Emericella nidulans
atggctgtttatgcacctggaccagaaacagtgcatgtctcgaggaccgaagaatttgatgaatctgcctttgacgctgcgtttgaacaggccaaggcggacatggcatctcagttcgaggagtcactcgttgagacaaacgttactgaatcgaacgccaataatgaagatcagaaagaagaggcccctgctcaacaaattggccatgaaacgataagaattgggtcggacaccatctcacaagttgacaaggacgatcctcaagcggcggcgaacgatgcagacgaacttgctcgcaccgcgggccatttgttgaacagcgtcagccatgagacgaatcaaaagttccgagaaagcaatttcctggcattaatgcggcgcattcgagaccatgaggtccaactcgagggtgatgaatttcgcgaagtcagt

SEQ ID NO: 25240 - DNA, 330 bp, Emericella nidulans
atgatttatatccgtgtccacaaccaccaagtaataggcctcgtcgccaaagagataccaacacctcgtcaacaccgtcacggacgtcgttcacaacgcctgggcaatgagcatgacgcgcccggtgcgtggcttcgagccccaattcaaaacgatgcgaaatcttatcgacctctgccgcgattgcgctaatcggcggcattcagacaccgggaaagtcgggttccagttcgtctcttccgtctccgtcgtaggctgtcacccatttattacgaagaaggctatcgttcctgaacagccagtcaatgcggaatcagccctgccgatggg

SEQ ID NO: 25241 - DNA, 354 bp, Emericella nidulans
atgaggacaatttatgccgcgttgcttgctggggccgggctggctactgcaatccctcatgcgtctccgtctgtcccagcatccgccccgacgggagtcagttatgcatcaggattcgacatgaccagaagctgggccaatctcagcccctacaaggatgcaggcagctttggggtccccaagggggtccccaaaggctgcgagctgtcccaagttcacgtcctgcaccgccatgccgagcgataccctacgggctatcctctggatggtgaaggtatggaagatttcgcgacgaagctggccaactacaccaagacccattcggtcaaggggcctgtgcacagggccccttga

SEQ ID NO: 25242 - DNA, 255 bp, Emericella nidulans
gctttctcgtccctttcgtcgctcatttccggaaatatcggccatgtgatcatctggagcattacatgtatcggacgtgagcgggaacgactgaacactggaccatatgaaaacgagatgaggcaagggctcgctgaggagctgttggtcatggcgaaggacctgatgatcttctccggcatggtcaaatacaaactacccccaagagtttacgagactcttgctcgagctggagcggacattggcgcattctag

SEQ ID NO: 25243 - DNA, 744 bp, Emericella nidulans
atggtcgtgaccgaaaagaaccctaacaataatgaccaagagcctacaccaaagacgtcgacggatcagctccccaagggcccgatcggtcccagtcctcctcccaatggcggactcgtggcctggctgcacgtggtcgctggtttcatgctgttcttcaatacctgggggttgctcaacactttcggcgtcttccagacatactacgaatccgggactctcttccgtcggagctcctcagatatctcgtggatcggatcagtccaggctttcatgctgctgctcgtcggcttcatcacagggcccatctatgaccgggggtaccttcgcacgctgctgaccgtgggcagcttcggcatcgtcttcggcaccatgatgctcagtctctgcaaggagtactggcaggtcctgctggcgcagggcttctgcgtcggaatcggtgctggatgcctatttgtcccgtgcgtctcgatcctgccaacatacttctcttccaaactaggcgccgcgctcggtctcgccgttgcgggatcctctctcggcgggatcatctatccaatcgtcctgaatcgcctcctcagtcccctcggctttggatggcccgtccgagtgattggtttcattgccctcggcaccctcctcctcccgatcgtcatcatgaagcagcgcgtcaaaccacccaaggccaaaaccctgatagactggaccgcgttccacaacatcccatgcatcacgctagggatt

SEQ ID NO: 25244 - DNA, 312 bp, Emericella nidulans
acctccgctaaggagaggccagagaaatgggactcggggtaccaacatacggcatactttctggcgtggctggaggatttccggattgggaggggagcgataggcttgttaaacgatcggctttgccgtgttggttatgttggagaaggtaggcccggcgtggacattaaagatgacgaacaagagagcttctggaaggctctgtacggcgctgagatcgatgaactatgggatgagtatggtagctggttggatacctcaggcggccaagagtcctgggaagacgagatcgtcactctagtcgatacttag

SEQ ID NO: 25245 - DNA, 207 bp, Emericella nidulans
aatatcccccgcgacagcctctcgaccgccagcagtatcacaccgggcaagcgcgcaccaactgtaacggcgctggaggaggacggctgggtggccgttagctctatggtcgagaaaaagcagattgcgacagtgatggatgagttgaccaaggttggcgcgacggatatcttggttttgagcatcgccaactcgcggacggattag

SEQ ID NO: 25246 - DNA, 1009 bp, Emericella nidulans
tccaccaagtggtcgcggcagtttccaggacaagaagagctcttggtaggtgtaccagcgccgtgctaagaccgctgacgctgactggatgagcaggcgtatctcactcacgttgctgagaaatatgggctatacaagtatattcgtttcaattccgaggtcacagaggcgcgatggagcgatgaagagaaaaaatggaaagtcagcaccaaagtttctggcgacaaggacaaccagttcacacgttcctatgtcctgagcacggatttcctcatctctgctgttggacagctgaactttccccgagaaccagatatccctgggctgaacgatttccgtgggaaaatgatgcattcggcgcgatgggattggacctataactacgagaataagcgaattgctatcatcggaaatggtgattttcccaaggtcggccattcaatagtggcctgctactcaggatgctaattatttccatccaggggcgaccgctgcacagattgtccctgaagtggctaaagttgcttcgcatcttaccgtataccagagaactccgaattgggtaatccctcgatctgataccgccatatcgcccctcgaacaagctctgctaacgtaccttcccccactgcgtattcgaaaacgctcccttgctatggacttccgtgagagcttccatgaggttatcagggactcgcagtcccaaaccgcgcggctggcccgcgacatcaccgcgcaacgtttacggacacagctggcgaacaagcccgagctatgggacaagctcacaccgaaatatgcccctggatgtaaacgattgatcataacagacgattattacccagcgcttagtcgagaaaacgtggatctggagaccaggcgtatcctgcgcatcacagagacagggattgctgtagaaggcgactctcagcaagagtatgatctgatcatccttgcgactgggttcaagaccgtagaatttatgtgtccgatcaagatccacgggtca

SEQ ID NO: 25247 - DNA, 2056 bp, Emericella nidulans
gccctgtacttcaaacttcacacaagacttcttcgtaggtacgtgctcgaatcttattgccatgggaaataggatccgccattttgttggtgtcgaaagctctgagcagctcgcattcatcgatgagcttcataagcttgggctcagcagcgatattaaactaccagaggtgcgtctcagaccctgcataacttgaaaccttgacagtttaatggatgctctcagctcgtcgtggttggcgatcaaagtactggaaagagctctgtcctccaagcgatcaccgagatatccttcccagtgaagcaagatacgtgtactcgatttcctgtaaagatatcttttcgtcaaactgccacagtgactgttccagccgtcaaggcaactattactcctggccgactcacggcgaaggacgatgcttttcgtgcaagaacaaaggacttttgcatggagagcgaaacgctgacgcaggaggttttgagggacatgattgacaaggtacctctaaattaatttcttttttgaagctctgaaagggaaatttaacgcattctaggctactgaatgtatcttcgaagaggatacggtgaagagtgaccgtctgtctgatgcggtcctccgcatcgagcgctcgggtccggacgagatgcactggtcaatagtagatcttccaggtctgatccggaatggaggcttgaccaagggacttacgaatggcacattgaccaatggctcatcttccactcatgatatggtgccttcggatacagacggggctattgctgaggcggtagtgcgcgaatacatgcaaaacgagagaaatattgttctgtgagtagagctagccacaactgacagagtctatgtactaccctctaggctaactgtatccaggctcgtcgtcgacgatgtcgatgttcgtcgtcagagaagtctagagatcgcccagagcattccaggactccagagccggtcgattggggttctaagcaagtgcgacaagagggaagaaggatctggcgaatgggtacggacttaaattttcctctccccccgactgctgatagcacacaatctgactgccgacggcagatggtctctttgttgcagaacaaacggatcccgaatgtcccctacctaaatcacggttggttcgggatccggaacagaaggcctatcgaatctcacttcacagatgctcaacgggatgaggctgaggaacgagagttctcccgagcttcctggcgggatgcgccaaaggaacggttcgggataagggctttgatgaactacgtcgacagggaacgtcgtgtgcagctgcaaaaaggcatgcctcagatcatcgatgagattcgccggaaactcaaggagtgtgaagacgagcttggaaagatgggggaggccaggactagcccgggggcccagcgatcttttgtgtggcaattctgcgccaaaatgcaggagatggctgatgctgctttgcgtggccgataccagactattgcctccgtagaccccaaagtcagactccgctacctgatacagcagcgtttagaggagttaggcgaagcaatatgtccaaccaaggaggtttctgtacgattcaatgcgtatgaggaggagtggaggcaactccgggcttctgaccctcgcacatgggaagaaagtatcaggacagcggatgacatatactcactcatttataacgaggctatacttagtcgtggaacaagcttgcccggtagtgttcacccggatgttgaagaaacggtcttccggaagatgtctgagcactgggaacgctatgcgagggacgcggttgaggatgtcaagctgcgagtgaaggagtgctacagtatcctgcttcaactggcgataccgactaaccgcgtgcgattggaggttagcaagctcatcagcaggcaactggaagattggaacaaggatgcagataatgctctgcgggagctcgtcgaggataaccagacccggccactgttcacaacaaaccctgggcttaagttaactaccggaactgcggacgagctacgcaatc

SEQ ID NO: 25248 - DNA, 636 bp, Emericella nidulans
atcatttcaagcacaaccaaacggcccagcatgtcgacaacatttgaaaaaaccctttcccttatcgacgctgcgcacgcccaagaccccaaaactaccaccccgcccaaccccgaatcctccccagtcccctacgaactccactatgccaacaaaatgacaaaatacctctccctgcgcagcccctccgcctccgaagccctccgtctcgccgtccgcgcccaacatctccgtcgctgggaagttccgcggacggactttcctgcgaccaaaatcgggtaccatagctggcggagtcatcttgcaaaaaggcaggctgagattgctcactctttatgtcttgaagggggctatgatgagcagtttgcggggcgggttgcggcgctggtgagaaaggaggggcttaggagcggtgaggatgaggaggtacaggttctggaagatgttgcttgtctggtatttttggaggatcagttggaggagtttcagaatggatatgatgaggagaaggtcattgggatcttgcagaggacttgggtaaagatgagtgagagggggagggagttggcgcttgagatggagttgggtggaagaagtaaagagttaatcgggaaggcccttggtggtagcgcttga

SEQ ID NO: 25249 - DNA, 1415 bp, Emericella nidulans
gacgtcttgatggtttggcatgcacatatgctcaatcctagatcttttctggaagactgcattcgacacggaaagatcagtttctggtctgccggatttccatgggaagccatcaatgcctccatcgacgacagaaccatggtgtacgacgctgggggtgatgcggccggcatctttaccagcaaaaccaacctcgaatgggataacctcaaggacatgccttcgaagatgctagactgtcccagctgcagtcatccaaattctgcaccttggactaaagggaggctaactcttccgtttgagagaacatatgatacctggactggatttacggacaagaattttcacatatactgcggatactgcaagctcagaatcacccacgatacgctgcgggtgcgaaagtttagaaacgatatcacggatcttgtcgagggagatcttcccatgccaggcactttactcaacttgtggggtgtccccgaacctcagagcgcgacccgacgaaaactgcagcaagcaaatttccccaatcggcttctgcaaacgactagaagggatattcgcgagtacttgcgatcaactctatggatgtgccctagcgtaaccatgctgcgcgactacctggggacattattacaagacagggaagtcatgcgtcaagccaaccctggcagcctcggaactaccctctacaaagacgagaagatcgctttccgccgcatgatgtcccgatactggagcaacagttcccagtttgcccttgaccttgtcggcgccgtcgttcgtcaagggacgtttgttcagaaaatggacaacatcgactggctccactccccagctctgaccgaaacaatgcagcgcctgattcgcaaatacgccgtcttcttccagatcatggccgccaacccaggccgcatggctgtaccgacccttgacgtagacctggcctggcacacccaccagctcacacccggccgctacttcgaatactccgttcaccgcaccaaacaagatgctaccgcgccatcttcatcgaccatgacgacaaggtcaacgaaatcaaactctccgagggcttcgaagggactagcaaaatgtaccgtaagctcacggacgggggcatctatagcgaatgcacctgctggtactgcgaagctacccgcggtgcacatctcaacagccgcggccgtatccttcttccaatctcctcaggcgcaagggcacgctctgcggccgcaaatctccacgacaaccctaatatctcctcagacccagacaaaaatccacacatttccgcacacagcgccgtcaagacgaagaatgccatggcagatgtagcaggaatagatcccaaccgtgtgaaattcctcaagcttcgctccgaatacgagcggatttgccggcgcgcataa

SEQ ID NO: 25250 - DNA, 747 bp, Emericella nidulans
atgcttcctcgagaccgcgtctcagccctcatcgacccgggcacgtcttttctggagctttctcaattagcgggtcatgaagtgtacccgggagaagatgttcccgcgggaggcatcattactggaatcggaacggttgaaggggtaacttgcatgattgtggcgaacgacagcaccgtcaagggtggcacttactacccagttactgtgaagaagcatcttcgcgcgcaagctatagcccaagagaacaagcttccatgtatctatctggtggattcggggggtgcaaaccttccacaccaagctgacgtctttccggacaaggagcactttggccgcatattctttaaccaagcgcgaatgagctcgcagggtatcccgcaaatctcggtcgttatgggaccatgtaccgccggaggtgcctatgtgcctgctatgagtgacgagaccattattgttgagaatcaaggcactatcttcctcgcagggcctccccttgtcaaggctgctactggcgaggttgtttcagccgaagacttaggaggcggtcaactccacagcacaatctcaggtgtgacggactatttagctgttgatgatgcccatgccattgtcctcgcccgccgctccatctccaacctgaactaccccaaagccaagcagcccctagagagcaacgatgatatcaaggagcccctctatgatccagccgaactgaacggtattgttggcacgaatctccgccgc

SEQ ID NO: 25251 - DNA, 984 bp, Emericella nidulans
cttcttgcccgcctgcgcggctgcaaaacagcagctcgcacgagccaaacacctccgcgcgctctctcacccagcttcagcgccgatgataaatcaaaaacagcaacacagtcagcaaaccccgcgactactcttccaccgcagctccgccatgtcctgtcgaccctcagtcttcccggcgacgacgaatacaaatacaaggaaattcctgaaaaagaggtcctgcgttgccccttgcccatgacgcaggactaccgcaaatgccaagaggaacggtacacgccgactgggttttcggttgccgaagtcaaggcgctgggcgacttccccgattatgcggcgctgagtggggtgccgctgccgagggcttacggggaaaagtttgacgttgacaaggcgctggcgagaccgtaccggccgttccggtgggcgtatcatcagacgatgtgtatgttgggcttcatgttgtgtgctgtttggtttgcgacggccgacggctgacgctgtgtagcactaacgaagatggagactgattggtggcttgagctggaaaacacgtacaaagagcggattgcacagcgcaaggcgctgtttgcgaaacatggaggtggtgttttggctgccctgcctggttcggaactcgcctgcaaggagcttatggagatggcactgcagttttactgcgcccggtatccgcagtatttctcgttgattgacaggcggattttcaaaaacaggatcctcggtacggagcaggatgttagattgaagccgcccctggaaattcttatgaataatgttccagaggactttgggatcatgatgcgcgatgataacacaggcaattactttttgcgcgcggccgtaatttgttcttcgatggggtggaatgtcgcgagtaagcttgggctcaggcttgatcacattcacgccaccatacctgactataaagaaaagatggagttttctatgaaccggtaggtg

SEQ ID NO: 25252 - DNA, 673 bp, Emericella nidulans
gctctcaatgccaaatacgacggtgtgggtgaattcggtcgcaaagagtgggatcagcttctgggagactgccaggtaatactaatccttggccgccgataccatatgcccaagaccactaacatgtctctaggctgtttgcgactggccagcctgcgctttcgccaaggaactgatcgaagcctaccccaacgcaaaggtcattctgaccacccgtgatgtggactcatggcatgcctccgtcatgaagaccgtctactggcgtgtctccgaccccgagcaccgcttcgtttccaacttcagctgggctgcgagcatgtattaccctatgctaaacaagttcttcaacaccttcttccgcggcgacttccccaacaagggcaagcaggtctacgaggaccatgtcgcagaggtccgcagcctcgttcccccagagaggctcctcgagtacaagatcagcgacggctggggcccgctgtgtgagttcctcggcgaggaagttccggacactcccttcccccgtggaaacgacatggccgacttcttcaagcgctgccgtggtcgcaacaggcgccagatggccaacgccgcactgcaggctgttaccatgggcggtgccatcatcgctgctgggttcgctgctaccatggctttcaagcgtttctctcggtga

SEQ ID NO: 25253 - DNA, 366 bp, Emericella nidulans
aacatcacattctcactatgggaaaaggaacgcatggataaattaggcgtggacggagtgtcggtccttgtgaacgacgtcgaacgctggcgtggttacgtggacgaggatccagaaggggaatttacatggcatcgtcacggtcattcgggtcttgacctcaaacatctctccactattgacgacgacatatttgcgtcctcggagctcgaaatcaaacaagctgattcaagcgacgatgcgaagccggaaaccctcttcttccgcttcgcattcttgaatggcgccgaggcggggacgtacggcggccccgggatttggctcgaagacgggggctggatttctcctccacagccgaaaaactag

SEQ ID NO: 25254 - DNA, 1011 bp, Emericella nidulans
gttctggaggcatgccctagcgtccccaatgataactgggatgcccgggacgcagaatggtcattgtaccgaaaacgtgtacacaccgctatctcggatcttgaagaattcgcggaaggagaagagcagccagcacccgcgccggcgacgggaaatactttccaggccatcaatttcggattgggatcaaatcccttccaagggccttcgtttaccgaatctgcacgtatggccgaaagtcgggtgccgtggaccatctaccagaatttgcggtcggtttaccgaatcatactcggcgacccggcggctatcatgaactatgcagagagctgggtcgaagccacgattggcctaacagtctggtgggatggcgaagacgacgaggaagccagcccgcctccattcctacgccgtggacagtcgccttctaatgatccatatctccgccgtctaagcctggctttcaagcatgcaacaagtacagagaaggacgagaaaggcttccgttataattcactaagcggaatcgaggttggactggccgctgttttcgaaggtgacgttgcgggtgtattagaactgctccagacctggtctctctgtgtggctgctgctgtggcagagatttcctcggttggtggctggctggagacgaagagcaatgctaaaccgcctggtctaagcgataatgaccttatggttctctcttataaccaaaacgacgcccccgccggagttagcagagacgatgtcctgagtgcatatgctactggtctgtctgagagaccgtcgatcggaaacgagcatgaaggtcgcgaaggatgggagctagccctcgaggttctgagcaggctagatgacagtcagaagatgcaaaagagcgtttcggaactgctagataagcttccgctcgacacggccgaacagatggacaaggtcgttctcctgtgctccgagctgggactaaataaggagggtagacgtgtttctgaggtacgtgctccaatgagt

SEQ ID NO: 25255 - DNA, 732 bp, Emericella nidulans
ttagctggtgaaatgcttgcccaggcgctccctcagctcgaacgcaacatccaccccgtcgtcattatctcggccttcaaacgtgccctcgctgatgcacttgcaatcattgaggaagtttcgctccctgtagacattgatgacgacaaggcgatgtacactcttattaagtcatctatcggcacaaagttcgtttccaggtggtcggatctcatgtgcgatttggcactaaaggcggtccgcactgtgtcttttgatgccggcggtggaaagagggaggtcgacattaagcgatacgcgcgtattgagaagattcccggtggtcagattgaggacagtgaggttattgatggtgtgatggttaacaaggatattacccaccccaagatgcggagaagaattgaaaaccccagggtcatcctgctggactgcccattggagtacaagaagggtgaatcacagaccaatattgagattacgaaggaagatgactggaaccgtatcctacagattgaagaggagcaagtcaaacacatgtgtgacgctattctggctctgaagcccgatgttgtcattaccgagaaaggcgtctctggtattttctcccattcctaggtttagattgcttctctaacctcttcagatctcgcacaacacttcttgatgaaggcgaacgtcacagcaattcgccgagttaggaaaacggacaacaaccgtattgccagagcgacg

SEQ ID NO: 25256 - DNA, 1052 bp, Emericella nidulans
aactggtaagggtctttgtaccccgcttctcattgataaggataccgtatctgttatttcgcctgttgtcttctgctactctttccgcctcgggcgagtgctagcaagttgtttactttttgttgcggagtccgtttcggcgcgaagtatgggtttgctaacgatctcgcgtttcctcagtcggccataccctcacgacagtcctcacggccccacgatattctccttccaacagaaactcatcatggacgaaggcggcgtacatcagaggaggaagtcggacgcgaagggcgcgacacgcctgagctacaacctgcagatatggaagatattttggactctggctcggattacttttctcctccaggctcgccaactactagaccccggttgtcgcgcagttccctttcgtaccaggatgactgggagacatttccgccccttgaccaactcactgttttcgaccttctcgataacctgtctctgtcccagaggcttgaaaggctgcagcgctctctcaatctgcaaagagagaaggtcaagaagcagcaggaaaagctacggtcaacctctaagaatgcgcgagaccgcgtcgttggcgaattgaaacgaagagtgcccaccgccgatgagcagctggagaagtaccgtcgtcggatgaagactggagttgaacgcctgtctcaacgttggaatgcagcatctgcggtcacacttcgtgagaagatctcgttcatagcgggtgttctcaacatcttcatcagtggctatctgcttgggtcgaaccccgaatacttctacatctggttcagtgcgcagctcgcctactttatgcccatccggttttacaggtatcattcgatcggataccactatttcctggcggacctctgttactttgtcaacgtgctttgcatgctctccatctgggtgttcccacagtacaagaggctctttatcagcactttttgcttgaccttcggaaacaacgcagttgcgatcgccatgtggcgcaactccatggttttccacagcatggacaaaggtgttag

SEQ ID NO: 25257 - DNA, 798 bp, Emericella nidulans
atgattcacacagtcaaggtacccgtgaacggggcttcagcagatgactcgagctcgcagtacactatcaaagcggagaagttgctgaacatgactgatttgtgggacatatttgattatgacctcaagttcaaagccctggtggagaaacgcaacactatccaaaagacttatgataacatacggtcggttttctctgtcgaggaccctattgtggaggaaatgttacccatagccactactatggaagagctgcaagatatccaagactaccttcacttccagtatgcctcgcagataagggatttgacgcttacaaacggtgataccaacggagaagtccaaaggcggaaggccctcacaagaaacttctttgagcgtgttcgcaatagcaaggcttatggtcttgtgcgtgcatttggaattacagcagatgcattcgcgcaaaacgctcttaaagagggccgtcgtcagtacacggaagatgcatcggagcgcccggaggatatggcggatgggctcgttgataacgacttcaacaactcatctcaagtactcaaggcagctaagggtatgtttgcagaggaaattgtgatgagtcccaaaatgcgcaaagtcatccgccaggcatattacatgaacggcgcggtagattgtttccgcactgagaagggcttgcggcgcattgatgagcaacacccgtactacgaattcaagtaccttcgagaccagcaactcagcgatatcgcccgcagccctgagctatttctccgcatgctgaaggcagaagaagaaggc

SEQ ID NO: 25258 - DNA, 1188 bp, Emericella nidulans
cgattgagggataacttcggaagcacggcctttctgcgcgcggcgcagttcaagcggaaggatatcgttgcgctgttggcgccgtacaacaatgtcgaggcgctcagtgaggatgcgcgcggtgcttgcgaaggctttgaagcgacggtcgtggatttcgggaattttcacaatgagaaccgtgtcaagcggacatctgtgttcaacctgctgtatgggcgggatcctgagaacccccggaaacaagcgttcaacgcgatgccgttgaatagcaaggcaacggagttccgatggattcatctgcccgcaaataatatggcttgggtggaggcgttgctaacaaaggcattcatcgaggagggggcgcatgatgttgatagcttcaaggggctggagaggtcgttcaattaccagcaccgcgggcagaagatgcattcgaatttcatgaggccgttgtgtcagagcacgcatagggcaccgaaggttcatgatgatgttcatcgtgaacctgcggaggagagggcggaagtacagtcaccaaaaatattaatcaatgggctctctcgagagctgctatcctcaccagtgccaccgtctccgaagctagacgggaacaaaaagaagcagaagatcggcgcaaagatggagcgggtggattcgcaggatgatactcagagcgcgtcgggaaagaaaggaaagaaagggtcagcaggaacccccaaagggcctaagtcgccccctatcagacgagaaaagtccccacatcccactctttgcaaggaaaagccgccaccgctggaaagcaacatctgttacttcatgccgtacttgcattttgagacagcagagcgacgagagaggatgcaggaggcgattcgcaacgctcaacaggccccgacgccccaaccggggcttgatcggacaccaacacgcgatgaattgctcctgcgcgctcacctcacagggtcgtcgacttcgctccacatccggcgtacactggaccagtttttctatcccaatatcgatacgcagtcacgcgatcaggaccaggtagtgtataggtatcagaagaagagatctcgtgtgccggacgcccaagagtcttcatggttgtccagctgtgcgatgtggatactcggcccaagcttgattgtaacagcaacctcacgatgggaccagccaaaatga

SEQ ID NO: 25259 - DNA, 555 bp, Emericella nidulans
  unsure (1)..(555): unsure at all n locations
aaagnaagggctctatacttgttcagcacgtaagacgtcgcagctcatacctcgtgcactatcatccacaatttccttccaccagaagaagcgaatgcgcttcttctcgaactcctcgaggagtcgcaacatttctcgcgctatcaaatgcagctatttgaccggactgttgaaagcccacattctacatgcgtctacgtctccacggcagaagaagaggcccagcacgcgaatgactatacgtacggtggcacgtatcacaccaatatccggcaagcaaccccgcacctccgcgcgatctccaaacgcgtccaggaagctgttaatgaggaaatacggaaacggatccgcgatgtctaccccggaggtaagaaattgaagtatcagtcgccgaaagaatgggtgccgaacgcggcgtttgtcaattgttatgatgggccggcggaaagtgtggggtatcacactgatcatcttacctacctcgggcctcgcgcggttatagggagtattagtctgggtgtccagcgagagtttcgggtgcggcggattgtctct

SEQ ID NO: 25260 - DNA, 1081 bp, Emericella nidulans
ggttaaggccgcagccgcagaaatcaagactggggagatggttcggttggagtatgcatatcccccgtgttctctctttccctacgttggtctttgcccatatccaggtgatgtgcaaaagatgtgctaataataagaaaaaagcctccctctcgacgtgcccaagaccccttcgttcggccgtgaggtcttccagcacaagatcaagccgctaggcagcggtgtcgggtatgatgatttgtatactatgaacacgcagagcggaacacaatgggatgggtttcggcacgtatgtcaagctcccatgtcccaagaatatggtaagtagatagatgctaagtatagtcctaagttcgcccacctgggctcgaaatgcttctacaacggggttcgtgtcgctctgcctcaccataccgggcttcggtcacccggtcaccctcactgaaggataagactgacaatacaaaggcaacatccgccgacatcgaaggtcctaatcccacaacccgctgcagcatccaccactggtcaacgcactgcatcgcgtcgcgcgcagttctactagactacaaatcctacgccgaagctcataacgtaaattacgatccctacacctcgcacgccatctcctatgcggacctagtcgcctgcggcagataccaaaatctcgacatccgacccgagtctgccggcggagacttgaaacccggcgatatcctactcgtgcgctcgggcttcgtccagcgatacaatgaactcacaccttcgcaacgagaaagcgcagctcaacgtactggcgccgacattgcttgggctggactgaagcaggaagaggagattttggactggctgcatgatagctactttgcggctgtggctggggatagtccgacgttcgagtgttggcctgttagcgctaccgaggggggaaggggatctattgggtttatgcatcaaaatattttggcgctatgggggatgcccttgggggaaatgtgggatctcgagagggttgcggaggtctgtaagaaggagaggaggtggacgttcttcttgaccagtgcgccggcgaatgttgttg

SEQ ID NO: 25261 - DNA, 1101 bp, Emericella nidulans
atgcctcaactgaacggaaaagaagttggccctatcggccttggcctgatgggcttcacctggcgtcccaacccgtgccctcaggagcaggcttttgagacgatgcgggcagcgctgcgaaatggctgtaggtggaatacttgcttctgtccagatacggtcgaatgtatattgacggagtcttttggtaggcaccttttggaacggcggcgagttctacggtccgcagtcctacaatagtcttgtcctgctcgagcgctacttcgagaagtaccccgaagacgccgaaaaggtcgttctgaacatcaagggcgggttcaacacgtcgactttccagcccgacggctccgagtccggctcgcgacggacactcgatgacagtatcgcccagctcaagggccgcaagaagattgaccagtttgagtttgcgcggcgcgaccaaaccgtgcctatggaggtgacctttggcgtgatgaacgagtacacccaggcaggaaagatcgggggcgtcgccctgtctgaggtccgtgccgagacgatccacgaagccgtcaagcatacgaaggtccttgctgtggaggtcgagctgtccatgtacgtctgcctccgtaatggaccgctgggcccagctaattagcacataggttctccaccgaccccctcgagaacggggtcgccgccgcatgccatcaatatggcatccccctagtcgcatactcgcccctcggacacggcctgctcacgggccagatcaagaagctggaggatctccctgaagactcgtttctgcgcacgtacccgcggttccagcctgacaccttcgagatcaacatccagctcgtccacaaggtcgaggaactcgccgccaagaagggatgcacgcccgcgcagtttgccatcaactgggtgcgctgtctctcgcgccgaccagggatgccgaccatcatccccatcccaggggcgaccaccgtcgcgagggtcgaggagaacagcaaggtgatcgagctcactgacagtgacatggacgagatcgatgctatcctaaccaaatttgaacctgcgggcgagcgatacccggagggggtgccgacccatacatag

SEQ ID NO: 25262 - DNA, 624 bp, Emericella nidulans
atgcggcagaagcgcaaactctccaatggcgctgatgagcgataccaccccaatgcccaacaaacggcagatttcggcatcgtgctgcgcgacttttatccgccagaaatgagcaacgcgcggtgcgaagcttacaacagcggaatcctggagcggccgattgaatcatggcaaaaagcatacacagagacgagcgctcagcagaatgcgatgaccgcgaacgcggcagtggtgcattggttcaaatccgatctacgtctacacgacaatcgcgctctgcagatggcgtatagggttgcgcgggagcacaagatccccctcattgggctttatattctctccccagaggacttgactgctcacctgtcaagtccggcgcgcgtggatttaacactgcgcactttggagcagctcaaacgcgatttgggggaactcgatgtccctttatatatggagacacaggcatgtcgaaaggacattccgcgccgcatcatcaatctctgtcaagaatggggcgcgaaccacctcttcgccaatctcgaatacgaagttgatgagctccggcgcgaggcaaagcttattcgactctgcgcggagaacgggatccgattcgagactgcgcac

SEQ ID NO: 25263 - DNA, 396 bp, Emericella nidulans
ttctggattcactgcaggatttgaaatactcccacagccatgaaatttggacgcaatttgcccaggaacgtggtgccggaatggagctcctcttacatccggtataaggcgttgaagaaactcatcaaatccctggcggaccgtgtgagggcaggtcacgaggcagatcttgccggtgagccacctttgttgcgtcttctggaccgcccggcggccctcctaaccctcgcgctctaggcttcttctactccctcgaccggaatctcgaggacgttgaccacttttacaacaagaagtatgccgatttctctcgtcgtctgaaacttctatcggaccgctacgcacataacttggatgggagtcatctggattcggacgatgtggaggatcccttta

SEQ ID NO: 25264 - DNA, 435 bp, Emericella nidulans
cttgctgggcagggtcctccccgggtttgcgccgaccagctcggccgttttaatgtcttgctctgtttggtcgctatcacgatggtcgctatggcggcggtgtggctcccttttggaacccgcgacgaggctacgctctacgccgttgttgccgtctttggcttcggctcgggcggatggctgtcgctagcgccggtctgcgcgggccagctctgctccactgaggaatacgggcgctactatgggaccgtctactttgtcgctgcgtttggcgtcttgttgacagtgccagtcgggggtgctctgcttcagtcgactacgcctcgtgttctcattggattctattctgcggttctgatggttgggtttcttgcgcttgcgttgtcccgatgggcgttgttggagtggaggtggaggtggaaggtcaaagtataa

SEQ ID NO: 25265 - DNA, 1146 bp, Emericella nidulans
atgtcgtcggcgcgaagtcctggtgctgttccttcgacgccaagggtcacctctccatcaccgacaccatcagaaggcagaacctcgtcgagatcgcgggatggatattcagcgcccacgacgcgctcggcagcccgacggcagcagcatctcggcgacgtcacggaagagacaacggactcttcaccaccgcgatcccgtcgacgcaagtcaaagctcaagcagcctacatcgggagaaccattagtggcgcggacaaacggtaatgcaccacagaagaacggatttctttccccattgccaaaagcagacggcacaggactcgtcgatagcgtctcacgatctccttcaccactcggcctgattcctcttcacacccgctaccgtaccttcatacaccgccatgagattccgcgcaaactgctccacgtctcgattggatttctgacgctccatctatacagccgcggcattcaaacacaccagatcacaccctggctcttcggagctcttgtgcccatcgccgcgacagacttcctgcgtcaccgttcagaacgggtcaacaggttgtacatccgctgcatgggtcggcttatgcgcgaaacagaagtgtccggctacaacggcgtgatctggtacctcgttggcgcatataccgtcctccgctttttccccaaggacatcggcgttatgggcgttctgctcctctcctggtgtgatactgccgcctccacctttggccgcctttacggccgctatacctttagcttgcgcaaggggaagagtcttgcaggtaccttcgctgcctggctagttggggttgtcaccgcggccgccttctggggctggttcgttccctacattggtacctttcccaacgatcccgaggacgcattcctttacacaggccgtctcaatcttttcccagatcccgtgaagcgactcattgggtggacagtaacatcaccagacaccgagtccggctctgttatcaccggcccgctagcgctgggcgtcatgagcgttgtatccggccttgtggccgcaggctctgaatttatcgacttcatgggctgggacgataacctgactatcccagttctcagtggcatcgggctctggggtttcttgaagatttttgggtga

SEQ ID NO: 25266 - DNA, 1671 bp, Emericella nidulans
cattatccgtcccggacagtgctgcctcgcctagaaagcgcctcaccacccttttcttgcgtgacgacagttctgctgaacggtcggctcagtcggccatggcttactctcctgctcctacttctcctggtccttcaggcgttgctcccatgatgtccaacggtttgcactctaggggccgttcggtcagccctccaactggcgtaccactttcgaagcgggacaagcggcgcagtgcactgcaagaacgtcttcacgaccttacggcctccttcagccagaatcgcgatactcaatttcgccaacaattgcacgctcttcaatgtgacatgaccctcatcaacaatgccgatccctataacccgggcccgatccccgattcggccgaggagattgcccagttgattgaaagcacggttggcggcggccagtttgctagagaaatggctagcttagcgggtatgtggtatgctcgatttgtgcaggaggtcaatcaggtcaaggcggagagagatgctgacctggctatgctggtcgtaagtttcttttccatttgtgtatggtagcttcaacgcggtgctaactgatttgtgtatctagcaccgccataataacaatctggagagattccagcgagaatatgcgtttcgcgcccattttgcggaagaagaatataataacctctcagcgactctccgggagcgccttgtgcagacgctgtcaggcaaacgggctcgccttatgagggaaaaagaacagcttgatatcgtggacaccaatgccctactcctccatcccaaccaatttagcatcacgaatcccgctagtcctggtggtattcacggcaatcgcaaaactagacatactcgccatcgggtggatttggatgagttaggcaatggtatcatgactgaacatttgaataagagaaagaggaaagctccggaggaagatgttgggtcaccggttcgggagactccggcagagcgcgcgaaagcccaggtagcccagcagcaacttgcgccaacatactctattcagtcactcttcacggagaaagagctcagtgcgcacgctaaccaggcacatattgccaccgttcatttcttctctacatccaagcgcgccgatcaaccctcaggcgcagtgacaaatggaaacaacacagacgcggaagaggcatcaggtgtggatggcaccggtgcagaggacaacggtacccctgctactgacatggcgcggaccgcgagccagaatttccatgctactcggtcgacccgaacacatggcaatcatgccctgaatccgttggctgagctttccgacaaaccagctgttcgtccgaatttgccatacaatattttagccaactaccacgcccgaccgagcaacagtggtgccccaccattgcccccgctcatgaacgaggaggtggacgacgattggaatcgcatggacaagatggcgagcaagcccccgggacatgttgacagaaaccttatccagctcctcgtcgagcagactccagcggagatcaatgggatcccacaaaacccgaatcgattcagcctcctccatcccgactttcccactgaagttggcatgcatctgtaccccctccgaaaagacggcgagagcaacgagcgcgccaagaaaccgaggactggatga

SEQ ID NO: 25267 - DNA, 552 bp, Emericella nidulans
atgctctgccgcgtcttcgcattcgttctcgccgcatcagtcttttacgtgctgtctctctctatcatgtctccgccaactccaaatcttgaagtccgactacaatctccctctgttcctgcaaaattcaccccgcccatccccctcacgatccaggtctctgtccagaataagggcgaaacccccgctaccgtcctgaaatggggctccccgctcgatgggcgcgccaacgtcctcggaattttcgagatccttgatacagagaacgataaagtggtcgaaatcaccacggtcaagttctctcgccagcttcctccctcagtggaggattttgtggagattccgcctggcggaaagatcgacgcggaggtaaagatcccgctcgttcctcttgagcagggaaagaagtataccatccaggccaaggggtggtggcaagctgtttgggagcagcacctgggcgaggttccgcgggagaatctagagaagttggcaggagcattgaggggagagtacgtatctgaggttgtccccgttgaagtggataaatag

SEQ ID NO: 25268 - DNA, 892 bp, Emericella nidulans
atgattaacagggatctttacctaggtgcactgcaatcaacaaactgggagagcaggagccaaaccctgctggactgcgacctcaactctccccgcgaagccccctgcacccaaggccggatccccgtctacactgtgttggccgaatcagcagaagagattcaaacggccgttcgctttgcaagggaccaaaatctccgcgttgttatcaggaacacaggccataacgcactcggacaatcttccggcccgggttccttgcagataaacaccagccgactcaagagaattgagccggtgcctgacttcattccacaagggattggtgcgtcagtgggacaagcggcgactcttggggcgggtgttctcgcactggaggtagcgcaggttgggctggaccagggattcacttccattatggggctgtgcaataccgtcggtagtgtcgggggctttatacaaggcgggggagtttcattacttggacccctatatgggatgggctcagataatgcggtggagtttaatgttgtcacggctgaggtgagttactcgagcctccttcgcagacgccaatccaccgttttctgctgccgatcagagctaagcaaaccgacagggtgatctcgttgtcgccaatgccttccaaaatgcagatctcttctgggccctccgcggcggaggcggcggtacctttggaatcgtagtcaacaccaccatacgcgtcttcggcgacgtcccaggcattgccttttccctgtacgcccagatctcgcggcaggacccaagataccccgactcagtgaaggccatcttcgacattaccagacagatcgtaggtatatttccagcactgaggcgggcagacgacgcaacaagccgctatgtcact

SEQ ID NO: 25269 - DNA, 2091 bp, Emericella nidulans
atggccgcgtccttgtgcctgcgtggctctcgccagctcgctctgcgctctcaattgcgctcaattcacccctccatcacgcgcagcagactcctcccaacataccgtgccgtgcacagctcatcacaacaatcgcactccgctaggcgccccatctacactagctcagtggcggaccacggagtccctcatcctcgcgatgtttttcagcccgtagatacgtttcctcggcgccacattggcccttcgccagaagccgctgaggagatgctcgccgttcttgaccctccggtcaaatctctcgacgagttcgtcaaacaggtgctcccggctgatatcctctcgaagaaggatctggccgtcacggctccaagcgccgacaatggcctgccgcggagcagtgttcatggtggattgggagagacggacatgctgaagttgttggacaaataccgggaacagattgacgtcagcgggaagacatacattggtgctgggtactaccccacaattgtgcctccagtgatcctccgaaacatcctcgagaacccggcgtggtatactagctacactccttaccaaccggagatcagtcaggggcgtctggagtcgctcttgaacttccagaccttgaccgcggatttgaccgggctcccgttcgccaatgcctcagttttggacgaggccactgcggcggccgaggccatgaccatgtcgttggccacccagccccttgcgaacgagaagaaggccggtaagacctacgttgtctctcatctgtgccaccctcagaccgttgcggtgatgcgctcgcgtgcggaaggatttgggatcaacctagtcattggggacattctggccgacgacttcaagatcgttaaggaccaaggggataacctgatcggtgttctggcacagtatcctgacaccgagggtggaatctacgatttccagggcttgagcgatgccattcacactgctggcggtacctttagcgtggccaccgacctgctcgctttgaccgtcctgaaagcgcccggcgagttcggcgccgacattgcttttggtaacgctcagcgatttggtgttcctatgggctacggtggtcctcatgccgccttctttgcctgcgctgacaaatacaagcgcaaggttcccggccgtgttgtcggtgtgtccaaggaccggctcggtaaccgtgcgctaagactggcgctccaaacccgagagcagcacattcgtcgcgaaaaggcaaccagcaacatctgtacggctcaggccctccttgccaacatgagtgccatgtacgctgtttaccacggcccttctgggctgaagaccatcgcccagcgcatcatgtcgatgactgccgctttgcgggagagacttgcggctttgggctacaacgtccctgccaagtccaacgtctctgacggtgctgcggttttcgatactatcacgatcgaattctcgaacagtgaagaggccgatgctattattgctgctgcccgtcagaactcgatcttcctccggcgcgtctctgctaccaaggtcggaatcactctcgatgagactgctggccgcgaagagctcaaggccattctgcaggtcttttccgctcacgccaaagccgaggctgctcttgaccaggaactcggccttgcttctatcccagcgagcctggagcgtacttccgcctacctcacccaccccgtcttcaacacccatcactcggaaacggagatgctgcggtacatccgccacctggagtccaaggacttgtctctcgcccactctatgatccctcttggctcctgcactatgaagcttaacgctacgaccgagatgattcctgtctcatggcccgagttctcgcagatgcacccgttccttcctgcagatgtcgccaaaggatacacccagatgattgatgacttggagcagcagttggccgacatcactggaatggccgaggttacggtccagccgaactctggcgcccagggcgaattcgcaggtctgcgtgttatcaagaagtaccaggaagcgaccggcagttctaagcgcaatatctgtctgatcccggtttct

SEQ ID NO: 25270 - DNA, 467 bp, Emericella nidulans
ctacagatggtgaacatcacctgccgtgtgttgtcaagacacggcgtggatgctctccctcagatctgccgatcgttggtcaaatattcgatgagcgggtgctcccatctatcgtaagcgaagtcttgaagagcgtcgttgctcagtccaatgccagtcagctgattaccaagcgtgagaatgtcgcaagacttgtcggggataatttggcccgccgcgctgcccgcttcaacatcgctttggatgatgtatcactcacggtaagtgacgacacctcatatttttgcagctcaggtttctggtgctaacgtcgaatttccgtcccattagcacctgactttctcccccgaattctctgccgctgtcgaagcgaagcaagtcgcccaacaagaagcccagcgggcagccttccttgtcgacaaggctcgtcaagagaagcaggcattcattgtccgcgcccagggtga

SEQ ID NO: 25271 - DNA, 745 bp, Emericella nidulans
ggctaacccagcgagaggcaatccagtatagcgggaactcttccaccctttctcctttgcctgctctgtggacgagctatttcagcactgccttggatgccgtgagtgctccccgtgtagaagctagacaccctgggacttactcaaaaaccctattttagcttgacttcttccaccatgattatcagaagtcaaactctctttcttcagatcttgatcggcgaattgcacaagattccgttgccgctgccggtcacgactaccttaccattacatccctcagcattcgtcaagctttcgctgcaacccagctgtgtgggccagcaaatgatccgtatctctttatgaaagaaatctcctccaacggcaacatgaacacggtagatgtgatcttccctgctcatcccgtcttcttatacacaaacccagcactgcttaaatatctcctgcgcccacatttggagatccaggagtctggaaattaccccaactcctatgctatgcatgatatcggtgctcattaccctaacgctacaggccatccggatggcaatgacgagccaatgccgttggaggagtgcggtaatatggtgatcatggctctagcatatgcgcagaaggccggggacacagcgtacctggaaagccactacacaatactgagacgttggacggactacttgatcgaagattctctttatccggcgaaccaaatatcgacagatgatttcgcaggtccattggc

SEQ ID NO: 25272 - DNA, 3934 bp, Emericella nidulans
gagccaaacgcaccacattcaacatgcctgctcacccaaaggggtcgagttcccctacgcaacaccgggttggggagcactggagtggaaacaaccctgtcccgacgatcggccgatttattgaacgtctccaggcagaccagcaggaccgcgaagcacatcagaaagcgtcggcgtcgaagacgcatgacgaacagacagacgagaatgctgttccacatcgaccacagaaggtgggcaaggggaggacccgagaagtcacagaccctacgacgggaagagagattgaggttgaggatttggacgagtctgctatggagcctgtaaagaacccgaaggtaatgcattgttctttgcatcgacagtcgtctctaacggaacgtagttggttgtacctaatgccaacctcggtaaggatacggtgagttatccattagcttgactagattagatggctgttgacagatgagtaaagccagtaaggtccgactcgaatcaaccgctatccgaatataaggaaaaccaagatattacagcaccgccggatcccatcgcagagggtactacatccgacgtgcccattcacggagagagaacgaacatcctcttccacccgacgccgacggtctccttcaaacccatgtttgagaacttggaaaagcgaggggccagtctatgtattggcatcgtggccgggatcattgtcctcggccggacttttggcgcctcatactggggacttttccctctagctttctgtattgccagtggcgtctggctatgggtacaggaagtgatccgcagtggcagagagatggaatggagtagtgaacagttacgtggacaagttgtaagtcgtttaccagtgatgataatcttgatgctgatgaatgttatccaggcgacacggaatttgatcccagaatccgttgaatggatgaatacgtttttgggcataatctggggcctgatcaacccggacatgttagcaccgatctctgataccattgaagatattatgcaagcgtcctcacctggtgtgattgagaatgttcgaattgcagaaattgatcagggaaacaatccaatacggcttttaagtctgcgagctcttccggatgagaatgtgcaacagttaaaggagaatgcctctcgagacaatagggaaaacaaggacccagacgaagcagcggcgctggaagaaggggggagcttttacaatttcgaagcatctttcgcctaccatgcaaagcccaccggccagagcgcttctgctaaagcccgcaacatgcacatgcagcttgtcttctatcttggagttcgtggactcttcggagtgcctttcccagtcttcgtggagctgatagagatggttggaacagtgcgtggaaggcttcagctagttcccgaggtgccgttcgtcaaagacttgacatttagtctggctggtatccctcatatcaaagccggctgtatgccgatgttcaaaacaggcgtcaacgttttaaacctccccttaatttccaactttgtcaactacgccattggtgccgcttgcggtatgttcgccgctcctaagtctatgacgatggatcttagtatgctggcaaagggtgatgatattgttaaggaaacgcaagcgctttgagtcatgtgggttcgcattcatcgtgcggtgggcttgagcaagcagacaagcgtggcaatgagggtgggccgagcaacccttatatcaacctttcgttctcgaaatatggaaagccgatgtattgcacccgtgtgatcacagatgatctgaatccagtctgggaagaaacggcagcactacttgtgaatgctgaactcatcaaggcgaacgagaaccttagcgttgagctctgggactctgatcgtcacacagcggatgatattgttggcaaggtggagctgcctattcgcgaaatgatccagcatccatgccggatgtaccagcatgtatcaaaacttcagggtatgaacgagggaagtgaaatgcccggcgagctgcactgggaagtcggattctttggcaagccgaaactgaggaatgagctgaggaccgacggcaaggtcaaggatttgccggagaatctgaaagccgacaagcaatttgaggacgacaagggtgtcatcaccacggaggaagaggaagccgtcacgcatactccgcctgatcctttgtggccaagcggtattctcagtgtcatcgtgcatcagattgtcaacctccagcttgtcaatgtcaaaggaagtaacggaaaccgccaagggagagagtatgagccggcaaagccttacggagagaacactgaggagcaaggtggagagctgcccaccagctactgcaagatcatgctaaacgacgaactcgtaagtcacccccttgatgtgtatttcgcgactaatattagagcagatctatcgcacacgagcgaaagctctgagctcgaaaccaatctttaatgctggaacagagcggttcgtgcgcgactggcgctcagcagtggtgtgtgtgacggtcagagaccagagatacagagagcacgaccctattttaggtgtcgttcctctgaaactgtcagaactcttccagaccagctcccaggtcaccaggtggtacccccttgacggaggagttggctttggccgaatccgcatttcgctcctgttcaggcacgttgagactaaactgcctccccaaatgcttggatgggacgttggaactttcaagttcaccgggaatctcaccgcacaaggcctcagccagaagaccaaggttcgcgtacgtacaggaggaagtagtagcaagatcccgcggcacgtatgcagcgtcaacgcagacaactcggtttccttcgacatctctaacattgatctgcgcctccccgtcaagcatcgctaccggtctcccgtcgtattcgaattcgtttctcaaggaaagcgccatcacacgggttacgcaaccctctggctgcaacacctcgtcgataacaacgatacccccatcgatatcccaatttggcaaacgaggaatggggcgcgcctgacgcagaactatataaccgaagacaatctcgaggaaaaacgcagcccaggtctcgaggatatccaggaggttgggcgcctccggttcagctgcgttttcactcctggcattgacgaatcccatgagcacttcgttgttgataacaactcccgcgagaccttcgagacgtgggaggcttgtatggccgagggcgcccgtccgcgtcatatcgaggctgaagtccccgaacgtactgagcagatgcacgagaagtcactcctccagggccgcgatatcctcaaggtcgctgatcccaaggagcgccgccgctggattgacaaggagggtcgagactggagcggcgcattcggccaagatccccttgctcagatacaggagcaagagaaaagtggaaaggaagagcctggtcaagaggatggtttgatgcacttaccagatgacgactcgcactcagacaccagcgattcctccaacgaacacggacgagaacataaacacggagatacagccaacgccatagtcgaaccctcgaacccgattgcgtccgaccccgtctccaaccaggacacccaagctacgccaaacaacggcaccccgcctagcagtagctacacccagcgcacaagcacgggcacgagccagatatccaccatcaacactgccgacacggcttcaagctcaacaacctctaagcgcgccgccaagcgcagcgagcagcgccagcagcgtggcctcatgcagtggaagcccgctcgtaatgctcagtttgcaaaagacgaggccaagtatgccttcagaaaagtccgacaacacttcagtggggatctgtcgggtagggagccggatattgagacggagacagggagctag

SEQ ID NO: 25273 - DNA, 290 bp, Emericella nidulans
gtactggtattatcggccgggcaccaattcactgggcttacgttgaggaggatgggcgggtccttgaaaacgggaagttcaccgacttgtctcttggggacaaagatcgcggtatcgccgacggcaaagacttggaagccttggttgagcttgttaaccggcgtcgtcctgatgtcattggggtgtccggcatgtcccctgaaactcggcgactttacaagctattgactgaaatcgttgatgcgaaagacctgcggggcgctctctacactgatgaccgtgatgaggag

SEQ ID NO: 25274 - DNA, 602 bp, Emericella nidulans
atggttcaagctcagaacagggcaaagaccatctcgtctgaggactgggcgcacgccagctattcctctgggcgggcggcccacaagctgtatgagggccatcatgatactggcgtgcgggtgatgggtacgtttctcccaaccacttctacaaaagcccatttctcgagatactgacctgtttggatgcagaggatggccgtctcaatatcagtctcacaccgcaccaaccctggttacagcggatcgtccgccacacacaacaacacccgtacccgcgcgactcggtgcaccgccagcaatcctccgcatcgttcaggccgaatccagaagatgaatattgcccacttcgattgaacatcgttattcatgttgttggctctcggggcgacattcagccgttcctcgcgatcgggaaacagctcaagtcgcatggccaccgcgtccggctggcaacacacctctcattccgtgaaacagtcgaagacgaggatctggagttttttaacattggaggagacccgtcagagctgatggcctttatggtgaagaaccgggacttatgcccgacttgcgaactattcggagcggggcgattcgcc

SEQ ID NO: 25275 - DNA, 801 bp, Emericella nidulans
gtgcgcgactaggaacggcgtcgaacctcaaacagctttaaagagccgttaaatcgatggattggaatatccgaggccacaaacatcactattgtccctccacaccttcaacctggccaacgctatgaatacggaatcggcgtggactttgaatcgcgtctcttcttcaatacagtaaacgcgaaagaagatgtcgagtggctgcgctacaataacgtctccaaaacatccacagtacaagcggacgaccgggtccctcgcgaaagccgcctgttgctcccagacgacgtctccgaccataaactcggcaatcctttcaagcagccgaaatatagcaagaacgagtacgtcaacccgccctggaacgacaccctcgacgcactcccagccaatcggacatggagtaatattcctctcttaacaaacatccactccgccgaagtgccggctctcattcatatgaacgcaaaagacaagggtaccgtgcgtgacacgtggtggtcgagaatgtggtacgccccttgggctcgcgctctcttgcgcaagtacatgcgctcacaaacgggctttgatgcggcgcagcatgctctgctggaccagaacttctgggatgtgcgcggtggcgttggcggtgtctggacagataagggcgagtggatagactatccagaagtctgctcaggttttgagagggaccttttcgatgatggtcttggaccttttggcgaggaagacggaggcgagtatggtggaccagtttataaccagtggggaaatctggtgaaggggagggaattctag

SEQ ID NO: 25276 - DNA, 261 bp, Emericella nidulans
acccgccaccggtctatcaaagtgaaggtagggtcctggaatgtggctgccatcgctggcacggagagagatatcgggaagtggtttgtgcaaaagcaaggagtatgccgacagcccttatcggggtcgcaaaacggctcgtcctcgaaatccacgaactccgcggctgctgctccactccttgaaacacccccggacgagattggtctctatgtcctaggcctgcaggagatcgttgatgtctcctcacctgcggaagat

SEQ ID NO: 25277 - DNA, 296 bp, Emericella nidulans
aattccccctatcgctcaacccttcgtcagcgaccgggccaagaagaccctggatctggtacttccccgcaccattaccccggcttgcggcctccactccgaacaaccaaaagtctaaccaacaagatcaggtcgaagaattcgtcgagaaagaatgcatccccgccgaagctcttttttccgcgcagctcggcaccggtgagcaacgatggaagaccaaccctgccgtcatggaggagctcaagacaaaggcgaagaagattggtctatggaacatgttcctccctaaaaactag

SEQ ID NO: 25278 - DNA, 654 bp, Emericella nidulans
ggacagggccgttttcatccaatctccaagcttggttcgcagataagccccagcggcttagggtggattatcgttgacagcttggatactctgatgataataaatctgacgagtcaactctcggatgcgcgaaaatggcttaaccgtggcctgacttatggccaggatcaggatgtgaacacttttgagacaacaatccggatgcttggaggactcctatctgcccactatctgtcgactgtgcttcatgatgtctcgtctcaacgggactatatttatctgtccaaagccgtcgatttggcagatcggctgctcggcgcgtatgagtctagatcaggaataccgtacgccagtgtcaacattgggacccggcaaggacttccctcgcacgcagatggtggagcatcttcaactgccgaggccaccagtgttcagctagagatgaagtatctcgctcatctcactggtaaggaggttttctggcggaaagctgagcaagttatgaaggttgtcgatgatcagcaaagaccggacggcctcctacccatttttatccatccagacactggacggttcagacaccaggaaatccgtcttggcagtcgcggagattcttattacggtataccctgcgtggcaattaacgtttactag

SEQ ID NO: 25279 - DNA, 577 bp, Emericella nidulans
cctttcttctctgttcattccccgctgcggtatcccccaccgaccgggttcacaaccacgccatgcctatgtatgtatcccatcgctggactgcgtcgtccatctatcgagccatcaggagcagctaacccagaaaaggctcaaagatccctctaagaaatacaggccattcaagcctctgagcctgccggaccgccaatggcccaataaggttatcgacaaacctccgcggtggctggccactgatctgcgagatggtaaccaaagtctgcctgaccctatggtatgttcttcgcaggtatctgcacgttttgcgatactgacatattgacatccggcaggatggcgaacaaaaactccgcttcttcaagatgcttgtcgagattggctacaaggaaatcgaagtgtcgttcccgtctgcctcccagatcgactttgacttcacccgcagcctcgttgagacacccggtctgactcccgacgacgtttggctccaagtgctctctccttgccgtgaggacctgatccgccgcacagtagactccctcaagggggcgaagaaggcgattctgcacat

SEQ ID NO: 25280 - DNA, 1146 bp, Emericella nidulans
atggccaagcggcgactcttccgtggccaagcccccgggaccactggcttgacgttcctcgctctgctgctgagcagtctcacattattcctatatggcggaagggtcattttcccatgacgccagctcagcgaggttcgtctttacagagtgcgcagtcagtcgacagtactgagggcgtcatcgcagcgcaagaatcgcttcacgaccaggtcatccgtgaactcgccgaaatcacatcggcatacagcaatacaagtcgagtcgggctcgtgctagcagctacacaatctgaggatttgcagtggcttctcgattattgcagggagcggttcgtctacccctaggatcccaagcccaacagcgaaggactgacttgtgttactgtttcacagcggccccgatacgatccctttcatctacagcaccgacgagaaacctgacccacgcctcctccttccacgcacaacccgcggccgcgaagcaaccgcctacctgtcctttatcgtggatcactacgataaactaccgccgtactcgctcttcatccactctaacattaaccaatggcacaacgacctttttggcccctacaccagcaacgccctgcgaaatctccgtctcgaggccgtggatgcaatgggatacgtcaatctgcgctgccagcatgaccctgggtgtccgacgagcgtgcacccgtggagccccacgcagatcgatatcgaaaagaacgatatccgcgcatttttcccggaggtataccaaacgatcttcaatgttccttctgaccaggtacccgagcatattgggaatgtatgctgcgggcagtttgccgtaagccgcgagcgcatcctgcagcgaccaaggcatgactacgagcggatgttgaagtgggcggcggagacagagcgcacagacagttttggggttggctgggtatacgagaagatctggcacattatctttgggatggaagttatttagtatgtcccgttcgcattctgttccaatccacttgctaaccagctcgattgcagctgtccccgctacgagcaatgccgctgcgacgtttacgggtggtgcggcccactggcagacacaggcgagacactgcaggcagtgcgcgccccagctccggcctcataa

SEQ ID NO: 25281 - DNA, 330 bp, Emericella nidulans
ccagcaaacatgtcttctatgcgcggactagttcagttcatcgctgatttgcgaaatgcaagagcgcgcgaactggaggagaagcgagtaaataaagaattggcgaatatccggcaaaagttcaagtcaggaaatctcgacgggtatcagaagaagaaatatgtgtgcaaattgctctatgtctacattcaggggtacgatgtcgattttggtcatctggaggctgtcaacttgatctcctccaacaagtattccgagaagcagattggatatctggcagtgacttttgttctacacgaggagcatgagctgcttacctttgttgtcaca

SEQ ID NO: 25282 - DNA, 594 bp, Emericella nidulans
atgattcaaggtttggacgacaagttggtctacacctttgatgcagagactctgtggattgagccatgggggccaaacgccattcgagtccgctccactcgctcgcggcagatccctgaccagaattgggcgttgctcaaccagccttcgacatcggcaatcatcaacgttcagtccaacgggacgggcgtgatacagaatggcaagattcaagcaagcctttcagagactgggaaaatccaagtacagaactccaaaggaaagcttctattgcaggagtatgtccgcaaccggaaggatgtgaaggatcccaagtgcagtgccatcgaggtggaggcacgagaatttcgacccatcctgaacagcgagagcttccatctgacagctcgattcgagagcgtcagtacggaggaaatgctgttcggtatgggacagtaccagcagcccttcctcgacctcaaggggcatcagctagaactcgcccatcgtaactctcaggcgagcattccctttctggtttcatcactaggctacgggcttctctggaataatccctcagtgggcagatgctttcttggccggaacatcatgtct

SEQ ID NO: 25283 - DNA, 1335 bp, Emericella nidulans
atggtctccgagcataacgatgggattgttcatcctacctccatagagaaggagcacgcccctctcgaagctccctctaaggatgacacatctcttgcccgccttgcggctcaacaagaacatcatttgggcttctgggaggcggtgcggtgctatccaaatgccgtcctgtggtcggtactcctctcgacttcgattattatggagggatatgatatcgttctgatccagtccttcttcgcccaaccgtcattccgagagaaatatggccaatacgacgctggcaccagtagtcatcagattaccgctccctggcagaatgggctcagcaacgctgtcagcgttggtaccattattggagcttttgccaatgggtattttgtccataaatttggctaccgtaaagtcctcctggcgtctcttgtcacgatctgcggctttatcttgatttccttctttacgcccaacttgcctgttcttttagttggccagtttctttgcggtataccgtggggtgtatttgctactatggcacctgcctatgcctcagaggtctgcccccttgcgctccgaggttatcttactgtctatgtcaacctgtgttgggcatttggccagctcatctctgcgggcgtgcaatcgggcttttctgagaaaactggtcaatggtcctaccgcatcccgttcgctatacagtgggcctggccctgcctactcttcccgatcctctggtttgcccccgagtcgccttggtactatgtccgcgtcggtaaccacgatctggctgaagcctctattaatcggctgggatcagcctcacaaagggcgcacagcaaggaaaccctcgcaatgatgatccatacagacgagattgagcgatcaattgatgaaggaacctcatatctcgactgctttcgtggcgtggacctccgccggaccgagattgcatgtatggcattcgcggcacagcccttctgcgggagtgcaatgggcggaacgccaacatatttcttcgtccaggctggccttccggagtctatatcctttcgcatgtcggttggtggcttaggtatcgcttcagtgggcacgatctttgcatggttcttgatgcgcgggtgtggacggcgcacgttgtatctatgggggctgggcttacttacgctggttctcctcgctgttggcttttgcagtgttgggagcaattcgaacgcgagcaattatgcccaggccgggctgatgctctgctggctaggcgtgtattactcgactgttgggcccatatgctatgctgttattacagaggtttcgaccacgccgctgaagaacaagagtgta

SEQ ID NO: 25284 - DNA, 211 bp, Emericella nidulans
aggatggcggctgcagaatttcaactcgaccgctgacaaacttctccatgccggctcgagactcgagactgaggttaactcggagacgaagtactggaatgaggtcttagcggtgaaggagaagggctggaagatttgtcgattgccgcgagaaagccaggcgcttggggtacaatatggattcctagaaggtaagaccaattcctggtgt

SEQ ID NO: 25285 - DNA, 1208 bp, Emericella nidulans
atgggcaaaaagaacaagaaatcagccgagcacaaggagcgtgtagcggcaaaacaatccaagaaagcagacaagaaagaaaagaagcacaagtccaagggcaaagatgcagacagtgacgctgaagacgctgatctagacgctattctcgctcaatacgcagaggaacaggccaggtttctgaaggtcacagaggtcgtctcagggcctccatcccctcgatcgtctgccactgtgcttgcttctccgtctaataggaatgagctactcatttttggtggggagtacttcgatggtacactggcaacgttctataataatctgttcgtctatctcattgacagaggggaatggcgcgaggttaccagtccgaatagcccgctgccgaggagcgggcatgcttggtgccgtggaggtaatactggggggatatatctctttggcggcgagttttcttcgccgaagcaagggactttctaccactataacgatttctggcaccttgatccatcgacaagagagtggtcgcgtattgagaccaaagggaaagggcctcctgccaggagcgggcacagaatgacttatttcaaggtactttcctcaccaatcgacaaattctccctatttctaataatattagaactacatcatcctctttggtggcttccaagacacatcacagcaaacaaaatacctccaagacctttggatctatgactgctcaaaatacacatggtacaaccccgtcttatcgaccgcttcacaaaagcccgacccgcggtcctcgtcctcgttcctccctcacgagtccggagcagtactgtacggcggatactcccgcgtcaaggtgaccgcaggggccggcggcaagtctgccaaaggcggcccgcagcgcatgacaatgaagcccatggttcatcaagatacatggttccttcggatcacaccgccagcacctgaagcgcccccatcgacgccaccaacagtccgctgggagcgccgcaagaagcccgcaaactcgcctaacccggctagggctggtgcgacgatggcgtaccacaagggccgcgggattatgtttggtggtgtccacgacgtggagctgagtgaggagggtattgaaagtgaatttttcaacacattgttcgcatggaatacggacagaaaccgttttttccctctcaccctgcgacgtcccaagaacacgg

SEQ ID NO: 25286 - DNA, 946 bp, Emericella nidulans
atcacgcaatcgcgcgcgcccagcagggtcgttataacgaggcttccgtccaaatggcagatatgagcttagaacgattccaatccctgaaaacgggtcagtactgggcgttcttctctggggcccttcaactcagacgcaaaatatacaagtatgctctctcctcttcctcctttcttcccagtgtgttacgattctaacagtagagcttcccatcctcagcgacgaccgagaatcagcaagccagctactctctcaactccgagcaatcgacctccctgacagcgacctctccttcctcctctccttcattaccgtcgaacacctaattcgccaagcggactacgcacaagccctcgaactcatcgaaaaaacagctcagtcaattcaccaagacaatttcgacatccaaccgcaggtcaaactcctctgcctgaaggcccgcatcttcgagaaaatgggccagccccagcgtggcttctcactggccatgcgagctgcaagcattgcctatcgctcgcgcctgctcccgggtctatgggaagcgatcgtcgcactaggtggtgtacttttgagtctaaaggaattcgaggctgttgcgaagatggttgaaagcattatgcctcaggtacttgaaacgagcgactgtgatcttgcggcaagtgcgtactcacttctcgtggatgcgaacatgggcattgcagggaggctttggagtgagggtaaggataacggacccgcaaagaaggagtatatgaatcgggcgctggggtatctggactctgcgtacgagcagtatgaggagattgaggatttgaggggtcagtgtgagatgatggcgaaaaaggcaacagtgatgcatcttacgggggactcggttctcgcgaatgattatgcggcgaagtatctggacctgcggaagcagaagacctctagttggatctaa

SEQ ID NO: 25287 - DNA, 1551 bp, Emericella nidulans
atggcgatccctgtctttgcgtccatgctgtcctttatcacctatgccttgtcaaaccacgttctggaccctgccccgatcttttcgtctttggccctcttcaactcgctccggatgccactcaacctgcttccgctggtccttggccagattaccgacgcctggactgctctgaaccggatccaggagttcatcgtggcggaagagcagaaagaggacattgagcgcgatgagcacatgccggaagctgtcagaatggaccggctttcgtttacctgggagcgcaaggctgcggacaaagaggccgagaaggttgaaaagaaagccaatccacggcgaacagagccaaagagtgaagcccccacggattccgcagagagtgacgaaccttttcagttacgagacatgaccctggatatccgccgggatgagctcgtagcggttattggcaccgttggctctggaaagagctctctactagctgcgctagccggggatatgcgcctgactgacggcagcgtccggttgagcacgtcacgagcgttctgtccccaatatacatggattcaaaacacgagtctccgcgacaacatcctatttggcaaagactatgacgagaaatggtacgatcaggttatcgatgcatgcgcattgaagcccgatctggagatcctgcccaacggcgacgcaactgagattggcgaacggggaatcaccatctctgggggacagaagcagcggttgaatatcgctcgagccatctacttcaatgccgagcttgttctcctcgatgatcccctgtctgccgtcgatgcccatgtcgggcggcatatcatggacaaagccatttgcggcttgctcaaagggcgctgccgcattcttgccacgcatcagctccatgtactcagccggtgcgaccgcatcgtggtcatggacgacggccgcatacacgcagtcggcacattcgatgaactctctcgagacaacgacctcttcaaacagctcatgtcaacggcttcgcaagactccaaagaagatgaggaggaagccaccgaagtcgtcgaggaagaagctgaaaagcaggctcaacaggaacccactaaaccggcagcagctctaatgcaacaagaggaaaaagcaaccgattccgtcggctggactgtatggaaagcctacatacgcgcctcgggcagctacttcaacgccctcgccatcctcttcctcctcgcctttgccaacgtcgtcaatgtctggacaaatctctggctctcctactggacatccaaccactacccctccctctcaactggtcagtacatcggcatctacgccggactcggtgcgggctccgccctaaccatgttcatcttctcgacctacatgtcgactgccggcacgaatgcgagcaggcagatgttgcaacttgccatgacccgagtccttcgcgcacccatgtccttcttcgacacaacgccccttggccgcatcaccaatcgcttttctaaagacatcggcgtaatggacaacgagctctgcgatgcgatgcgaatg

SEQ ID NO: 25288 - DNA, 1838 bp, Emericella nidulans
atcagttgccccaatctcagccgcaaaaccactcagagaactgtctcgacttgcaccggtctcccctgccctcagatgactacaagcttcccgacttagatggcctcgttggcgacgatgccaacgatatagatgacctctgggatttacaggagcctggatctttaccagagctgaccgatctatgtcctacctcgcccaattcagcggtatctgctggagaccaggcagctaatgcctcggccatggaatttgcctcgccagcaagtttgggctcggacccttgggctttcttctcgttagccgcccctgcgctccagaaccagccccgagacttcccaggcttcgacccttcgaacattgtccgtcattaccccccgccgtctggcgtgccttctcggccggccccgcgggatctcacgtcaatcccgcagccgttgaacaatccgtcatggactctaattgagtattatttcaaagaggtcgctgccctattctctagctatgacagtcagatgaaccctttccgttctaccgtctctcgtctttggggatcctccttagccatgtgtcgcacaatgcagagcatggctgccgctacccttgttaacgacttcccgcaattcggtcctatggggaagaagctgcgcaacgaggccattgagataatcagcaaagagacgaccatggacgacaaatccctgcttgctctgcttatgctcggacaaaccgccagctggcatgacccgaaagatctcggcattccttacttcaaccatctacgacgacatttggataatgctgccctggccaaggcagcgaacccaacgaaccgcggtaacaactaccagttcttcgaggaagctctagtgtattgggagatgctcctttctttcgtcgctgacgacgcggccgtcctaccagcgcctaaaacaaattccagcacagccgattccctcgtcttgcagcgcgtaccccatccctggacaggcatcgcgcgcgacacccagtttactgtccaggaggctggccgacttgtgagagcagagcgcaaacggatccgaactcgaaggttcacatgtcaagtcgacatcgtcaacgctcaggtagctctcgaaaaagcccgagaactcgaagaacggctcctatccctcgctcatcccacagaagcggaaattgtcagtccaggggacgacgaaacccctgtctggcatctccttaccatggccgaagtttaccgctgtacaggcctgctacaactctaccgtgcattccccgatctcctgcagcggcgacttcccgttcaacagcaacaccaccattcacctacacagcaatcccaccccacaacttcagcaacacgatacccattccacccctggctcaacgaaacctgcacacaaccatcgcctagcccacagccacccccagaccaatcctcgcctacctactacgactcctggctcaccgaatttgccctgacaactctctcccgcctaaaatccatacctctcgaatcccgtacccgctgcttacagcccctcctccttgtcgcctccagcagcgagctccgtctccctccatcttcctccgaccctctcgctctctcagccaacgggaatggcccctgcgtttcctcgcatgccctcgacgtctcaaggacaaggaggtttattcttgggcgcctcacgtcacttcagtatgtgctgccgccgaaaccgattactgtttgtcttgacctggttaatgaggtctggcggcggatggatgcgggcgataaagatgtctattggatggatgttatgatcgagaaggggtgggaaacaacgatggtgtag

SEQ ID NO: 25289 - DNA, 324 bp, Emericella nidulans
aaaatggccgacaagctgcgcacccttcaaaatctcgaagcgcaacaagcgcgctacattggcactggacatgccgacacaaccaagcacgagtttctgaacaacatcgtgcgcgatagctatgccagctatatcgggcacccaccgctgctagggtacatggcgctgggaatgggcgagagccgcgaaaaggtgcgtgctatgatggtcgagaagatggtcaggggggttggggctccgccggaggttagtatttcctttttcttctcctcttcctcttttgttcgggaggattcgcggatcttgatggggctgacgctgtga

SEQ ID NO: 25290 - DNA, 462 bp, Emericella nidulans
atgtctaccgccacagtcaccgaatctgtcaccattaccaaggacaatgtccgcatgcgcctggatggcagagaccctaagtttggagactttcgcgatgatctcgcacgagacggtttcgccgttgtgaaaggagccattcccagagaacgggctctcaaatatgccgacgagatgcactcatggctggagggcttgtaaggcgcctcctcgtacccgcattcaccaacacaactgacgaaacagcaaccttggctacgaccgaaatgacccgtctacggtccacaaagaccgtcttcccctcatcaacgagaaaggtatgtgcatgcactacagcgttgcccacgaaaagttcgtctgggacgtccgcagcgagcccggcgtcgtcgaggcttttgagaaagtctacaataataaagacctcatcgtctccttcgacgcagtcaactttggcttcccaaa

SEQ ID NO: 25291 - DNA, 1560 bp, Emericella nidulans
cttccacaagacaccatccactccaacatcaaggatcggcggtcaatcgttcgtgcttacctcgctcctggtatcactttggagcttgagggcgatgcgaatgactatgttggcaagggtttgtcaggtggtcgtctaattgtttaccccccgcgcggtgcggctttcaaggctgaggagaatgtcatcgtcggtaacacctgtttgtacggtgccactcgtggtacctgcttcttccgcggtgttgctgctgagcgtttcgctgtccgtaactctggtgctactgcggtcgttgaaggtgtcggtgaccacggctgtgaatacatgaccggtggtcgcgttgtggttctcggttcaaccggccgtaactttgctgccggtatgtccggtggaattgcttacattctggacatgaaccaggacttcctttccaaggtcaatatggagatggtggaatgctctggccttgaagacccagctgaaattgccttccttcgcggtttgattgaggatcaccaccactataccggctccgagttggccgcccgtatcctcttggacttcacccgtgctcttcctcactttatcaaggtcttaccaacagactacaagcgtactctcgaggaagaagccgcgaaggctgccgctgcgaagaaggcggaaaccactatccctcagttgcctagtgttcctgtcgagaagcagaagcccaaggctgaaggcgatgccaagaaggcggagctgttggacattgaagacagtgtcaccgactccaaggtcgagaagaagaggactgctcttatccttgacaagacccgcggtttcatgaagtacaaccgccgcagcgaaaagtaccgtaacccggccacccgtacccgtgactgggcggagctctcttctcgtctcactgaggatgagctcaagtatcagtccgctcgttgcatggactgcggtgttcccttctgccagtccgataccggttgcccaatctcaaacatcattcccaagtggaacgagcttgtcttccagaaccagtggcaggatgctctcaatcgtctgctcatgaccaacaatttccctgagtttactggccgtgtctgccctgctccttgtgagggcgcctgtgtcttgggtattaacgaagaccctgttggtatcaagtcaattgagtgtgccatcattgaccgtgggtttgagatgggctggatggttcctcgtcctcctcccgtccgcaccggcaaaaccgttgctatcatcggatctggtccggctggtcttgcggctgctgaccagctcaaccgcgttggacacagtgttactgtctatgagcgtgccgatcgtattggtggtttgcttatgtacggtatccctaacatgaagcttgacaagaagattgtccagcgccgtgtcgacctgatggctgccgaacggttaatgtttgtcaccggtgtgtctgttggtcctgacagcgaagtctccctggattctctccgcaagagcaatgatgctgtgatcatcgccaccgggcctaccgttgcccgtgacctcaaagttccggcc

SEQ ID NO: 25292 - DNA, 462 bp, Emericella nidulans
ctcggtgagcatccgatggcggtcgcagcgatttattcgtttcttctggatcggcatcaagctctagatttcaacggatccttaactgtgaacatattgaaggtaagtagtcgcatcttttttcgccgattcacaactttagctaattataatctcaagctacttgctcggttcgtcaccatggatgacgacaccctcactaaaacaaatgtcgccaaggtgcttccaaggttcgcgaaaaagggaagtgcggaagtaaaagccctcgcacaaactatacaggccaacgccgctgcatccaccaagcgcaagcaggagaacgggaagccgggctcaaaagaaggctcgccagctaaacctccggtgtcaggtgccgcagtcgtaaatggggctcgtagggatacctctggctctaaacgaccacgagatggagaggccaacggacagacggctccaaggaaa

SEQ ID NO: 25293 - DNA, 780 bp, Emericella nidulans
atgcaggagtcctgggatccatgtatacagacacttgagggccacaaacactcggtcaactccgtggttttctcgcctgacgggcagatagttgcatctgcttctgatgacggaactatccggctctgggatgcggctactggtgctgagaagtacacacttgagggccacagagattgggttaattcagtggccttctcacctgacggacaggttgtcgcgtctgcttctgatgaccggactacccggctctgggatgcggccaccggtgctgagaagcacatacttaaaggtcataaagactgggtcaatgcagtggccttttcacctgacgggcagagagttgcatccgcttctgatgactggaccgtccggctttgggacacggccactggtgctgagaagcagacgcttgagggccacaaaggcaacgtcaaggcagtggccttctcacctgacgggcagatagtcgcatctgcgtctaatgacaagaccatccggctctgggacgcgaccaccggcgctggaaagcaaatacattacctgaacgttataccaaaagccatgtggttctcagctgatggatgttgtctgaactctgatcgtggtttgcttctcttgggtgttcaagcctcttacttcccaaacaagtcaatattcgtgcatgagaaatggatagagagaaatggtcagcgcttggtttggcttccaccacggtaccgggcatcatgtgcccctgctagagaaaataaagtgataattggtaaacagtcaggagcc

SEQ ID NO: 25294 - DNA, 504 bp, Emericella nidulans
gatgtgtacgcggcggaatctttccggagagctgaggtcgcgtttatggcgggctggttcgatgatgagatcgtgccgataacgacccgcgtcaaggatccgaagaccggcgaggaacgatctgtgactcttaccaaggacgacggtgttcgctatggaacaaccgtcgaatccctctcaaagattcgacctgcgttcccccagttcggtgataagagtaccggcggaaactcgagccaggttacggacggtgcggcggctgtccttctcatgagacgcagcaaggcgattgaacttgggcagccgatcctggcgaaattcgtcggcgcgactgttgcgggtgtcccgccgcgcgtcatgggcattggacccacggctgcgattccgaagctgttgagcaagttcaatctcgacaagaatgacgtagatatctacgaaattaatgaggcctttgcgtcgatggcggtgtattgccgtgaaaagttgggtctggaccatgcgaag

SEQ ID NO: 25295 - DNA, 316 bp, Emericella nidulans
ccaagcatgcggctccaccttaccattcagcggcacggtttgcctgtaacgcgcattctctggactacttcaccgccatcgctcttcggacacaatcatcccaacccctcgtccatatcacctgcctcctcttccgctgtgacgtcgtcgcgtatgcccaatgcgttatacggcaacgggggatacacaatcgcacagttgctggaggacgttaacgaggtcattccgctggagacagagccgcggctgtttgaagatgaaacaagcggacagtggggcttggaagactacgtggttgaagttgggggctcggaat

SEQ ID NO: 25296 - DNA, 209 bp, Emericella nidulans
ctttcggtctaacgcataacccgcgtattgaggacttccccgtcatgcccatggagcgtatcagcgtgatgttaaaaccggacggcttttttacgaagaacccagcactggatgtgcctcaatcgacgcagaatttcaacaagtcaacacttcacccagaatcatgttgcgagtctgtgaagagtaagatatagataggcatactatgg

SEQ ID NO: 25297 - DNA, 1275 bp, Emericella nidulans
atggttcagtcgcctatgatatcatgtcccctcaaacagaccaacgaaatcgactggatccaacctctcaaggattatattcggcaaagttatggcgaagaccctgagcgctacagtcaggagtgtgctacactcaaccggttgcgtcaggatatgaggggtgccggcaaggacagcgcgacaggacgagacctactctaccgctactatgggcaactagagcttctggatctcaggttccctgtggatgagaatcatataaaaatatcatttacctggtaatggacctacgaattatcattacctcacctccgctaaccatgtaatgctgcctataggtatgatgcattcacccacaagccgacctcgcagtattctctcgcgttcgaaaaggcctcgattatcttcaatatatctgcggtcctttcttgtcatgcagcgaaccagaaccgcgcagatgatattggcttgaagactgcctaccacaacttccaggcatccgccggcatgttcacctacatcaacgaaaacttcctccacgccccctcgactgatctcaaccgcgaaactgtaaagactctcatcaacatcacgcttgctcaaggtcaggaagttttcctcgagaagcagatcatggaccacaaaaaggccgggttcctggcgaaactcgccagccaggcttcatatctatacgcacaggccattgaagggacacaggaacatgctaaaggcatattcgacaaatcatgggttacgcttctgcaagtgaagtcggcgcatatgggctccgtggcctcgtattatcaggctctagccgacggcgaatcaggttcgcacggagtagctgttgctaggctccagctagcagagaagcattcaacgagtgcgttgagttgggctaagtcgctcccttcgtcaatatcaccgaacacaaaccttacatcggaggctgggcccagtctagtagatatcgtgaagttccatctcgcaaacgtgcagtcacagcttgctaccttcgtcaaggataacgattttatttatcatcagcctgttccgagcgaggcaggactgtctgcggtatctaagctccctgcagccaaggcaattccagttagcgagttgtatcagggccaagatattcaacggattatcggtccagatatcttccagaaactcgttcccatgtcggttacggagacagcaagtctttatgatgaggaaaaggcgaaactgatccgggcagatacagagaaggttgaaaccgccgatggctag

SEQ ID NO: 25298 - DNA, 1734 bp, Emericella nidulans
atggcagacaactccaaacacaaggctttcccagacgtctcgtcgaagctgtctgccccggccaagaagtcgctctttgaacgccagaaagccgaagccgaagccaaacgtgcccgcgaacgcgccgagacagctgcggtgtacgaggactttgtcaaatctttcgaagatgattccccggcccctgagcgctcgacatttgagggaaagcagaatagatttgcgaacaggaacactggctttggagggcctgcaaaacgacatttcacgagctccggtccgcgcatgagtggtcctgggacgctgggaccgcctccaacatcactctctcgaaaacgcaaccacgaaggctttcaaccattacataggaattgggaatctgcgcaggggacgctgggatttgataatgcagccggtgcggctaagtccgcttttcgcgcatcggacgatgaggatgagggtagtgcggacgcgaaggaggctgagagggctgcggctaagccgacattgtatcttgcgtctcttccccctgggacctctcaatctgtggtcaaggctctaatacctacggtgttgaccgtcgacaatgtcaaattcctacggccctcgggccagaccgccaccgaacgcaagtcggtctcagccattgtgacccttgcaagtgaatccgctgcatctgatattgatagcagtgtcagtgcattgcagaaccggtatctcgggtggggctactatttgtctatttcaaggcatctatcatccgctgcgattggttcgacagttgccatcgggccctcctccacaggctcccttccatttggagcaaagccggtagccccggagctggggggtcgacttaaccgtgcaccaccgcctggtctgcatcggggtggcttcgctcctccgagctcctatgggccatcttatggtggcagcagctctactctgcaagtggaagtgaaagcaccctctgatttgaagcagcttagacttatccacaaaaccttggagaatttgctaaactacggccccgagttcgaggcccttctcatgagccgaccagaagtccagaaggaggagaaatgggcgtggctatgggatgcaagaagccccggcggagtatactatcgatggaaattatgggatattatcacaaatagccgctccaaagaccaacgaggacactcacaaaatcctttcccgatctttgaaggcggcgcaatgtggattcctcaggacaagcttacattcgagtatactactcgactagatgaactcgtgtctgacgaagactacgactcgtcggatgaggacatatccgatggagaggacgaccgacggcaacatggtgggccgcctcccaccgacggcattggaacaggaaatgaaggcttaggccatatgaatcctttgaagaaggcgaagttggctcacctcctggcacgacttcctaccactcatgcaaagctacgcaaaggtgatgtggcacgagtcaccgcattcgccattaaacacgcaggtgccggggccgacgaggtggttgaaatgattgtgtcaaacattattgagccttttgtctacactggggcgaaccctgatcgtgagctggagaaagggctcgctcgaaaagagcagaatggtgatggcgccaatgcagcgccaacagataaggcagggaaagaaaaactagatacgtcctccgcgaagttggttggactgtatctgatctctgat

SEQ ID NO: 25299 - DNA, 1246 bp, Emericella nidulans
gagctgccgacggatcatttttgagactgttgtgaagactctcccttcaggacttaaaagactcaccgtccccgagattaaacaaatcggtggacgcgctggccgctatcgctcagcagcgcagcacggaaaagaccatcagcaggacaatgacaatgacaatgtcggttacgttacctcacttgaagaagtcgaccttccttacatccaagaagcgctgaacactgagccaccaccaattagtgcagcaggcattaatcctcccgactctgtttatgagaaattcgcagcctattttcctagcaacgcatcactcgcgtacatggtcaagcggttaacggagattgccagaatcaataacttgttcttcatgtgcgaccccagcccaaacctggaaaatgcggagatcattgatgccgtacctggcctgcattttgtggaccagctaacctttatggccgcgcccatgaacccacgagaagagctcggacgcagagtagcgatggcattcgagcgctgcgttctcgaacacacgaacggccggctcttggatattgaggaagtcaatctcgaaatcctcgaagaacctgtatctggaaacaaggagtatatgcataagcttgaaggcctgcaccgatctgttattctctacacttggctcagttatcggttcggaggcatctttacagaccgcactctggctgtgcacgtgaaagaactcgtggaagaaagaatggtcagagcattgacagaattctctgccaacaagaagctccggaagaacgcttctctgcatcgccagatcgcaatgcagaagcagctccgtctacagcaggagttcttgaaagccaatggagacgcagaccttgacctgtcagaatcagaggaacaatactcccccgataccatgaacgcatccgacaacgaggacgccgctgagacagatatcaccactgacgaaaacgatttcgaggccgagtcaacactgaatggcgggacgcgcgagagcaaggacgccgctgagacagacaaccccgccaacaatgactatcaagaccaacagcaagaaacaagtgacaccacactaaatagcgaaggatcagctgagcatgatccaccggctcgtgatgcgttagaggaagagcctacatcgggtgacgccacgcctgaaaggaaagagtctgctgaatatgatccaacggttcgcaatgaggacgagccagcgcggaaagctgccaacaactga

SEQ ID NO: 25300 - DNA, 579 bp, Emericella nidulans
atgaaacgagagtcaagcactgtccgtgcagtcaacgatgtgacagtcgacatcaaagtagatgggccgccagttgacggtgagatgacaccaaagccagacaggacacgagactccgtcgagcctgatgccaccccccgagtccgtatccgtgaaccatcacgcggcccagatgacgacaaagacgttgaagagctctcattgcaggatggcgagaagaagaagaagacgcgcaaacgtggcagccgcggaggcaagagtcatagacgcgggaagaagaaaattgagagtgagaaagaggaatctgatcacgcccctggcaccttgcaacccccggctgggcccgatgccgggttagctctcacccgcactgcatctaatgaggtgtttgaagcggacggtgtcatccagattggccgtttgaaggtctttacggctgacgttctgggtcatggaagccacgggacagttgtttaccgcgggtcgtttgacggccgagacgtcgcggtcaaacgtatgctggtggagttctatgatattgcatcgcgacgaagtgggattgttgcaggaaagcgatga

SEQ ID NO: 25301 - DNA, 501 bp, Emericella nidulans
atcggaggactcgtcttgttcagcggatggacaggcattgatgtctccagactgcccctggaccaggatatcacggctgctgactccctagaggcccacaaggtcaccagcaccctccacagctttactaccacgagtgaagatgtcccacgatggactcctcgggttgtcgccgagaaagctgccattggcggcttgggaccagttagtgtaggaacacccgaaaaggtcgcagatgagttggaacgttgggtcagggaggcagacctagacggattcaatattgcgtatgttaccacgcccggaacctttgaggatgtcgtgaacctcttggtaccagagcttcgtcgacggggtatctactctgaagcgccgcaggagggtttaacagcgcgcgagaaggtctatggggtcggccaggccgggctgaggtccgatcatccaggcagccaatacaagtatgatgtgtatcaggaggagccgccgtatgagggcgactga

SEQ ID NO: 25302 - DNA, 488 bp, Emericella nidulans
gcgattgtaaccctctttcaatgggcgtctatctacatcgcacacctccggttccggactggtctgcttgcccaaggaaggaacctcgctgatctccccttgaagggcttgcttacgccctacgcgcagtgcttcagtctgctgattgtgctgttcatcttcggatgcgagttctacctcgcctgtttcccgtttggggagaaggggtccgccaagagcttcttctcgacgtacctagcggcgccgctgttcttcttcgactatggtgtctacaaggtgagagagtctacctatccccataagccgtgagcctggaaggccgctgactggtcctgcagtggtggttcaagacgaggattgtcaagccgagcgagatggacttctcggccgcggtagtctttgataatatggagcaagcagatagaatcgctctggaagagaaggcaaagcatggcaaaaaatcgtggctcaaaagagtgcaatatatg

SEQ ID NO: 25303 - DNA, 308 bp, Emericella nidulans
cacggaccacgaacacacagccgttcaccggagaaggagtgctcgaacggacgcacggtggttttgcctctcaaatcacaacccgaccccatagccagaacgacaagcggagacagggtccttcccaaaaggcaatgctctctaaagctctacagaaggcaaacactgctgtccttcttgataacgcggcaaactttgaaggcgccatggaggcttataatgatgcttgccagctactgcaattagttatgctccggagcaatgggggagaggatgaaaagctcaaacttcaagaaattgtaagtata

SEQ ID NO: 25304 - DNA, 417 bp, Emericella nidulans
  unsure (1)..(417): unsure at all n locations
atgaggcgacagaacttcgaagagggtttggtggaacttcacagccggaaactacggacggataagacaatggaggatcgaagtcgggagaggcagaagctacgagatcacgttctccgacaacgtgaacgagaggacgaatacctcacacggccgtctattcctcgggatatgctaccgaagcgcatgcctgtgctgccggatccaggcagggaacagcgactcgctcaatctaaagcccgaactgagaagaaggctgccaagaaggtggcagagcgtcgggatgcattgcacacgctctacatgaatgctcgtcacttcatcactaccgagtcccaactagcggctgaaattgagaaggtctttcctgagggagagaatgaagcttgggcgcacgatcacaaatacngcgagaac

SEQ ID NO: 25305 - DNA, 213 bp, Emericella nidulans
atgaagtccaccatcaccctcctttcgctcgtaccctccactctcgccgccactacgggctcttttaatatcctctccttcaacgtcgctggcctccccgagatcttcaatagcaatgacgtccctggcgacaagactgaaaataccgagctcattggcgagcgcttcgcagagtacagctacgacatcatccacgtgcaagaggtcgattag

SEQ ID NO: 25306 - DNA, 464 bp, Emericella nidulans
atgtcacgccaactcatctccagcgagaaatttcctctcaagcctcacaactgtacgcaacttacaacagagtcgcattcagtctctagcactctctaattttgtttcaacaggcccagcaaccaaagttcccggcctcgtcttccttgccggtcaaaccgccacaggcgaaatcaagcaggcaactgtacgccttatcgtcactaccctctccaataccccaactgatatgtagccagcgcaccgttctccaaaacataaaagaagtcctcgagctctctgggtcgtccctggaacaggtggtgaaatacaacgtttacctcgccgatatgaaggactttgcggccatgaacgaggtctacattgagtttctgcccaagccgatgccgtcaagatcttgtctccaggcgctgcctccgggcgagggaaccgttattgagattgagtgcattgcgcaggtttag

SEQ ID NO: 25307 - DNA, 1287 bp, Emericella nidulans
atgacccctgcaggccccttcaaccccccttcccccaatctccccggcaagcccttcgtgccagaatggaatccgcctccggttaccaagcagactgagagctttgctaccctaaagtcaatcgatctgtccctcctcgactctgaagacccggtcgtggtcaaccgtctcattcaacaggtcaagattgccatccgcgacgacggattcctatttctcgagaattacggtgtctcgcttgagcagctgcaccgccagtttgcgctcgcgcagtacctctacaataacatgagcgaagaagataaggagcgccttctgtttgaccccgagacagggaggtggtcagggtataagcatccgtacgggttcaaggtaatcctatatcccgtctccactctttataactcgaacatccacttaactgggcttcgtcttatgatatagcgccaccgcggccccccagacggaatcgaacagtttaacttctacacgcgcgagtggaacgaccccagccgcatcccgacgtgcttacaccctttcatggacgaaatcaccgcgttctgcaactaccttacgcaatcggtaaaccgccgactgctgaccctcttctcacgcgtgctagaacttcctgacgactacctctgggaaaatgtgcagtcgcacggattccccacgggggaaggctacttccgccacgcgctgtttcggcctgtgcagaaggagacgcaggaagcgtccaaagggctgcgtatgcacggacacacagattttggacttacaacgctcctcttctcagtaccggtcagctgccttcagatctggggaagggacgaaaagtggtattatgtcccgtacaagcctggtgctctagttatcaacatcggcgacacgctggagattgtctccggtggacacttcaaagcgaccaggcatcgagtgtataagccgcctgccgatcagctaaatgaggagcgcctgagtcttgtgctgttcaatagctcggtcggggagttgcggatgcagcctgcatatggtacgtttcgtccctttccgtatctacagcccacgagcccggaatgcggatatgtttgctgactgtgagaacgcgtagagtccccgctcattcaacgagaaggctgcattgaagagcaaggtgtgtacaaggagttcaagcgtctcacggaagcaggccagctcgtcccgagcaaccgcgagtggcgcgagatccagatcgccacggcaacagacccaacggatacagatcataacagaattggagtccatcag

SEQ ID NO: 25308 - DNA, 687 bp, Emericella nidulans
atggtgaaattggggatgggccctgagcgtaacatatacgcaccttgcaataatccaccgtcaacccctgtttcatcatcgaagccctacattgaaactttaaccgtggagaaactctcgccccagtgggaatggaatcataacccggataatgcgaaatggtccatcggagaaggcgtgactctcaccaccgcttcgctcacaaatgacctcttcgcggcgaagaatacattgactcatcgaatcctcggtcctaaatcttcggctaccatccacctcaatattagctccatggccagtggtgaccgagccggcctcgcattgcttcgtcatcattccgcctggattggagtcgtcaatgacggaagtacaacgcgcatcgcggtcacaacggggctggagatggactctgaatggaacacggtttccaccgggactgaagttgccacggctgaatactcgaacagcgaagtatggctccgcgtcgaagcggatatatcgcccggtgcaggcagcggccagttctcatttagtggcgacggtacaaccttcacagaccttggtggttcatacaccttgaataataattgggagttcttcatgggctaccgcttcggaatcttcaatcatgcgactactgagcttggaggaagtgtggtgctaaaatcgtttgctttgtctgtgtag

SEQ ID NO: 25309 - DNA, 940 bp, Emericella nidulans
gcccgatcaattcgcaactgccgatctcccaacccaagagcagcgaatacggtgacgttatccggacttcccattgtgcataaagccgaactctcgctccagggtacttcgggtgccagtggtacggttcgattgaggcactatgaagctcagcagtttggttgcccttgtaggggtctcggccctctccgaggccagccctaggcctaaacccaactttgttttcgtgttcaccgatgatcaagacctgacaatgaactctgtggaatatatgccacatgtcgcaggtcgcattcgggataggggacttgatttcacaaaccactttgtaacgacagcgctttgctgcccgtcgcgagtcagcctctggactggtcgccaagcgcacaacacgaacgtcacatgggtcgctccaccatacggtaagttgcatatgttgattcagacatcagaactgacaaagcaaggcggttatccgaagtttgtatcacaaggtttcaacgaggactggtttcccctgtggttgcaggatgctggatacaatacctactacgtcgggaagctattcaatgcgcacagcgtgacgacttacaataatccatttgtcaaaggcttcaatggctcggacttcttgctggacccattcacatactcttactggaactccagttatcagcgtaatcatgaggccccaaagagctatgcgggccagtatacgacggacgtcaccgaagaaaaggctctcggctttgtggacgatgctttggaagataaggaacgaccttttttcctgactgtggccccaattgcaccacattttgagcaagatcccggtcattcttcggacactcctccacaagctccgatccctgctcctcgtcatgctcacctctttcctgatgctaaagttccgcgtgtgccttctttcaacccactcaat

SEQ ID NO: 25310 - DNA, 531 bp, Emericella nidulans
atgagaatacgaatacgaggtccctctgggcaatttgctattacccttgctgaggacgcaacagttggagacctccgaaacacgatcattgagaagacaggattgactgcctatgacgcgaagtacggctatccgccgaaaccgatatcgttggaacatgcagaaacagaccagaaacttgtcgagcttgggattcaattagaccgggagcagctcattatctccgccaaagatggaccacctggaccatcaggaaagaaggaagacacttcctcttatgccgggcaatcatctccgaaactctctttatcacgcaaacaaaatcccgttgccgaggatacaccaaaagtcccctcgccggagcatggtggtctattcgttctacgtgtcatgcccgatgacaactcgtgtctgtttcgcgcaataagcactgcactcctgccaggcgaggacaccatggttgaacttcgatcggcggtggcgaaacgatcagaacaacccgacgagtactcctccgcagttttggagcag

SEQ ID NO: 25311 - DNA, 1404 bp, Emericella nidulans
agcatgcttcttcgtttaccgccaagcctccactaccccatcaccgttacgtcgttgttaaagcagccgggtgatgaggtggagagggacgaggcgatattctggtatgcgtatcaaactattgttacagaaggagatgggtggggaaacaaggttgatgtgaagcggacatttcccactcgatttgaatccaccgttgatggaaatattgtgcaatggaagattagcaagggtgatgttattgatggaccgtaagctgctcttatatccttacagaagcttcatggatgctgacttgacagtgttgatgttgttgagatagatgagccatgtgcgcacgaagtacagtatggcggcctttgcgccgagtgtggaaaagatatgactgagtaggtatcgagttatatgttagattatgaatttagcttactggttcagggcgacgtataataccgaggttccgggctccatgcgtgcgcctattcagatgactcatgataacaccgcgcttactgtgagcgaacgggaggctatacgcgtggaagaagatgcaaaacgacgccttttagcaaaccggaaactctcgcttgtagtcgacctcgaccaaacgataatccacgcggcggttgatcctactattggcgagtggatggcggacaaggataatccgaaccatgcagcagtgagcgatgtgcgagcgtttcagctggtagatgacggtcctgggatgcgcggctgttggtactatgttaagctgcgacccgggctagaagagttcttagagaatgtggccgagatgtacgaactgcatatctacacgatgggaaccagatcatatgcgcaagctattgccaatattatagatccggatcggaagctctttggtgatcgcatcctcagtcgtgacgagagcgggagcttatccgtcaagaaccttcatcggatctttccagtggacacaaagatggttgttatcattgacgaccgcggagatgtttggcggtggagccccaaccttattaaggttataccgtacgacttttttgtcggtattggggatatcaactcgagctttctacccaagaagcaggagctggaaactccaggggaaaaccaggaacaaaacccaacgccaccaatacaacagcaagtcaatgggttggccgaaaaatctgacgcgacagagctatcaactctagagcagctggtgactatggggggtggggataacccaagactcctgcaggaacagaccgaggcgcaagacgtgacgatattgcatcaggttgaggatcgcccgcttctacagaaacagaaagagctagacgctgaggatgaatcggcagattcgagggaatccggcttgaacgagtcgcgagattcggcgaagccacgccatcattt

SEQ ID NO: 25312 - DNA, 818 bp, Emericella nidulans
agaacttctgaagacccggttatacactacggtataatcgcttcaagcaaccaggtcgtcaaggacagcgcgctgcgggaccgcattggcgcagaaatcggtgctatctgtttagaaatggaggcagcagggcttatggacagcttcccctgcattgtcatccgtggagtctgcgactatgccgattcccacaagaataagcgctggcagcggtatgccgcggccaccgctgctgcgtacgcaaaggagctgctacatacagtgcccaccagcgagctgattgccagcccctccgcagtgcagatacttcgatcaggtcagtcaagcgggttttgagacctctggtctgtttgactaacatcctcgtagagctgtctggaatacgcaacgatgtgtaagcccatctattaattttggttaggaccgacccaggtcaagaactaaggttacgaaggcatacaatcaagcacagggtctacctgaatgtgctccccctagcagagggggctgcattcgactcgtatgagaatgaaatgagtccgcactgtcattcagaaactagaagagaactgctctgtcaaatcaatgactggtcgtgtgatcgtaacggtaagagtatcttctggctcaacggcatggcaggaacgggcaagtcgacattagcaaggacagtcgctcgctccctgcgagcagatggacgattggccgcaagcttctttttcaagagaggcgacgtctcgtggcaatgctctcggttcttcaaacaatcgcatcgcaagttgcacgagcatacagcagcacagacacaccaggaggct

SEQ ID NO: 25313 - DNA, 595 bp, Emericella nidulans
ggtgggccaatcaggctcctcacgatacaccgcgcggagtacagtcatcttcaaccgccccgatactttcgcctggggcgtctgcaagggctgtcaattcctttcccgcctgtcctcgttcatccctggcgcctcaaactggcctaccttcgaacgcaacgcctccgagcagtacgaaggccgcgttgctatggtccgcatctccgatcccgacccgtccaacccttctgtcttcctccacggcatgcacggctcttccttccccattgccgttgcacacggcgaaggtcgcgcctccttcacggcctcctctacagacccagcttccttcgtcgctcagggcctggcgccggtgcagtgggtcgacaacgctacactcaagcccaccatgaagtacccttttaaccccaacggtagtcccgagggtattgctggtattcgcaacgcaaatggtcgtgtcatggccatcatgccacatcctgaaaggaccgttatgaacggtattgcgagctggttgccggccaaggcagaggagtggggtgatattgggccatggggacggatattcttcagcgcgagacggtgggttggttag

SEQ ID NO: 25314 - DNA, 1072 bp, Emericella nidulans
gcgtatctccatggcgtcaaaggaattgactttccagggtcccacgacgtcgggttttagcttcgatcttgccaagtcgagtctcaaggaacgcggaattgaagttgagcgtaatgaaggcgacataacgcgggaaccgtcgccactgccgactcccccatcgccaggatcctgtcatgttggggatccactatggagtatcagcaagacggaagccctccggctgtgtcgagtgtatgaagaggagatgggagtcatgtacccggtagtggagcttgatcagcttctacataatgtccagttgttgtacggaccgacagaaaccgggccctggcttcaagcgcctgctcatgcacaaggcattggggagttggacagtgatgacgttcacatcctgcgattggtattcgcgtgcgctctgacagcagaggcgagtgggagtagtgagttagcgatgagtttgtttgcgactgttcgagatgctgcaaaccactatgtctgggcagccccagagctcaaaagcattacgttactcgcgcgtgtggtaagtcgcacctctggagtaccaacgaatctaatgggcgtaggcgatattgtatttccagatcgacgaggagacccttgcttggcgaacgatcgggattgtggaacgaatgtgcttagagaaaggtctgcaccgaagagaaacactcaagcatcctgctattatgaaagcaggaaagaaccgcgtgctcaagctgttttggtcggttcgggtactggatctgaggtggagcttcggaacgggcatgccgtttagcatggatgactctgatatcgacccctggctcccagagccagaggaggaggactcatacttgcgcgtgatggtccggtatagtaggatagcagctaaggtctggaggtttatatcagccttcaataacaccaacgagctcaagaaggacgagatgaactacctagactggcaagtcctgcagtgggttgctgctctgccagactctttgcgcctgcgaagtacctcaggctatgcagaagccgagacgcgaacgtccggcgactccgctccttg

SEQ ID NO: 25315 - DNA, 1030 bp, Emericella nidulans
caacgaggtttgcgcggaacaatgcgctgtcgacggtgctaactatgcctccacatacggcatcaccacatccggcagctcgctgcgtctgaacttcgtcacgcagtcgcagcagaagaatatcggttccagagtctatctcatggatgacgaggatacatacaccatgttctacctgctcaacaaggaattcacttttgacgtcgacgtctccgagctcccctgcggtctcaacggggcggtctactttgtgtctatggacgccgacggcggcaaatcccgctatgccaccaacgaagccggtgccaaatacggcacgggatactgcgactctcagtgcccgcgggacctcaagttcatcaacggcgtcgccaacgtcgagggctgggaatcctccgatacgaaccccaacggcggcgtcggcaatcacggctcctgctgcgcagagatggatatctgggaggcaaacagcatttccactgctttcactccccatccctgcgataccccgggccagaccctctgcaccggtgactcatgcggtgggacctatagcaacgaccgctacggcggcacctgcgaccccgatggctgcgactttaactcctaccgtcaggggaacaagaccttctacgggccaggcctgacagtcgacacgaacagcccggtcacagtggtgacccagttcctgacagacgacaacacggacacaggcaccctctcggaaatcaaacgcttctatgtccagaacggcgtcgtcatccccaactccgagtcgacctaccccgctaatccgggtaactcgatcacaacggagttctgcgagtcgcaaaaggaactcttcggcgacgtcgatgttttctccgcccacggcggcatggcgggcatgggcgccgcgttggaacaaggcatggtccttgtactgtccctgtgggacgacaactactcaaacatgctctggctcgactcgaattaccccacggacgcggacccgactcaaccaggtatcgcgcgcgggacgtgcccgacg

SEQ ID NO: 25316 - DNA, 309 bp, Emericella nidulans
atgacccggaagctcttccagtctacaaacccggcagcccagccctttgtcatctccggaagtggcactctaggctgggatttcgttgcttccaaccttgtcgagaagggcgagaatgccctcgtcctgcactccggctacttcgcggactcgttcgcgtcctgtctagagacatacggcgccaatgctacacagctcaaggcacccattggggagcggccatccttcgaggcgattgagcaggcattgaaggagaaacatacaagatcatcacaatcacccatgttgatacctctcctggtgttctaa

SEQ ID NO: 25317 - DNA, 2065 bp, Emericella nidulans
atgagtacctcagagctccgagagctccttttcttcaaggatgccgataccttggctttcatcgaccccccgtcctacaagccagcttggtctctacatcccagctgcgcccagtcgatcggccacagaatccacagctggaagctcctaggatcggcatctccatttttgcaagcgcagttcgagcagcgcacgcaggagcgaaacatcaagcgccgaggaggtttaccagacggcatcaagtacatcattgacctcaccccgccctcggtagaagacgaggccctactcactatatccgagctaagctgcccactcggtataaggacctgggcctattcacagtcgcgatggattctaccggaggatctagtaggcggttctgagactcagggtgacatcaaagatcagtccggccgtcttgctgagtactctcctgagaggcaccgcgcgggtattgtccaggtcctaagagtattggagggcctcgagccgaagctcgacacgccatgcaaactgtggacgttctttgccgtagcaaagttgtacgggcttgcatccatgcctgaaattagcgtccgtgttagggaatgggtctacgaggggaataacaggcgcctcattgaaatttatccggagatcacttatcgattggggaagggtatccagtgcgcccacatgatgcgagactcttattgcgtcctagtcggggaggaggctctgcggcttctgcgcgattgtagcactccggctccccgaaagcgaaagactacagtccatggaagaccgctgggttcgttggatgatgacgacgagcaacgggtgcaatacgccggcgagtcgctcctaggctatgtgatagagcaattcgtcgagctagccgggaccgaaatgcgctggctgcaccggtcagagatgtttcagaatgttcttgcctacagcccaaggacacagtacgcattggagacgaaggagaatctcatatcttgcttgaaagactttgtgcggacttctatcatcgtggcgctttctcagagagcgaagaccagacttctccagaacgcttcccagagaccaatgagctacccagcgacagattttctggacgtctttaacagcctgagcttgacggagcgtttgatgtccaggaccttttggacacttctcagtgacacacgactttccgagcgtgatggcagtgctgatgttgcagtgccttggggcgcttcccttgctagtctcggcggcgaatttggggcttttcgtggccagcacgacgcaattatcaggcgtatcactaagcaggagttgtatagcagggtcgccgcattcaaccgcctttccttaaacactaaccttggatctcagcctgaacgacaccaacacaggtactctcgaaacgaatacaatgagctgacctatgggccagacggacacttctctgtacctctcttccttcaacaggcctattatcacaggcgtgcatttatcaaaaggatatttctgcaggcccgagatgaaatgaattacgttatcgcggacaccatcactagtctcaccgagcagcagtatcagtttctccctctatgggctgacggatgtgatgacggcactggcggcgtttacgccaaccaagtaccgcttgctgaggtagatgggttttctgccccgggaccttctatccacactggcagtctgcgccgtcagtacgccgtcacgtacgccgtccgtcgcttcgttcctcgagagcacagtccacggcgcatctcaccaagccacagaaggaatttgtagtgaagttctgtcagtcagttcagagctctctttgggaactgacggggcgagtatagccggttctccggatattcaggctgttgatcatgagctgtcatttacgttggagacgtcggcggacgacgttgacgacgatccttttgataccgacaccagcgacaacacagttgttcttgaccatggcgatcttagcgagcttagtgaattcgaagagctggatatgcaggacggcccagcgccaaaccttcctattaggcagaagaaagcttga

SEQ ID NO: 25318 - DNA, 453 bp, Emericella nidulans
atgcatttgaaggacgtgctggcgaatcctgcaaacaacgaacatgactcggtagagctcaagagacagctcgccacagtcaccggcgacggtactactgagtcggcgcctggtgccactaacagaagccctgcccctgctggactcattgttaggattacaaacacacctagagaaccagactcagaagcaggtcagaggacgaaccacgagtcgacgccgacaggaagcaaacgcgctaggacagttcttggaccgcaggaagccaggctgattatccagatgcgacatatccaggggatgaagtggaaggaaatctcggaccacttcccacaaaagaaaccagccaacatccaagcatggcaccatgttcactggaaacaacgcaaggcgaatgcttctcgactgtccggaccctggtcaaaggccgaactcgagaaattggaatactga

SEQ ID NO: 25319 - DNA, 245 bp, Emericella nidulans
ttgcttctgccgatacggtcatgaaatctggacagcatcgtgatgagatcgtcaaaacagagaaggttatcggctttgaaatggagggcgcaggggtgtgggagaatgtcccctgtatcatcatcaaaggggtttgtgactatgccgatagtcataagagcaagttatggcaagcatatgcagcagcaactggagcgtcaacagcaaaagcttttctggaatactagatgcctgccaatcataaa

SEQ ID NO: 25320 - DNA, 474 bp, Emericella nidulans
cacaaacataccaactaccgctctggcgctgcgactgccgtccggaaccgccagctggtggtgcagatgatctgcactgtgtccaactacgagtacatcttcgcttatatcttcgaccaagcggcaaatatcgagctggaggtgcgggcaaccggcatccttagtacggtgccttttgacaacgagaaatttggcacgactgtcccctggggcacgaacgtcgggccaggcgtcatggcccccttccaccagcatatgtttagtttccggatcgaccctgcgattgacgggcacaagaatacggtcatttatcaagactccgtgcccatggctgaagactccaacaacccgtatctagtgggctacacgaccaacgagacagtcgtcaagacgagcagttccgccgaaacaagcgtggagaaacaccgtgttttcaagatcagaaacgactcgcagatcaatcccataacctac

SEQ ID NO: 25321 - DNA, 1044 bp, Emericella nidulans
catgggtggctaaatagcttgtccatgcaggcggcaggataccctggcgtccccggaattttcactccgagccagattgagggctggagaaaagtcaccaacgcagttcacacaaagggcgggctcatcctctgccagttgtggcacgttgggcgggcgacgacgcccggttttctcggtggaaagacgcctcttgccccgtctgatatccccatttccggcaaggcgctggatgggaatgtgtatgccgatgcgccaccgcgtcctatgaccgttgacgagatcaaagaggtcgtcttggagtatgcggcggcgagtaagagggcgattgaggctggctttgacggagtggagattcatggtactgtaaccacccttctcgcctgctattgtcatagcatgccctagcagatgctgactgtaacaggtggaaatggctaccttctcgaccagtttctacacgacaatgtaaataaccggaccgacgcctacggaggctcaattgaaaaccggtcccggatcgtccttgaaatcatctcggccgtcacggaagccatcggcgcagagcgcgtcgggatccgtctttccccatacaactacttccaggatacacgggactcaaacccacagaagcactgggggtatctgtgcactcagatcgcttcacttcccgagtccagcaggccagcctacgtgcacatgattgagccgcgcttcgacgagatcctcgacgagtctgaaaagatcagtgcccttgagacaatgcaagaagtcgtcaagccatctcttgacgggctcagatcttctctgaagaaggggggtgtcagcttcattgcggcaggaaatttcaagccagagaacgccggtgagaaacttataacagacagcgcggatgctatcgcttttggccggcttttcatctcgaatcccgatctgccacgacgattgaaggagggtatcgagttgaccaagtatgaccggagtacgttctatggcgcaacgcccccagagaagggctatacggactaccctttcgctcaatag

SEQ ID NO: 25322 - DNA, 297 bp, Emericella nidulans
atgcctctctatcacttcgtcacagcggacttgccctccaacacgaaagctcccgagctagacgacgtccacgccgctgcttcccttcgcgccgacgcttcctggtcaggcgtcgacgtgtcagccggcgccggtgtaaccgaggaactggttggtttgtacacctcgtaccttgtctccgttggatttttgccgccaccgacagagtctggtgcacgaccactgccggctgtatcgatcacggatgatcagcgtgaggcgatggcgggtgttggtggacgtggtggaactgcttga

SEQ ID NO: 25323 - DNA, 736 bp, Emericella nidulans
tctgactttcgcagttcttaaagtaaaccgcatgatggaaattgcgtttgaaaacgacttgcccctgatctcactcgtgcaatcggtactcccactagccaataacatacaggcaacctgatctgacatctataggccggggtctttctcccccagcagttccgcgtcttccacaagggaggtcagctcttccgggacctggcggtgcgcacgcagcacggaaagccatcctgtgccattgtctttggctcctctacagcggggggagcttatcatcctgcgctgtcagactataccattttcgtggagaaccaggcgcaggctttcctgggaggaccccctcttgtgaaaatggctacaggagaagttattggcgccgaagagttgggaggagcgaacgtccacgcgacagtcacgggtctggccgaccaaattgccattgacgagtatgcctgacggatataatgaagtttgtcccctgcatcctgctaattatacgcaggttcgacgccatcgtgaaggctcgagagtgggtttcaaccctacgagagcgagcagtgcctctccatagcttattatcgcctgctgagccccgatatccagcccaggacctcctttatcttgttaatcctgatattcggaagccgttcgacatgttggaagtgttgttgcggattgttgatgattcgcgcctgtccatgttcaagcccaagtacggcacgaacatgatcaacgc

SEQ ID NO: 25324 - DNA, 1100 bp, Emericella nidulans
atgttggccttcaacccgcttgtcacagcgcttgccgctctcattttcctcttctgtcaagcaaatgccaatccgccgcttatgcagaggctcgtccatgagtaccaatggaagaccaagcagggcctacctaggcaaggtgcttgcaccccccataaccttgcggttcgcagagagtggtatgtatacgtccatgcggcgctctcccccttccgcgacttctatttgctgaccggtttgccaggagcaccctggatgtcgagacccggcttgaatacatcgaagcggtcaaatgcctggcccgcttaccctccatcattgatcctgagctggctccaggtgcgcggtcccggttcgatgactttcaggccacccacatccgccacaccaggaccatccacgctacagggtccttcttcgcctggcaccgccatttcgtctacctgtatgaaaaggcgctgcgcgaggaatgcggatacacggggtaccagccctactgggaatggtcccactgggctaatctccccatcacggccaaccccctctatgacggctccaacgcgtctctttcaggcaacggagtgtatattcccaaccgcaacggcaccctccagcttttcccaattcccaacccgtctcccgataccgctatctatactcctcccggaaccggcggtggatatatctacgaccgcccgcttgacgactgggagctacacctcgggcccgtcctctattcgtacgataacggccaatacatacctgcaaacccacgttcggacggattgagatacacccacgtcccctaatcagagacttcaataacaccctcctccagcaaggcgcctcctgggacatcatcctcaacatgctcgtcaacgtgaccgacatgcatgaattccatcctttattcttccaaggcccgcatctggccggtcatatcttcatatcgggcgtcgacaatgatattttcacttcgcctggggatccgctattctggttccaccacgcccaggtcgaccgcatctggaccatctggcaggccttggacctggagacgagggagtatgccctggacggcacgctaacgctactgaact

SEQ ID NO: 25325 - DNA, 1722 bp, Emericella nidulans
atgctggtgggctgtttgctcccccacccagatttggatctgcgcgagctccctgttccgccgttccagatccgcaagacagatcgggctttggcgataaactccccagcggtcacccatgtgcacggaacgaaatggatggaagacctcaaattaatgtgcgacgctgctgaatcgcgcctcgcgcttaatggcaaggaattagtacggcctcgtagtgctgggaaagataactctagcgggaaccctgggccggtatttcatgaaggagatctatatttatgctccgaatcgttggacgcattcgaaggagcgttgggtggagtgtgcgaaggcatagacgctgtgtttagccccggaccgacgaaacgcgcattcgtttgtattcggcctccggggcatcattgttcttctggcaacccatccggattttgctggatcaacaatgttcatgtaggaatctcctacgctgcgatgacccatgatctcacccacgctgcgatcctggactttgatctccatcacggtgatggctcgcaggatatcgcttgggaacagaacaagaaggcgttagctgctccgaagaatgctgccgcccacaaaaaagctatggttgggtattttagcttgcacgatatcaattcgtacccgtgtgagatgggcgaagcggagaagatccgcaacgcgagtgtatgcattgagatagcacatgggcaatctatctggaacgtacatgtggaaccgtggaagacagagcaggacttttgggagctctattgtgcgaaatactcaatcctgatagagaaggctcgtgactttctggagatgcacactgaccgtctggcaagtgttcccaatggccctccacccaaggcggcaatattcatttcggccggcttcgatgctagcgaatgggaaggcatgggcatgcaaaggcacaaggtcaatgttcctaccgaattttacgccagattcacagccgatgttgtgcggatggcagaggaggaaggtcttggtgttgatgggcgaatcgtaagcgtccttgaaggagggtacagtaatagggctcttacgactggtgttttgagtcacttgtcagggctaggggataccaagggtgtgcaattgctcgatgatcgtcacatcgaccgtttggcgactgagatgacagaacgcctcggcttgtccgacacccctcctgaaaggccagcttttcaggccgcttatgatcaggaatggtggtctctgcctctgttggaggagctggaggccttagtatacccgcctcctcccagcaagcctaaagagaaatcagccccgacctacttcgccccaacccaatcgtttgctgcaaaggttgtcttaccggcaagggatcggcgctccaccggctcccatagctcagagcaggagtcaccacctctaccaccagtcaattgggccgtggccgcacacgagctgtccaaggttctaataccaagcgaccggcgaaccggcagctgccggcctgaagaactcaatgctgaggcttcacgcttgagacgtgaacgccacgcaacagcaaccggcatcagcgatgcagtgaagacgccgacgggaccagctgcaggagaggagaagatgaaactccgtataaggaacccaagacttcctctcccattgtttcagagcctgcgactcccgcccgtcggactaacaaggacaatcgcagaacaacattag

SEQ ID NO: 25326 - DNA, 1456 bp, Emericella nidulans
attcacattgtctgcgctgggcaagactacggggcatctcggggctatcaaggccgggctcacgttggataaagacgtggaattggatggtatggcttcttttccttcactaatagtcatgcttccaagtggatgagaaacatgactgacgagcgtcatcggacaggactcgataagttaagcggtttctccatcgatgaagccgcgctccttatcccggccatgggcgatgggtcaaatctgcgcggcaaagcaacactgccaaaccactcagttgtcacttttgctttggtatttattccgttagcccagcatgctatcactgctaacatcacagggaaacgtaaccctcaacctcaagtccggcgacatattcctcggtaccgccctcttaccggacgttaccctcctcccaggagacaacagcgttggcttcaccggcaaagcagacataacctctgcactggctaacatcggttcaatcctctcatcgcaagcagacgcgctcaggaacggcgaggtcgagctcagcgcatctgggaaccaaacgatcttcaacggcgagcacattccctacttcgagcgggtgttgaatgatctcactatcacagccagagtatcgatcctcaagatcctccttgataccgttagcgatttcctcggcgaggggtcagagggtgtgatacagtccctgacggagatcctcaacaagatcaactttgcggctctgtttgagggggtcgattttgattcccttgttgggagtgtaggcgagatcatcaccaatctaaatctgggacagctgctcgacggcatcgacctgaatgaattcctacaggggattgattgggcgaaagtcgtccacggcctgggtagtatcctggaacaactcgatctcggcgcgttttttgaggacctcgacgtggcggggatattacaaagtattgactggacaagtctgctgcagggcgtagcatccttcctcgcagacattgactggtcctcgcttgcaacgacgctcagcaccatcgtgagcagcgtagactggtcctccctgtcggaacagctccagcctatcctcgagaaactcgacatcggctcgtttctgtctaatatcgactgggacgccatattcgacagtatcggcccgatcatctcgcagatcgatctcggcgccatcttcgaagacattgactggagcgccgtgttgaggggattaggcgagattctgacaaacgtcgatcttgggcagttatttagaagtctccttgacgcattgagcgagctgaatttaggagatttgtttgatatcgatattggcggggtgaatatcagtgatgtgctcggtggtatagcgggttctgcaaatggaacgagtgtggatgaggcctgggaaaatctcatggatgccttggagaactttggaagcagcggtaatgacactgcgagctcatga

SEQ ID NO: 25327 - DNA, 258 bp, Emericella nidulans
gtagaagctctaagggagcgaaagtactttgtgaacaccgcccctcatctttccagctggctcccgatcatggtaccagtccaaaagtggtggcagattccctacttctgggccggtacgaaatgctatgattggctagctggctctgaaggaattgagagctcctacttcttgccaaagagtaaagccattgaggcattccccatgctccgaaaggataacgttctcggtgctatggtttactacggtatgtgtttt

SEQ ID NO: 25328 - DNA, 305 bp, Emericella nidulans
aaatggcagtgcgagaagggcctcgcgggtctgaaaatggaccttgaccgtgctgagcaggagactgcgtcccttcgaattcttctccaggaacatgatatagcagttcccgctgagcttgccgacatacccttgggcgcgatgcctttgcagaggtgatcgccacctcttcctccctcgagtcggcatatcagcaactccaggcggatcgcgaagaagccgaagccagtgtagcgcactcacccaacgtagatgatgcagaactcgccgagtcgttcaaccgcaccgacacactagcgcagcac

SEQ ID NO: 25329 - DNA, 580 bp, Emericella nidulans
gttcacagcgagaggctcgaactcccaccatggccgcagacgaaagtgaccctaaaatccacccacacgaggattccaaggcctctgaggcagactcagagcaggcccagaattcaaaactcgagtacaagcgccacccggtatactcccctcaagaatggctgtttgaagctgccagctctcttctggctatgggcctcctgttctccattgtcggtattttcattgccatggatggaaagcccctgtcagactggaacgcgcgcgtttctcttagcgcaaccatctccatccttacaaccgcatatacgacagcgctgatgcatggagtcagctcgttcatcgcgcagctcaagtggctctatttcaaggaccgaccgaaacgactttcccacctcgagacgttcgatgggctagtcgcggcgtatgggggtctatcctgctccttacaaatgtcaagtggaatctggcgaccatcggcgcggtcattaccaccctgcggcttaccttctccgcccttcgcgcagcaggttgtcctccttgagcagcggcagcttgtggagagcgacgtcagcgccat

SEQ ID NO: 25330 - DNA, 347 bp, Emericella nidulans
aaatggtgtcctcagtgccggagacccccgctgccagatctacctcgtcatgggcaagaccgatcctcgcaacccagacacctacaagcagcagtccgtccttctggtacctgcatccacacccggcatcaccatccaccgcatgctcagcgtctacggctacgacgacgcccctcatggccacgggcacatctccttcaagaacgtaccggttccgctatccgccatggttctcggcgaaggccgcggcttcgaaatcatccaaggccgcctaggacctggccgtattcaccacgccatgcggacaattggcgccgccgagcgcgcaatcgactggctcattgcac

SEQ ID NO: 25331 - DNA, 624 bp, Emericella nidulans
aacaatggaaagacccaacaagcccatggccctcctcctagcaagcttcctgctcctgtgcagccagtcaagcctctgaacattgcgaacaagcaggcacctaaaaaggctaccccaaatggtgtccgccaggccgaagctgctctgaccaagaaggccgacccgcacaagaaggaagtccgcatgtcggcaatgagcgagaatgaagttatggatagactgaggtcggtcgtgtctaaggacaaccccaatgagtcttatagcaagcagcgaaagatcggacagggagcttctggatctgtgtatgttgctcgggtcaaagaaaatgccacttctggagtcgctcgagagctatatcggcaatatggtccacgctgccaagtcgccatcaagcagatggatctacgtagtcagccgcgcaaggagctgatcgtcaacgagatcattgtcatgaaagacagccaacatgctaacattgtaaactttctggactcgtttctccaggagcagagcaatgaactctgggtggtcatggagtttatggaaggtggagctctcaccgatgttatcgacaacaaccgtgttattcaggaagatcagattgctacaatctgtgctgaggta

SEQ ID NO: 25332 - DNA, 963 bp, Emericella nidulans
atgagagtgtcggcagttgcggtatttctgaccttgacggtcgcggcgcagagccaggacactctgggcttgtcgaacggctacaggaaggtatcgactgctaatttcgatctcagtctggtgcaggacgctcagattctcgcttcgctgagaccaaagggacaagatttcgacttttctccgtctgactttcttcagcaccgcgcaggaaatgaacagtatcatgtcggcgacgttaacttccgattcacagccgctggagacagcagcacatgggtcgatgccagctctgcctcatcccgtcaaccggttgaagatgtccctttaacatcggctctcgctgaagcagatctcacagacacgctccctgattcattccctctcaaggtcatgcgcaagtggacggatgtggacggcgatctagggttgagctttaccgtgacgaacgcacaaaatcactctatcgagctgggaagtctcgggctgccaattgaatttaacagtattttctacaactatacggcggaagaagcgctggatacctgctcgcttatcgatccatacattggcctgggaggaggctacgtgcaagtgactccaaccaggggaaccgggcctgcgcttgtgataactcctcttggtgatacacctttcgaagcgtggaacttccttaaagaaccaacgaacggagcacttccatatcacagtcaagtcttcgagggattctatgagtggcagactcttagcaaagcccacgcggagaccgagtgggcggatgttgagccgtggaacgaaccgacctccaagatcctggcgccagggagtagttggacggttggattgcgcatatcactggtaaaggagggggtgcgtgggattggagatgttgtccagaatacggggacaccctatgcagttggagtccctggctatattatcccatcggatttacaggcatcatta

SEQ ID NO: 25333 - DNA, 217 bp, Emericella nidulans
aacgggaacaagaagtagctcaaacacaacgaccaggacaagcacaagcgcaacatccactcccaccaccacagcaaccggaaccccctgtgccggaaacaccccggacacccgcagggaatggtgcgactattccatcgatacaaactaccacgacatcactccagacacaggagtagtgcgagagtattggctggagctagacgagatcaccgta

SEQ ID NO: 25334 - DNA, 399 bp, Emericella nidulans
atggcgtacgcttggaagtcgctcggccgaacgccgatgcggacgcgacatttgaaggatattctgttattccttgcatcctggttcctgttgagcgatggaatcgccaccgtcagtggtacagccgttctcttcgctaaaacccagttgaatatggagcccgcagcgttggggatgatcaatgtgattacaatgatctcaggagtttttggtgccttttcttggagctacgtttcacgagtgctgaaccttcgcgcttcgcagaccatcatcgcttgcattttcctttttgagcttgtgccgctttatggtctgttgggctttattccagccatcaaaaacctcggcttcttgggtcttcaacagccgtgggaaatgttcccattaggggttatatat

SEQ ID NO: 25335 - DNA, 501 bp, Emericella nidulans
atgctgcgctggacatggactgcgcaggtcttcttcacactgcacaccctgactattctcatgaagatccactcttacgccttctacaacggtcatctgagcgcaacagagcgtcgactctcagaattggataagcctggttcgcaaccaacaggtgaggctgttcggtatcctgaggtgcccacttccaagcagccactgcgacgacctagtatccataagcggtcaaactcagttgcgcaactgcgcgacgacctagctactgagttaacttcgccaatgggcaatgttacgtatccccagaaccttacgctctacaactacgtcgacttcatcttctgccccactctctgctacgagctcgagtatccccgcagcaaagaaaggtcgtggatggaagtcggatacaagacccttgcagtatttgggtgcatcttcctcttgacgcttgtgagcgaagagttcatcctgcctgtcctcgcggaggccggcgttcgctta

SEQ ID NO: 25336 - DNA, 384 bp, Emericella nidulans
gagctgggcgaagcaactgcccgcattatgttgcaagggagctatgagaaccaaattgtgctgtttacagctgaggagacaatcacgtccaaggaaattgttgatatcatcaacgagaccacaaagcgacaagtgaaactcgagatcgtctcccctcaggaatatatccgaatcaacagcgcgaacgatcaggggggaaagccgaaggcattctttgaaatggtcctgacgtggtgggaggacattgcgaaaggggagctacgcacgacacacccgcttatgcgtgaaatccttgggaggccgcccacgaagcctcaagatgctttaagagcgttgttgacggaaaacccggattatacctggcaccagaactacgcgaaatag

SEQ ID NO: 25337 - DNA, 1083 bp, Emericella nidulans
atgctcatgggccaggtcgctgaacgcgttcaggacggtatccttgtcaaaagtattggcggtctgcggatgagtatgatcaaggacgcattgtcttatagcgctgaaggaagtgaattcagagtgcagatgatcaacggcgtacccctagggaaagatgagaaggtatacctcttgtgggagatcacatttgatgtcctggaccctggggatccgaacttcacacgagttcgcgatcccgcgatgattgacttgatcattgacattatcccagaaaatctcggccgccgaaatgattctgatgatggtcgagagcctgctgcatccggaactggagcccaccagcgaatcatcaatgccaatgcaccggtagacgatgacaaagccgcagcaccggtagacgcatctacctcgagcatgaggaacgttttatcatcgctggttaactcggtcgcgtcaatgcttcaagatgaggtaaaccaaatttacacaccggcaccctctgtttcaaagcctcgcccgacccgtcttcctattcccgctgccgtgtcgaccgggttagggtcgggtcctctgcccgatgtggacgactcaccactcgtgtcaattaacggtgggacatcgcaagtccgacttccctggtctgacatctacatggccgacgacctctgcaatcaacgcatcctccgaagcgtcgcgcagacttatcaagtactcgtgatcaagcgcagggggtgcacattctcacagaaactccgaaatattgcagcgcacccaccgtcaaaaaatgcactgaagctcgtcatcgttgtctcgtacgatgaagaagaacatattgacggccagaacctgggtctgggatacgcagcaaggcttgcagaaccgtaccttgtgcgcccgcagctagacgaaagacaggtgacggctggtggaatcccgcgacggcatctgctcagcatggtgctcgttggaggcggagacgagacgtacgagcttctgcgtcaggcgcggggtgtaggcatccgacgaagatactcgatgcggtcgcagggcgtgccgatttctaatttattcatcgtctag

SEQ ID NO: 25338 - DNA, 1716 bp, Emericella nidulans
atggccatcattgacaccacaaaagacctttcggcccttttcacccagcaggtccgtgcgagtcccaacgccctcgctctggaggatgacaaaacctcatacacctatgcagagctagataaagaagttgaggaactgtcgcggcgactgcgcagctatggcgtcagtcgggacagtctcgttggtgtgttactcccccgcagtgctcatttcgtcattgcctgcttggcggcgctgcgggcggggggagcgttcctcgtcttggagctggcgtaccccccagatctgcttgccgacgtgctcgaagatgccactccagcagtagtggtcacgcaccggtcagagaccggtaagattaagggcagcgtccccgtcatcagtctcgacgagccccctgtcgacgccaatggccatactgttgagcccggcccgttaccggttgacgatgacttggaccggctggctttcgtctcgtactcgtccggcactaccggtaaaccaaaaggaattgcaaaccctcaccgagctcctgttctctcatataacctgcgtttcggcgtccaggatcttcaaccgggcgatcgcgtggcttgtaatgtcttcttcatctgggaaatcctgcgtcccttgatccgcggtgcgacggtggtcgccgtcccagatgaccacagctatgacccggcggcacttgtcgatcttcttgcctcgaggcatatcaccgaaacactcatgaccccgactctccttgccactatcctctctcgacactctgatatcggagctcgattaccggaactgcgtacgttgtggctaaacggcgaggtcgttactactgatctagcgcgacgggcgattagggcactccctaacacccgactgctcaattgttatagcgcatgcgaaacccatgagattgcgtgcggtgatatcaaagaaatcgtaagcgacgaatcccagtactgcccagtaggtcctctgctcgaccccaaacacgcctacattgtcaacgagcagggcgagaaggtagaggagggagtttctggtgaactctgcgttggcgggcccatgcttgcaagagggtatatcaaccgcccagagacgaccgccaaggcatttattcccgatccgttttcaaattctccaggagctgtcatgtaccgcactgaagaccgggcgcgtatgttgccgtcgggtcttcttgagatcactggtcgcgttggtgcaatgatcaagctgcgcggatattccgtagtcccgggcaaggtcgagaatgatattgtcaagcacctcgcggtccgacagtgtgccgtcgttgcacacggggagggcttggaaaggcagctggtggcatacattgttgccgaccaggaacactctgaggagcgtccaaccgtggagattaactcctccggccacagcccaggtgcccgaagagccctgaccaaattcctcgctcactatatgattcccgccctatgggtgcaggttgatgaactgcctacccacgaggtgtccggaaagattgatctcaaacgccttcctccgcccccgaccgaagtcctcgccaacgggaacggaaagaaggaagatcccatcggcattgaggacattgcagcaatctgggcggtcgcgctcaaggttcccaaagcgacgcttaagcctgaagacaacttctttgatctcggtggtcactcgctttcgattgcggacctctct

SEQ ID NO: 25339 - DNA, 560 bp, Emericella nidulans
attacaaacagacccaacttgccgctgccagacgtctgagcacggtacgcgaagaaaagcctggcgtgaagaggaagagagatactgttttcaactaccagttccagaagcgcagaatttggcactctgtccgtgatctcataccatactttcaaacctcagtcgagtcattccacgtacttgaccggcgcactggtcaggacacacggcatacaactaacgtcaaccatgacacacgttgggttggtctctcccgttatctagatcaaggcagtcaagatgatcactctgaatgggatgctatagaatacggcaggttttccacagttttggatagccctagcatgattgtcgtctatttttgggacaatcccggggttgtcaaagcacattccgttgcggaggggcctccacctccgagatcttcggacataaatggcgcgtctcccccggaatggggaattgacgtgaaagttgccggtggaatgataaactacggcccttgggctgatagagaacgtgtgggtctgcaaaatatcttctttcctaatgcctaccgg

SEQ ID NO: 25340 - DNA, 995 bp, Emericella nidulans
ggttctgtctcgatttcatcataggccctgcggggatccagagttttgggtaggtaaggtttgtggttgagactccatgccccgcatgaaaagactcaccctgcgacctgcgacagatcacttcggtttcatcaacaatggacccttcgtccaagtcgttccagactcaacgagcacaatatagctcggccttgaaacgctttctcgattctaccaaggattttgagatcatcacctccgtatcccgcgactacggtgaaccccgcgtaccctcaactgcagaggtcctctatgttctggattcttctttcaaccccccaacgcgcgcccatagccacattgcgtgctctgccgtgttggagaacaagggccagccttcccgcatcctcctcctcctcgcaacccaaaatgcggacaagccctctaaaccggcctctttcgaggaccgcttaattatgatgcagctctgcgccgaggaggctttggcgttcttagaatcggaaataccagctgcagagcttcctgtcatcgacatcggagaaacaaagaagccatatttcgtggacaaggccgccgcaattgagactgcgaatgtatatcctcggagcacccagcaggtccaccttaccggctatgatactctaattcgcatcctcaataccaagtattacccgccggagcatacccttgcgccattggagccgttcctgtccaagcataagctacgagtaactgtacgcccggacgatggatggggtagtaaagctgagcaggaggcctaccttgcagacttagcccagggagggcgagagagcgagggggctaagcgggaatgggcgcagcagattagacttgtcgagggaagaaaagttgagcaagccgtgagttcgaccaaggcacgagaagctacccagacaaattcgcaagacctcgactggctggtaccaggaaaagtccgagacttcattttgtcggagcagccttaccaagagtaa

SEQ ID NO: 25341 - DNA, 603 bp, Emericella nidulans
tcattccaaccgacttctccgcgttctgttttgactgtctacgcgtttcttctagcaaaagaggcctctcctctatggttcgtgaacccgaaaggatcgccgaatgaacccattcctacgcgctatcaccttaccgaaggcggataccaatcccaacgtcaaatcctcctccgtatcgagtcagttatcttacgcacactgggattcaatacgcacgtggctttacctcacaccatcaccctaacctaccttcagacgctaggtgtctcttcaacggaggttgcacgaagagccttcgagcatctcaactcgagccttctctccccgcaacttctttttgtcacgcatcagccaaatgcccttgcggtagcctccatctacttagcggcgcgagagagaggagtaaaacttgttgatggagagtggtgggaagtgtttgatgtggaccgggaggaccttgggttcctggttgttggaatgcagagtatggaagggtttgcgcgagcagaaatggagaggtggaagggtcgcaccgttccgctggatgttgaagaggtagaggctgagattgagcggagacaaatgctggaatctggagagtga

SEQ ID NO: 25342 - DNA, 736 bp, Emericella nidulans
cggagcttccacttctccgcagcatactcactagccgcatagcgaaaatcgacaagctttcgattctagggtaagtggactgtatatactctagttcgttgctaacacacatcgcaatctttagtgttcgctcgttcgacaacacccgcagcgaaacgatccagttccacacgccgcttactttgattgtcgggtacaatggttctgggaagacggtcgttacaccatatatacattcaaaaaggggcatgctaaccctgaatctagaccattatcgaatgtctcaaatatgccacgaccggggaccttccgcccaacagtaagggtggtgcattcatccacgacccgaaggtatgtggtgaaaatatacacaacggacacgggctaagggatgtaacagctgtgtggggaaaaagaggtcttggctcaagtgaagctatccttcaagggcacatctggtgcgaagatggtggcgactaggagtctccagctcacggtgaagaagacgacgcgacaacaaaagactctggagggccaacttttaatgatcaaagagggagagcggacggcgatttcgtcccgggttgcagagctggatcaaattatgcctcaatatctgggtgtgtccaaagctattctcgactctgttattttttgtcatccagacgagagcttatggcctatgagcgagacttctgttctgaaaaagaagttcgatgaaatatttgaagcactc

SEQ ID NO: 25343 - DNA, 491 bp, Emericella nidulans
atggctgtcgctagacctattcgcatgctctctgcggcatgcgtggtactcgtgatttttctggtgttccagatgaagaggagcccttcatatgtcggcatggggccaggcgaatacaacggcatgactgcggaccctctgaatgatcgtacgctctcgctcctatccattttctcttgtttagctgtcggtccttcggctgtgctgacattatcttcaaaatatagcaaccggtgagcctgatggctatctgtggcgcgccgacgaacacgactacgctcctgacagcaccaactccgcccgaaccaatgcagccatcatctccctcgtgcggaacgaagagctgaacgagctgcttccaagcatgcgcgacttggaaaggacatggaaccacaaatttaactacccatggattttcttcaacgacgtgccgttcaccgaggagtttaagaaacgaacacaggctgagactaaggccaaatgtcaatacg

SEQ ID NO: 25344 - DNA, 2113 bp, Emericella nidulans
atggcggctggcgggacctcgacaagcacaacggagctgcttatctctgcggtcgcaaaaacgggcaaggtacgcgtcatccatcgggactaaggcacctctaatagatctgtaggacactgctcatttccgggccctgaagcgtcgcgttgatgaagctttcaggacgtcgtcgcacgggcgaaccgatcagttcgctgtagcaaagcaactcgaagggctactcgaaaagttccgggttctaaatagggacgacttggccgaggcgcttcagccgagactcgctgaattggaccagcaccgcggggccgtgttcccagagatcctctcttttctactacagcttgccgatagaccggcccagcttgcgaaggttgatcggctattgaaactccaacctgagaaagaagaaaagcagctctcgtggaccgatctggatgcctccgggaccgcatactgcgacgaggatatttgggaaagcgtagactatggcgctagctcatctgacgacgacgacgtttcttcagtatccagcggtgtccaggctgctaggaactttactcagattacttcagaagatgactatgtgattcccgactatatcttctgtgcaggccacgatgaagaccttgtaaaatcgatcaagagcgtgcaattttgggaagaagaaactcagcgagaccttctagagtgcgcaaagctagtctccttcgaggtaaccgaacttcagattgtgagagaggcgattttcatgcttcagggcttaccaacgtctctattaaggcgcattgacggaaatgtcgaaatagaccggagatacactcttccacatttgtcacacgaagctctttcgtctgtcctgcgctcaatatgcgcttgtggaacgaaaattgacattctaagacgatttaccagaacgccacaatccgctgcttacatgcaaacgctccatcgcagcaccgaggattgcttacacaagtttgacaaatttctctcggagatgcagaacaagttcctttcaagggactcgtctgtggctgtcagtctcctgcagctgttggacgatgttcaacgcgaatcaaaactgctcactcttctggccgacctcgtttccaatcttgaccgaactgcggtagatagcgttcagtgcttggaccagttatttgacttagtgtgcatcacgcaagctgccggagatgacgagaattttgctcgcttagctgaaatcttctttgcctcgcttgagacctacgctcgtcctctttaccgttggatggagaccggtcagcttgaagattcatcgctgttcttcgtctctgcgaatcatgagaaaaatgacttgcggacattatggcatgactggtacttgctggagacaaaaccagagctggcgaagatacccaaattcatccgcccctttgcccacaagatatttatcactggtaaaagtagggtcttcttgaaccggttgaatctggcagacagtttagaagcaccgaggaaaactgccctcagttttgaggatatttacccttccaacttgtcttctacctgtctgcctttctatgcactgctagagtccgctctcaacgacgtcattaacgagaatcacgcattcacatcatctcttttgcgaaaggagttagacgagcgatgtgggttgtggatatctctccaggcactcgagcatatccatctctgcaaagatataagtctaatcgggccaatcgacaccaaaatctttgaactaatcgaccgaagaaagggcggctggaatgatcggtttcttctcacagaactcgcccaggatacattcggttcgctgcccatcattgattcatctcgcctcatcgtccgttctgcgaaagaccatgacacacgcagccgatcagtaaaggtactttcaagcctatctttcgattacatcctttcgtggcctgtagcaaacatcaatacgaatgacggtattgccgcgtatcagcgcggctcaaacttctgatgcaaatcgcaaggcaaatatagcttggaaagcagggctgcgtacctaaccacacacaatatggccagggtccaagggcaaacattagctcgcatttcgacacccactctttgt

SEQ ID NO: 25345 - DNA, 255 bp, Emericella nidulans
ccctgcctgcccgccggatgggagacggagtggcgcgatctgagttttgaggaactcgcattcaacatcatgtccctctacatctcaccctccgaaataccctctgaagatctcagggatatcattaagcgctcgtactcgaccttccgccaccccgagcgtacacccattgtcgagcttgacgcaaagcagaacctttaccttttagaactgttccacggccctacattcgctttcaaggatgttgcgctttaa

SEQ ID NO: 25346 - DNA, 1218 bp, Emericella nidulans
tctgctgcagcgccggctcagccaatttctcatctacctcgctctacatccgatactgcagcccttaccggcacaacgacgcagaccgcacggcctacaactggagcgtcaatggcttcgttcaaaaccgggcgtttgccatctcgtggttcatacggacagccagtggcacccactgtggcagcaacgaatgccgagggccgactggcgcaaccaaagagcaagcagtacgtcatctccgcaccgatacaacaagatgccggacaggcttctgctatgggtagcccaagcgtacagaatttcccttccaaattcaacactacaccgcgccaggagcctccaaagggtcacaagcggtcgaatactgtctcggctatcgcggaaaaactgttcggaagatctggctcaatatttggaggtcgcggaggccaacaaagtgcgtcaaagcagaaggctggcaggcgttatccccccacaagcatgagggatccttatcctggtgatgactccaggacatcggtggattcacggcgctcagctcagtatggttatggtacccggaaggcaagcgaagcaggcggcgagaacaggacacggcgtttctccttacttccagcttcattttcactgaagggcatttcgtcctctagcagatcgcaaacgcccgatgaggaatccaaagccgaccgcttctcggacaatcgtgtcagtcagcgcccatcgactggggctatacgaacacgcgtccgagctaccagctacggggcccatgatacgatagccagcgcagcgaccgatggcccgtcagatgatgttattgtccatgatgaaccagtcaattaccaggctcgcattgatcagcagttcgcggctctacattcaaacaatagcggaacttatcagccatcgccatatggtacagtttcagcagagcaggttcaccaaaatgataatgaacactattaccgcaataactacgccaaccattcaacacctaattactatgacgaatacaacggcgttcatgacaatgcgtcgggggcgtccttgcaaactgggcgctcttcgaatcggcctggcgtcttgcagaaaaaccacaggaggttcgcagacgcttacgagaatgagtcgcaccattctggtagctctggggcagcccgcaaagtgatggatttcttccgtcggcgagccaaatccagagttggggacgaccgctag

SEQ ID NO: 25347 - DNA, 1724 bp, Emericella nidulans
cccgccatctacgacccgtatccagactacaatagtggagtatggtcagatacatgctcgttaacgttcagaacttgcgagggtccacggggagggactttggatcgccaaactgtctaagacatggtcctcacctatcctggcgttcagggtggtgcgtacttactctattcgtgttaccccttggcttatgcgagcaagactatctaaccggtcattgcgatcgtaggctttccgtatccaaagtatggctcctacgaggctcttggtctagacggatacacttgcaccacgcgcgcctctcgattggctgcatatgggtactccgagtcgggtttgaattctactgcggaccctattgtctgggacaacgtgaactggggtacgctgcagtcggaatgcctccagcggaacataaacagatatcatgagccgaaaagaacacctcgcctgagtatccttccactgaaccctatccgaacggaggcgcctgcaaacgacgatgaaggcatatcctctccagcaaccaagaagaggacggcagtggtactgcgcgcatggcacgacatagtctggaccgagaatctaaaagagcatgttcgatcgctcatcatggaactgtcactgcactctggcgcggaatatgaggtgtttctcctgacccatgtgaaggataatgatctcctcttgtgtggcgtagacgaggcgaagattcgcgcgctgaaaaagaagtttatccctcgtgagttctgggatattacagttctcttcgacgagcggaccctgcaatcgtggtatcccaaggtagacgaacacaggtatataacccctatccgtgaaaccgctaaagaattaacctgtccaggccggtataccagtacgcgcagcctttgcagatcttttcaaccgttttcccagacttccactactactggcaacttgaaatggacgcccgcttcaccgggcacacctatcacttcctcgagcgggcaagcgagtttgcaaaacagcagtccaggaagtacctctgggagcgaaacgcctatttttatattcccggggcacacggaacctgggaggaatttatgcacacggtcgacaaatccctgctcaaaagggaaagcaatacggtatggggaccagcgccaccgcatagctggatccagcccgtcggccctgagccgcccatttcgagcccacaagatgacgattatgaatggggtgtcggcgaggaagcggacctcatcaccttccttcctatatttgacccatccgacaccacctgggtcttctggaacctgctctggaacctacccattgagacaacgacgcggcgcacatctcctgtcatgataggccggttttcgcaccggctgcttcaagtcatgcacaacgcgcagatcgagcagggcgtggcgctggtctcggagatgatgccctcatcctttgcactttggcatggcctcaaggccgttcatgctccgcaccctatctacgcagacggcaagtggatgccgaaggagctgaacaacatcgtgaataaggttgcaggcgggccggagaagatcaacggcggaaaagatagcttctggaactgggaccataagctcgaccatatcgtttatcgcatgagttatatgttcaccggccagccggcagaggacttttatcggcggtggttggggtataagccaaatccagcgcagtatacggatggtagtcgg

SEQ ID NO: 25348 - DNA, 1124 bp, Emericella nidulans
atgcggatattctcctcacctctcatctctgccgtctctttgctaccctgtctctctttcgccgtcagcttcgactgctccagcatccatgtagacaactacaattataacctcaaggctctaggcggagtccacgaaatctaccatgccgagcaagtcggcgaccttatcgttaacacgacatatgtactgaatctgtgcaacactcttaagggcgcgtcaataagggggaatttgaaatgcggcacgtcaaagaatagtatggatacaaatgcgcttagcaactgaagcgtagtttatctaccggtaatgaaagaaactaaccatttgcctagtttgtgggttcaactacacatacggagcagacggcgccaccgaaaatgattttgcgttcccgatcgtcgggctggagcctatgggccagggggcgaaagatgcggagataacacgattaaagaaggaggatactgagaaagagggtctgagggtaaaactgtctggagggggtgagtacccggagcctggctcgaaaaagaagaaaaaggcgggtgcggtcatcgagtttgaatgtgaccctggtcggtcgggtctggagggtcttgtcaaggaggacacaaagcggcttctccgcgcccgggaagaaggtctggatgagggcgagggggatggtgaaggcgacggcaacggggaggataaagagccattctacgatggatcagacccggataaaagcctgcaatacaagagcttcgggaaggcggatgacgaaacgtatatacttagtttgagctggaagacacgctatgcctgtggccattacacagaagatcgtggttcgtcttctggccacggggggttctttacttggttgattgtgatgtataatcaaccccggccaaacatgcttgacttcgctaacatggttcagtttcttcctctgcgccgcagcatatcttatcttcggctcgtggctcaattataatcgctatggtgcccgtgggtgggacctgcttccgcacggcgatacgcttcgagacattccttatctcttccaagactggctgcgccgggtagtcaacacatttcaaggggcgggttcgagaggaggatacagcgctgtataa

SEQ ID NO: 25349 - DNA, 1590 bp, Emericella nidulans
atgaacaccgacaagtacacagacaaggccaacaaggccttacaagatgcgctagaactcaccatcgaacactcgaacgccgaactataccctgttcacctcgcagttgctctccttgacccctcacaaaacgaagatgacgggccatcgctccacccctctcacggagattccacctctctcttccgccaagtcgttgaacgcgcgcatggtgacgttcagctcctccaccgtggtcttatgaaacggctcgtcaagcttccgagccaagaccctccgccagagactcgtagcatctctgcgcccttccgaaaagttctcacagctgcggccgatttgtccaaaacgcagaaggacagctacatcgccgtggatcatctgatccaagctgtatgccaggattcaaccgttcaagctgctctcaaagacgccaatgttccgaacgtcaagttgattgataatgctatccagcaaattcgaggtacaaggcgggtagattcgaagacggcagatgctgagagcgaaaatgaaaacctcaagaaattcacaatcgacatgacggcgctggcccgagagggtaaaattgatcctgttattggccgagaagaggagattcgtcgtgtgatccgtattctcagtcggcgaaccaagaacaacccggtactgatcggcgagcctggtgttggtaaaacaacaattgttgaaggactcgctcgtcggattgtcaatgcagacattccagctagtttgtctcagtgcaaacttctttctctcgatgtcggctcactggttgctggaagcaagtaccgcggcgaattcgaagagagattgaagggtgtcctcaaagagatcgaggagtccaaagaaacgatcgttctttttgtcgacgaaatccatcttctcatgggtgcaggcgctagcggcgagggtggaatggatgctgccaatttgttgaaacctatgcttgctcgcggacagctgcactgtattggagcaacgacgcttggtgaataccgaaagtacatcgagaaggatgccgcattcgaacgacgattccagcaagtgctcgttaaggagcccactgtctctgagaccatctcgattcttcgtggtttaaaggagaaatacgagggccaccacggaagcgtgcgaattctcgatgccgttatcgtcaccgcagctacccttgctgcacggtatctcacggcccgtcgactgcctgattcggcggtcgatctcattgatgaggctgctgctgccgtcagggtagcccgcgaatccgaaccggaggctcttgataaccttgagcgtaagcatcgacagctccagatcgagattcatgctctcaagcgtgaaaaagatgaggcttccaaagcccgtcttcaggctgccgagcaggaagcggccaatgttattgaagagctgcggcctatgcgtcagaagtacgaaagtgaaaagcaacgtaacaaggccatccaggatgccaagactaaattggacaacctgaagaacaagcaagaggaagccgagcgatccggtgacaccgaaaccgcagcagatctgaaatattacgctattcctgagacccag

SEQ ID NO: 25350 - DNA, 895 bp, Emericella nidulans
atggcaccaccaacctcccgccccgagattctgtcgcgcctccgtgcccagatccaagcgggcaagcctatcgtcggcgctggagccggtttggaaccccgcaatcccgctcatggtatcgcacacagagctgaccagcacaggaattggcctctccgctaaatctgtcgaggcgggcggcggcgatctgatcatcatctacaacagcgggcggttccggatggctggtcacgggagtctcgcggggctaatgccatacagcaacgctcacgaagtggtggtcgaaatggcgtccgaagtgctgcccgttgtgaaacacacgcccgtcatcgcgggcgtgtgcgggacagacccacttagggacatccctcgttttctctcccagctgaaggggatggggtttgccggggtgcagaatttcccaacagtaggcctgatcgatgggcagtttcgggccaacctggaggagacggggatggggtatgacaaggaggtgaagatggtgagggccgcaagcgaactgggcctcttgacgaccccgtatgtgtttaatgtgggcgaggcggaagcaatggcaaaggccggggcggatatcctggttgcccatatgggacttacaacgtcgggcacgattggcgctaagacgggcaaaacgctggagcagtgtgtggatgagatccaggcgattcgagacgtggcggtgaaaataaacccagatgtgatcctgctgtgccatgggggaccgattgcgaggccggaggatgcgaggtttattcttggacgagtggctggcttgcatgggttttatggcgccagttcgatggaaaggttgcctgttgaggtggccattaaggatacaacggcggagttcaagaagattgcgttgaggcactaa

SEQ ID NO: 25351 - DNA, 416 bp, Emericella nidulans
agcgcccatgggcatggcggccatcgggattgcgctgtggaaatacgtcatgaaatactcgcccacgaattgcaactacttcaaccgcgatcgctttgttctttcgaatggtttgtattccttccagagaaagagagggaatgggggacacaaaacaaaactaagaactcattgcaggtcacgcctgtctctggcagtacctcttcatgcaccttgtcggcgtcaagagcatgacccttgagcagttgaaatcctaccactccacagactccagttccctatgccccggccatccagagatcgagaacgaaggtgttgaggtaacgaccggcccactgggtcagggtgtcgcgaacgcagttggactaacattagcgaccaagaacctcgccgcaacgtacaacaagcctggctag

SEQ ID NO: 25352 - DNA, 718 bp, Emericella nidulans
cgaagaagaacctcattacatttactcctctgggcggtccaacagccatatatacgacgaaggtcatgagcctggctacgaagctcagttcattcaatacgaccaggaacctgactacgaagatcaattcgacgagcgcgaggagacatctcgctatgggaacgattaccgcctcggaactacccgacgcaatacgaacactcaggtcgagtatccgccacacacggtacaacttgggccttatcgtggctcttatcctgaagtgatgccaacaccgggagtaagcttgactctctcgcgaacttttgatctatgcctctaatcggcaaatagcatcccatgtctctgccgtcacagagtgtcctggatccgcgtgagtccctttcattatctaggcaaaggaagtatatctaatagcttagggtacatggttcaaccacctcattactaccgagagggtaaggtatgtttaatagggtttttgttttgttttgtttcttcggcaccgatgcaatttgaaaccccatttcacgcgctcaatgtatcacaactgaccaaactaggtcttttcgatcttgtggcacgaaaacgatgggcgagccggcgggacccttgtcagcagaggcccgctgtatcgaggccgctttggggagccaatttacagcactattcgccgcatggtagtctttagacagtatgagcaatgctcatggtgttt

SEQ ID NO: 25353 - DNA, 1068 bp, Emericella nidulans
atggcccagcctaatttccccgcgctgtccaggccccttacatcgccacgaggcgggtcagggcatccagggtacggcactcagtcatcaagtaagtatggaaacagcgatgtgcgtgcgtcgaactgcacactcaacaaggacaattctgttaatgggaggggcactaagagaccagaacccaatgggaaatctgattcaggaatggaaaacaacaagttcgccttctcgcccgaccagctggataaactcttgaaccctaagaacttcggcgctttcggcacctttggtggtttgcgcgggctggaaaaaggtctacgaaccaacgtgcagagcggcttgagcctggacgaaaccgtgttggatggtacggtgagtttcaacgaggcggtttcacggaccttcgtgccagcaaccaagtctgcctccccagccccattaacgccatcacgtgatactattgcggacgcatcgcaggaccgatttgtggatcggcaacgcgtgtttggaaccaacaagcttcccgagaagaaactcaagtccatctgggagctcgtgtggattgcgtacaatgataaggtgctaatcctactgtcatttgccgcgcttgtctccctcgtcgtgggtattccccagtctgtgcgaggaacgggcgtagaatgggtagagggagccgcgatcattgcagcgattgttgttgtcgtgactgtcggcgcggcgaatgattggcagaaagaacggcaattcgcgaagctcaacaagaagaaagaagatcggtatgtcaaggttatcaggtcaggccagatatcggaggtgtcgacctacgatattattgccggggacgtgatgtatctggagccgggcgatatgatcccggcagatggaattctgattgaggggcatggtgtcaaatgtgacgagtcttcagtaacaggggagtcagacctccttcgcaaaaccccaggcgacaaagtttatgaagcagttgcacaaaaaaaagaattgaagaagatggatccctttatcatgtcggggtccagcgttgaagagggtacggggactttcctg

SEQ ID NO: 25354 - DNA, 561 bp, Emericella nidulans
catcaggaacccagaccggtctcgtctcccagtgacggagaagttcagatcgccattcgctcaacaggtatttgcggctcagacctgcactactacagccacggccgcaatggtgacttcgttgttcgcgagcccatgtgtcttggccacgaatcttccggcatcgtcacagccatcggccccaatgtacacaacctgaaagtcggtgatcgcgtcgccctcgaagtcggtcttccctgccgcaaatgcgccctctgtttgtcgaacccaagccgctacaacctctgtccggagatgaagttccgcagctcagcgaagatattcccccatctggacggcacgctcatgcaactcaccacccaccctgagaacatgtgccataagcttcctgatactgtttcgtacgctggtggtgcgctcgtagagccgttggccgtctgtttacacgctatccgccgctcgaacccccctgctcaatccttcctcccaccaaactacaaaagcacaacccttatatttggtgcaagcgcaattgggttgggtttttgccggaccctttga

SEQ ID NO: 25355 - DNA, 666 bp, Emericella nidulans
agttatgggggaaagctgcaacgctttgagcgccagatccaccactacggctccggtctcaacgccctgcccttgctgtcccatttccgcgacaatcctcaggatacgtatcttcttcacgtaggctacggcgggatgaacggtccgctctctaacatcgacattgacgggttcgcctctgcctcgttccactcttggccggatacgctggcgtgggatgggtacagtggcgactatggtcccaacttcctgggcctcgcactcggctcggcagtgtacctggttgaggacatgaaactgggcttagttgcctacggaggtaatttcaacagaacgtctggaagtactgccgttgtcgcaactcgggatgcagcgaagcaccgtatcttcattggcccgatttcggtctacatcaccattgatgcgggtgcgatcgaaaagtttgagtacaacactgaacagcgtactgtctccttgacaattgccactaagtctagttcggctcctgcgacttcagcggacgctgaggcggttgttatctggatagacaatttaagcggcttaggaggctatgagcttgtcggcgagtatacgcacgagcgcggaggaacgaaggtgtcattcggcaagcagagcgaggtcacagtcgtggttaggcctggatga

SEQ ID NO: 25356 - DNA, 545 bp, Emericella nidulans
cctcccaaaaccccgtcgacgccccaccacacgttctggaacttctcttcaagcttcacaaaaagtctctcgagcaggaagctgccattgcccagtccaaggaaggcaagatattctccgccagcgtcatcaaggacctgggagacaaccgccccaaggaagacacaattgccgagttcgacaagttgatgctggacaagtttatcgccctcgacgaagacaagtgccagttcacctaccagttgattaccgccatgggggccacaaacgtcgttgaggcgggcactagcttcggtgtcagcacgatctacctagcgcttgcggtcgcaaagaccaaggcggcgatgggcaagccaggcgtggtcattgcgaccgagaaggagaagcaaaaggctcaaattgcgagggattactggaggcagtgcggcgacgaagtcgagagccagatagatcttcgagagggggacctgctggagacattgaaggagaatctgcccgaggtggatttgctcttgttggacagtgagtgccctcagcctttttga

SEQ ID NO: 25357 - DNA, 206 bp, Emericella nidulans
ttgagcaagatgactcccttggtacacccgcttcggagaacaagatgcagggcgttgggctcgaggcttcaaaaacatctccgcctgcggatgagtcgacatctgtgcagtctagctcgggtccggcagacgaagcgacccgtttgaaagagcttcacgccgatatccgcgatcaagatgctctagagagagatataacgcgtcag

SEQ ID NO: 25358 - DNA, 413 bp, Emericella nidulans
tcagtcatgggtaagaaaagaaaggccggcggtcgtccagcggtccaaaataccgacaaagaagagccctatagattcgacattgaggagagatttgatgattctgaggatgaattccaggctggtcgagaccagattttgctggacgaatcgccagaagcaaagagacgacgcaaggtcgcagaggatggtatgcggtagtgcccgattcttcatcctatgttgagtgctgttactaactcagctgctgttcagaggaagcgctccaattatcagacgaggaggtcctgggctacgagtccgtcgacgaggacgaagatctggaggatgaggacgaagaagatgaggtcgattatgacgacgatgatttagagcaattctcatcaaaatccaagaagaaacggagtggatag

SEQ ID NO: 25359 - DNA, 1125 bp, Emericella nidulans
atgttcggctttctagctcgtgagaaccagtttgttgtggagggtcgggtgagtctcattgtggcatctgtcgtctctgatttgggcattactaacaagttgggcttgcagaccgtggtgatcaccggtggctcggagggtatgggcaaggccgttgcctgccagctcgcccagaaaggagccaatattgtcattgtcgctcggacacttcagaagctcgaggaggccattgaagccatcaaagtacgctcaccttgaacatttctatgtgcatttgatcaatgtttctactagggttccgctgccaatgtcaacaagcagaggtttcactacatcagtgctgacctcacgaaacccgaagaatgcgaacgcattatgaccgaagtcaccgagtggaatgacggcatgccccctgacattgtttggtgctgcgctggatattgcactcctggatatttcgtcgagacatccgtccagacactcaaggaccaaatggataccgtttactggactgcggcaaacacagcacacgcaatcctgaggaagtggcttgttcccattaaccctagtcaccagcggccattgcctcgacgacacctcatctttacttgttctaccctcgccttcgtgcccattgctgggtatgctccatactcccctgctaaggctgccatgcgtgccctttcagatacgctgtgccaggagattgaagtatataacggctctcgcgcttccaaagaacgagcccgtgccactccagccgatgtcaagattcatacggtgttccccatgggtattctcagccctggattcgataacgagcaacaaattaagcctgcccttacaaagcagctcgagtcggccgacaagcctcaaacacccaaggaggttgctcggattgccatcgaagccattgaacgaggcgaatacctcatcactacaatgttcgtcggcgacgtgatgaagggtgctgcgcttggacctagccctcgaaattcttggttccgggatacgtgcactggttggttgagcaacttactattcctgggggttgttcccgatcttcggaagcaggcattcaactggggagcaaagaatggtgttccaaccatcgcgtcggcttag

SEQ ID NO: 25360 - DNA, 524 bp, Emericella nidulans
ggcagcacgcttgaccctgactgtccaaacatggagctgcacacactcggcagaagtgacaatcgtcacctgatcagcgcagaagacctagtagagaagcttaaggcgcagctagatcaagatctggatcataactgcactccaatagggccttgtgggtcttatggtgcaccattcaagattacttgtgccacatttggatatactattgtcgggaaagggacaacttcgagactctggaaggaggtgtcaagcgaggtagatgtttaccgtgtgctccagcctgcccaaggatcagcagttccagtctttcttggagctattgatttggcccaaatctacttccttcatggcgcgggagaaatctgtcatatgctccttatgggctggggtggcgagggcatgggcaatataaaacttgacaagaccatccagcgtgcaatttctcgctcggtaaaggaaatacgctctctaggtattttccaccaggaccttcgttcggaaaacatcttgtggaatgctga

SEQ ID NO: 25361 - DNA, 263 bp, Emericella nidulans
aaaacaactcttctcaatgcactcgcccagcgattagactttggcgttgtcacaggggacttcctggttgacggaaagtgagaaacccctaactatttgtgtcactcttgtactcacaatcccagaccccttcctcgcagcttccagagagcgactgggttcgccgaacaacaagatatccatgagccaaccgctactgtccgagaatctctgaggttttctgctctcctgcgccagcctcaagaagtccccatcgaagagaa

SEQ ID NO: 25362 - DNA, 1076 bp, Emericella nidulans
aattacatttttccgccgcgcaaggctaatcctcctcccgcatcgccgccagaaagtccgactgttagccgtgatcatggattgacgatgatcctgcattcgcctatttctccgatgacgccagcttccccgacgtttcctgatgggatcatgacacctctatgggcctcaaaacaccaagatttggtccccgccgcagtgatcaatttctttccgctctgtctcgactcgaccatgaactcgttgcgtgacaatcaactaaaaatcgagatcaatgggttgaaaaaacagtggtcttcttcggggtacaggacccgcttcattgtcgtgcttctatcagagaaggctatcggagatgatttgggagacctcgatgatcgagttttagggattcggagagcaacaaatctagaccaaaaatcgttattcattttgcctccggatgtgagttcggaggagatgagagatttcacaaggtcgcttcttgctcttttgcatccttctttgatggaatattacagagacttgtccaagcatgctcgaaggaaacggaataggagcagtataccacctccacagcaccccctactagtggaacgtctcagacgttatcgcttcagggttggaatactcgatacgaattcaaaatgggaatctttgcagaattccggcaagaaatcgacgcggcgctcaagaattatgaaagtgcctatgagaccctctttggacaagaagtttttgaaaacattgctggatgggaccctaaattcaatgaagctcgtctgtttagcgatgcgcttgcgatacgaataattcgctgcttgctatctactggacatacaagttctgcagtaaggtcctgggtctatcaccgcagacgtacacaagacatcgtgaatagaccaggaaagggtacgaggaactacggatgggaagcttgggaagctagatggtcgtcggtgatggctcacttcattcatcaagcccagaatcctcattctaacacctcttggaaaccttcaaaattcagtttcaacagccccatcctaatttttttttcccccccaaaaagaact

SEQ ID NO: 25363 - DNA, 1021 bp, Emericella nidulans
aatgtatgcatcgaataagacgtatccgtcttctagggcgctcccttgcctcgttgagaaggtcgaggcacaacacgttgacggggcgattagagtaaggatcacaacgctggagcagagtacgcgtcgtaaaccatcccgagcagattatctatacttttgtgaagcctttgagcttttgaacaccttgaggtcgttctcagtacggatttgccagtatgactattacacccaacattctagaagactggcgtcaagccaaagccgccgctgttgaagccaaatacgaagcggaacgcgagatccaacttcgagctcacggaaacgtgaaagacattgaaatcacccgcgagtcagcctttgaacactttgcaacagatccctgggcccagcatgtgggggtagacatagaagctcagcgcgagcggttgctagcggaacctggaagccgcaagatcctaatcatcggggccgggtttggaggtctactgtttgccgtgcgtttgatccagactgggcgatttaccgctgaggatattaccatgatcgacagtgccgcgggcttcggtggcacctggtattggaatcgataccccggactgatgtgcgatactgagagctatatctacatgccccttttggaggaaactgggtacatgccccggaacaagtatgcgtcgggcaacgagattagggagcacgcggagcggattgcacaaacgtacgggctggcaactcgagccatgttcaggaccgtagtcgaaaagctggattggaacgaggcggaaaaagtctggacagtagctggttctatgctgggcattgcaaataacgggcaaagggataatatgatgtcttttcagatggtttcacaatttacgatcatggcctcgggttcattcgccagtccgagagtcccggattatcctaacatattcgactacaaaggcaaattgttccacacagctcgatgggactacaactacacgggaggctccgtggaaaacccgaagatgctggg

SEQ ID NO: 25364 - DNA, 561 bp, Emericella nidulans
gcaggtctggacctgaaccaggccaaagaggcagagtccggcatccgtcttgagctcgaccgcgccatcagggaacttgatcttctacaacatgtcgcccatgcgtcgtcccgcgagatagataacctccgtgtatgtgatgcatgcgccatgttttgcgacttgacctcctgacactttccatagcatgaacttgcctcgctgagcgcaattgcttctgatacccagaaactacaagcagaaaaagttcgcttaactaaagaagtatcgagcatacggtccgaagtcgacgaactcaggtctcaaaacacttcggccaacgcactccttgcagagaatcaagcaattacccggcagctaaacgcaaccaaaattcagctggagaatgagaaacgcgcgcatgaacgtacacttgccaaacaagctcaacaaaaagaggacgtcggagcactgaccacgaagctcgaagtagcacgtcaggaattggaactggcgcgtcgccacggcgcagcacaatacacggcagaaaaacagcaccccaccagtttccggcgaaaatag

SEQ ID NO: 25365 - DNA, 1090 bp, Emericella nidulans
ttatggcgacgagcacggcgaaccccagcaccacggggaagagggtcaatgtcctcgtctactctggtgcgttttctttttttaatatataccaattacctatttgacagttctcaggagatggaaccaccgtcgaatctgtccgccactgcctctacaccctccgccgtctcctagcctcccgttatgctgtaatccctgttacagcagacatgctcatcaaggagccatggacacttacgtgtgccttactcgttattcccggtggcgcggacctaggctactgccgcgcgctcaatggtgcaggtaatcgcaggatcgaacaattcgttcgccgcggaggcgcttaccttggtttttgtgccgggggatactatgggactaaacgctgcgagttcgagctcggcgataaaacaatggaggttattggggagcgcgagctagctttctatccaggcatttgtcgcggaggggcttttaagggcttcgtctaccatagcgaggtgggcgcaagggctgcggagctgacggtttcgaaggatgcactaagcgctggtgtaatcccgtcgagttttcggtcatactataatggtggtggggtgtttgtcgatgcgccgttgtatgcggatagaggcgttgaggttcttgcgagctacgcggagcgtctcaacgtgaatccgggttctggcgctgcgagagtggtgtattgtcctgttggcgatggcgcggcaattttgactgggccacatcctgagtgagtttttgtcaccatatcgagacgagtgtagctgatgtagcagatttgcggccgttaacctcaatccgaaagctggaggtcccgaatacgctgaagtagtcgaggctttggcagcggacgacaaggcccgtaccgacttcctgaaggcttgtctgtccaagctagggttgcaggtggcgcaggaaacaacgcatgtaccctctctatcgtctctgcatttctcgtctttgtcatctggtgatgcagaacgagtgctaaaatcgcttgaagaactagctggcgacgagggccttttcaaagacgagtacgacacctttagaatcgagaagtggg

SEQ ID NO: 25366 - DNA, 266 bp, Emericella nidulans
tcagtcaactccctttcacctccacatgtgatgtccatcgaagtcaattgggggaccgccacctctggtccggacggcgaggctctagctgagcgcatccgctcttttatccacgacaaattccagcaggtgcccctcccgcgcttcatccgctccgtccaggttcactccttcgacttcgggaccgtcgcccctgacttagagatcaaagacttttgcgaaccatttgccgacttttacgaggatgacgaagacggtgactcggg

SEQ ID NO: 25367 - DNA, 684 bp, Emericella nidulans
atggatattgaaaagcaccccgacgagaaggccgccgatgctgcagccgatgagcccgagtatcccggcttcgctaaagttgccgtgatcatccttgggttatacctgtctgtctttctcgtcgccctcgaccaaacgatcataggggtagccattcccgaaatcacgaaccaattcaagagcattgaggatattgcgtggtatggcagtgcatattttctcacttccacagcactgcaaccgtcgtatggccggctctataagatattcagtgtttgttctccctcaccctctttcacccccttggagaggcacatgggctgcttagtctgacagctataggcaaaatgggcgtttctgtgcgccgtctttctctttgagctggggtccttgatatgcgccgtcgcaccatcgagtaccgtccttatcgtcggacgggccgttgctggtataggcgtcgcgggtattttctctggtgcgctggtcatcattgcactatgtggtgggttgctttagaccatcccgtttactgctgaatcctctgacctgaatagtacccctacctaaacgcccgctcgtcttcggtatgttcggcatggtttggggcatcgcatccattgccggaccgctgttgggcggcgccttcactgactctgtctcctggaggtggtgcttctacatcaa

SEQ ID NO: 25368 - DNA, 440 bp, Emericella nidulans
atgttcgcaaccgccttggaatttccggttacttggaggagtatgcacgctacagtgacttccaccagttcatgcatcagttttcgccaaacaggacagaagccaacttctctgttgtctccatcaacggaggcctcaatctgcagaactcatcgctccctagctccgaggctagtttggacgtccaatacgcaatctcgctggcgtacaacacatttgcgacatattatactactgcaggtcgcgcaccgtttctgcctggggctaccgggacagacgaggatatatccatcaatgagccgtatcttgaacagctccattatcttcttgaccttccagacgaggaattgcccgcagttcttacgacctcgtacggcgaagacgagcagagtgttcccgaatcgtacgctgaggcgacttgcaatctgttcgctcaactg

SEQ ID NO: 25369 - DNA, 213 bp, Emericella nidulans
cttaaggtgtttatgatgaccctgttggagacagcctgcctcaatttctgcatcaagctgctcaaccagaagaccaaggtacacaagtacaagagcctgttagtatatataatggcagtcctcggtcgcggcaagcagggctggcgcgacgccgacagctatctactaatcctctcatgcgtgctgaaggtggcgcgctttcttgttgtgtag

SEQ ID NO: 25370 - DNA, 2887 bp, Emericella nidulans
ctgcgcctcccgagcagttctttgaattctataacgccgttagtcaacgcatcgcccagcttgttgtccccggcagtgatgcacacgaaaggatcggcggtctcctagctcttgaccgactaatagatttcgatggcgtggacaatgcgcagaagacaacgaggttcgccagctatttgcggagcgccctgcgcagcagcgataatgccgtacttgtctacgccgctcgggcacttggtcgcctggcgaagcccggtggtgcccttactgcagaattggttgagagtgaaatacagtcggcactggaatggcttcagtctgaacgacaagaaggtcgacggtttgctgcggtgctggttattcgggagctcgctaaagggtcgcccacgcttctttacgggttcgttcctcagatcttcgaactcatctgggttgctctgagagaccccaaggtacttatccgagagactgctgcagaagcagtaagtgaatgcttcgaaatcattgctgcgagagatatacaggttcggcagctatggtttgcgagaatatacgaggaagcgctccagggcttgaagtcgaataatgtggactggatccatggatcactcttggttcttaaggaacttctcctcaaaggagccatgttcatgaatgaacattatcgaaatgcgtgtgaaatcgtgcttcgtctcaaggaccaccgagacccgaaaattcggacgcaagttgttctcacaattcccattcttgcctcctacgctccggttgatttcaccgaaacatacctgcatagattcatggtgtatcttcaagcccagctcaaaaaggacaaggagcgcaatgctgctttcatagctatcggaaagattgcaaatgcggtgggtgtagctattgcacaataccttgatggtatcattgtttacatccgcgaaggactggccctgaaagcgtaagtataaactcccaacctttcttttcccttttgttatttttatatatccccccagccttaatctgacgctaatgattggcagcaaaaatcgagctgccattaatgaagcgccaatgtttgagtgtattagtatgctctcgctggctgttgggcaggctctcagcaaatacatggaatcgctcctcgatcccatctttgcatgtggcttaagtgaatccctgacacaggctcttgttgatatggctcattatattccaccaatcaagcccacgattcaagtaaagctgctggatatgcttagcctgattcttgatgggacgccttttcgccccctaggttgtccggaaagcaggctacctccgctgccgtctttcgccaaagacttcaccctgcaagaactgcattctgacgctgaaattgcgctggctctccacaccctgggaagcttcgatttttctggtcatattttgaatgcaatttgtgcgcgccgttgccattcactatgttgaaaacgacaaccctgaaattcggaaggctgcggctcttacctgctgccagctatttgtgcatgaccccattatcaatcagaccagcagccactcaatacaggttgttagcgaggtcatcgacaagctattgaccgttggtgtcggcgaccctgatcctgagattagacgcactgtgctatggtccttggatcgcaaatttgaccggcaccttgcacggccagaaaatatccgatgcctcttcttggccgtgaatgatgaagtgttcgctgtcagagaggcagcgatctgcataattggccgcctttccagtgtcaacccagcctacgtattccctcccctaaggaagttgctggtgaacttgctcactggacttgggttcgcaagcactgctcgccagaaggaagaaagtgcacagcttattagcctttttgtttcgaatgccacgaaacttatccggtcgtacgtcgaccctatggttacgactctgctaccgaaagcagttgatgccaatcacggcgtcgcctccacaacactgaaagctgtcggagaacttgcaagcgttgggggcagcgatatgaaagcctacctgcctaagctgatgccaatcgttctggatgccttgcaggacctttcatctcatgctaagagagaagcggctttgcgaacattgggccagatagccagcaactcaggctacgttatcgacccgtacaccgaccaccctcatctgctggcggtgcttattggtatcatcaagacggagcaggcaggatcgcttcgcaaggaaacgataaaagttctaggaattctaggtgcactggacccttataaataccagcaaataagcgaaaccgcaccagacgtccaccatatcaacgaagtacaagtggtgtcagacgttagtcttattatgcaaggccttgccccttccaatgaagagtactacccaactgttgttatccatactctcatgcagaacatacttcgcgagaactcccttgcgcaatatcattctgctgtcatcgacgcgattgttacgatctttaagacccttggcttgaagtgtgtccccttccttggccagatcattcctggtttcatttctgtcattcgaggttcaccctcaagccggctcgaatcttatttcaaccaaatggcaatccttgtcaatattgtgcggcagcacatcagagcctttcttcctgaaataattgaggtcattcgggaattctgggacacgtcatatcaggttcaagcgaccattctctcgcttgtggacgcgatagccaagtcccttgagggtgaatttaagaagtaccttgcaaatctcattcctccaatgctggacacactggaaaaggataatactccgcgccgccagccttccgagagcattttccatagcttcttagtattcggctaa

SEQ ID NO: 25371 - DNA, 357 bp, Emericella nidulans
atgagtctaacaactagcaaaaaggccctagctctgatgtcttacccctccaacattcccctctccctctctgaactccacgccctctcctcagacatactccacctagctggcgactcctcggtcgacgcatcctggtacacgaaacgtctctccgtcagcgctatttacgcatccgcggaagtaataatgacccgggactcgagccccgatctctcggcaacagaggcgttcgttacgcggcgggttgaggatagcaaggccattggggacaaacttagtggtgcgaagcaatgccttggtttcatggggtcaacggctgttgggctgggaaggagttgggggttgaagatctaa

SEQ ID NO: 25372 - DNA, 1473 bp, Emericella nidulans
actgtcaccatggttaaggaggaactttccgaattcgagaagcagcggctcgccaatatcgccgagcgcgatgcgtttctcaagaagctcagcctcgacgcgcagtcgacaggtgtctttacctcaaatatgccgagacgacatctgcgaaccagtcgaagccgaagaagaagcccgcgccgaaagtgaaaaaggaggaatcgctacttcctcgtcgtacatcgtcgcgattaagaggcattgcggcggacagcgagattgcgaaacgcaaggcggacgaggagtatgatcgcaggcaagaggaggagagagcgaagagggttcggaagtcggactctttctctttcaatgatatatttgtgtcgggccaaaaactgtccggagacgctttaatcggcgtggatgtagtcaccaagggagtcgcggtcccgtaccaacggacgtttggagaggaggacatcaaatccacggatgacaaagacttgaaggcgctgagaaaagagatgaatagtctaagtctttgggaagcatgggagcctaaccgtatgaactcttcctgccagcttattagacaattgctgaagatggacgaatacaggcattaagatcacccctgagcgaatctactctatgacatttcacccgtcagaagcaaagccggtaatatttgctggagataaaatgggccatctagggatcctcgacgcatctcaagaaaagccaacatcagccgtgaagaacgaagacgatgaagacgatgaagacgatgacgaccctgatccggtacttgttacgctcaaaccccatacgcgtaccatcagctcgatgaccgttcacccttcaaagcccacacatctctacactgcaagctatgatagttctatccgcgagctggacctcgagaagacatcatcagttgaaaagtatgcacctgagtccacgtcagacgacgtccccatctccggcctcgacatggccgccggtgaccccaatacgatttactggacaaccttggatggcgcattcggccggtacgacatgcgcacaaagcgacagagctccgcgacaacctggcaattatcagagaagaagatcggtggtttctccctatatcaaacacacccgcactatgtcgcaacggccagtctcgaccgcactatgcgcctttgggatatccgaaatctctcccataccgatcctacgcctgtcggcgaacaccagagccgcctctcggtttcacatgccgccttcaactgcgtcgggcagatcgcaacgtcttcttacgatgatacgttgaaactgtacgatttcagctccaagggtatctcgtcctggaagccgggacacatacttgatgaatcggaaatgaaacccgatactattgtacggcataattgtcagacgggccgatgggttactatgtacgctctctatttactcaccagtactgagaccgtgccaccgtcatgctaa

SEQ ID NO: 25373 - DNA, 533 bp, Emericella nidulans
gagctagagaatgctgttaccctgattgatccccaacgagactccctctacagatacgacgaggaaacccacaaataccttagtgatacccgtccatggaccaaagaccctcactattttaaatcagttcggatctccgccgtcgctctcctgaaaatggtcatgcacgcccgctccggcggttcgctcgaagtcatgggtctgatgcaaggctatatcctccccaacacattcgtcgtaacagacgccttccgcctccccgtggagggcacagagactcgagttaacgcgcaagacgaagcaaacgagtatatggtctcatatctccagtcgtgtcgggaagcagggaggatggaaaacgcagtggggtggtaccacagtcaccctggctacgggtgctggctttcgggcattgacgtttctacgcaggatatgcagcaaatgagcgggccatttgttgctgttgtcattgatcccgaacgtacgatctctgcgggaaaggtagacatcggtgcgttcaggacgttccctaa

SEQ ID NO: 25374 - DNA, 2967 bp, Emericella nidulans
cttcggaatgaggctcgtcgtatccagcgatcggcgctcttggctgcgaagcttgtatggccttttcatgttgcaagcatctttggtatggatgcttatctttatggctgtatagatctctctcacggcgttgttcattccccagatcgtcttcctttctgaaagagagctccgttctccaactttgcggaatgctgtttcccttcctgccgatattctggaactccttgcaactgctgcggcactcgtcctctcgtatatccaccactgccgctcgctccgcccctcgacgctcctgattctcttcctatctgcgcgttcgccgctcggcatcgcgcgcgtgcgaactctatggcttatcccaggggccaacagggcagctattttatttactgctggatttgtggctaccctactatgcgcaatcctcgagtcaacggagaagacgtctaacatccttcccgcgaggaaaataggaaaagccattcccgctacaccagagtccttcagcggcctttggaagtgcgcgagtttcgcctggctgtctggaacgtttcgacgcgggtatgttcatgttctgtctgtggatgatctaccgcagctggacccggcgttggatagtgaagtggttagagaaagattggaatatatttgggcgactacgggtaagactcaagtgacattcagtctggttgggaaagaaatgttgctgaagaatggagttatcagataaaacagccagatatgccctcctccgcgcaagcgtttaagcctacctgaagcccttcctctccgccgtaattccacgcctcctcgtcgcaggcttcgcattctgccagcccttcctcatcaacgcgacagtctcctgggtaggaagaccagatgccccagccgattcgggaaaggcgttgataggagcgtttgccctcgtttatgtcggacaggctgtctgcacggccctctacggataccagaacattcgcttcattattcgtctccgaggtgggctgatcagtctcatccataaacaaactgtgcacccgcgagccgtcgatctcggcggaagtactgctatcacgctcatggggacggatgttgagcggattgtcagcggttttagattgcttcatgagctatggcctagtctgacggagatcggtattgcagtatatttgctggaaagacaggttggggttgcatgtctggcgccggctgtaattgttgctggtgagtgctccgtttactcattcgattgtctacagtcctttgaatcatagaacgagggagtagaagctcacaaatgaatacagtgttcatcttagcaacattcaaactctccaccttgacaaacaagttccagcgtctctggattgaaaaggtcgaagacagactcggactaacctcgtacacgcttgagaacattaaagccgtcaagatgttagggctatcagagaagatcttcagcattgtgcaggggctacggcacgctgagatcgcgacctctgctgttttccgcaaattgcttatcggaaccatcactctctgtacgccggccctatcttgctactcgttctcaccgtcccagtgagatggagagttctctataagctaatactgagtctacctgcagcaaattccccttctgacctcgcccccatgacgaccttcgccatctatgtgatcatcgcgctcgtccgcaacgataactcgattttggctgcgcaggcgttcacatcactatcgctgatctcgcgttacgaacccggtgctgacgtttatccaggcggtgcctgctgtcatccaatgcttggggtgcttcgagaggatccaggagtattgcagtgtacccgtgcatggccaagatattcccgagcaggacctcaaggattccttggagaaaaagaataccttaaccgcacttcaggatatgccagctgtagctgagggagaggagcaaaaaatgctggtgacattcaacagatacactgtcacctgggaaaaaagtgtagcccccgtcttgcgggagatcagcctgacaatcaaccacggaatcacgatgataaccggttcaatcgggagcggcaagtcaactctcctagagagcattctcggcgagaccctcgttacgtctggacatgcagattgggtataccgtggctcagtcgcatactgttctcagacacaatggctgcagagccagagcatcaaagcgaatattgtgggcagatcccttcccgatgaaacctggtatcggacagtcatatcagcctgcggactcgaaaaggacctctcgaggctgccgcgcggcgatgccacagccgtggggaataatgggatgacactgagtggaggccagaagcagagaattgtatgcccgcctatacccagccttgacctgagagcagtctttcagagtgcgtatgctgattctggacaggccctttctagagctctctattcccgcgcccaaattatccttctagacgacgtcttcagtggtattgacgcagaagggactgagattattgcacggaatctctttgggaaaacagggctctcacgaaggattgggagctcggttgtgcttgctacgcattcgggcatgttcctcttcttctaattatccgcggtatttctagacctcagttggtaggtatggctaactgtacgtgaggacgatagggtacctccttcgctatgctgacgagatcgttgtcctggaaagtggccaactcgttgataaaggaagtctggaggaccttatggctaagagtacctatatccaaggactgcagacctcgctgccgaaaccgacatcatctattgatagtaggtctagtgaaacagtgatggctactcctttttcggtcgagcaagaccgaactgctgaagaacgcgcaaacgaggctgttaaaagtgagaacgacgacctcctaggccacgaggcccccagcgatgcgacccgcc

SEQ ID NO: 25375 - DNA, 504 bp, Emericella nidulans
tcgctcaatatgtcggctacgtctagtccggtggaggcgaggcttccgacccggtccaacaccttgcgtactgtgagtacgggcacggagcgcagggcgtctctaagcgacgacgaggcgatccctggaggtgatagcaatgaggtatggcgctactgaacttgtcaatcatagagtatgggtttggggaactaacgctgcgtctgggtagactacgaacctcctcgtggagcggcttcgtgcttggaagcatatgtgcgggtacctggaggattatgtctccgttactgccaaagtgcaaaaagggttgtcgaaggattacgagaaagtcttgaaggtctgctgatctattcgtgatttgtgatatatctttgtccttcattggatactgattaggaggaattgtagacggtcaacgagccgctgaaggagggtcaccatttctcgcagagtgcgggtggagttgcgtcttttttcgaaaacatccgtgccaacactcaggta

SEQ ID NO: 25376 - DNA, 1293 bp, Emericella nidulans
cttctcgatcagctatacgaagaggccaacaacgagcagtttgctccgaaggccaaactgtaattcgaacccagtgactgccttttgtacatagcgagtttccgcctgacggcgggcgtcatttgcatgatcttcaaaatttccctgtatgatacatttagtaatagattttaccattcccaaagcactaaacagagtgcaagggaaggaagatgtacggttaatacttaaggtaatttctcatccgctcgggcaagctagtacctagcttgccaagcgccagcttaaaccttccaaaactccaactcgtctcagaaccacgtccgcgttgatcctaacaactcccaccgttccaaaatgcacctgatcaatgccctcatctttctggttcttctagtacatccagccctttcttcaaaatttacgatcacaatcccgccctccccggtcctccctaatcctcagtccctgccggccgacacccacgcaacactcacctcaaccaccctcgcgagaccgctcaaagcacccctcactcgctctgcgacattcgtattctccgacttcgctgcagccgagtgcaaggatccctcccaacatagtatttccggctcatacctgctcgatatccggtctgcagaatatgtctttccaccgctgagggtcgatctagatgagaggggggaggtgaagggtgtttgggagacatttcgtggcaatgagtggggaaatcgcggggccgaaaagtacattaggccttctggggcgcaggttggtggtggaactggagatgtggttgttgaagcgaggcctgttggccggaaagggttctacgaagtccgacagacttgtatgtggttccagcaaatccgcctcgagagttatggttggaacgtgtgctaattctgatgtttctggctgagcagtctcgcctctgtcgcttctcaaaaatcccatgattctgcttgcacttgtggcactggctttcacctttgggatgcctaagcttatggagaacagtaagttctaactttctctttttttctggtacgtgatggatttggctgctaacggtccttaccagtggaccccgaactgcgtgaggagtttgagaaacagtctcgcgcatcgccaattgctggcgcgcagagtgctatggctggtggtggccctgcaaactttgatcttgcgggatggatggccggggctgcgccgcgaggacagccggttcctgtgtctgggtctggtgccgcgagtgggagggagaatagagggggcgcgaggagaaggtga

SEQ ID NO: 25377 - DNA, 1055 bp, Emericella nidulans
aaacgagagcaccaagatcagactggcgatagcagaccaagcaaaaaatctaaaggcacgaaagacacgaaaaaaaacactgaagtttcgccgccttattttcaatcccctgctcttgataatgttcctcaaacagaaattgataaatttctttctgaccattccatcaagataacggatgcctcagcagataaaccgtctctgcgcccaattatctcattttcattcttaccccccagcaataaagacctctacgctccgttagatggtttcgcctcgccgaccgctatccagtcggcaacatggccacttctgtttgcaggccgcgatgtcataggaattgcagagactggaagtgggaagactcttgcatttggtctaccgtgtctaaagaaggtgcttgatttgaagaccaaacaaaaatcatgcagaccacttgcagttgttatctccccgacaagagagctcgcaatgcagatttatgaccaacttgtgaagttcgcggaaaaagtggatattcaagtcgcctgcatatttggcggtgtcaagaaagacgaacagcgtgaagctttgaagtctgcagctgtggttgttgcaactcctggaaggttgaaagaccttcagaatgacggctctttggatttaggcagggtcaaatatcttgtcctagatgaagcagaccgtatgctagataaaggatttgagcaagacatcaaggatatcatctctcctatgccagtgtcaaaacgtcaaactgttatgttcacagcaacctggcctcctattgtcaggaaccttgcctctacatttatgacttctccagtcacggtcaccatcggtggtgacccgtctgcagatccacgtgcaaacagcaggattaaacaggttgtcgaagtggtaaaaccacacgagaaagagcaaagactagtgcaaattctgaacaggcatcagcgtggaactcctgataaagtgctcgccttctgcctttacaagaaggaggctatgcgggtcgagagactccttcgaaccaagggcttcaaggtagcgggtatacg

SEQ ID NO: 25378 - DNA, 305 bp, Emericella nidulans
agtttcaacgcagatattaccatcctaacgaagacccgcctctggcagaaacaccagctgctgatttcgaaacgcagctgcgaaaactggcggatggtaccctctcaggacgatactctcggccagatgataagactgtcgcctctccaaagccacaagaaatccgacaccaaaagggcttggctccatcgatgttcaagcatcttatcggtcgcgatcatcctgaattctcgactatgagacagcaggacgcctttgagttcctactgcatgttttcaagcacgtcacattgtccaagcaccct

SEQ ID NO: 25379 - DNA, 574 bp, Emericella nidulans
ccccagttgacatgggaggcaccggtgtcgccgattgcacgaccgccagcccttcagattcccacggagccctttcgccttactcacttgacacaagcctgtttgcatccggcactcctcaggatttcgaggaaacctcggatagctccttagcaagagtaatggatggatctcctggtgtcagcctcaacagattgaaagccaccaggtccagttctatctatgcgcgcagcggtcgacatgcacttggcgaccaccgtagcctaacaaattccgagaagtggcaggcctatcttactactgtgaccgaccactatggcgtcgactgtggtcgtcctgatatggatttaggaaagaacgatgaccactcggccatcgatgtcagtgatgctttggacacggtccagtcgcagactggaagcaatgcatctagtccaggcataatttctacgaggatagaccgtgaactgtgtgatcgcaagtacaactactatgggtcacccgtgcctataaatatacctcgatacctgtcgccacttccggcgtctttgctgaacgtgcctatcaacttgat

SEQ ID NO: 25380 - DNA, 621 bp, Emericella nidulans
cgttgtctccagaagttagtgaaagagggtgtatcggtccccgcattattgggtgtggattgggagccgagtgctggagatgggagctcttggcttgttatggaatggattgagggtgagcctgtcagggttattctggaggaatgggaggcatatttgaaaggcattgagagggaaaagaggctgggcttgggagagggtgtgcaagggagcgaggaggagaaggttcgcgggcttatgcggaggattgggagggctgttggggggttgcatagagcgggtgttatacatggggacttgacaacgagcaatcttatgctgcgccctttgggctctgcagatacgactgaaaccatagaggagagggatcagtcaccctctatggcaggtgaagttgtcatgattgacttcggactcgcgatgcagagctcccaggatgaggaccgcgcggtggatctctatgtcctagaacgggcttttgggagctcgcatccacgaacggaaaggtttttcgaggaagttcttgttgggtatagagaaagttataagggtgcggtctcggctctgaagagactggaagatgtgaggatgagaggaaggaagaggagcatgattgggtag

SEQ ID NO: 25381 - DNA, 1394 bp, Emericella nidulans
atggaaagactgcgtaatgcggcgaatgcggctctccaacagccagcactcacgcccattccagacttaatcctagcggacctcactccaatcgctgtcagtcagctatggcaagaaacatccacctacagtagctcagataacagcgaagtacgtactcttgaatatctcatgcgccaggcggtattaaccattagcagattcttcaaaacctcctcattgctgaggcgtctttcagaaaacagtctcctgagaacttgtcggacatggataagagtgccatcaacagattctacgcctgggctagtgagcttgctctgccgttaccagtctttgcggaatcgccagagttatcatcaaaatgtgggccttggcccctaactcacctatatttctgatctagctaactatatgcagcgcaggatgaaagtcgacaacggtctacgctcgctgtgtcggtcatttcacggctgaacgccctgcttccatttgagcagtccgaatgcgtgtccagtgtcgttattgctttggcaagcttctcctcagatgcagacgcgtggaatacacatgaggccttcactgcttccactgccatgctgagggacttcgtagaggcatcgtctttctggctgacaatagaatccatcctcaaaagccgggtccgacctatcttcgccaaagcgaagaacccggccatcacggaatctggccggaagaatttccaccctattccgttgccacgatttgattcgagtattctagatcctgagacgaagccatggaagttgcaagacgcctacatcacgactgttttcgcctggattgtcaaccaatacaaggtgcgtactattcatagctagaatcttcaatctaatactaactagacaccagcccaccgacatcaacacccttgaagcccacttccccctcctagtcccgcctactctctccttgatagacgacagcagccatttctacaagcgcctaggctgtatcttgctttcccaattcctagtccccattcgtgaaagcaaatcagatattctccgccggacaaacctctcctctgtcttcgaggacgctatcagaccactcttccactccctaccaacaatcacgccagaagatgactctatccagcttctcagtgaagcataccccgcgctgcgttctctcgtccaaacgagctacagactatcatcggccacgaaccgaagtacctcgtcccctcgacagctaacagacgaagagaagtttatatcaactacaacaaaaactctacgcgaccatctcatcccatcctttcaccacatcagctcaacgaacccaaccacgagctcaggctctaccttcgcttcctttcctcatccgcgcctctcaactttccttcttga

SEQ ID NO: 25382 - DNA, 1746 bp, Emericella nidulans
agaacgctctcccccacctccattaaactccctcgacttccccatctaccgcctccccgccgtccccgacgagccctctgaagactcgctgcggaatcttcaggccgtccttgcctctatccgccgtccccaagacattaccaccgacaaattcagagacctcaacctcaaactcgagactgacgtgccattgtcctcaattgtgcgtcacgatggcgcgaagacggcgcctccgctgccctgggaactggactcccccaagccctctctcgggtcgccgctcccggccgacgggacccctatctttctggaaaacggaaacccgtacccgaccagggacaaatacgagctactcgaaaacgaactgctactggataatgacgatgccttccgggaggttgcccgattggaaccccgcgctggccgcgaacgggtgcgagtgacgcagaccaggaagttttggacggcgctggagcggatgtcacaatactgggatgatagcatggatcagtactacgaccgggccaaatcgccggaaccgagtgagaagaaggcggacgacgccgaagcggctggggacacggagaccaccgccgaaacaacgccaatggaaatagacccgccgacaaacacgtctacacaagacaaggccgaaccggaacttgtcaagaagtacaaaggacgtcgcattgccgccggccaagccatgccagaagacatccgcgacgagactatccgcgccctaaccgagatggcggcgtggccattcggctgccaggcctccctccccatgaaccctcccaagctcttactcgggacgctcctgttccccgtccgacagaccttccaggcaacccgctcccccaaagaccgccaactcgcccgcaacggtattctcgaagggcccgtcttcgtcgctcaatgccgccccgaaaccgtcttccgcgcccctggcgaaacacacgggtatggactcggcgatacctgcgacctcgtccgtgaggtaggcgctatgctcctggccgctcaggaacgcgcgcgagagggcgctatcgaggtcagacccggggagggaaaatggtggacgacgaagccccgatggggtggtgcacctaatgatgcgattggcgatagtgtgcgcgtaacaaatgagcaggaacgagaagcggccgcgctgacggggcgtgcacgctcggggtcccggccgcagccgccagggctacgccggcctgggttgcgtcgggcaatgagcagtagcgacaaatggaagattatccagccaggaccgagtctctgggataagcgcatgcggtatattcagattggacgggacagggagtgtccgtttgacgatgtacgttctattttctttcctttctactgtcttcctttctaacagtccgccagatctacatgctctcgtcaataaaccaccatctctcaattctgcacctccgcatccaccgccgctacctcgatatcatcacaaccgggagaagcactgtccctccgacctcgaacgacgagtcacacccctggcatatcctcaagctgcggcgtacaaggtggtacgatctattcgacgcccaggaccgcgtcgacgtcttccggggtatctggacgattttccatgtcatgctccgtgcacctcgtccgcctgaggctatgccaccggctagtcttccacccatcactccggttgatccggcagttgtttatcggagtttgccgttggagtccgtttag

SEQ ID NO: 25383 - DNA, 1069 bp, Emericella nidulans
agcgaacgccaaaattgaggacatgaagcggcagcagtcagactttgaaaaactcaaaggacttgctctgagctccgaacagaaagcctctgacttggcgaaggagaacgcgtctctcaaatacacacttgcgcggtttaagcaggaagcatcaaaatatgaaggccgacgcaaagagagggaagcgaggctgaagtcgcgggagtccaagctggagacgcggattcaggagtatcgtgacaggctaaagtcagcaactcagcagcatcgaaagcaggaagaagagttaaagctatcatttgaccaagagcgccgccagatgcaggaacagattgatatgctgaaaacgaaactacgagctttcgagagcgcgacagagctcagggcgcgagctcgcccagagagccgcatagattatgatgggattcatacttatgactttggcgctaccagtccccaaaaagatgcccttgacgaaaccggtgaaactgaccaaccacccagtccaagtccgcggggcaaggatcgccctccgttgagtctagggaccgatctgacagactcggatctgagacaggcgatgaaggaaatgggcattgaagatattgatgaaaaattcaataatctgggaatatctcctctaaggtcattcaagcctcctcgttatcgagacgacaccgatattctcccgccgtcttcgccgcctgattttgggacgtgggccgcttcaaaccaacggcgtaatccagaaacccgtaactcgcatctactctacgtaccacgtcaatcttcagatgatagtcacaaggtccaaaccaatcgcctccagtcccgacgcgcagctacgaaatatgctcccgaccactcgtcctcaggaccggatacacatcaaatggaccgcgcacggagacggcaaactgttgctgctgccgctactacttcacagcgagattcattgtcgttggaccgaaagatggctgcccaggcgcgcctcagacgaagggatgactcccgcaaactaattagagatgatggcaaggagaacatgcggacaacagtgagagcttaa

SEQ ID NO: 25384 - DNA, 1522 bp, Emericella nidulans
actggagccattgatgacctgcatcggactgtcgccgatgtgacggatgacgagaagcgcaaggagggaaagaccatcattgaggagttggcgaagcttaaatatgagattcagcatgataggcagttgacgtaggttactttactctcgtaagggtactcttactccggggtgacggtactgattgtcattgtgtgctaggcctctcgacgacgacggcgagccaggtatccaggagtataatgaggaattggaaaagcgaggaaaccctaagtggcataatgtgtcatggcttttttcggagtgttatctttgtgagttcagggacgttgggcatcgtacttgacaattgacgctgacaatatgaaacagacaggcgcgtgagcacgctcttcgctcggtcgaagcactggaaaggctacgatgtgtttgcccgccaaaagatgtccactttcaagtcttcccgacctgccgtgctcgagctggccgccaggtacaaggagctagcgttggaggcaaaggaaggaaagaccaccgaagaatcccatcgcctgctcttctccgagatgtgcgagatctgtctgtggggcaatgccactgacctctcgcttctgacaaatctcacatacgaggatatccagaagctacagggctcgaaggcacgcaaggcagcagaggagaatatcatcgtcaatgatctcaatgccgcattcgatgtccttcgacaagccaaggaagaaaagaagggcgagcgccgcgtcgacattgttcttgacaacgccggcttcgagctcttcgtcgaccttatcctcgccggatatctcctttcggctgatatcgccacaagcgtagtccttcggcccaaactgataccctggttcgtgtcggacgttattccacgcgacttcgcagaccttattcaggccatcgctgacccccagagcttctatactgcccccgacgaggctggaaatcagcaaagcccgctctcggacaaggaggtcgaggaggtgaagttcctcttcgaccagtggagccatttccatgcggagggcaagctgatcattcgccctcaccccttctggactgcaggcggctcctactggcgcatgccgcacgtcgcacctgacctcttcgaagacttgaaagaggccgaactggttctgttcaagggtgaccttaactaccgaaagcttattaacgatgtgcgttcacaatactattaactcctaccacaccctgaatttttcatatttctatttctattccgagacactaacaatccctccaggctgcctgggacccgacaaccccgttcgcaaccgccattggcccgctaggcccgcactctggcatccgtgtcatgtcattccgcacctgcaaggccgattgtgttgtcggtcttccagccggcaaagacgaggaactgcgcaacgcttacgagggctcgagatccggaggtcgcgagtgggcgtggagtgggaagtgggccgttatctctttctgtgatggtaaggcttga

SEQ ID NO: 25385 - DNA, 330 bp, Emericella nidulans
gcaagatgtcgcaaagccatgctctctccgacgaccaggtacgacgctgttccttgaataagacaaggtgtttttaatagaagctcaagctcacggactctcgatggctaggtggcgggcgagctccgcaagatgactgctttcatccggcaggaagctctcgagaaagctcgcgagattcaactgaaggccgatgaggagttcgccattgagaaatccaagctcgtccgacaggagactgctgcaattgacacccaatatgagaagaagttcaagcaggccgctatgtcccaacagattacgcgttctacccctggcaaccgcactcgt

SEQ ID NO: 25386 - DNA, 596 bp, Emericella nidulans
tttcactcccactccgccaaaatgaagcacgctaccaccgttctcgccgctgccggcctcgtctccctcgccaatgcccacggctacatctcaagccctcaaccccgtatgcccggctccgctatggccgctgcctgtggccagcaagtctacaacaatcaagccgccgaccgcgctggcaacgttcagggtgaactgcaagttgccgcctcgcaatccgactatgacgccgatgcgtgccacatctggctgtgcaagggctaccagttcgacgacaacacggacaacgttcagtcgtatactgccggcgagactgtcgacttcgtgatcgacattgtcgctccccactctggtgtcgcgaacgtctccgtcgtcgacactgccagcaactccgtcattggatccgccctgaagagctgggacgtctacgcctccaccgagactggcgtcacggaggatgagacaaacttctccatcaccatccctgataaccttggcagccagtgctctgaggccggcgcctgtgttctccagtggtactggtatgccgagagcatcgaccagacctacgagtcgtgcgttgatttcactgttgg

SEQ ID NO: 25387 - DNA, 660 bp, Emericella nidulans
atgccttctatcaaaccagtcctgcctcccctcagaacgcccagcaatatcaccttcccctccgagctccatacagactcgagcgctggctcagggaagaatgaggacagctcctccactccgattacgcctcctgccgcttatactgagttcctgaaagtcttcactcctatcttctccagcccaacgagcgctgagggcgtggacttttcaaagtacaagtttgaccgtcataatgtccattctgcacagtcacaaccttccagtgcagtcagcggcagcttcaatttcaacgagccagcacgatcggcaacaacattacctccgctgactcctcttgtgccctctcattctcgacgagagttgagtaacctgcgccggctgcgcatcccgccggcgcttaggtactcgcccacgtcggcggagccgcctcgaagcgctggacctcgcagtgcgggacctcgaagtgctacacttgatcgcactccttattctccaattgattggaggctacgctacctggatgctccccggagcgccaaccctcgaagctccaaccacaagatgagtgtgcgacatgtcatcacgcacacgatcacatataagacgacggagttggatgcaccaccgagaggaaagcgaaggaagcacagccatgat

SEQ ID NO: 25388 - DNA, 953 bp, Emericella nidulans
atgatcgccaagacagagcccgtcgtggaatccactgatggccgtttaggccagtttaaccctatgattcgtaaagaatctctcaacgagaaggtcatccttgttgtgggtaagtggtattatcaatcacggtttcagtgttgcaatgctaacagccttaggcggctccaacggcattggcgccagcctcgtagagctatgctgcgagaacggtgcttatgcgataattggagacattgacgccgctaggggagagcagttagccagaaagtgcatccagcaatggccggtacatcaagagccaactggtcctcctaaaccccctcgcgcgattttcagaaagaccgacgtgacggactatcagtccgtcctcgatcttttcgacaataccttcaagaagtacaaccgcattgaccatgttattgtcaccgctggcagtgcggagaccagagagtcatggttcgaccactccttgaaccttgtacaagtccgcaaggtaggtccaaagcaagtatcttctacagtgtcaacactaatagctactaggccccatcagtgaaggatattgatgtgaatctccttggtacgctttacgtcactcgcgtggccagcgtctaccttcgtcacaaccgcggcccaggcgtggatcgctctatccttcttttctcctgcgccgcagtcatcagggagacccccgttgtgcctatttaccaggtcgccaaacacggtgtccaggatctcatgcgctccctccacgccaacctcaactctccttaccgacacagcatccgcatcaacacgatctgcccttggatggcccagactggtagcacattctccaagaccgctgaggagcgctggaccaaggaaggcctgccctttagtactgccgatgatgtcgcaaaggtgtccgttggcgtgatttgcgatgactccctccacggcgtctccat

SEQ ID NO: 25389 - DNA, 344 bp, Emericella nidulans
ccacagcacccattaagcgcgagcttaatgccaatacagggtctagtatcccacctaggcgggctccgaaggaagccctgaatccgcgcatgatccagaagtcgcctgctacgtataatgtacggatggccatattaaagaaattgcatggcactctatgttctttgaatgaccagcttgctaaagacaaagctcttgaggataagtgtttgatcctaacaccagacgagctgataacaatggcgctggacgaagaggagaaggtggcaaaggagagccctactgtatactcgaacgtggtcaagctccgtatcgtgaagctgtctaggatgagcaaagaggac

SEQ ID NO: 25390 - DNA, 291 bp, Emericella nidulans
atgtccgccgaaagcctcccaataactcccgttgcctttgcggaagcaattaaagagctcaccctaccggttctctatgccaaagtcgccgagctccaaaactccatcgcacacctccgacgctcaaaccaagaactgcgacatttcatctcagagtcatgcgagagccaagccgacagagaagagctggagggctacatagcggaaaatgatggggtggaaaagtcgatgattgagcgtattgagctgtgcaaggcagaagttgagaggaggggtcagacatggattgac

SEQ ID NO: 25391 - DNA, 318 bp, Emericella nidulans
atgtctcctgccatggggaaccgggtgctctcggttcttcaagccagacgtcttgccggtacactcgaccttgacctgcccgccgatatcacacgtgccacgcgcccttctatgataaatgttggcctagaatacctccgaaagaactatcccatggatgaagacgccgccattatcgcccggatcgaacgagaggagcgggagtatgaagagaaacttgcgcgagaggcggaggaactgggtttatacaaaccgcaaagtggcacatatggcgcggactgggcgagcaaaatgatccgtcgggaaggagtgttctga

SEQ ID NO: 25392 - DNA, 318 bp, Emericella nidulans
attctagacgatgacatccacctcgacatgccatcaagcacattgccgaagcagatttacgaagagcaattcactgatgcagagtatatcaaggcaaatataaacctagcgcggattgtgggcgagacgacggcgaaagtctatagtcggcgtaagtacaatgagacattcctgcagagggtgcagaagctgctcaaggcgctgaaaaactgggttgatacgcttcctgagcatttacggctgaatgttgaggatcccgagatgaatacgaagcaggttacctctatacaccttgcttttaaccaggtattcctccct

SEQ ID NO: 25393 - DNA, 516 bp, Emericella nidulans
cacccaatgcaagttggttggtgcagttcaaactcgaatacggtgcggacgaggaccgtctcggctgctttgtacaagtgtgttccttctcgtaaaatttgacatagagcaggcactgacgaaagcagtatgatggtccagatccagtcaatcatatcgtcgaatatctaccgtgaggacgacaaacctctgtgtaagtctcactttccagcctgctgatagtgcgaagggtactgatttgagtgtatgtagatcgccgcggaaaccgcgtcctgatcgcgatcaactgtctgaatttcgtgctgtatctgtttgccaagtggtactaccagcagaggaataagaagagggatgctgtttggaataggatgagttctgaggtaggtctcttaactaggcttcttatccaaagaagggatatggtgctaatatatagtactgcaggagaaagaagagtatctcaacattacaacagatcaggggaataagaggttagatttcagatttgcaagctag

SEQ ID NO: 25394 - DNA, 390 bp, Emericella nidulans
ctcggtgacgataagctcatggtcgaggggcaaaaggcgctcattgacgtctgcgacgcggctaccccgccagtgccccggtacgtctctagcgactgggcactaggctacacgaaactgaagctgcgcgagctgttccccaaggaccccatgatccacgtgaaggaatacctggaaagtaagcggaacgtgaccagcgtgcatatactagtgggtgggttcgtggagccgatcttcagctcctttttcgggatcgtggatgcagacagcgatgtcattcgccattggggcgatggtagcgagattatggaggggacgacgtatgatgatgctgcgcggtttacagcgaggactgtgcttgattgccaggcaagcggtgttttgaggtgt

SEQ ID NO: 25395 - DNA, 405 bp, Emericella nidulans
atggaagaaggctgggatttcgacgccgcacccgccgagttcaagcaagtgcaacccttcttgctaggcctcttcgctgtctccggcaccggctggctgatgaactatttcacgacgattcgagcagctttccaagatcggacacccggcgtctccttaatagcactgagtaacaatctcgcctgggagtttgtatatgccatcttctatcccccgccgctgcccattgcgactataatcgtccgctcgtggctactcgttgatatctttgtcatttacaccacggtcaagtttgcgcgacgcgcaccgggaaacgtaaatccgccccttctcaggcactacctgccgctattcgtgcttggtgggatcctgggcttcttctcgggccattgggcttctctgtga

SEQ ID NO: 25396 - DNA, 899 bp, Emericella nidulans
cttcattcatatcctgttccacccacaatgacttccctcttcttctcgaccccgctcgacatcgacattgttctcgaagatggcgacgagcgccagatggttgatgtcaaactggacaaaggccaccgggagaaagtgcccttgtatatggatggtgaatcagtcaagggtgctgtgactgtgagaccgaaggatgggaagcggctggaacacacgggcatcaaagtgcagtttatcggaacaataggtacgggaagctagctgaatgccttcttttgcatgccgaactagctgtcgcaatggagaacctgtgtccaaatgctgatgcggcactgcccgagtacagaaatattctacgacagaggcaatcaccacgaatttctatctttggtacaggaactcgcggctcccggcgagctgcagcacccgcaaaccttccccttcaacttcaagaacgtcgagaagcagtacgaatcatacaatggcataaatgtgaagctacgatactttgtccgggtaacggtatccaggcgcatggcggacgtgatacgcgaaaaggacttgtgggtttactcttatcgcatgccactggagaccaacagcccgatcaagatggatgtcggtatcgaggattgtctgcacattgagtttgagtactcaaaatccaagtaccacctcaaggatgtgattgtgggacgtatctatttcctacttgtgcgcctgaaaatcaagcatatggagttgtcgattattcgacgagaaacgactgggacgcggccgaatgaatataacgagagtgagacgctggtgaggttcgaggttagtggtcaggatactgattcgttgaattattgctgatcgaacccgaacacagattatggatggttcaccttcaagag

SEQ ID NO: 25397 - DNA, 595 bp, Emericella nidulans
ttgcgtgcagattggtctctatcactatttccaggaccgtgggcccgttgacctcgtggtatccggacccaattatggccgcaataccacggcacttttcgctatgtcgagcgggacaatcggcgctgcaatgcagggcgccgcatgtggaaaacgctcgattgccctctcgtatgccttcagctcgcgcaatcatgaccctgtcatcatcgcggaggcgtctcggcattcagtacgggttattgagtacctcgcgaaaaactgggatgagggtgttgatttgtacagcgtgaatgtgccgctggaacctggtgtgagcgaaagcaaagtaatgtatactgagatgctcgataatcggtggtcatccgggagttgctttgacgctgttgatgccgaggtaccggtagaaaacccagagcagcgagaacagaccctgcgggatcaggaggagaagctggaagaagatcccactgcgaaccctaatgctaagtctggaaggaaatcgcggattgcccataagcattttatttgggcaccaaagtttactgacgtctatcggagcctggaggaaagtgcgcctgggaatgaaggctga

SEQ ID NO: 25398 - DNA, 501 bp, Emericella nidulans
ctacctatcatgtactataatattccctccgcatcggggcttaagttgtcgccctctgagattgccggtctgagtagggtcggggtcaggtggctcaaagatacgtctggtgatgcgccagcattcacagagctggtcttcggactctctgaccagatcactgcgctgaacggctgggatacgcttacattctatgggctcgccgctggttgtccgggtggtgtgtggggtgctgcgaatatcatcccggagctggcggtggaattgtacgaggcagtttctataaagaaggatctagataaagggaaggagctctggagcaaggcctggccgatctgcaagtttctcgagtcgcataactatgccgctgcagtgaagacaggtgttgagctgacggggcaggcgactgggggactccgcaaaccgtttgcgctgctgggtccagagttgcaggaggagttgaaggggttgctaaagaatgctggcgtagctacggtctag

SEQ ID NO: 25399 - DNA, 561 bp, Emericella nidulans
atggctcctccttctgctgccgaaagtgaagctcaccaaagactccttgaccgtctcgatatcgcggccgttccccgccccttccgaagccagacctggaagccatctcagcgacgaaacaagaacgttaagcagcttctctccgacagctcaagaaaggaggcgtcttcgattgctacgcaggttaattccggtgcaactactcccggagccgccgctagtacagatgggagccagacccctgctgagggcaaccagcgcaccgcgaacatcgcccaggctgcgcataacctgcagacacttgttttagaaaagaatgcacgcgctgcatattcttccggaccatccgtaacctacaccaatatcgagtccgcgccttcactgcacccgtcgcagcaacggccgtattgcgacattactggactggcggcttgctataccgaccggaaaacccggctgcggtatcatgataaggaggtgttcggtgttatacgaaccttggggcaaggtgtgccggatagttaccttgagctgagggctgcccatgttgtgctcaaatag

SEQ ID NO: 25400 - DNA, 528 bp, Emericella nidulans
gtgaattgtctgcacgaggtcttcttcgacttagctatcgaaggcgcgaagcggcttgatgcctactttgctgagcacaagaaaccacttgggcctttgcacggtgtgccgatcagtctgaaggaccaattccacgtgaaaggcgtagaaacaacgatgggctatgtcggctggatcggcacctttcaaggcctgaaagacgaccccagaagcagggtgtttgagagcgagcttgttcgtgagctgcgggccctgggggcggtgctctactgcaagaccagtgtgcccgcgaccctcatgtgcggagaaacagtcaacaacatcatcacctacaccaataaccccaggaatagactactcggttgtggaggcagttccggtggcgaaggagcactgattgctctgaaaggatcaccaggtggttttggaacagatatcggcggcacggtgcgtatacctgccgtattcaacgggttgtatggcattcagcgttcgtcaggtcggattccatatgagggagctccaatt

SEQ ID NO: 25401 - DNA, 609 bp, Emericella nidulans
ttctttctgcatccaaatacgactcttgcgcctccgcacagattcgagagagatgccacagcactggctcatctacgagagaaacttgactcactcttaaggagcgggtccgttgaacaactgactttccgaccgtctgaggtgttcaagctaatgccgtataaaaggagacgcggctatcaaataatgtcagtcagggatatcttgcttcaaatgcagaacttgaatgatctaccagaaacctcggaagccgctcgtaggctccaggaatcattaaaacaagtgcggatgaaatcattaaaatttggggaagatgtaagaccaccataccagggaacttacacgaagcggctttccaaggaggcggctaccaagttgatgcgaaacccatttagccgcgcgctacctgaggtcaattatgactacgactctgaagcagaatgggaggatgcagaagaaggagaagagttagactcggaggaagaagaggagggtagtgaagatggcgatgaagatatggatgggtttctcgacgatgaggatgatcacctggcaaacagtaaacgacgtctgcttgtgggtgatcttgaccagtttgcacgggcataa

SEQ ID NO: 25402 - DNA, 357 bp, Emericella nidulans
atggctctccctgacgtcgaaaacacccccggcgccggcatcccctactttacaccagcacagaaccctcctgctggaacagctgccaacccgcaaaccagcggcaatgccgtccccaagctgtacacacctctgacggtgcgtggggtgaccttccacaacagacttggcctcgcgccgctctgccagtactccgcagaagacggccacatgacagactaccacatcgcgcacttgggaggtattgcccagcgcggccccggtctcatgatgatcgaggcaacctccgtctcacctgaaggcagaatcacgccgcaggacgtcggtttaggaaggactcgcagattacgcccatga

SEQ ID NO: 25403 - DNA, 498 bp, Emericella nidulans
ggtgatgagcttgctgcggctgaagcacttcagcgcactcttgtacacggggcctcatctagcaactctgtgctgtcggagagcgaggatggctgggctgaagaacaagagacactggaagccatctttggagaacgatactcatccaaatcacccgaggtctgcgagattgagtgtgagttaccgggtgcaaaggcaatactacttcgattccagagaccgtcggcgcattatccgtcttccgtcccaataatatctattcagacagagaaaatacctgcttacatccgactaagtgccatccgccaggttgtgaagttcgcagaggagaatttcttgggagaacaaatgatttacaatataatagattggctggaaactcatttaccgaagatcattgaagatccagggaagttacgcgatatatcagcactatcagcacctcccgttgcttcttcggaatcaacttttgaacttccttcccgccaacggaatagg

SEQ ID NO: 25404 - DNA, 315 bp, Emericella nidulans
cgggcaagaatatcacagggctttaaagctgtgaagatgaacgccccgaagatcttgtcgtggcttgactcaccccatgctttggacctttcggttgagcgattgaagaccgttcaagtccttgggggattgcgccccggtgttgacttccatggcagagtccacaaggcaatggcgcaacagctcgcatacaagcttgcaccgcacgagcccttattcatcgaagagccgctcctgtctgagcatccggaatctgtcgcagcattgtccaaacttgtcccgatccctatcgccctctggagaacggctacatag

SEQ ID NO: 25405 - DNA, 899 bp, Emericella nidulans
atgcagagcgctacagacggcctccagccatacagctctatggccggcaaactcgaccagaagctgcttcaagccctcaacgtgctgggcttcgagtacatgtcgcccgtgcagcagcgagtcctcacagagcttcccacatggcgcaggactgtctcgtgcaggcaaaaacaggcaccggtaaaactgtggcttttttgctgcctgctttgcattgcttaatacaaggccagagccaggtcaggagagggcaagtggcgatcctcatcatcacgccaaccagagagctcgcacagcagatcgccaagtcatgcgatgagcttacctcacagctttcaagaccgctggaatgtcatattgctgttggtgggaccgcgcgagcgtccgcgcactcgcggttcatgaacggggacccgtccattcttgtagctacacctgggcggctgaaggattacctctctgagtctgagactgcagagaagctcaaggatatccagaccctcgttctggatgaagcggacacgatgctcgagaccgggttcctggcggacgtcaagcagatcctcaagctgatcccgtcaaagagcaccggttggcaaggtatgtgcttctcagccactctaccaccaaaggtcaaggatgtggtcagcgttgtcttgaatccagggtacaccagcatttcgacagtggacaagaacgaaccgcccacccacgagcgcgtgcctcagtactatgtccttatgccctccgtagccgaaacattcacgaccctctcctccctcttggcccacgagtccaagaagaataccaagatcatcgtcttcggcgtcacagccaacatggtcgagctttctcacagcgccttcgccaacggcctcacgccgcttaaggctctttga

SEQ ID NO: 25406 - DNA, 1186 bp, Emericella nidulans
cataataacgcctactcctcgggaatgaaagaggacctcaatttgtatggaaacgagtactcgctcttcggctccttctacaatatcggctacatgctctttgagattcccagcatgatgataatgtcgcggcccaaatttgcgcgctatttcctgccgaccatggaagtgtgctggtccgtcctcacattcgcacaatcccggctccgcaatcaccacgatatctacggtcttcggtttcttcttggtgtccttgagacccccgtgtccagcggtaccatgtatatcctttcctcctggtacaggggcgacgagctcttcaagcgcgcaggtgtctggttcgtctcgagcaatctcggctccttcgcaggcgggtatctacaagccgcagcgcacgagacgctagacggtgtccatgggatggccgggtggcggtggctattcattatcgatgggtgcatcagcttgccaattgccctgggaagtttcttcttcttacctggtctgccgcacggggagaaagtgtggtggttgacggacgctgatcataggcctctgtgttcagaggatgcggaacgagggtgtgagggaaagccggaaaattgggaaacgcatgctcaggagagtgtttacccattggcacttctatatcgcagtctttacgtacatcttgttagtgggccgtctccctacctagcatgtgcacaggtaggtaaaaactgtttgttgcagtgactaacgattcaaccagcttccaatgcacctcctacgttgccggccagatgatcctctggttaaaagaccaggcagatcgatatggtacctggacagtgtctcagatcaatatgattccgacgggcgtacaggctgtttctgtgtttgccggtgtactggcgacatctctggtcatggtatatccgccctgggctgtcatgggcgttgttgcctccgtcctgctcttctcgaatgtctgccttttggtctgggatattccgctgggactgaaatgtgagctcatcccttccttcctatatacccctttgttgggcgcagcgtgttgatgatactagttactgcatactaccttctcggcttcacctcgtgtgtcacgccaatcctcttcccgtgggtgaacatggtcatgcgcgatgactccgaagccagagcgtttacgtctggggctatg

SEQ ID NO: 25407 - DNA, 804 bp, Emericella nidulans
atgacattctccgtctttgacaactaccagaacaccatcaacggggtgcagacctcgactgccgaaaaacgccacggcatcaaccctgcaaccggcgagccgaacccagacgtccccgtcgcaaccgcggaggacgtcgacaaggccgtcgccgcggctgaggaggccttcaagacctggtccgaagtcccttttgtggagcgccagaaggcgctgctagcctttgccgatgcaatcgagaagcacgcggaggatttctcaaagctccttgttcaggagcagggcaagcccgtacgtccatttgtcaagactatagacctgatcccgtagcatcggctgaccgaaacagctccaattcgcagcctatgaagcggtcgcgtccgtccagaccatccgcgcgcaggccgagatcgctgaggggctcaaggatgagatcgtcgaagacagcgccgagaagaagattgtcgtccggcacacccctatcggtgtcgccgcggggattatcccatggaactttcccctcgcgcttgctgtaattaagttggcgcctgcgctgctaaccgggaacgtgatcatcatcaagccgtcgccgtttacaccatactgcgggctaaagcttgctgagctggcgcagcagtttttcccgccaggagtagtgcaggctctgagtggtgatgataggctgggcccctggctgacggcgcaccctggaattgggaagattagctttacgggctcatcggcgaccggcaagaaggtcatggagagtgcaagcaaaaccctgaagcgggtgactctggagct

SEQ ID NO: 25408 - DNA, 635 bp, Emericella nidulans
cagggagcagaggaatatggagttagggcgtgccgattctggaactccggctttgttgccttgctggctaataaccagctgattgctgtttccagctataacgagccacgaccaaggctcctagcacaatgtccggaaggagaggttgcttcgtggtctctcattccaccagcttatacgttatcccgctctgttgaggttcttcttgctgttgataagacgatctacctcgtcgatcctacggaggctgaggataaagtgctccaaaatggaccttttaagcatgcgagcgtgtcgcccacgggccaatttgttgctcttttgacagctgaagggaaggtctgggtggtgagcagcgacttccaaagcaagtacagtgagtacgacccggactcgcgggtcactccccgagctgtggaatggtgtggcaacgatgccgttgttattgcttgggaagatgaggttcaccttatagggcctaatggtgcagctgcacggtaagcacaccattacttaggtgaaaggctttctaatctggacaggtatggtacgcgggactgttcacgtgttgccggaatttgacggcgttggcctactcactaacgatacatacgagtttttgcacaaagtatcag

SEQ ID NO: 25409 - DNA, 561 bp, Emericella nidulans
aaagttcccggtgcaggccccggacgtgcaagtactctcggaagcggaaagggcaagcatggcaataaagttacgaagctctctccttctgcgcttgttggcgctaccgtcccggttcgactcagtgccaacgaggtgggcgatgccgacgacgatgcccgcagcgatagggattttccgtatcgtcggacagggagcggccggagctctctcggcagcggccatcgttatcctagcggctatcaacgaaacacagcgagcagcggtaacacgccaccgaacgaaaagacggatcttccaggagtttctgaggacaaagctggagagcaaaaggataccaacattgccaaggacgatggtgccacaaccaacagtcgcaacagtgagcaggaagatagtttcggtaccgttggggatatgggtgcaccgaatgctgctactctggccgagcaaaaggccaaaaaagcagccgatcttcggcgccgaggcagtgtggacgataggacaacctcaatgaccaacgtgcgactctttgtcgccaacccagatctgagcgattag

SEQ ID NO: 25410 - DNA, 753 bp, Emericella nidulans
atgaaaggcctccagatcctcgtctcatccatcctcgccttgggggctctggcagatccctccgcacagatggacaagagagctgaccgcggttcctacaccgtctccggacttggccagcgcaagcaggctatcctggacgcgggtgggaacactcttgatctcgccatcgccatgcttgagacgtaagctagcctctattgtcatattataacagatcaccgggtattgaccaattcagtgagggaatgaccaccgactacgtctacggtgatgcgaagaccagggatgctgccaacttcggccttttcaagcagaactggggcttgctgcgcgtctgcgctgatcgggctggctttgtcggccagtccgaggatgagtggaataatggtgctaaactaaagtatgagcttctttggccttgcatcgaagatctaccctctaacccaagtgtctgtgcctagttcggacgtgtatgccgatgtcgcctcccgctgggattgccaggaacactatggcgagcagaagtggttcgctggccaccgaaacggtgaaagcggactcaacaatcctaacacccaggatatcaacagtaattgctccctcctcactataaatgctactaaatgcagatactaatactgctgcatagactacaagaatgccgtctactggatcaaggagcaaatcgatagcaaccctgctcacaagtctgatgacacccgcttctgggtcgatgttgtggctatctaa

SEQ ID NO: 25411 - DNA, 786 bp, Emericella nidulans
atgcggagctttctgctgctgaccgcgctactgggcgtcgccgccgtcgctgaagatgggctggcagcctggctgcggtatgcgcccatccctcatgcgaaatcgtaccacaaaaatctaccgtcagtaattgtgccattgaatgcaacggctggacgaccgatagatactgcagcttacgagctcgtcgatggcattaaggggatatttggcaagcgagtcaccctcaagaacgagacgcgtgacgacccaaaccttcccgccgtgacggttggcactgtcgaagcatacgctgaagctggcggcgatgtgtccagtgttccggaactcatcgacgacgggtactatctcagcgtcgcggggcccagcgtcttaatcctcggacagaatgagcgcggagccctgtacggaaccttccagtatttttagcgactggcgcatgggaaggtctcggatacctcgttcgcatccaacccgagcgcgccgatacgatgggtaaatcaatgggacaatctacaggacggcggcacccacgggagcgtggagaggggataccgaggagactccatcttcttctaggatggcagggtccgcgacgatctcacgcgcgcgagccagtatgctcgtctgctggcttcgatcggtctcaatgctgtcatcgtcaataatgtcaatgcgaatgagacgatcctgacgcaggagaacatggatggcgtagccaggatagcggatgctttccgtccgtacggcatccagctcggtctatctttgaactttgcgtccccc

SEQ ID NO: 25412 - DNA, 1113 bp, Emericella nidulans
ggggccattggcatggctgcgatcggagttgcgctctggcgatacgtgatgcgatacgcaccgcatacccccaacttcttcaaccgtgaccgtttcgtccaataaaatggccacacctgcctctttcaatacacgttcctgcacctgaccggctacaaagccatgacctttgagcagctcaagtcgtaccactcggagcgcgagaacgcgctgtgtcccggccacccggagatcgagcacgagggcatcgaggtaacaacgggcccactcggccagggagtcgccaatgcggtgggtctagcaatggctacgaagaacctggctgcgacgtacaaccggccgggatacgaggttgtcaataatcacacctggtgcatgatcggcgatgcgtgtttgcaggagggtgtcgctcttgaggccatctcgctggccggccactggaagttgaacaacctgaccatcatgtacgacaataaccaaatcacctgcgacggctcagtggacctcaccaacactgaagatatcaacgccaagatgcgcgcctgcggatgggacgtgattaatgtagaggacggctgctacgatgtcgaagggatcgtggaggcgctttcaaaggctcgtgcgtccacagagaagcccacctttatcaatattcgcacggtcatcggtctcgacagcaaggtggctggccaagcagctgcccatggtgcggcgttcggtgtcgaagatgttgcagctatgaagcgcaagctcggtttcaacccagaggagcactttgttattggtgagacggtgcgtgaattctttgctgacctgcctgcccgcggcgagggttatgtaaaagagtggaaagacctcatccagcgctatagcgaggcgcacccagaactggccgatgagtttcagcgtcgcgtgcgcggcgagctgccaaccgactggcagaagctgatccccagtgagctccccgacaagccgactgcgacgcgtgtctcatctggcctcgtcttcaatcccatcgcacaatatatcaaatcatttatggtcggcaccgccgatctgtcgccctctgtgaacatgatctggaagggcaaggttgacttccaacacgtaagt

SEQ ID NO: 25413 - DNA, 252 bp, Emericella nidulans
aatggcatctcgtaatactcgcaggatactgcgacctctcctctacggtactgccgcagtcacaaccgtgggtgcaggtgccctctatttctcgatccgtccccgtaacattcctggtctcgaagcgccggctgttccaccacccggttatcatgaaggcaaacttgtgcctcccagctttcctaaaatcaaatcgcgccttgagcaaatcgaggatctcaaacgcagttcttcaggtgacgatgcggatgt

SEQ ID NO: 25414 - DNA, 264 bp, Emericella nidulans
agaacaataagttctcgccacggaccccagggaagcgtgcaatcgtttacgagcgaatcgacgtttatcgcggacgaaacggacttggaaaaggttgatttggatgagtacgaagaagaaagtaacgaaaccaaatcaatggtcgatcccaatctgcactacggccctgcccccgagaagcagagccgccgaggcgtccgcaacgcgcagatggcaaagaaagaagttcagctggtcaacggtgagttgattttggagtgtaag

SEQ ID NO: 25415 - DNA, 354 bp, Emericella nidulans
cgcctctagcgctccaaactacgtaacttcctcatgcactcattccacctaatcctctggctccttacacccgcgaaaaccgccatgatcaaagacacccagtgtggattcaagctcttttcgcgagcgtctctgcccgccatcgtcccctacatgcactccgaaggctggatcttcgatgtcgagatgctcatgctcgcggagtttgcgcgtatccccgtggccgaggtccctgttgactggcgcgaggttggcggaagcaagcttaatgttattagggatagtgtgggcatggcgtggagtttggctgttttacgcgcggcttggttgttgggggtatatagacggacatag

SEQ ID NO: 25416 - DNA, 1236 bp, Emericella nidulans
tatcgttatgccaccgtaatgggccattccgatgggatgatgtgaaggagcagctccaccatgacctggtcttatggtacgtattggcagaagtatgtaaggttaggctaactcatcagtctcggacgtcgcctcccagtgcccgtaatacagcgcgcaagcgataagactggaagcaatatcaaaaagtcgcaacgctacgctaatgctccattccgagttgcagaaaaggtacaaaagcctgaattcgccggatactgggtgtattgcgacaagtcaactgagtcttgtctcgaggacgcggacctcgtcctcttccacctccacggtggaggctatgtaatgggtcacccgcttgataatgcacccgagcttctccttatcgccgaggcgctgtcgcggcgcaaccataaaatagctgtattctctctcgaatacacgctcgttcccaccgcgccgttgccgacacagcttgatcagaccatcgccgcatatacctggcttgtaagcgaactgcacataaatccgtccaagctgtacctcatcggcgaatcagctggtggccatcttattctctccctgctcaacgcgctgtatgaacgagcttcaagtcaagttccgattgcgctcccaaaaccagcggtggtcttcctggttagtccctgggtaaacctaaacccatgcggagttgacgcaaaagcaaagaaccaagatctggacacccgcagcgcggcatttaaacatgtactcgagcgcttctccaacctagtcctgcacggagcatcccccgcatacctaaagctacacggcagctttgcacagccagtcccaggacgcggttcgtggaaggacattttacccgtgacaacctgggtctctgcgggcactgcagagcctctattccgcttcgacattgaagagtttgtcagggttgcgcggcgcgacggggccgatgtgaggttcgagctcgcggatggcaaagtgcatgtttggcagtccgttgaggcccggcagcaggaggcgaaatttctagctttggcgctggaagaagacaatgcacggttaatgcctgggtatcgacatattgcggagttgatatatgatctcttggagggtcgagcgtaaccagcacgttaactgataagtaacctttagcaggacatgttccttccgatgtcagccacgccactgtcatacttcctacaagtcttctcgcacagcaagggagcctgatag

SEQ ID NO: 25417 - DNA, 618 bp, Emericella nidulans
acagccatccggcaacttcgtcgatcattctcgcgctcaccctcaaaaagctcaagtttctctcttctgacatctcgaaaccactctccgtctaagaacacatcatatgtctcgtcaccattgtcaccgtcgcgaaggtcggcgcaaggcaacttcgtgctcttcccaagctcatctcaacagtcaccgttcgcaataccttatcctcccagcgctaagatttcgcgtcctactatgcgccgcgcgcgcacgtctcctcggagtccagtcaaacgcgcccttaacgtctcaagtgaccagggaaacgcgaagcctctacatgagacccccgttacacctggagtagagaactcctctacaatccccgaaattagcctttcacctgacgatattggtggtggtttcagtacatgctcaaatgagtcaagcatctacgcggagggaacgccaaatccacgtccatcggcgtcccggattgagaaacgacgaagcggtacgtttaactcggctgtcagcccgatgaaacgaagcgacgggatcatgaatctagaccgcgcgtcaaggggaagtccttccgccaaacgacgagtgttcagcagtgatcttcctggagattag

SEQ ID NO: 25418 - DNA, 4927 bp, Emericella nidulans
ctcctcagagtatcgtttatctgttggctttggcctggcctactaccttgctggcgcagtgatcctcgatgcagtctctcagcccctttggacagccgtaacgcagcgcactcccgtccccgtgaagaacctatctacactccgtgaagtactcagcacaaactctggagatcgaaaaagattgtactggagcaatctagcaaagttcttcttcctgcatatctgggggacagcggtcaccttggcgttgatgtgggcgtttgaagcctcgcaaaacgccacaatcatgttcctggcgtatattggctcgtatagcgggttgctgttctatcagtataatcgaattttcacaggccctgaagcagcgaggtgtctcgcggctggatcagttgttggattcgtgattgggatgactatgcacaccgtcattgcaagctttacgtggagtagtgtcatttgcttaggcagcgggacatggacggctgcgatctactcgctctggctgagtgatattggaatgccgacgttcagacccaagaatctctctgtcttggagagtaacagtcagaaggaattagccacctacacgagcagcagcctggagccgtacctggatctctccccgacgacagtggccgaaacgtttgacaatatcaatgcccttcctgatgacctgcggcataagctcgacccggagacacatcctgggatcgaagtgaaggagatcatcctctcgaactcggggtacaggacctctgctcttgtgcaagctgcttttcccgacgcggcgcagtttctcagagagatcgcccgactctgggtatctggtcagacagtcattgagtttgtctcagctgagcatcttttacagaccgagcagcgcgtccgccgcataagtcgactgaccggcgacagtctgcatatctttatcgtcatcggccccggcctcgtcggtcaagactggacaacgaatatcaggcggaactgtcgtgctattgcggaggcggttgtccaggccacagccgaagcgagactcggcttgacgcatgatgagtccatgatgacggagttgcttattgggactcatcaggataattatgacctctccttacccgagggtgtcaaataccagcttgaacgatctcctgcggagtgtgcccgtgttgcgaagcacggccagcgtacatttcttcgacatcttctcctcggtatcgactgcgatttggagtgggatgaactgccgaaatcagcacggtctttcctccttcgtcgtgttgctggcaaacccggccgactctcatcagaggaactctcatggttgcaaagccgggtgggctcagaagatatccagaacctcgctgcgcacgtcgcacgctataaccttggcgtcgccatgtcccttggtgtatggcattacgcccagcgttggatggagcacgatgcatacccttcctatcctgtctttccggacacgacatacgaaaagcctatacagacactcctccctccgcccattggcttgcacattcgcttcacagacgcgctaaaactctcctttttgcaggtcagtcactcagtgagaacatgcctcaagttctcgatcatcgctctggttgcagacccgcagtaccagcgcgagttggaatatatgctccgcgggcagccacaggtcttcgccgtaccgatgacgctccttttgaacagcgtgtaggagtttcgccaagttactacaaagaattctgatcccgctagtcctcttttacgggcgtaaaagcatcagtgacgtttacaagagcagtcgtggctggaagacggtgcttcataaaaacagagtagcaatcgaaagtctcgagggcccaacgacttgttttgcaaaatcccaaggagagggtactacgcttctctatcaatactcaggcagccatatgcacgagccggaggataacaaggctcttaaggcaatcaatacatacactgaccggctcgtccttttgaagcgcgaggagtatagagccggccagctaatcaatgccttctcatacgagtacgcacaggacacccctaaaggccgacgaacacggccgctgccaatccagcgattgtgtaccgccggggagctggaggggcaagttgtcatctacgacgagagcggctacatctcctcaggctccttcatgcaaggcatgaacccagtgaatttcaagtatgcctttcgaaagaacgctaagttcgacgatgagctgctccgcgccgagtacgtattcccgcatatcactattagggtttcctggtgcatgccgccatctcgtcatccagagaaggaggacaaatggatcccttacccaagagtcagccaggcggcctttatcgagccaggtaatgtctaccaatcaaaatggacttacgaccacaagttccaccctgtcattaccactacactcaacggggaaaatgtcgagacgcccgcgatgatttcagaggactggttccgtgttcttgacaagcctcagaggagcagctttttgcatgacaacccgttattcttctttaggagcgtccggacgaacatagtgagccgcttgttagggctaaatgtcaagacgaggccaattcccaccagtcgagcacgaacgcatctgtggaaggcgtggaaggggagcaaaacctttgatgccgtgaccaccacctggcttgatgagatactgctgcgttcggacagcatcctccgtccatactggcgaaaccgcgactttggccatcttgatgcggccggagagtatctggacgcacaagtggacacgatccttgcccgcgtcgacatcgaccctgacattagcagctggacgcagatggcgttcaagattagcgatctgtatagctttggcatcggcggagatgcacgcattaacacgcggactctctcgacccagctccaagataccagcacgcaactgcatgttctggccatggacacggccacctggcccaacgagcccgggggcgtctcggcgtgccgacgggacatggtcaacgacctcagggggataagatggcacatcatctccgagaatgcaaatgactacggcgtccccaagttccagatagagcggaatgtgcaatctcttacagtgctgccacaatgggggctcgacttcctgaaccccacgcacggggtattccaaaatacgcttgacagtgctgtagttgagcgcagtcaggatacaaggaaagacgatataaaaagacactttgtcccaatcctgtccaggttggtgcgctgtgcgcggacagcgaacctgaagagacatcatattgaggaggcgactaacgcgctggtcgatctcaatacgtactttgagtctggacggtcctggaatgatgtttggatgagcaagacggtgaagactgcgtggcgcgaactttggctctctgacgatgtggatgacgccctgcctgtggaaaaatggtgggatgctgagcacccttctctccagcagcttgatactgcgctggatatgtggcatcgatgtaagccttctcctacacatggcgttgtgtctttgagtggtatactgaccaatttgatagatttatttattttctccatcccagtccctgagcgcatccccgacgtatttcaggtatctcaccatttcacgggagcaacctacggggtgctctgcaaagcaaagcgcaagtgtgccctccacgtctgggaccattgcatcagcttcagggagatgaccaccttcctctcggccgctgtctcctttgacagctcgttcgtgaacacaacactcatgtcgctcggtcatctggcatgtgtactgatcgagcaccacgctgacgttatcttaccgtgcgctgagtacttcaaccccggctgggagattgaactgggcaccgcagagggggcgctgcagcatcggaaggcatttgcccggaagatcgacccggttgtcaatgggattacgaacatggagaggtataagcctattgagaagatccgcaccgagacgccgacagttgtgatgttgtcgcatatccggtacgtatctcctttttccctctctttcacccttactaccggttggatgcagctaacgacaggaacaggtatgtgaaggacatcaaaacagccatcatggccaccgatcttatcgtcaataaatggggtttcagagactaccgtctacacatctacggcgatatggagcgcgccccagcctacgcctccgagtgccaggaaataattgcgtcaaaaggcctccgcgagcacgtcgtgctcaagggtctgggcaacccctccgttgtgctgcaggacgcctggctatttatgaactcttctatctccgaagggctccctcttgccatgggcgaagcagcccttaccggggtgccagtagtgtgtaccgacgtcggggcctccttctgcgtagttacggaccgcaatacaggtaaacggttcagcgaggtcgttgcacccaatgacagcgattctctagcgcgcgcccagcttcgcgtcttagcgctgctcgataagtgggcgccctttgcggaagatgagccgggcacaatcgtccctaccctagacttccatccaacacctgagcaaatcaaggctgtatcggaaagaatgtacgccaaaatcgagcaacgacgaaaatttgggatgcttggtcgtgcgaacgtgctcaactcgttctcgtctgatcgatatctccgcgaacacgagcagttgctctggataggcaagtggcagagtcgaagttttgtgacgcgaactgcgttgtctagcgcagcaaacttgagtaccagcgcttttttccagatgggaaaggagaaagagaaggtgaacaacagtgcagtccgtctgtatatagggaatgtccccagtaccccggactcgatctaccagcccgttccg

SEQ ID NO: 25419 - DNA, 538 bp, Emericella nidulans
gataattcgttctccatgcgctcccacctccttctacggcagtggtcgactcctaatcacctgtgtacacgaataccttcacaagtccttcgctcaacctttccgaaccgtcttctcctttctaccgactgccgcggagcccgtctacgatggtggcaggtgaaacgcaacgaaccatggacaataacggcacaagaactgagggaccccaagatgctggtcgcaagcataagaaacgcgatatgggcagggccgaatggaggtaggtatgtcggcgtttttaaaggataccagccttcacgaaagcaaggtcgaattacgctaacgaggctagtcggcaaatgccagataagagagagcgcaacgagcgagccgaacaagcaaagcgaaggaagctggaaaatggcgaggaggtagttgcaccgatatatgctacacagttctctaaggaagatattgagaacgagcaacggcgtccgaagaagaaggttgctgtgttaatcgggtactctggaactggctacaagggaatgcaact

SEQ ID NO: 25420 - DNA, 429 bp, Emericella nidulans
atgtccaccatcgtccatgccaaccaggcagatgccaccgctgctatggctcaaggccagagtatcgcaaacagcatctcagtcggcacctctttcactgccacggttgagaaattcctacagatcggcacaactatcaactaccagtggactgagaccgccacgctaaccggcacggttacgatgacaattccgaagaataaatggggcgcgatcgttagcaacccgctgaccttccgcaagagcgggtatgtttttagcggacaacctggaagcgcgcactatgagtacttccacgccgattctttcactcaagatacctattcctacggccagaactcactgtcctgggtcaagggtgtggttacaacttgcctgggtgactcctacccgctgaagcgctgccttggcgaaggtgaattgaaatag

SEQ ID NO: 25421 - DNA, 961 bp, Emericella nidulans
ctctggaggctgtgaacgggaaagaggttgatgggagaacgctagctgtggattgggcagtggagaaggaagtgtgggagaatttgcagaaggaagaagagcatgcagaaccagatgtgaaggaggagtcgagcgatgtggatatggaagacggaggggttgggttggataatggggagcttgatgaggatatgagtgaggacgatgatgaggaagatgacgaagttagcgatgaagaagatgaagacgaagatgaggaagaagaagaagaggaggaagaggaagaaaaagaggacgagagaaatgcctcaaccatatttatccgcaacctaccattcacatgcgatgatgagtctctctacgaccacttcacccaattcggaccgctccgctacgcccgcatcgtcgttgatccagaaaccgaacgtccccgcggtaccggcttcgtctgcttctggaagcccgagcatgcgcaggcctgtgtcagggcgcccctaaacagcaagaccctctcgccgcagaaaaggaaaaggcaaaaagggcacgatcatcaagcaatccgtcctgcagaatgagaatgccgatccaacgggccgatacactctcgacggccgtgttctccagatcagccgggccgtgagcaagtcccgtgccacacagctccgcgaagaaggtgtctcgaagcgactcgtccgcgacaccgacaagcgccgactctaccttctcaatgaaggaacgatctcacctaactctactctctacaagagcctttcgccttcggaaatcaagatgcgcgaagacagtttcaagcagcgacagaactttatccgcaagaacccctcccttcacttcagtctcacccgtctatccatccgtaacataccccgccacgtcacatcaaaagacctcaagcagttagctagggaagcaatcgtcggctttgccaaggacgtcaaggaag

SEQ ID NO: 25422 - DNA, 363 bp, Emericella nidulans
atgctcaagaacccctacgtgttcatgacctgtgcctttgcctcgctcggatgtatcatgtacggatacgaccagggagtcatgtccccggtgcttgtgatggagaacttccagaaccacttcccaagtctcatgggctcgaccatccagggttggctggtctctgctctagagcttggcgcttgggctggtgctctctttaacgggtacctggccgacaggatctcgcgtaagtattcgatgatggtggccgtcgtcgttttcacccttggttcggggctgcaggctggcgcgcagacgccggcatatttcttcgcgggacgattcatcggtggtttggggattggaatgtttagtcatgta

SEQ ID NO: 25423 - DNA, 1209 bp, Emericella nidulans
caccctccgttctccaacggcaggcgcctggcaaatatgcgaccagatggaatctcgagtacgaataacttctcgcagctctcgaagggcggggccgcctcgcccgctcagaaggcggccctgtctcgagctctgaacggccaggcttcgtattctggttcgaatggcgagatgaaggtggatgggttccagaagccttcgaaaacttcttcatatttcaaccatgatcgtgaagaagtgaccagaatccttattcagagtctctacgagctaggttacagtaattcggccgcattattgagcaaggagagcggctaccaacttgagagtccagcggttgcaattttcagaaatgcagtgctcgagggacgctgggctgaggccgaacgcatactggtacaatcatttcaggaacagggccaggaagaaaccgcgagcaaggagaagttggcactggttgagaacgccgagaagagtgaaatgctgttctatctccggcagcagaagttcctagagctccttgatgctcgagatcttggagcggcattaatggtgctccgccatgagcttacgcctttgaactacgatgttggacgtttgcacgctctttccaggtaagcagattggttttgcattggctaccgtcactaacagtaccccagtttacttatgtgtcctccggaacatcttcatgaccaagccagctgggacggacccgtcagcttctcgagggaaagattgctatctgagttgtcaagtaagttgtgttgactacacctagcgaataccagactaatcgaaccagaatcgatatcgccgtcggtgatgattccagataaccgactggccacgttattggatcacgtcaagcaaaaccagataaaccagtgcttatatcataataccgcgcagtctccatctctctactcggatcacatgtgcgaccgggatgattttcctcttggcacgaaactggagctcaataaacataccgatgaggtctggcattgtcaattttcccacgacggtacgaaattggtcacggcgggccgggacagtaatgtaatcatttacgacacaagcaccttctctgtgctttatatcctaggagaacacaaaaacggggtcgcccatgctgtttggagcccagatgataccaagttgatcacttgctctcgtgattcaacagctcgtgtttggagcacagag

SEQ ID NO: 25424 - DNA, 414 bp, Emericella nidulans
gtcacttcagcctttatgaagcgtgtggcgcagttgatgaaaggtgaacagggagcaagggacgccgtccacgatatcttcagcaagtatcacgaaatcattgagcgtgcactgtttgaccgcgacaccgacgcgaagcctgatcaggtggaccttctgattcagttccagcaagatctcgtccaccgtccccggggtgagacggtgcttctgttcctggccaaggagctgtatgagttggaagttgtcgaagaggaggccttagagcaatggtgggcagacgagcggtcgaccagtaccgaagagatgcgcaaagtccgagctcagacgcaacagttcattgactggcttgcagaagctgaggaagaggagagcagtgaggaggaagaagacgaagaaagtgatgacgaatga

SEQ ID NO: 25425 - DNA, 747 bp, Emericella nidulans
ctcgcaagactttgaaccgcgttcccagctttcaggatatcctacaaggcaggatgacccaccccgatatgtaaggagctctctctgcgatgccattcaggggttcaacgctgacagtttgctatcaactacagctcagttgacgttctcgtcatcggcgctggcccaactggattgggtgctgcaaagcgtctgaaccagattgtacgacctctaactccaattgcgcgcagtagaagatcctaacttctgcctcagaacggtccctcgtggctccttgttgactccaacgagactcccggtggtcttgcctctaccgatgtcacccccgaaggcttcgtatgtggattcatcaatggtgatatctgatggactgcgcaactaacacaattgcagctttacgatgtcggtggccacgttattttctcccactacaagtacttcgatgactgcatcaacgaggctcttcccaaggaagatgattggtacgagcaccagcgtatctcctacgtccgttgcaagggccagtgggttccctaccctttccagaacaacatctccatgcttcccaaggaggaccaagtcaagtgtatcgacggtatgatcgatgccgctatcgagcaccgcgtcgccaacaccaagcccaaggacttcgacgagtggattgtgcgcatgatgggtaccggtgttgccgatcttttcatgcgcccctacaactacaaggtctgggctgtgcccactactaag

SEQ ID NO: 25426 - DNA, 292 bp, Emericella nidulans
atcgggcgacacacacgtatcacaaggtatactggactacatgaaagatcaggagctagagcctgatgcgtatacctacatggccttactcacagatgctgtccgtgtgggagaccacgaacgctttcaatcattgttgcaagagattcaggtcaaggaagaagtgcgccgcaatccgtggattatgaccaaaatcctccatgcgcattttctcaccgttgcaaaacgaagggactcggatgaggatccgagtgacattttctattccatgcttgatatgtatggtcgatta

SEQ ID NO: 25427 - DNA, 816 bp, Emericella nidulans
atgtctttgtcggccggccagctcttcgccatctcggctacggaacggacgtgctccacggtctcgctgttcgcgaccagcattataatcgtttcgtttgtctcatctcagtcgttccgcaagcccataaatcgcttggtgttctatgcctcgtttggcaatatcatggccaatgtggctaccctcatctcgcagtctggtatctgggcgggcacggatagcaatttatgccaaattcaggctttcttgatacaatggtgtgtagtatgaaaccacaaggcgtgcgctccgttgacatgataacttcaggttcatgcctgcagacgctttatggaccttcgccatggccttcaacgtctatctcacattcttccgaaaatacaattccgatcaactgcgccgcctggaatggaagtacgtcatgctatgctacggcctgccgtttatccccgcatttacatacttcttcataagaaccgagtctcgaggcaaggtgtacggttcggctatagtatgtatactgattctgggtgtaacgaggttctgacggatagcagctttggtgctgggtcgccccgtcatgggactttctccgcattgcagtcttctacggcccggtatggtttgtgatcttcgtgacgctggctatctacgcgcgaataggcgaactcgtttggcgaagaaggcgacagctcaaggaagttggtggtcttgatacaacacttgacgtgtcaattcccgatgacccgcccttttccaaagtcaccgagattcgaatagaaagggaagatgctgcttcctaccgtccagaggccg

SEQ ID NO: 25428 - DNA, 1909 bp, Emericella nidulans
gagggcgacattacagagaaggggtaagctaccttgcgctgagttgtgagagaatgcctgggaggaatggataacaccaaaatcctcttcgctctacgaggaagcatcatcttatctcgatccaaattgtgcatgggaacagtcgatattgtaggctaacccaccatagatatcagaaacgccgaacactccttctctcgcagtaccttggctcgaaagctttggacttcaatgcggcgagcgccgccgaacctgcccagtcgatgaccagttcggtcagatcaccaccagcacttctcagtatacggccgcctactgctgattcgggcggaccagctcattctttcaccggcggacatggatcgcctagtaacggaagcttcggttacgagcagcatactagcaatgatggattatcgccttataacggagacggcgcgatgatgtctcaccatggtcgaatgccttctgcgtcgtcttatgattctcttttccttccaaaacctgcgcctcccgtacagcaagactcgagggcagctaccctcctaagccagaattatgctttcaatcctcctgaccccaacgaccattttgatgaatcggccggagcctacgatatacctcctcctgaagtgtcacgacagtcaacaatgttggaatcacaacaagggtacttcgaggactttgccgggcagcagcaggaggaacttagagatagttacggtggtggttttcatcgatactctcagtccgatgcattttctccaaccgcaaatatggcaccgccattaatacctgcctcagaacttccgcaaggagctattgtcgatcatctattacccctcgagcctcgcgatattccgtttgctgtgcatgacccgcatgataaaagtacgccaatgtcgaactttgacaatattcccacagttctcaggcaccgtgcccggacttgcggtaaacagccagcatactgggtcctagatcagaaaggcaaggagattgcatctataacgtgggagaagctcgcaagccgtgcggaaaaggtcgcgcaggtcatccgtgataagagcaatctttaccgtggagaccgcgttgccctgatctaccgagattccgagatcatagagttcgctgtcgcgctattaggttgttttatcgccggagttgttgctgtgcctataaacagcctaaatgattatcagagtctaaaccttgtccttacatcgactcaagcacatcttgcattgacaacagaaaacaacctcaaaagcttccagagggacatcactacacaaaagctcaactggcccagaggcgttgaatggtggaaaacgaacgaattcggcagttggcatccaaagaagaaagacgacacgccaccgcttattgtcccagacctggcctatattgagttctcgcgcgccccaacaggagacctgcgcggtgtagtcatgagccaccgaacaatcatgcatcagatggcttgtctgagcgcgatattcgcaactgtaccgtcgtcttccaaacaaccatcgcgcggagaaaccattattagctatctagaccctagacagggaattggtatgattttgggtgtgctccttacagcatacggtggccatacaactgtttggctggaagatcgagcggttgaaacgccaggtctttacgcccaccttgtcaccaaatacagagccacaatcatggctgcagattaccctgggttgaagattaccgcctacaactatcagcaagatcccatggctacacggcacttcaagaagaattcggaacccaactttgctagcgtcaaactctgtctgattgatacactcaccgtggacgccgaatttcatgaggtacttgcagacaggtggcttcgacctatgagaaatccaagggcccgtga

SEQ ID NO: 25429 - DNA, 540 bp, Emericella nidulans
atggccagcaatcccccaccaaccctggtggtcctggttgatgcgaacaatgccatactgtcgacggcaaggttcaactttgcggaagtcgcaaaatatgggacagtttatgtgaaacgggcttatggtgactggactagcacttctctaaagggctggaaaaaagaactccttagtcagtctatccagccattccagcagttcgcatacaccaacggcaaaaattcgaccgactccgctatgatcatcgacgcgatggaccttctatattggaaccgtttcggcggtttctgcctcgtctctagcgacagtgacttcactcggctggctgctagtattcgcgaatctggtctaactgtgtccggctttggggagcagaagacacccaagcccttcgtcgctgcctgcaataaatttatctatacggaaaacctttcgttccatggggaacttgtaccgcatcctgatagggttattgtgcccaaaaatcatgttccagcgcggcacgcccacgcagatggtcacttaaaaactctgctt

SEQ ID NO: 25430 - DNA, 543 bp, Emericella nidulans
acaagaatctcggccaccaaaacatgcaggctcttggcattctgcacagtgggatccccaagcacccgcgtcactaaccaagactacgcctttatgccctttcgctttttccgcatccagcaacaggtcacaagcggcgctactgacgtcgacggcctcgcgcgcgaacttagcaaaggaattctctactcaactatccgctctaattccacaacagactccgaattggccccttcagcccgccgcattttcaacctcaacctttggtcatcgcacagacgagcacgtgatcgcagcacaagaaccctaccgtcccaggagattctcacggacagcatgccattaggcgatatcatagtccagaaagaagtcaaagtagatgtggcgaggatagcggatcctgccactgaggcagccttgggaaaacatacttctgtcacagttgtagaggctggtgactcgactgcacagacttatgttgatgaactatataatctctgctatgcgcccgggctgcgtctgcgccctagtccaggcttttga

SEQ ID NO: 25431 - DNA, 728 bp, Emericella nidulans
agagagcctgtctggcatgcaaaatgagagctctccagagtctgtcccaaaatcatccatctggaagtcctattatgatctcctttccgccatccttttacatgaattaccatatactgcaccggcgcaaggcccggagcgactgcagcttgccaccgagttacgacgtgtagaggccatatgtgaggctaatctactccgtgaagtgaaatttcctacagccgatagtggaaacgaaattatcgaggcatgggtggagcaggtcattcaaaactggaaaagactatgtggccctcaatggcatgacgacgaacttggggaaggtggccagcatgctttggggaagaatgttctcgaggtatgtgccgtgtgggaattaagctgtaacactcattactgattgtttgaattagattctttaccgtgctgcgactcgaacatatcattcatttttgattttgaggcgtctcttccacgttcattcagcactggctgagttcgatctcgcatttaaagcgcttgactcatatatagaaatcgtcactggcgccaaggaaagagcagagaagtcggtcccgaacgagcacttggaggatgatggcgttttcatgcgaacgctttcagaaagtgtcaccattttatgttcttatggttctgagaaagaggcggaaaaggctcgagatctcaccgctatcttgaaggtgttcatcaataaccatgttacggat

SEQ ID NO: 25432 - DNA, 470 bp, Emericella nidulans
ccagacgggcagcagaagcaagcgggccggttgcgccttttcagcattgggtactcgacgactgtgacggatgggatctcgagcagggtcgccccaagcgccattcgagcgggaactatggagaaatgtggtgtcttgctgcgcagccgcggtggcagccggcgaagggacgtgacaacaaaccgatgcccgctgcccagggtgagttcacggggcagcatttggcggctgggtgcgcggatgggtcgattgtgttattgtcgactgcagacgatgatttgaagtttttgcgaacgttgaggccgtcgacgaagaagccgcgcgtgttgagtgttacgtttcagaaccggaatacgattgttgcgggctacgcggatagttcgattcgggtgttcgatatccggaatgggcagcttttgcggacgattagtttgggtaagggtccgacgggaggttcgaaggagttgcta

SEQ ID NO: 25433 - DNA, 571 bp, Emericella nidulans
ctccctgtctctttcaacgagccgacatcacttctccagcgcgtggccgaagatctggagtatacggatcttctcgacgttgctgccgatcggactgactcgatggagcgattggtgtatgtcgccgcgtatgcagcaagtgaatacgcttctacaatcggacgtgtcgccaaaccattcaaccccctattaggtgaaacttttgaatatgttaggccagataagggctatcggttcttcgttgagcaagttagccaccatccaccgattggggtagccttggctgaatcgccaaagtgggactactgggtatgttccgactgccatatatcagtttaaggatatgtcgttagctaaccgtggtagggggaatcatctctcaagtccaaattctacggcaagtctttcgacatcaatctcctgggaacgtggtttttgaagcttcgtcctgtatcaggaggcgaagagctctacacttggaagaaggttacgtcctcagttattggcatcatcactggcaatcctactgttgataattatggtctgatggagattaaaaactggaccactg

SEQ ID NO: 25434 - DNA, 543 bp, Emericella nidulans
atgcacttcttcaaaaccatctccttcctggcggccctcgtctccatagcgaccgcagtccctgctccctcagcatgcacaaccatctaccctagcatcgcacgcgtcgatgctgcccagccggtagcctcctacctcccaggcttcagagtctcccaggaggcaaacgccgccaagaagcaagacacattcatcgagtttaccgtcccgcagggcgtctggggttgcacgctctcctactccatccctgccggcacaccggtcaacaccgtcgggcttgcacccgtggaggtcttttcagctggcccgctgagccgctcgccaagaggtattgatatctcttgggactattgcccggcgccaataagtctggtcggtagcgtgaaattcgagtctggagcgagtaatcgggtgatcaatagcttcgcctgtgccggtaccatgacctacaggctgagtatttcgaatggatatagcagcaagacaagcgtcgagtttgcgcaggcgcctggagttgggctgcggatgagttataattgctga

SEQ ID NO: 25435 - DNA, 1909 bp, Emericella nidulans
atgagcgacgaaattaacggcaccggtgagcgatttgctatcggtatttcttttggcaattcctccagctctattgcccgtatcaatcctgtatgttagcccgcagtcctggtgctttctagttggcaattgggaaggagttcgctaaacatgactttactcacaggaaggcaaggctgaagttattgccaacgaagaaggaggttcgtttgccctatttccataaatacctgccgctccgccgcatgctcttgaggaaggctaaggctcaccatattctagaccgtcagatcccttctatcctctcatacatcggtggcgagcaatatcacggtacccaagcgaaagctcagctcatccgtaacccctcgaacaccgttgcatacttcagagactaccttggcaaggagtaagttgcggcactcaaaactagaactggaagcgaatgcacctgctaaaggactactgcagcttcaagtcaatagaccccaccccatgccataactccgcccaccccattcagagcgactcgactgttgctttctcaatccgtgacactgagagcgagacacccaacactgtcactgtctctgagatcaccacccgccatcttctccgtctgaagcaatctgcctctgatttcctcggcagggaggtcaacgcagccgttgtcaccgtccctaccgacttcaacgatgctcagcgtgaggccctgaccgctgccgccaaggctgctggtcttgacattctgcagctcattcacgaacccgttgccgctgctcttgcctacgacgctcggccagaggctgttgtcactgataagctcatcgtcgtcgccgacctcggtggcacccgatctgatgttgccgtcattgcttgccgtggtggaatgtacaccatccttgccactgctcacgactacgaattgggaggctctaccctggaccagatcatcattgaccactttgccaaggaattcatcaagaagcacaagaccgacccccgtgagaacgctcgtggactggccaagctgaagatggaaggtgaagctacaaggaaggccctgagcctgggtaccaatgccaccttgagcattgagtctcttacagacggaattgactatggttctaccatcaatcgcactcgttacgaactcctgtctagcaaggttttcgctcagttcaccggcctgatcgagcaggttatcaagaaggctgaactcgatgttctggacattgacgaggttatcttctccggtggtgtttcccacactcctaagatcgcccagcttgctcgcaatctgttccccgagaagacccgaattttggccccgtccactctggcgtccgccatcaacccatctgagctgtcagcccgcggtgctgccattcaggcttctctgatccaggagtttgaaaccgaagatatcgagcagtccatccatcctatggtgactgccacacctcacctcagcaaggcaattggtgtcgagttcacttccggtgatgctgtcgagtttctgcctctccttaacacagagaccgcccttcccgcccgccgtgtggcccagtacagtgttcccgccgagggcggcgacgtcctcatccgtgtctgcgaaggttcccgtgagatcaaggttactaagcccgagcccaagcccaaggaggagaagtccaaagccgaggacgatgaagacgactccgacttcgactccgatgaagaagaagaagacatccgcgagattgtgtggaaaaccgagcagcccattgctgagctcgccgtcaagggcgttaaggccaagggtaaagttgagctgatgatccacattaacgccgacctcggtctgcagatcacagctcgagaagttggcggccaaagcgccgtccggggcgctgttgagtcgccatga

SEQ ID NO: 25436 - DNA, 407 bp, Emericella nidulans
ccgcgaaaagcaggcaaaccctcacagcgcaagacgcatcagaggaacaagagacaacacagaaacgaaagcgcgccgggcggccgcccaaatcgcaaaaccaacccacagacgatatcgaagagcgaagaccacagaaaaaggccaagacaacagtgccagaacgtcgtgtttcaggcccctcaggtgatcccgagttggataaaatggttgaaaactatgtcaaccggactggaccgctcaagggacgaagcctctatattcttaaacgcgagaatccagcggacccatctgcgacgcacacccgatcaggacgtgtgtctgtcagaccgctggcctactggaagaacgagcggtgtgtgtacggtgacgaagaggcagcagaaggacagcgatttcccctttca

SEQ ID NO: 25437 - DNA, 488 bp, Emericella nidulans
ggatcttcaagcagcaaactgagaaatacctcccagttatgaacgttgcccaggagcttttggtactcggctccagcctgctgattagtcttaactctgagtccaatataacaaagctcatcatcttccagattctcatttgaatcggtgtgggcatgaacattgaaacaccaatcattgctgttcaggctgcaacaagtgttcgggacactgcggccgttactgagacgatggggtttgtgcgatctctctctactgccatttcggttgttgtcgggggtgtagtatttcagaatgagatgaatgcgaagaacgaggagttagcacgccagctgggctcaaagtcaaatttcgcgcgcgaattcaacggcgatcttgccgcttcgagtgtagaggagattggcgcccttggactaaatgcagatcaagacggctttgtcagaaagatgtattttgaggcgttgggaatggtatgggttatgggaagt

SEQ ID NO: 25438 - DNA, 708 bp, Emericella nidulans
atggatgggctggtcaactacatcattatgcaacagcagagccagatcgacccggaactgaaccttgatgcggccgagttttggctggttgcgggtgaacaggctgcgttacaacaacccctggcgcctcatatgcccaagattgttccggtgctactacagagtatggtatatgacgaggaggaagctattcggcttgccggggaaggcgaggacgctgacgtggaagatcgtgaggaagatctgaaacctcagtttgctcggtcgaaggccagccgtatggatgtctccaaagccggcggacagcagaacgggaatgcgtcggcgcaggcgccggaggatgaggacgatgatttgagcgaaggcgaaatcgaggactccgagtttggagacgatcctgaggatgaatggactttacgcaagtgctcggccgctgcactggatgtcttctcgaacgtctaccacgagcctatttttgaaatcatcctgccttacttgaaggaaaccctgcgtcatgaacagtgggtgcagcgagaggccgctgttttgacgctcggtgcggtggccgacgcgtgtatggatgccgttactccccaccttcctgaacttattccgtacctcatttcattgttgaacgacacgcagcccgttgtgcggcaaatcacttgctggtgcctcgggcgttattctgaatgggcttccacatcg

SEQ ID NO: 25439 - DNA, 455 bp, Emericella nidulans
cattcgtccgccccatctatgcgggcaacgcaattctaaccgtgcagtcgaccgaccccatcaaagtcatcacagtgcgcggcaccgccttccaagatgccgaagccactggcggcaacgcctccataacagacggaacggaccccaacgcccccgcccaaaccgaatgggtctccgaagagctctcgaagtccgaacgccccgacctagcaacagccccccgcgtcgtctctggcggccgtggcctcaaatcaaaggaggaattcgaccgcatcatgatccctcttgctgattccctcggtgctgcaattggtgcttcccgtgcggccgtggactctgggttcgcggataatagtctgcaggttggacagacgggaaagaatgttgcgccgcagctgtacctgagcgtgggaatcagtggggcgattcagcacttggccggtatgaaggatagt

SEQ ID NO: 25440 - DNA, 748 bp, Emericella nidulans
gctggatctcccatgtacgatggggagccaattgacaagaacgacatgcgcgaatggctacaagacaccattacagcgatactcagctgcagcccgtccagtgttcttgagatcggaacgggctccggaatgatcctcttcaatatcatcggcagcatccagaagtacgttggcctggagccctccccccgggctgtggatttcgttagaagggcagtccattgggttccagaggctgccgggaaagttaatataaaatgcggcactgcatcagatattggacgactgcaggatatggggacccttgacctcgctgttatcaactcagtagcccagtatttcccctcgcttgactatctgcgtaacacgatcaaagaccttgtacgccagggcgtaaaaagcatcttcttgggcgacatccgctcatatgcgctgtaccaggagtttcaagtcagcaaggtccttcggctatatggccgcggtttaaccattaccagattccgccaacatatggccgagattgcccgtttggagaaggaactccttgttgacccagccttcttcacctcgttgccagcagaattgccgggcatgatcgagcacgtcgagatctggcctaagcgaatgaaggcaacgaacgaactaagctgttatcggtacacggccgtgttgcacgtcaaacgtgctgaacagcccttgcttattcgagaggtcaaagagatatcatgggctgactttcaagcaaggg

SEQ ID NO: 25441 - DNA, 2455 bp, Emericella nidulans
gacattcgttcgccggtgcgaccttgccttttggtacgtccaccaaatgatagaatggccatcgactaatagagatgaaggtatggtcaaggcagtcgccgacacgcagggcgagaaccaaggagggttcgcttatgacaccacgcacgtaacagggttctctcacactcatgattctggtacagggggtgtaggtttacctctagcttgctccgcgcctcacaatgctgaaacaatggatgaacgacaggcctcctcaatgggaaacttccctttgttcgtgcaccccagctgcccggatgacgatattgcaaattgctcctggacttcttcagacagagctgtaccctggaaccgcgactctcctggccctgaagcgcgacccgggtacttcgctatatcactagagaatggcttgcatgccgacatgaccgtgaccaaccgctcggcactctatcaatttcagttccccgacggcacggggacgagtccggtggtttttctcgacattatcgatcttccacagtcgaggaatcatgggactgcttgggttgatcccgagacaggaagactgactgccagtggcaacttcaatcctagcttcggggaggggacatataatatccatgtctgtgttgacttccacggcgccgaaattcgtgacaccgggtcgtggacgaacaggagcgctgacttaggacaaagcactgtgtcagttacggccaactcatcgtatccggcgagtcaatactctgcaggaacttttgtcaggttcaactctgtatctgctgacgatgtgatatctgctcgcgttggagtaagtttcatgagcgtggaacaggcttgctcgaacggcgaaaaggagcagccggatttcgacttcgagcaaacacgagcagccgctgagagtgcgtggagaaagaaaatggaagtgattactattgacgctgaaggcgcgtcaacagagctccaaaaagtgttctggagtggcgcgtaccgcgccatgatcagcccgcaggattatacaggtgaaaacccgctgtgggagagcgatgagccctactatgacagtttttattggtgagcctctccacctttccaatctggtcctttctctgatagcaagggcagtatatgggattccttccgtggcatccaccagcttctcactctgatcgatccgatatcccagtcacgaatgatacgaagtctagtcgacatctaccgccatgaaggttacctccctgattgccggatgtctctctgcaagggctggacacagggtggctcgaacgcagacgtgctgattgcagaggcctacttgaaaggcgtcatcgacgtcaactgggccactgcctacgaagcaattgtgaaagacgcagaaatcgaaccctacaactggaatgttgaagggcgtggcggtctcaggagctggaagaatcttgggtacattccgaagaacgataccgatcccggtactgaagggctacgcacaaggagcgtgtcaagaacggtcgagtatgcttacaatgatttctgtatagcgctcatggcggacaagctggggcgcgcacatgaccgggataagtacctggaacggtcaggaaactggcgaaacctatggaaagaagaccagtcctctgctatcaacggggtcgatacaggcttcaccggcttcctccagccgcgtctggaagacgggtcctgggcgtaccaggaccccatcttttgcagcccgctattgaacttcacgtcctgctatctgaatgccgacgggcacgagacttatgagggtagttgctggctttataccttgtgcgtcccttcccctcctgccacccaggtgtgctctgctgattgatttgtattgcttcagttttgttccgcaggatatggccacgctcatcacaaccctcggtggccgcgaagcatttacctcccgcctgtcctacttgcatgattccgcggtcctgtatctgggcgacgagcaggcctttttgacggtttatcaataccactacgggggcgccccggtctgtccgccaagcaggcacacagttacatcccgtcgcagttcaacacctccgtctctggcatcccctgtaacgacgacagcggcgcaatgggctcattcgccgtgctagctatgcttggcctattccccgtccacggacaggatgtatacctgatcacgccgcctttctttagagagattagtattcgaaacgatgtgacggggaagatcgcaacagtaaaggcaaagggtcttgatgcaggatacgaaaacatctacattcagagcgtaaagagggacggcaattcatggacgaggaattggattggacacgatttcttcgccgagggggggttattggagatagtggttgggaaggaggagagcgactgggggacgaggcttgaagatctgccgcctagtgtgtcggaatatgcgtaa

SEQ ID NO: 25442 - DNA, 1911 bp, Emericella nidulans
atgagcacagttcgagcgcaaaacctccaggatctcatctacaagcgcggtcaggccggcgttaccaaagcgagcgtgacaatcgtttttgacaatagggacaccgcgaaatcaccgatcgggttcgaagaatatgcgaccatctccgttacgcgacaaattgttctcggcgggactagcaaatacctcattaacgggcaccgtgcccaacaacagaccgtacaaaatttattccagagcgtgcagttaaatatcaacaatccaaactttttgattatgcagggacggattacgaaggtgctcaatatgaaagcgggggaaatcctgtcgatgattgaggaggcggccggaacaagaatgtttgaggataggcgggaaaaggcggcgaagacgatggctaaaaaggacctgaaattacaggaaattgaaggtttattaaaggaggaaattgagccgaaactcgaaaaactgagggctgagaagcgagctttccttgatttccagcagacacagaatgatttggagcgattgacccgccttgtggttgctcatgactatcttaggagcggcgaccgactccgtgcttctggcgaggaatgcgagaaaaagaagcgaaagatccaggcactggaagataacacggcgaagctcaagagcgagatagcacacatggaagaagatgtaaagcgggtcaaggcggttcgggacaaggagctacgcaaagggggaaaatttcaggcccttgaggatgaggtcaaggctcattctcatgagctagtccgtttgacgactgtttttgacctcaaaaaggcgagtatcgctgaagagaaggagaagagcaaagagctccagaagtcagtgaaggacctcgaaacatcactcaaggagaaaaagaagatatatgataaactgcaggcagaatatgatgcggcgaaagcggaacttgatgcacaaacagccgaagtcgaacagaaggaggagttgctccagactttgcagaccggtgtcgcttcgaaagaaggccaagaaagcggatatcagggtcaattacaggacgcccggaaccgtgcgagcaacgccgctacagaacaagaacaggcgaagctcaagattgcgcacttggaaaagaggatcaaggaggaagaaccgcgagccaagaaggctaaggagcagaattcagggcttctaaaagaactcgaaggcctcaagtctcaggccaagaaattggaatatgagctctcgaagttaggttttgagcctgggcgcgaggagcagctatatcaagaacagagcgggctccagaaagaaatccgtgaattgcgccagagagctgacggtcttcagagaaaggttgccaatatcgaattcaactactctgatccctacccgaactttgaccgatccaaggtcaagggtcttgtagcccagcttttcactgtggacaaagagaagctccaggctgctacagctctggaaatctgcgctggcggtcgcctgtataatgtcgttgttgactcttccgatactggtacgcagcttcttcaaaagggaaagctccgcaagcgtgtgaccattattcctctgaacaaaatttctgccttccgagcgtctgtagagaagattggggctgcgcaaaacctcgctccaggaaaagtcgacttggctttgtcgctcattgaatatgatgaagaaattactgcagccatgaattacgttttcggcaacactttaattgccaacgatgctgagacagcgaagcgggtgacctttgatccttctgttcgtatcaagagcgttactcttgacggtgatgtctatgacccgtctggtacactctccggtggtagcgcgcccaactccagcggcgtgcttgtgaccctgcaaaagctcaatgagatcacaagagagatt

SEQ ID NO: 25443 - DNA, 594 bp, Emericella nidulans
atgtcctcccaatctttccgccagatcatcggcctggcgccctcaaccgccacaatcaccgactccacgcttatcatcgtcgacgcacagaacgagtacgcccagggtcttctcagagtccaagaggtcgaccagagccgaaaagtaattgccgatcttctctcccggtaccgtactgccggtcaacacaagaacattgtccatgttgttcaccagacacctgctggggcaccggtcttcacacccgacacgcccctagcaaaggagtttcctgagctgagccccgcagttggggagaaggtcattaccaagaaatggccatcctcgtttgcgcagaccgatctccacgagtacctgcagtctttgggggcggtaggtaagaaggtcgtccttgtaggatacatggcgcatgtctgtgtgtcgactacggctaggacgggcgcggagttgggatacgatgtgcttgttgtaagggacggggttagcgatagggctattcccggggtggaggcgaatgtcctcgttgatgtggcgctaaaggaggtcacagatgcgtttgggacagtgattgcgtctggggagattaaagggtag

SEQ ID NO: 25444 - DNA, 746 bp, Emericella nidulans
atggcagatttactatctgatctcccttggccttggtgcgacaaatgctgcgtttgcagcttgggcgttccggcatggtttgttcaagccgaacagtgagggagccaaggaggctgcgggacgggagctgcgggagacattggcccatcggtcgctttggtttctcaccatgtttttcttcctatattccggggctgagataaccctcggcggtgagctacctagtttaaagggagccaaggatgcggctgacagttgatacaggatggctggtgcaatttttagtcggggtgcgtcatggtgaccctgaaaaggttggctacgttgcgtccgtcttctggtgcggcttcaccttcggccgtgttgcgctggcagacgtgacacatcggtttggcgagcgacgcatggtcttcatatacatcgccgtggcgctcgcattccagctcatgttctggctcatcccaaacattctgattaatgccatttcggtttgtttgttaggtaagcgagcgcgggtggtcgaacaccaatgcgtaacgagatatctgacctgtatataaggattcttcatcggcccgttctacccagtgggactctacgttctcacgcaggtggttccacaggagctccatctcggggcgataggtacgtgacaaacatccaccatcccaagtatcttcaaactatccagtctgacccgcgcgatagggtttgccgcaagctttggttcggttggctgtgctgca

SEQ ID NO: 25445 - DNA, 894 bp, Emericella nidulans
atgtattgcgactttgacagcaacgtagctgactctacactagttatcgttaagcatcaagggaagcgctacgatgtcgagctcgacccgaattccactggcgaaacattcaaatatcagctatactctcttacaggagtggagccagagcgacagaagattcttgtgaagggaggccagctcaaaaacgatactctactatctactatcaatgcgaagccgaaccagacattcatgatgatgggtaccccttccggggaccaaggcgccggagcattgacacgtcctaaggaagttgtgaaattcttagaggatatgacggaagcagaggctgccaaggcagcaggggccatcccggccgggctgcaaaatttgggaaatacgtgctacctaaactcgacattgcagacgctgaggagtgtcccggagctacacgaagagcttcagagataccgcccatctagaaacatcagcggcgcatcgaacctctcgaacctttctgatttcgggcttggtggcctgggcgcctctatggacctcacttccgcgttgagagatttgttcaaacagatgtccgagactcaggaaggatttcctccaattctatttctcaatgctctgagaaacgtatttcctcagattgctcaacaggaccggaacgggcatggctacgtcaacatggatgcggtagaagcttggtcacagattgtgtcgcagctgcggcaaaaattggtgatcaaagatggcgagggggagtctgcgactggagtatcatttgtggaagcgtatatgggcggaagatttgaatctgtcactgagtgtgatgcaccggctgcacaggaggctggtgaacaacctaacaagacttctgacgttatcttcaagcttgactgc

SEQ ID NO: 25446 - DNA, 858 bp, Emericella nidulans
atgggtgctgcggatgtacatcggttgacaaggcggttggaatatggaggttcgtccttccgcgtttctcttgctttactgatatgtttgagcaatgatagtttggaggagtctgcactgcatttatgctaatatgacttaccaaaatgaatagagcgcggtctcttcttttaccagaaccaccctatccgcttcgtgaacttggtcggcataatcgtagcacgcgccgacgtcccacgccgaaccattttaacgctcgatgacagcaccggcgcgacagtggacatagtggtcttgaagagggatccctgccctatacctgtcgcagctacagtcgaatccaaacccaaaaacaacaccgatgttcatggcgaagacggcgctcaaaaggagatgcacctcacgtccacaacccagactccgatcgacataacgcccctgcagccgggcaagctctttcagataaaaggcacactgtcgaccttccgctccacgaaccaggttcagctggaacggttcttcccggtgccagacacaaagaccgagatgcggttcgtggaagcgcgcatgagatttctggcggaggtgctgactgtgccgtgggctctggatgaaggagatattgaaaatttgaggatgcaggcggatgaggaggggagtaggattgatgatgaacaggcaagacataggaggagggcgcggaaacgggcagagagggaagagagagagaggaggaggattttgaagctctgggagcaggaggaggttgttagggagagagaagggaagattgccagggaggcaggaagagattatatgttggagcttgagaggcgaaatagactattgtctagttga

SEQ ID NO: 25447 - DNA, 474 bp, Emericella nidulans
atgaaggttatctgtaaagaccgccagaaaacgacggctcctgaaggacgtgcgctaaactcggtcgccggggatatcaacaagcttctcagccccaaatcctacgagcagttgcagaagcttgaagagcaggtcaggataaagctggattcaaacgagcctatcgatacggattattgggaggagctcttacgcagcctcactgtgtggaaggctcgcgcaaagctgaagagggtctatcaagatgtcatagctgagcgagttcgggcactacgtcggcaacagcgcgaggaagctgagtcagtccgtacgaagctggcgccactggcgcccgtggcccggcagggcacagcgaaaatcaacgaggaagagtttcgtgatctggatcctgacccattgcttcagattcgtccagaggacaaggtatacgaagtgatagatgaggaggccttcctcgatcaggtggtaagttac

SEQ ID NO: 25448 - DNA, 601 bp, Emericella nidulans
cttcgttctccctccgcagaagcctcgtgaggctgaatctccacctcgcaagtcaccccggctccaatatggatcaacccggagatctctgcctagtgaaacccccagcaagccagtaccacctccgcagaccaaccgcgcccggacaccctctcggtcagtaagtcctgtcaagtcaccctacaaacaagcctctggctgcctctgtggtgcggtagtctatgtggatgttcacactacggaaggtgaggatgcttgcggcattttcattgaactactccagcaaatgggagctagatgtatcagggacctgtcatggaacccacgggtgagcgtgtccccggaagaggatgccagttcccgaaaagggcagggtgggaatacccaagttgttttaaaggccggggggttccgaccctggaaaagggccgcaggccccgggcctttcaagtgcgggggggtcggttggggtctgaataagttttcctttatccccaacgggctgttttacttggacacattaaggcaagaaagatgggagaccggccccccccttgaaaccgtcaacttcccgggggggcaaaccgcaagagttgagccc

SEQ ID NO: 25449 - DNA, 1239 bp, Emericella nidulans
ctggccaaatcaaaatttcggacccgaagatcagtgattcttagtgaccgacataactatataacatggcgcgattccgtccttatggatgcctatataattgacgctaaggatatcttcgttcaaacaaagccacctaatggcagtaatgaaatcgatatcgcctgttgggatgcgaagaatgtcattatgcgtacaaggattcttcaatcaattgcatcgcacgtacgagaaaccatctgccggcaacgctctaccctagctgcggaactatgggctaggatagcatcaacatatgccccatcgacggccgaagagcgccttgtgaccgtcaaagccttgcttgatattaacccacagggtaactacccagcgatgatccgagattatcaacggataggggaaaagcttaggcgaatggatctatcctttgaagatcttatccatgacatctttatctgttctctaggtcaatggcagcaggactttgttcatacaaagctagacgagttctactcctgcggccgaggaccgatcaagaacctggatattacgacttttgcgggtcaattagttgctcgatcttctccctccagcaacaaatgcatcccccagcatccgccacgattcaagcttgaagcgagatatcgaataagccctacagaactaaaggattcacctcgaacgaagcagggttgtcagggtcagaagcccatgcgtacaaaggtgccttgtaaagcatgcggaaaaggataccataggccaaatgattgtcgggaactgcatccagaaaaggcctctgacgataagaaccaaccaaaaggccagaaactcgtcctacgaaaccatccgcaggccaactcgattgcaagcgaactagcccaagagcccaagcatgataacgaacccccctggctcttgagcactgctgcagactttcatatctcctatagggatcatgttttcagcaacctccgagatcatgaagcatcaataaaagacgccggtggccatgtacatcagattatcggaattggaactgcattagttcatggaatggagattcctgacgttcgatatgcacctgcaatgaagacgaacctgctgtccttcggcctattggataagcagaattttgatatatccctacatggcaatttcgagaagcacttccttataaaatcacctacaggagattctcttggcgcctaccttgagcaggaaacaggccgatatcat

SEQ ID NO: 25450 - DNA, 363 bp, Emericella nidulans
gttccgctagactctcccatccgcacaaccgcaatccacgagctcctcccggacatccgcgttcccagctcacctcaccaaccacaccggtacaacccggtaacctgtgcaccgattgacgcagatgacaagcgcgtgagatccgagatcgaccaactgcggaaggactttccaacaccagatgctgcgctgcaggcccaggaacaggctgcgcgcgagttgagacagaaactagacgatgcggagaagaagcgcgaggaggtgcagagggctatggataagaagatcaaggagaggaatacggagttgaaggttttagagaagtttcaggatgggaaggggccagcgcttgctgctccttaa

SEQ ID NO: 25451 - DNA, 837 bp, Emericella nidulans
aacagccctgtccgccggtacgccgacatcaccacagacggctgggactaccagcgccacggcattgtcgcaaccctctccctcgccgaccatatccctcctccgttccccatcggcacgcggacagcataccagcgcttcctgcctgccctcggtggcccaatcgcccttctcccgctcccaaacaacaacgctacccttgtctggtccacgacggtcgaaaacgcagcttacctcaagtccctatcgccgggagccttcattgccatggtcaacgccgccttccgcctgggcatgccagatttacagtacatgatgcgcatggagcgcccctcgtcctcgtcggtcacgaacctcgacgaagacctgcacgagagcgaactcacttggcgcctacagcacactccatccccctctcatctccctccaatggtcacaggcgtgcaagaaggcagcgtcgcctcattcccgctacgtttccgccatgcgtcaacgtacatctcaccgcgcgtagccctagtcggcgacgctgcgcacgtcatccaccctcttgccggccagggcctaaacctcggcctgggcgatgtggcctccctctccagaacaatcgagtacgctgtgacgcatgggatggacataggcgatatcctcacgctcgagagatatacggctgagcggtacgccacgaacgcaaagatcggtggcacctgcgatgtcctgcacaagctttataacgtgcccggccaggggcctgttgcgtgggggcggagtctgggatttgagatcattgaccgagtaccctttctgaaggggtttctgatgaggaacgcggattaa

SEQ ID NO: 25452 - DNA, 444 bp, Emericella nidulans
atgagccttatcgacacgcaagttccacaagaagaggcgtctaagccaggcgaaaatgaatggtcagaacgcgatgtttatccagatgcagcccgtgcgaagttggctgccccttcaagccaaccgcagcccgaaactcagaaagactcggaagcaagtgggacgcctaagaagtcgcgcaagcccaagaaaaaccggtcatatggagtgaaatacagtacttgccaaccaattatcatcacattcgattcacttgacctccctcgttcgggaaccatcagtatcctccgcgaatacctcttcgccgaagcaaagtcgaagcggggcatcgagattgacaaatctttggtcaaaggcatgaccgcaaaggagatcccacatcagccgaacttttctgattgcggtctttacctcctagcctacgctgaaaagttcgttcaagac

SEQ ID NO: 25453 - DNA, 324 bp, Emericella nidulans
ctcttccttggccgtaagctcgttcttggacgtgaatcagaccaggtcaactttgccgaagacgtagcggttggtagtctgcctcgcgacggactctcgcagacctgcgagtgggtcagcagagtcctagacgacgatgcagatatcttcgcccaacgcgccgtatccacaaagggagagaaactgtatctgcgtacaaggaatgcagcctctgccgaaagcgcaaagcgtgccaagcaagttgttacctcggacaactggacagccgtccaccctctcttccaagacgaggcgagcaacctggaagccgagcgcgagaagatg

SEQ ID NO: 25454 - DNA, 688 bp, Emericella nidulans
gtggttttcggggcagaaatgcctggtaaaccatggcttatacagccagggaatcaggaatgggttaccactataatatacatcaatactagggggtggccaataccctccaccattatctttaaaggaaaagtctatatagagggatggtttgatgaatgcatgatccctggcagttggaggattaaaataagcaccaatagatagactacagatgcaattggcctctgctggcttcaaaatatcttcattccagtaacaaataagcgtacaagggggggatatcagctgcttattctagatgggcatggaagccacctaatgcctgagtttgaccgtacatgcaaggagaataataatatacctctttgcatgcctgcccattcatctcacctcctacagcctttggatgttggttgttttggacctttaaagaaggcatacggcaagtttattgaggagaaagggcgcctgggatataactatattgacaagctagatttcttgaaagcttacctagcagctcaccaggaagtctttactacagagaatattcaaagcagattcaaagcaactgggatacttccttctaatcctaaggcagtgcttgaaaagttaaatatcagcctgggtactccaaccccccctctaagccatggggttgcttcaatcccttcttctgagcttg

SEQ ID NO: 25455 - DNA, 1263 bp, Emericella nidulans
aattctccgcctcctcccgtgagctgcgcgtcctcccctcttttgcgccgcctctgccccgcctttcccccgccttcacaaaaccatcaccttcctcttcggctctcagctcccaatccgaacagagcgaacaagagaaatatgaagtcgtcattgtcggcgccggccccgccgggttgatgctaaaccttcttctcgcgcgctatggtctctctgacgattcgcttctctgcgtcgacgccaagcccagcacgctccgatccggccaagcagacggcctgcaaccacggacccttgaggtcctgaaatcgctcggggtcgcagacgagatcctcaacgatggctgtcatatggaggaagtcgctttctggaatccaacaggtaaaactgaaggtgatgtgattgaacggacgtccatcgtgccggacgtgagcgtacccgcgcgctttcagcacgaggttacaatccaccagggacgcattgagcggattctagagacagatctgctgaggtactcgaagcgcggcgttcagaggaatacgagactcgtggatgtgaagcttgatgaggcggatggggagtttccgattgtggcggtgatcgaggttgggaatggcgatggcgaaagggaaaagaggacgattcgctccaagtaccttgtcggtgcggacggggcgcactcgattgtccgccggtgcatgggtctcagtctagagggtgaatccttggaccacatctggggagtggtagatctggtcgtggatacggacttccctgatattcggcggcggaccgcgatccactcccctgcgggttcggtcatggttatcccgcgcgaacgtattgcgacaggcgactaccttacgagactttacgtgcaggttcccgagattgagattgaggctggcgatgatcggcgggcgaaggatgccgcgaaggcacgcagggcgggcgttacgctggagagtattttccagcaggcagctgaggcgttcaagccgtactatatcagacccaaagaagatggttctgtggattggtgggcggcgtatcagattggccagcgcgtgtctgggcaattcaccgtcaaggactcgaaggggattaaccgggtgttcattgctggcgatgcatgccacacgcacagtcctaaggtacatccaaacttcaacctgtgcattccggacaagtacgctaacatgcctgaagacaaaaacaaggcatgaatgtctccatgatggactcatccagcctagcatgaaa

SEQ ID NO: 25456 - DNA, 614 bp, Emericella nidulans
tgttcggtaatccggagtcgccgtaatggagtcaccatgtggatcaataatgaaccgcctccggcaaagaatttgaagactgctttgatctgttggtcaagggcgactgcgaggaagtggcacggcttgcacaattgaagcggtgggatgacgattccaaaccgattttcgacgagtgccaatctgcggatgtggagcgggtaaagaacgagcaagggccgctttccgtcgttattactacccccaagaaggagaaagtccaggctcagaccgggatgctcacaccatcatccagctacgatggcgacgtcgagaatgcttccaccactactctctcaaatcctgcaagcaaaggacggaagctcactgagatcctcaaggccagcaagaaggatgcacctaagactgagagtgccggcgtcaagaagcctgcgcctcggaagcgcacaaagaaagagccagtcaagaatgccaaaattaccacattcagcaaagtcactaaggctcagaaggttacgcccgaggagaaatccgtcaaattggaggagcataaggcaatgcatcccctgccaccggggctgcgcgtacaaatgcgccgatgcttcctgggctag

SEQ ID NO: 25457 - DNA, 251 bp, Emericella nidulans
cgtctgatgccacaggccacgcacgtgtttcgactcctggacctactgcgcaaggttttcctacccctagtgaaatccatgctgccattcctgcaagtggtatcctgagcaccgatctgctcaaaatatttcggccacgcatcggcgactcccgagagaaccataggaagttcatcgcaatcgtcaaggatgttggcgtttatgggaaggaagaccgtcttttgcgtccggggccatggaaagaaacataa

SEQ ID NO: 25458 - DNA, 913 bp, Emericella nidulans
acatcgcaaccgcccttcctaaggatgcagtgacagaggtcatctctcaagcaccgttcgcgtctgttcccggtatcttcaacctacgcgacatcagcggtgcggattcgcctctgtatcccttttcagttaacctgcgaaccggtctcgtatatcgagcgggtgccccggcctctacattcacagaacatggtagagctgcgctgaacaccctcggtatcaagaaaatctttgatctacgtcgtgtcgatgagcgcatcaagaatcccagccctgtcattgacggcgtcgacgttgtatggattccgtacgcagaagggggtgcccggccggcaactgtccggaaccttgaagggtccatggaacaggttgtggaaatgtacatgggatatctggagacgcatgcgccgatctacaaggccgtctttgagcacattcgggacgagccagagacgccatttctcttccactgttctggtgagtctcgtaccaaccggatgctagaaggaataaaaagaaagaaagaaagaaagaaaaactaatggagatggatggcttagccgggaaagaccgcaccggtgttctcgcagccttaatccatcggctggcaggaagctccaacgaggcccttatcctcgacttcacactaacccgcgttggacttgagccgggtcgcgcggcgctcctgaagatgatgcaaagtgtgtacggcgagtcagtgctcgacaacccggtcctgccggtggtctggggagttcacggtaccggcatggtggcgttcttggaggctctcgacgaagattatggtggagtgactgggtatctgaagaacgcacttggattttcggacaatgacctcgaggtcatgaaggcgaaccttttactgaatccagagtcgggcagtcgcctgtga

SEQ ID NO: 25459 - DNA, 1067 bp, Emericella nidulans
attggcatgggaaaccagcggcaggcgtattacttcttgcgggaagcaacgactctatatacggcgggcatgctggatccggctgatgccgacgacgaagacgccgggaacctcttttggctattattgatctcggagaggtataaatcatatgtagggcctccgtttacagcgtcaagtctgacagatcatatgcagagcgcacgccatccgaagacatcgtccgatcacgctacaggtcacccgcgacagtccaatcctttgtgatactcggtccgacgcattcagtctgggcttccgctgccttgcggagctctacagacccttcgatcagacattcctcagccgctggaacggaaccgactcctccgcgacaacagagcagctcatccaacttgaggaccacctcctgcaagccgttccggccgacgttgagcttcccgacatcgtcctcgccgaccttcgtgtctcgcaacagtggctccgcaccatgatctggcaacttgccacctcagctggctttctgtcgagcacgccgtcgcgtccgtgtctgggcttcgcctatccactccagatcgcgcgagacctgtcgctggcgacgtggaaactatcgaaagagagcttggaaacgcacggcattggattggtaagccgagcaccacttcaccacccgctgcgaactaatattagaaatgcactaggctgagaaaatcttcgagataacatgcaccctcacagacgtcatggcctgcatgacctccgctgggctccggtcgtccagctttgaccttggccctcaggactacctcaagcacctatgtacacttattcacagcctgccgggtggtgagaccaagttcctccccctgctcctggcgaagatcagccagacgctaccgtctatgctgacgcctgtcacccgccatctcagtttgccctcttgcatggccgagcaagtgtcggtgtcgccaaatgtcggcatcggctctccagtgagtcatcgggatgactggagtaaagcgctgaattgggctgaaatgagccgcatcggggatcggacacctgaa

SEQ ID NO: 25460 - DNA, 340 bp, Emericella nidulans
gaattacgccaaatcacatcctgacctctgtatccttgccgtaaacaccttcgtacaagactccgaggacccaaatccgctcattagggcactcgccatccggacaatggggtgtatccgagtggataagatgattgattatatggaagagccacttcgaaagacgctgcgggacgagtcgccgtacgtacgaaagaccgctgctatctgtgttgccaagctattcgacttgggaccagccatgtgcttggagaatggattccttgaaatgcttcaagagatgattggcgacccgaatccaatggttgtggccaattcggtaacggctctttctgagatt

SEQ ID NO: 25461 - DNA, 473 bp, Emericella nidulans
ggatgagactaagaatcttatcaatgctgaaatggtgagcttcttcttggtcccactcagccaggcatacgatggaggttagggctaatgtcgttcgatgggcgcagaccccagcagtccatcagatggaactccacccgttcctctctcaaaaattcttcgcagtctggcacaaaagtcttgaaatccacgcgcagcagttcagtcctataggtaatatgaactcgttctaccgcgatgtctactggagcaacaggcgcgccaacctcggccgcctcctcgacgagcccgtcctctccgaaataggcgcaatgtattccaagaaccctgcacacgtggtattagcctggagcgtgaatcatgggcgctctgtgatcccgaagagtacgattccttggcagatcaggcagaatgttgagagtgattttgtgcttgaggaggatatggagaggattgatgagctgaatgcggat

SEQ ID NO: 25462 - DNA, 1953 bp, Emericella nidulans
agctctacgagctgaatattcgtggctgttggtgctttgcgaaccggacagtcatggaatcagtccgccctctatatattaaggacactcctccaccgcgcaataccggagcatcaagcacacgcgcgcccggcaagcgaaaggtgtatggcaagcgacgaactgacgctccaagagctgtctttgaacaacgaagccccgcaaagaccctggatgtagcggacagcgatgctgtgcaaaatgccgttaatctactccaggccaagttggccgattttaagattgacgaaacaaaaataccgaaaaaggttcaggaagtgtctaagcagaaggatatccataaagcggcaggagcaggtctttgcaagagtaccgcaaatgagacgcctatatcaaaccctgagtcgctgggggacactgtcccagctcagcaacccgtcctgaaagctaccccaagacgcaaaaagaagtatcagaccatggtggaagtgagagtcaccccgagggtaatccctaaagacccgcaaattcctcctaccctggacagctgcaaaaggagcacaagaaagatcaaaccgttgcaaaggccctcatttgagtatatttcagatgaaaaagcaacttcatatgtccgttctatactggaccagaccttgtccccagcagcagcgcagggtattcaaaaatttgattcctgggcagcgcgtgcgggggagatgctgcaggtcgtaaaactggcagaaggctcatacggagaggtctacaagctcaggctacgagaagacatatgccagaaggagatgtccagctccaggttggcgcgcctaagagcgtgcggcaatggcgttttcaaggttgttcctttacgagcccagagcgggcctggctcgaaaaagtttaccagcatcgaggagatcgtggcagaagtcaaaatgttaaagtacctggaccctatacccgggtttgcacgcttcagggaagtccacgttgtccaaggccggtttcccgaagctttccaaaaagcctgggaccactacaggaaaacaaaagatgattgcctcaaccctaacccttcaagtaaacgagcctatcctgattcgcaaatttgggctattattgagatggatgatgctggttgtgagcttgaaaagttttcttggtcatcgatcttccaagtctatgatatattttggggagttgctatgtccttggctcgcgctgaagaatacgctttgtttgaggtaatgtcccaacatcaggaatatgtttggattatatctaattgaaaacagcatcgcgatctccaccttggcaatatttgtattcgaagtacacgaccggacggtctcatgcacccgccgtctgactcggagatcatatgccaagcgtactcaagtggttttgggctgagcacactacagacaacacttattgactattcgctttcaagggcggagctggtagtcgatgagacgtcagagacgctggaggtgacatcttcggatctggacaagaagcagatttttgatgctatcggccaagacgaagatgatgcgctcttgagagacacttatcgacagtgagtgacctggcctttcttgacactaacggttgtgctagggcatagtactaatcgtttggatagcatgcgtgcccaattatacaagggcaacccaattgacactgaaaaaacacccgatattcctggaatatgggcggaatatgcaccacgaacaaaccttatctggctccgattccttcttaagatgctgctgaaaaaccggaagcatgaaacctcagagcccccatctcaaaaccaacggcagccccttgcgccatgttcaccaaacaagaagatcaagaagggagccaagtctgacaagaagaagcaggacgctattaatggattgcagcttgcctcagatgcccactcgcaaatagtacagctgaagc

SEQ ID NO: 25463 - DNA, 629 bp, Emericella nidulans
ggatcgggaagagagccagttcgtccatgtatgtgcattgagacccttctgttgcacttgcaaacttcgcctttttttgtcctaatataggcccgaaatgcacaggactgctaccgcaaactgccacgctcctggctgaagcccacgatggccaacctcgagcacttgacgttatactctcgcctacgtgccggtttctgcccaaaactagacctgcgtggcctgcatttcccgcgcttaagatcgctttctctcggcaactacgccttcatgcatgactcgcagctagactggattctttcgcacggctcgacccttctagagctctacctggatcaatgcactatcatttatgaggcagcactctcttttaatgtcgacgagccgatccccgtttcggcgaccatcctttccttggaagactttcacccgcatccggacctggtggtcgaccgactctacgcctcgtacagcggacgctgggccaattactttcgggccttccaaaacgccctcccccatctacggcacttccggtttggattcacgccggggaggtggaccaggaggattttgccgtttgaacaagacatgcagattgcgattggattcatcaacagtgctacatg

SEQ ID NO: 25464 - DNA, 603 bp, Emericella nidulans
gtcaacacctgcgagccaattaaggatctctactgggacgtgtggaactgtaacgcgactggtgtctactcaggcgtccaaagcagcatgaatggcaatggtgacgatgactctaaccttgacaaaacattccttcgcggaattcggaagactgatgaagatggtgtcgccgggttcaagactgtctttcctggccactactccggccgcacaacgcacgttcacgtcgttgctcacctcaatgcaacacttctgcctaacaatactcttacgggtggatacgttccccacattggacagctgttcttcgaccaagacctgatttccgcggttgagacgacctacccatacaacaccaacaccgtagcgatcactgagaatgcaaacgaccacgttgttatagtcgagactgaagatagcaattccgacccgttcttccaatattctctgcttggtgactccattgaagatggcattttcgcttgggttactctaggagtcaactcttccgttagccacgactcaactgtttcttatgccgccactctgatctctgatggaggtgtctcaatatcaaatgccggctcgggtgtttctttctga

SEQ ID NO: 25465 - DNA, 246 bp, Emericella nidulans
acctatcctcgatcgcggagagtgaggagggacgttatttgagttccgacgacgactatcctgacgatgaggaaaccggactcacagcgagcagagacgccagcggcgtcgacgacggaaacaacggaggcagttggatgctcgcattgcaggcacaaagtctcgcggagatccgttcaatctcagttcagcagatcggactgttatcagcaggctgctggttaatgttggattgattctgttatg

SEQ ID NO: 25466 - DNA, 497 bp, Emericella nidulans
acagcctcgaactcctccgtggcaaagccggccgcgccttcggccacatggccggcctaatgtgcacgatcaagggtctccctacaacatacaacaaagatctgcaagagagtgtcgagcccctcctcgatcacatcaagaccgtcggcgatagcatccagattgcgactggcgtgctgtccacgctgaccactatcccagagaagatggccgccgccttggcacctgaaatgctcgccaccgagttcgccgactaccttgttcgcaagggcgtgcccttccgcgagggccaccacatttccggccgcgtcgtccagctcgctgagaagcacggcgttcccatggaccagcttagcctggagcagctcaagagcgtggatgacaggtttggcgatgatatccaggagtgcctggactacgagcgggcggttgagttgaaggatgctattggtgggtgcagtaagagggcagtgctggagcagacttcggtgctcaag

SEQ ID NO: 25467 - DNA, 612 bp, Emericella nidulans
gtccagacggccaaccagaagcttctgcatagcgagctacagaccctgttgaagacgctttctatatctgtaaacgatctgcaacctttgaaagaggcatcgcttagcaatattgacgggttaagagaaaccgacgttgcgctttctactctatacaaagctatgttgacaatcgaccccgatatctggcataacaaaaaacgtctggatgctgctggaggacatggtaccgtgggagtgtacgccgacactgagatcggtcaaatgcgtgctatcaaggacaaaaaggaggagtatcgattctattcgtcatcatttcttcaacggctcagacagttcatgggcatcgcctatcaagtagcggcacagaagcgggctgatgcggcagctaattcgcagaaggatccgatgaagttagacggctcagcaagggcttacgctcgtcgggaattatgggtttacagtgcgttgaccctatttgctagggaagtaagtgggccagagtggcagggtttgatcactctatacgaacaacaagccaaacaatcataccaagctgaataccgtgacaacaacatggcatggaagcgaacggcaaggaaaatgacgggc

SEQ ID NO: 25468 - DNA, 2159 bp, Emericella nidulans
cttgtctgtgtcctctgtgatatcatacctgtatatatctatcgatctctgtcctttactctagaccatttctctcgggttttagtattgaatttgaccgtttgcattctaatgcctcctgccgccatggaaaaggacccctccactggcggcccactaacgaactctccagctgaacaatacctgcgctcccccgcagaatcgaggtccacctcagatacagcgtcgatcccctcgtccaatcctgacagcgagaagttcgcacctatacagacaaaccagtccacccgcagtcgcaatcagacgctcacccgcagaggtaccgctggcagcaggccgctcactgacgatgagatcacccgcgcgctgtcgcatcgaacgagctccacataccagggcgggtcggaagataatgaggaggtagccaggctggtctcgcggatgttcggccgtgagcggaaggccaattcagacgaagagcagacgaggcatcaaggtgttgtatggaaaaacttgactgtcaagggcgttgggttgggcgctgccatccagccgacaaacgcggatatctttctggggctgccgaggttgattaaggggcttcttacgaggggtagaaagggcacaagtgcgggcagtgcgccgttgaggactattcttgatgattttacggtgtgttcttatagtatgatgagtagagcggcgtaattgtcaaagggctgcgtgcggccaggtgagctactattggttcttggaaggccagggtctggatgctcgacctttctaaagaccattgggaatcagaggtctgggtataaaagtgtcgaaggggagatacattatggaggaacggatgccgacatcatggcggacaaataccgttcagagggtaagctttagtcttttttggttataatgcagatactgaccgaacagtcttgtataaccccgaagacgaccttcattacgctactctttcggtgcgagagactctgatgttcgcgctgaaaacacgaaccccggacaaagactcgcggctgcctggagagagccggaaggaatatcaagaaacctttctgtctacgattgccaagctattctggattgagcactgtcttggaacaaaggtcggtggagagatcgtccggggtgtatcaggaggtgagaaaaagcgtgtctcgattggagaagccctggtcaccaaagctagtgtacaatgctgggataattctactaaaggacttgacgcaagcacagcttcagagtacgtgcagagtcttagaagtttgaccaacatggcgcacgcctccactctcgtggctctctatcaagcctcagaaaacctgtacaagcagttcgacaaggttctgctgatcgaggatgggaggtgcgcatatttcggacccgcaggtcgtgcaaaggcctactttgaagaccttggatttaaatgtccaccccgatggacaactccggacttcctaacgtccgtcagtgatcctaatgcgcggcgtgtgaagaaaggctgggaggaccgtattccccgctcagcggaagattttcaacgtgcgtaccgtagcagcgaagactacagagagaacttgctggatatagaggatttcgagagagaagtcaaggaacatgaggatgaacaggaggaggctcggaggcgggcgccgaagaagaactatactgtgccattccaccatcaagttatgattctcacggaaagacagttcaagattatgtatggtgacaagggaactctcattgggaagtgggcgattctcacctttcaggcgctcatcatcggaagtctgttctacaatcttcccaacaccaggtaagtctgaaggcttatatatcatatcagagctaacagacatagtgctggcactttcactagaggaggcgtgatgttctttgtgctgcttttcaacgctttgctcgctctcgcagaactgacggacgtctttacccaccgtcctgttatgctgaagcataagagtttgtaaggaccagaaagtcaacactcacacttctcatgctgactgcgattttagctccttctatcgaccttctgcctacgctgtcgcccaagtagtggtcgatgtacctataatctttatccaggtcacgctgttcgagctgatcgtatactt

SEQ ID NO: 25469 - DNA, 1139 bp, Emericella nidulans
gtcagtcaagccctgaaggtacgtgtctacgcggcgttcacatcatctatcgccttctataaaactctccgttcatcatgtccttcccgccacctccaggtcaccaaccttcgtcgctccctccgcgaccacctcaatcagcaaacacaaattcacaatatgcgaacagcggatatggcgggggctcgcggccgggcttcaacgctgctatggcgtttgcgcctcgttccgtagcctctcaacagccctaccgtaccagcagtccggtcgtttcggctgcgcccactgcgtcaagcggttattccactccaacaagcaccagctacggcaactactactcgcaaccgcaaccgtcatatcaagcgggcccttcatattatggtgccgcgcagtacagtaatgcgggtacgacatacggtcctacggtccctcacattcagaaccccttcgcgccgtcgggcagcgacccgagccgcggacgaaactctggcctcgacgccgagacagaagcgcaaatcgcgcaatggcagaccgcctatgccagtaaggatgatgcatctaccatgagtaagggcgccgcccgtcgagaagggagtaccggcacacctggcgcaactactgtatatacctcgtccggtactacgccgacctctacaacccccgccgcaggagtcgagtcacaaaagaccgtcgtccgctctggcggtggccagacctggaccgacccgaccctgctcgagtgggatccggcccatttccgtctttttgtcggtaaccttgcgggcgaggtcaccgatgattctttgtttaaggcattctcgaaatacacatccgttcagaaagcgcgcgttatccgcgacaaacgcacgcagaagagcaaaggttacgggttcgttagtttcagcgacggcgatgactacttcaaagctgcaagagaaatgcagggcaagtatattggatcgcatcctgtcctcctccgacgcgcaactaccgaggtccggcccgtttccaatacaaagaacaataagaaaaatgctggcaagggcggtggttctggtggcaaccagggcgctaaggtgaagcacgatggaatcaagaagccaggaaagactagaggaggcctgaagattctgggttga

SEQ ID NO: 25470 - DNA, 854 bp, Emericella nidulans
gtatcatcgatcttgatccgtggttagagccttttcgggaggctatcaagcgccgattcgattatgttgagagctggatcaagaccgttgatgaggtggagggaggtctcgataagttcagcaaggtgagtagactatcaactatccagttgtgttccccattttctctataacttgtgtgcaacggctaattggagagcttcttccatggggacgatagggctatgagacattcggcttcaatgtcagcgagacgggcgacatcacctacagggaatgggctccaaacgccatagaagcggcgctggttgggtgacttcagtacgtctgtctggcacctggggtgggtaaaatcgccagttaaagcacgttactaagactggcagacaattgggataccaaggcgaatccaatgacgagagacaacttcggtgtttgggagattgcccttcctgcgaagaatggcacgccggtcataccgcatgatagtaaggttaaggtatgtttacggcatgcagcttcaccaccgtgggggttctaatgctgacttcctacagataactatggtcacccgcagcggagaacgtatatatcgtattcccgcatggatcaagcgtgttgtgcaagatctgaatgtatcgcctatctacgaatctgtcttttggaacccaccaaaggcagagcggtataactttcagcatgcgcgccctaagaaacccgaaagcctacggatctatgaagctcacgtcggtatctcgtccccggataccagagtagcaacatacaaggagttcacagccaacatgctccatcaaattaagtacctaggctacaacgcaatccagctcatggcg

SEQ ID NO: 25471 - DNA, 862 bp, Emericella nidulans
atgtcaacctcaagcgagccctctcccatcccccgacaccccatctctgacttgcgcaaggtcttccactacaccgacaccatgacccgcagtccaactcggccaaacgacccctacagctacgcacccggctttggcaaccggcatcaatctgaagtgattcccggcacgctcccagcaggacagaataacccgcaggagccgcggtttgggctctatacggaggggatcacgtactcggcattcacggcgccgaggagagagaactatagcacttatatgtaccgtgttagaccggctgctgcgcatggtaagccctcccactctgacttcgcgcttgtttggagctgattaagcgctgatggcgtggtatagacgggtacgaaacggatattgagcataaatcccacatcgaaaatagccttctcaccctgaaccagcggctatgcacactcccttctcaaggcgaatgggcgccgttccctctgcccgatgttactaaggaagggaaaattgactttgttgacggcttgcatacgctcggtggcagcggcgacccgaacttgcgcgaaggggtagcactgtacgtcttcatgatcaacgcggatatggaccatagagctttctgcaatacggacggggacttcctaattgtacctcaattgggaagtttggatatccagacagagctggggatgttgtttgttcagcccggcgagatttgtgttgtgccgcggggggtgcggtttactgtacggctggggaaagaggatcccaattatggccacagcggatgctctggagcggatgccggtgatgccggcaagggcaggggctacatcgttgaggtctggggctcgcg

SEQ ID NO: 25472 - DNA, 777 bp, Emericella nidulans
atgcttctgaactggcataacctcatcgcccagtccaagaacgacatcgcaaagcttgtcgtgtatgaaacaggtaagcccatggctgaggccgttggtgaggttgactatgctcttggctttgcgtggtggttcgcgggcgaagcagagcgcgttcgcggatccattgcacagccgtctatctcagagcgacgcactttcgtgatcaaacagccgattggggtctgcatcgcgcttgtgccgtggaactttccagtggccatgatcatccgcaaagcagcagcggcattggcggcgggttgtaccgtcgtgatcaaaccgtccccggagacgccactcagtgtgctggcgttggcagatttggcgctgcaggccggctttggccccggagtgatcaatgttctgaccacagacaatttgaatactccggacgttagtgaggcactctgcaagcatccccttgtgcgcaaggtgacgttcactggaagcacggctgtgggacagctgattgcaaggcattgcagcgaggggctgaagaaggtgacgctagagctcggcggaaactgtccgtttattatctttgacgacggggatctggagcaggcattagctgctttgatgattcttaaatggcgcactgccgggcaggcttgcacccatgcaaatcgcgtgtatgtgcagagtggtgtctacgacacgttcttgcgcatgattgtcaatgctacaaaacagcaaaaaaacggccatggggcaagccccgggactaccatgggaccc

SEQ ID NO: 25473 - DNA, 732 bp, Emericella nidulans
agcgcgagtatcgcgagggacgccatcacacttctcaaaaacgaaggggacttactacccctgagacgtaatgactcattgaaggtctttggcacagatgctggtcctgatcctcaaggcttaaactcctgtgcagacaaaggctgcaataggggcgttctcactatggggtggggcagcggcacatctaaactcccgtatctcatcacacctcaggaagcaattgccaacataacccctacagcagagttctttattaccgatagctttccgtcgtccgtcgatgcaaacgacgaggacattgcaattgtcttcatcaattccgactccggcgaaaattacatcacggtcgacggcaatccgggagaccgaaagacgtcgggcctacatgcatggcacaacggtgatgaacttgtcaaagccgcagctgagagattctctcaggtcgtcgtcgtgattcacacagttggacctataatcctcgaagaatggattgaccttgacagcgtcaaggccgtcctgatcgcccatctcccaggccaggaagctggctactctttgacagacgttctgtttggtgactacagcccgagcggccatctcccctacacaattccttatcaagaatcaaactatccgtcaagcgtgggcctgcttcagcaaccgtttggccaaatccaagactactacacagaaggcttatatatcgactaccgccatttcctgaaaggg

SEQ ID NO: 25474 - DNA, 786 bp, Emericella nidulans
aaccaaacttgggaagagaaattgatcaagaccgaacagatccacaaagagcgtgaagcggctctggaagagcttggtatcagtattgagaagggatttatcggtttgagtacaccgaaaaagatgccgcatttagtcaatttgagcgatgacccgttgctagcagaatgtctagtatataacctaaaaccgggagtcactcacgtcggaaatatggatcaaggaaatcacgtcgagatcagattgaacggctccaagatcttagctgatcactgcaagttcgaaaatgtggataacgtcgttacaatcctgcccagcgagggggctgcagtcatggtcaatggagtgcgcgtcgacaagcccaagcggttaaagagtggttatcgcatcatcttgggtgactttcatatctttcgattcaatcacccccaggaagcaagggctgaacgagtagaacaaagcttactccgccattccgttacgactagccagcttgcctcccctgcgccgggcaaagctcacgagagaaacgttagcaaggcttcagatttggactgggattcaagcagagctgattctccaatgggtttccaacgtgggagagagtcggactggttttatgcgcgtcgtgaagctgtgagcgcggggatggatccggataggcttgcttatatgcctgatgatgagctcgatgctctgttcgagaatgtacagaacgttagggcaacccgcgtgggtattggagatgaaaagactcggattcttaagtcatatccattccgataa

SEQ ID NO: 25475 - DNA, 671 bp, Emericella nidulans
gctcatcaaagactgcagctgccgctgccgccgctgcacatctgggtgatcaatccggggccgacttattagagcagcgcatttcgtccgaggaagaggaggatactaattacacgcaattcgacctttcaatagaaacagtcaacgtaacactatcatttggcaggtggatcaacggcaaaggactccttcgcgacgttgaggtgaaaggggtgcgcggagtggttgatcgcagatcggtgttttggcctgatgaacctcgcgatcctaaatcatatcggcacgagcataatcccggggacttcgaaatcgactccttcaaaatgagcgacttgcttgtgaccgtataccagcccaataactttagaccattctcggtaagcatattctcctgcgatcttccgcagttgaggaaacagtggctcttctacgactttctatcggccaatatgatgtccggatcctttgacaactctttatttactattcatcctcgccaaactcatagcttcactggcgcgcaacttggcaatgaggcagaagaggacggcaaaccgaccccttggaagaaacacagcaggattcgcattgatggattgaatattgatcatctcaaccgtggggtgcagggtccatttggatggattcatgaaggcaccgtggacaatgtg

SEQ ID NO: 25476 - DNA, 318 bp, Emericella nidulans
gaagacatgctaattggataacgtacagtcatgggtaataagatcacctaccactcgcccagtcgtgggtgctcgatggaactaggcgccgccattacagtccttgttttcagtcagtacaagctgcccgtgtcgacatccatgtgcattacaggcgcgactgttggagtcggtctgtgcaacggcaccctcaaggccgtcaactggcagcgggtgggactgttgggactgggatggatcatgacgatccccattgcaggaacgctggccggatgtctgatggggttgattctgaatgcgccgcattttggctcatag

SEQ ID NO: 25477 - DNA, 706 bp, Emericella nidulans
atggccaagacatatcgtattgctactattcctgccgacggaatcggtccggaggtgattgacgctggtgttattgtcctcaaggccctggcagacaaactccaatcattctccctcgacttcacacaccttgactggagctccgagaccttcaaggcgaccggcaagtatattcccgacggcggactggaagtgctgaaaaagaacgatgctattttatttggagctgttggtgcgccaggtaaacaaaccccgcaatacacgttattcactataggaaagaaatgaagtacagtactaacaagtggatgtagacgtccccgatcatatctccctctggggtctccgactcgccatctgccagccctttcaacaatacgccaacgttcggcccacccgcgtcctccgcggtacacagtctccgctgcgcaagtgcaacaccggagaccttgactgggtgattgtgcgtgagaatagtgagggcgagtacgctggccaaggtggtcgctcacaccgcggacacccgtgggaggttgcgacagaggtggccattttctcgcgccagggtgtagagcgcatcatgccgttcgcgtttgagactgcggccaagaggccaaggaagctgttgaccgttgtgacgaagagcaatgcccagcggaacggcatggtgctgtgggatgaggttgcgaacattgttgccaaggac

SEQ ID NO: 25478 - DNA, 935 bp, Emericella nidulans
atggctgccatttctttgtcctccgaccccgagtctagagagaactatggcccgtacgttcccaacatcggctgcaccatcccagggacagaaaagccgatcacctacaacgataaagctgcgctgcgcgaagctttcgagaaggccggctccaacctcgccgccttcctcgtcgagcctatccaaggcgaggcgggtatcatcgtccccgatgacgattatctgcagctggccagatcgctgtgtgaccagcataatgtgctgctgatttgcgatgaaatccagaccggtattgcgcggacaggaaagctgctctgccacgagtggagcggaatcaaaccagatatggttttgctgggcaaagcgatctctggtggcatgtaccccgtgtcctgcgtgctaggacggaaggatgttatgctcacggttgagcccggaacccacggctcaacctacggaggcaaccctcttgcctgcgctgttgccatccgcgctcttgaggttgttcaggaggagaacatggtggaacgcgctgagaagcttggccaggccttccgcagcggcttggaagccatccagaacccgatcattcagacggttcgtggaaagggcctgctcaatgcgattgtcatcgacgagttcaagaccaacggacacactgcatgggatctctgcatgctgatgaaggaaaagggtcttctggtaggtatcaaccctccgttcattcgaccaacgctaactcggccaaggccaaacccacccatcagaacatcatccgtctagcaccgcctctcgtcattaccgaggaagaaatcgcaaaggcgctggaaatcatcaaggccgccgtggctgagctgccgaatctcaagggtgctgcggaagataaggtcgtccctccgccagagaagaaggtgaagattactctcgagaactag

SEQ ID NO: 25479 - DNA, 579 bp, Emericella nidulans
aggctcgcagaaattgaacaatctcgccgggtgcgctcagtgcagcaggcctctggtactttaccggcggattttcctttcgagaatcgagagcttgttgcctttgaagttcaagaggccgcctctgaatgggagagtggttatggcaaggagaagaaatttcagaggcctaagaacaagccacgaacgtcaagataccaaactaaccctggcggtgttggtgccttccgcggtctcgttcgatgttaccaagggatttccttcttccgcgcaatcttctatttgatgttcaggtgggtgacagtcgcgtccgataaagctttatcccgtgttgggattactgcccggcctcagtgggttaaagctattctacggagcaaagctgcgcaggataactcgggcaagactgaacctgagtctttggacttttggatacttacggatgagggagagctagagctgcccgaaaaccacgaattcgacgtcgaaaaagagatgagaaagagggagcggctgaacgcgggtgactggagtccgtctgatgagcaacgcctagatgagaagctttataactggtaa

SEQ ID NO: 25480 - DNA, 630 bp, Emericella nidulans
ctctttgaggctggtatcgagaagaggtttaaggatgggggtgttacaattgcgagtatcgtcaatgtcatgaatacgccttcccccgaggacgaggcggccggtatcgatgaagatgggctcttcaaccaggccagccagttcgtcgggtctgtcttcagccgtaagttgcggcatgccgtgaactcctggctccctgcgcgtgaaaccgtgcaagccgcctacaccgaccggaagaacgtgcacgccagcgggaagatcatggttctgcctcaaggcggcgtgccctggaaggagcacctgtacaactttgagaaggaggcaaaggcggctaatattaacggcaatgcggaggacgccgaggttgtgtatgtgctgtacccagagagcgcggccgaagggtccaagtggcgtgtgcaggctgtttccgtgaatgaggggagcttcgtctcgcgcaagcctttgcccgagaagtggcggggtgtcagggatgcagatctcgatggagttcttgctggtgaaggggcgggtatccagagggggcggtgtttgtgcatgcgagtggattcatcggcggccataagaccagggagggggcatttgctatggctgctaagggctctggaatag

SEQ ID NO: 25481 - DNA, 1003 bp, Emericella nidulans
cgatgtacacaaaggttaagcaaggaggcggacccgcacaccaacgaatatcatatggcgatctcttgcatcatgttacctttctatctcaggtacgttctccattgacatcacctcctacgacacgcatactaatcggaacagctcttccgcggcgaattcatattccctcctgaaggtctcactactaatttggagaacaccttgcggaccctcgagaaagatcaagtcctggcaatcaccagagattccacgggcgcaccacagttcatcgaactctcagaaacagagcgtcaatgcggacgcgagaactacgatttctactgcttcctcatttggccgttcattgaagcctcgtggctcggcactgtgtccttgctagggcttactccgcccttaaacggtccaaaggacgtatggatcaacttaagcaaggcgcagaacaatgcacaattagtatgcagctctattccttcaagtctcagccctcgctaacatccatagctcggcaaaactctctaccaccagggtgacctctcctatttcgaagccgtcaacaaagaagcccttaaaaactcgtacgaccgtttcgcagaggaaggcatcatcatcgtcgcaaagagcaaagaaaaccgctcgtccacgaaaatgagactcgccccagagtggacgccagagcgggacccagataccgggaaactcctcccgcaaggccgtctttgggactttatggagttgattgcgaagtctagacgtgaggggtacgtgccttgtttaactattagctttcttatcgtttaagccctatcgtgcatgtaagctgattctgtgcaggaaaaaccgccgagacggcgccactgtttcttcgcgggtcctgactatgtctgacaatgttggccggacgttgttcgagagcgcagagagccgtgcgcccgctactgatgttgatgtcgatgtgtcgaccagggcgccgcggaggaaggcacttacatctaagctataa

SEQ ID NO: 25482 - DNA, 429 bp, Emericella nidulans
atgccctacaacactcgtcgcaagtccttgtctcttcctctattgggaattcatcttccaaacacatctcgccgctccccttctacatcaaaaccgcctcacgcgaccgacgagaatactcctccttccaaaaaggttaagagatcgcacgactcggcgtcgacgtcgccagagcctacagaccgtggctcaaatccaagcagaccctcggccactgttcgtccatctggtcgacgcgcgacactggaacaaacacctccccagtcccctactgacggtggtgtcgcatccaagatcgacctcgatgggataaacgacgatatcgtggtgggcgtgattgagcagttggaaaagacggctaatcgcccacatttggtcaaagagctggctgcggtcctcattacatctaacgataatgtggcaaagtaa

SEQ ID NO: 25483 - DNA, 1144 bp, Emericella nidulans
atgaggttcgcttcccagggtgggcttcgcccactgctctcggtatggcttgccgtttcgtattttcttccgctcagtggcgcatatcgggacgtgtcagacgcggccctaaaggcgcttccccggccgggaaaggactttgatatccacgacggcgccatcctctcgcccattcttatccctcgtgtcccaggaactgctggatctacggcggttcttaatcattttgtcgatttcttccggaactcactcccgaagtggaacgtcgagtttcagaactcaacttctacgacgcctgtgtcggatggaaaggaggtcccttttgtgaacttcatcgcctatcgggatcctcccttcgcagccaagggcgatgtgggaagattgaccctcgtcgcccattacgatagtaaatacgagcctaaaggctttatcggagccattgatagcgctgctccgtgcgcgatgattatgcatgcgatgcgcagtatcgacgaggccttgacaaagaaatgggaatccggctctcctgacgattatctcgagtaccacggaatccagatccttttctggacggcgaagaagcctttaaagcatggactgacactgattctttgtatggggctcgctcacttgcgcaacactgggattctgaagtaaatccagcaatatcggtctacaaaacgccgctttcatccatatccctgttcgttctcttggacttactgggttccaaaaacccaataattcgctcttattatcgaacaacgcactgggcctatcagaagctggcgaatgttgaacgtcgccttagggatctaaagatgttcaagtcgaacggcgagacctggtttcctgacagctcaacaaatgagcggcaattatcttattatggtagcttgggggatgaccatgtcccattcctcaaacgtggagtggacgtcctgcacgtcatcgactactcgcccacgcgcggtggatttccaagtgtctggcacaccatcaaggacgatgctgaacacctggatatcgacacggtagaggattggagtcttctaattgctggttttgctgccgagtggatggaactggaaggcttcatgccagaaacaaaaacaaaaaagcgcaactctgacaagactgaatt

SEQ ID NO: 25484 - DNA, 876 bp, Emericella nidulans
atggtatttaccaaaggtgccgtggagcggatcgtcgacgcctgcacgacggctgtttgggacaactcatcggctcctgtggctctaaacgacgagatgcgcagtcagattctccagaacatggaggaacttgccaaattgggcttacgcgtgttggcactggctcatcggccttacaacgagcaaggccgaacccttgaaggatctgatctcaaccgcgatgatattgagaagaacctctgcttcctcggcctcatcggcttgtatgacccgccgcgtcctgaaactgcggggtccatcactgcctgctataaggctgggatcacggtgcacatggtgacgggcgaccatccagggacggctaaagcaattgcccagcaggtgggcatcctcccggcagatatgtcagtcctcggaacagatgtggccgaggccatggtcatgacggccgctcagttcgatagactctccgatgaagaaatcgatgacctcccaaccctcccacttgtgattgctcgatgtgcccctcaaacaaaagtacgcatgatcaacgcccttcaccggcgcggtaggttcgcagcaatgaccggtgacggtgtcaatgactcaccctctctcaaacacgctgatgtcggcatcgccatgggccaagccgggtcggacgtcgccaaagacgcctcagacattatcctcactgacgacaacttcgcatcgattctgaacgctgtcgaagaaggccgccgcatcttcgacaacatccaaaagttcgtgctgcatctactttcagagaatattgcgcaagcatgcacactgctcattgggctcgccttcaaagacctcgacggcaaatccgtgttcccgctcgcccctgttgag

SEQ ID NO: 25485 - DNA, 1316 bp, Emericella nidulans
atggttcagctcactcaaagtctccttgtcggcctcggccttgcgggtctagccagcatcgccgctgcccatcccggccatgatgttgaggccgaggccgctgagcgcgcggcctttctcaagagcgttccagtgcagggccgcagccttggacactgcgccgcgaagctcaaggcacgcggcattgcggagtctaatgttgcccgtcgtgagaacgccgtgcagcagctgcgcaagagggctggtaacaccggtacgtatgcatagatgaccgagaacaggcaccaactgataatgttccaatcaagatggccgctacctcaaggtgcgcgatcttgattctgtgctggccacggaccacgagtcgaccaagaacgtcaccctctcgaccgaccccagcgtcctatttgcagacggcggggcttgtatcgtgcagccagaggttacccaagggccgtactgtacgtaccttcctcctttctgaccaaactatgacggggctaatatggacaagatatcgccggtgaactcgtccgccgcaacgtcgccgaagaccaggcgggtgtgccattgttcttggacctgcagctgattgatgtcaacacttgtgagccgctgcagaatatctatacggatatctggcactgcaacgccactggtgtctactccggtgtcgttgccaacggcaatggcaactttaacgacgagagcaactccaatacgaccttcctgcgtggcatccaatccagcggctccgatggtgtcgtgcagttcgagtctatcttcccaggccactacaccggtcgtgcggtccacatccacggtacaactccccacgacccccacagtgctatcatcaactaacattgagtcaaacagtggtcacccaccccggcgaccagatcaaggtgctccctaacaacaccctcgctggcctctatgacacccgcgcctcccatgtcggccagatcttctttgatcaggacctcattactgctgttgaaaagaccagtccttacaataccaacactcaagccctactcaacaacagcaatgacgacatcctcgcgaccgaggccgagaccaccgaccccttcgttgagtatgttcttctgggtgacgatgtgtcgcagggtgtcttcgtctggacttcactcggtatcaacagcacgcgcaatgaattcaactcgcctgaggggtactggactgaggatggcgccgaggtgaacccgaactttagtatgaacatggctgggatgtccaatctcctgattcctaccggttctgcgggccctgctgccacgtcggccgcttag

SEQ ID NO: 25486 - DNA, 390 bp, Emericella nidulans
gcattcgcatcaaggccaagtccggcgagaccggtgagatcaagggcgtcacctactctggtatcagcctcgagtccatatccgagtaggctccccttccagcccagttctgaatccagctctaacctcgtccagttatggtatcctcattgaacaaaactatgacggcggtgatctcgacggcgaggtgacctcgggcatccccattaccgacctcaccattgagaacatctccggctccgcgccgttgactcagatggatacaacattgtcatcgtctgcggtgacgacgcctgctccaactggacctggtccgacgtcgaggttaccggtggtgaggattacggcagctgtgagaacgtccccagtgttgcatcttgcagcacctaa

SEQ ID NO: 25487 - DNA, 318 bp, Emericella nidulans
atggcaatcaacttcaaagacggcgtcatcctaggtgcggacagtcgaacaacgactggagcttacatcgccaatcgagtcaccgataaattgacgcaagtaaatgataccatttggtgctgccgatctggctccgccgcagatacacaggccgtggcggacattgtctcctaccacctgaatatgtactccatcgtcaataacgagccgcccagcacacaggttgcagccgcgctgttccaggagctatgctatgagaacaaggacatgctaaggtatgccattcttgtgccatctcagaatgcattgtttgattaa

SEQ ID NO: 25488 - DNA, 258 bp, Emericella nidulans
gcgcagccgcatacaactataacgcatcatcttgaccttgcggatgataaggggctggttcttatgcatggccaggtgatgcctgactcgggagtctcgactgccgaggctacgtggttagttagctgcgtgcagcggttctacgacttcggcggccaggcgagtggacgaaagggggaacttctccgcatgtttacccagggcgatgttcagaactttaggattgaagagttgatggctgaagcggagaaattgtag

SEQ ID NO: 25489 - DNA, 272 bp, Emericella nidulans
gcaaggcgctattccgtctccgaccacctttacggactatctatgggtcagcgacgagctcctggcctcgacattccggcgattcgtgagcggacagcgacggtatgagagtcgggtcccgggcccattggaagccaggaggaggctggccaagcggaggaatacagcgcttgctagtctagcaggctctggacctggggatgatattgcgagcttgctgggaagaaatggacgggagcatctgaaatggagtgaaccggagagaggtttcg

SEQ ID NO: 25490 - DNA, 517 bp, Emericella nidulans
gtcaaaatgccattctccaggactttgagaccgcccggtccattgacgttgaaggtcgcctctgggatgcacatctcaagatcaacactcgctttcgaaaattactctcccgcgtgagttacttcatcttattcctctcgttacccgctaatgttgggcgtataaaaatagtttcgtgacgacaacgagaagaaaaagaagccggtggagcgcagaaaatttgagaagcactacctggagttcatcaaatcgagccagcgattctaccgcggctacatacaacaactggcatcccacttcgggggcatttcggaattggaaaaagtcgcggggaagttcaacttcgaacgtgagcactcacctgcccgcaatttgctgttttagtcgctgaacaccacagtagacctgtctgcgcgcctcccatccaaacctctgaatctctacggaaatccatcctccgatcatgccatgcgacacttgttcgcctaggtgacctctcccgttaccgtgaaacgga

SEQ ID NO: 25491 - DNA, 622 bp, Emericella nidulans
atggcagacgactttgatacaggggatatgttcaaggacccagagggcttctatccgcctgaaaaagaacctacttttgcagagcacaggatgctctcaggccaggtagtccgcgtgcgcctggttggcagccatcctctatatgtagctattcccgaattggctcatggtttttggcactaacatctctatggagggaaatatgctctggaatgccggccgcataagttcagaatatatcgagacgcacgcccccacactcatcgctggaaaggacgtcctcgaaatcggcgctgcggcgggagtgcccagcattgtcagcgcaattatgggcgcccggaccactgtgatgaccgactaccccgatccggatctcgtcgataacatgcgccagaacgccgatgcctcggcgtcgatgatacctaccgacccgccgtcgtcgcttcacgtcacaggttacaaatggggcagtgatgttgagccgctcaaagcgtatttacctgaagagtcgagggccgatgggtttgatgtgctcatcatggcggacgtcgtgtacagccatcgggaacacgggaatttggtaaaaacgatgcaagagacactgaagcgacaaaaggacgct

SEQ ID NO: 25492 - DNA, 1436 bp, Emericella nidulans
atgagttatcaaattggggtgtatcaggaggaactcgagcacaaatggcgacgcccccgaaatggacgtgaaagagccggtggtgcttgcggtccgctttggcctggcagcaccccgagggaaattgggaagctgatgagtgattggccgatggttgcgggttactgtaaagagctgatatcgcggttggaggatctaaatggtgaagggaagggacttgttgagctagatgagggcgggatctttattgacggagtcggaaaggccggctttgatatcacggcaaagagtgagccgtggagacgggggtactttcaggctcttttgggggctgcaaaagcagcagagaaccttgagggttggctgactgatcggaaacaacgcgtttcagcatcggcagagtattttgttggcccatcgaatccccgtccgaagcctgtaccccttggtcagaccccaccgcgtgaggaggactctgagccggcatctcctagtcctgaggttttctacatgaagatcctgacgacccgcggctttaacacaggccagaaaattgatgccgcactcgcatacgccgactggctggactacaagggtttgcaaagcactgcggcggatatgtacaaatgggcaatagatatcgccgcgtcaggggcttccatggatgccacgaaggtggtagatctgaagacaggcgtcatcaatagcgacagccaaactctgccgtctgaaaacatcctccgggtctcaaccgctctcggagtccaccacgcccgacacggaaacctcccaatggccctctcaattttcacctctgtcctcaaagcccgccgtgccatctctccacctcctcccggcaccatcgttcctatatcttcttccatccctaagccaacgaatgacatcttcgtttccttcttcaacaccctgaaaaccgtctttattcccgtccagtaccccccaccgccccccaccggaaacgacacccctttccgcacaccatcttctccctgcgacgaagcaggcctgatgacctatatcggcgaaatcctctacgcaactcactccaaagaaactggcctggcctggacgcgcgacgcagtcgaccttgctgaatcgacgcttccggaaacagacccatcctcgcggaacaaccgctgcatcgactgtctccgcgtcagcctcgagaactggaagacaatggtgtcgcagttcctcgagaatgctcaaaaggacgaagaagagacgatcaccaaggcgaagaacggatcttcctggttcggcccctcgaagagacagatcgaagcaaagacgctggtgaggaagaggtgggaggctgagcagtttattctgcaggcacgcattaagaaactcctaccggttatcgaggacgactctgcgattcagggtgtagtgcctggtgtggggttgtccca

SEQ ID NO: 25493 - DNA, 327 bp, Emericella nidulans
tcgtcgccggattggaattcttccccacaatcccggattatgtctaccgctatgcgtccttcctcttctcgttccttggtcgcggtgtttgtaagtcttcattcccaggagctgcgtcgctcgcagtctatgcactgacacagcgataaagtctacatcttcgttggatgtctcatcctgcatggccacgttctgcaatacattgctggttccatcgtcggcttcctcggcattgggtatgctgtcttggaattcgtcccctccattgagccgccgtcgaacatgcgcgaggccgaccagagctggggtgccgagcaggtcgtctag

SEQ ID NO: 25494 - DNA, 820 bp, Emericella nidulans
cgttttcttgatttgatcaagcctttcacgcccctccttccggaggtggcagctcccgagaccaaggtgcccttcaaccagaagttgatgtggactggggtaagttctctggtggccgccgtgcgagattcagccagctcatcgatacttcagttgactcttttgatcttcttggtcatgagccaaatgcctttgtatggtattgtgtcctctgacacatcggatcccctctactggcttcgtatgatgctggccagtaaccggggaaccttgatggaattgggtatcacccctatcatctcctccggcatggttttccaggtaagtcttgcaggccgtacaatcgatttccaaagaattgtgatttactgactcaattgcgcctgaatagctccttgctggtacccacctcattgacgtcaaccttgaccttaagaccgaccgtgagctttaccagaccgctcagaagctcttcgctatcattctctcgttcggccaggcttgtgtctacgttttaactggtctctacggccagcccagcgacctaggtgctggtatctgtgttctgttgatcgttcaattggttgttgctggtctcgtcgtcattttgctcgacgagctgctccagaagggttacggccttggtagcggtatctctcttttcattgcgactaacatttgcgagtccattgtgtggaaagctttcttcccaaccaccatcaacactggtcggggccctgaattcgaaggtgccatcatcgccctcttacaccttctttttacctggtccgacaagcaatgtgctttgcgcgaggcctct

SEQ ID NO: 25495 - DNA, 613 bp, Emericella nidulans
atggagagtgaaaccgcattaccgcccacgttaccagtcgcaaatcccacagcacctttctggcgcactgagctccatcagcttgatgacctgcgaactacgccagagctgcctcagcggagcgatatcgtaatcattggcgcaggatactctggaataagcctcgcgtaccacctctataaacagctttctcacgccgaccaatctcgccccgcaattaccatcttggaagcaaggcagatatgctcaggagctaccggccgtaacggtcagttgaagtgttcctagttacttgactgttacaagactgatatgaggtacaggcggccacttgcgtcctgacctgtacggaaatatccccaagcatatcgaaagacacggccttgatgccggtgctgaggtcgcaaatttcgagatcgcgcacataaaagctctcaagaccctgatagccgaggaagatattgattgtgacctgaacttgacgagatgtatgaacgtttacctgaatgaagccgacggtgaaaaagcaaggaagacatatgaagcgctcgttgctcacggtcttgagtacacctctgacatccattatacctccaagaaatacgcggagaag

SEQ ID NO: 25496 - DNA, 1148 bp, Emericella nidulans
atggcgggaaaaaaacagagcctaccgatacgcaagtcgctgctcttggagcccaaacgcctggggtcaacacgggattatcgacccccctccccgcggaggagcttattgacgacgtccgaaagaggaagcgtcgcagtcaaagtcctgctcctcatctggaagaggttgcaagaaagaaagctaaatccgcggagaaatccgcattgccgacccccgatgaatccatatccgcctcgcacgatgatatgcagcagccgcccgtccagagtccaactccggaggggaaaagccccgagacgccagccaaaaagaatacaccacaaaaacaggatgtgcgcttcaaaggcttatttaattctattggaccagaaaggacccgaccgccacagccaccggttgatacagagatggaggacgtcacagttgaacccgctctacatgctgccaccgctgcattgtatatagacggccttatgcgaccactccaacctgctgccctcaagaaccacctgctctcggttgcatctcccccaggggagtcaccaaaccccgatctgatcgtcgatttctacctggatcccattaagactcattgttttgtcacgttcgtcgatgtttcgacagcatctcgcgcacgtagctctcttcacggtacagtatggccggatgaaaagaaccgaaagagcctttttgtcgattttattcccgagcacaaagtccaggactggattcggatggaagaggatgcccgcggtcagggtggtcgccctccccgttgggaagttaaatacaagagaggtgacgaggttgaagcgatcctcgagcagattgaccctgaaaacgctggcactcatacctcccgtggctcagcaccaatcgagctttcacagcccacggaccggcgcccgaacgggccgtccgaaacgggcactggctctcttcctgcgcaaggattcgagtcactggaccaactcttcgagtcgactactacgaaacctaaactcttctaccttccggtcccgcgagccgttgcggatcggcgcctagacagattcgatgacttactgcggaaaggctcgtttccacgacgcggcggagatgaaactcgcaagtattcgttcgtggatgacgactcgtttgttgat

SEQ ID NO: 25497 - DNA, 402 bp, Emericella nidulans
ccatttcaaagctccctcggagtattccgttgctctgatcctgtgctcacacggatttgtgaagtcggtgcgcgaaccatgcagttaaccgaattctccgcgggctcattgccagacttttggatgatcaccgaagaaggtgccctggtggagagccagactccccagcctttctcatcagactatgcgcctggcttgacagcatttgagctattttttcccgtcaaagttatcagaaacggcttcgagttcacggttctgagcggtatactaggcgttgggatttacatatttgccaacattgcgaattgctccatctcggcgcacacaggctcaacggtgctggactcagtgcctctggcctttgccgcattacctgcttccgtggcagtgggtcgctga

SEQ ID NO: 25498 - DNA, 828 bp, Emericella nidulans
atagccaattctcttactgaacttgcgcagcgcaaggaggaggcgcgtagtggtgggaaggaagttcctctgctggagagcattgtctgcgggcgcaaccggttggaaaatggcagtatggcggcttgggcgcacgcatacaaagctcatgcggctggtattcggtcggtgaagatgacacagaacggaattcgtcaagaaggtatctctcacctgctgaaggagggtctttctcacgctagtgctctcgaggttctcgacctgcaggataataccttcactatcaccggatcaaccgctcttgctggtgtggtcagtggatggccatcccttcgcgaactcggtgtcggtgactgcttgctttctgctcgcggaggtataaagcttgctcaagcccttgcgaaggccaaaaaccaaaaggttgaaattcttcgcctgcagtacaacgatatttcagcagagggtgtcaagcagttcttgcatgctgccaagacagctcttccggccctgcgtcgcattgagctgaacggaaacaaattccaggaggaggacgtaaatgtgaccgagcttagcgaattattggagtctcgcaaagaagcacacggcaaggatgatgaccccgaggatatgtggggcattgacgaacttgacgaactagagagtgaagatgaagaggaagaagaggaagaggaggaagaggaggaagaggaacaaaaggccgaaaaggttgtcaaagatgccgaaattgcggagaacgagaaggttgctcaggcacaggataatgacgtcgacaagcttgccgaggcatttggaaagaccggcatctaa

SEQ ID NO: 25499 - DNA, 868 bp, Emericella nidulans
agcgatgaggatattgatgtcatggctggtatcaagggtgatgctgtacgtatcacctccatatgcttcgttcccggcagttcgaagcgtataacactcatttgctcaacgctcagcctagctaatgaagatttgtgccgttccgtagaaaatcatcaaggagactttcagccttgagggcgttcccaaggacgctctttacctcggtattgctggtgtggttccatacctcgctacttccttggagactgtgtacctctcctacgagattagccgtgctaacgctaccggtgatggtctgatcttctccggccagagcgccgagatgatgctgcacatgcttgagcacgtccaggtcggatacggtgctgtggtgagttcacttaagctctgcagtggttttatatgagattaaacagaggattaatcaattgtggcacagatcctctccttcctcggagctgtccactggggtctcgagtgggctggatacggcggtcgcactggctacaggcgctacgctgccggtgtcattgcccccgccgtggcctggcctactctgctgctccccgttgagcacgcccttatcacccagttccttgccttcaccttcctctactacaacgacgctcgtgcttccatcaagggccttgcccccaagtggtacagcatgtaccgtttcgtcctgaccttcatcgtcggtgccagcattgtcgccactctcgtgggccgcgagcagatctccggcatcgtcaccaaggagcacaacatcaccgacaaggtcaatgcgctcctctacctccagaagaaggagaaggaggaggctgctgctgccgccaaggctgcgcaggaggaagagtccgagtaa

SEQ ID NO: 25500 - DNA, 933 bp, Emericella nidulans
attaccgatatccctccagatctacgcaccgacgaagggtttctacgtttaaccgacgagctgaaccccactgcagcacttccccggtcatccgttggacggaacgtgaaggggcttccgaaattgatcaaagaacacgaagaacttgtgcgcaagctcgagtctgttttagccaagtatctcaagaaccccgatcgattaccgccgtcccgaccaacaatgcgtccaccccgtggccacagagacgaggatgggagtggcaaggtcgatgctatcgattatcttaccgaccgcattcagagactcgaggaggagattcgtcatgttcgggcatctattgataaacggaacgcgatgccatatgggtttgtgagctgggacaagattgagcacgcccatgcggtagcgtacgtggcacgcaacaagcatcctcgtggtacaactattcgacttgccacgcggccgcacgacctcatttgggagaacctgtcattatccaagtcggctcgaaaatggaaggcctttgtaatgttcctttgggtgaccgctttgactgttgtgtggattgcacctaacgctctgatcgccgcctttctctccaacttgtcgaatctgggttccgtctggccggcttttcagacggaacttgaccgaaaccgcaaggtgtgggccgctgtccaaggtatcctttcaccggctgtgacgtctgtgttttatcttctcctacccatcatcttccgtcgcttgtcagctcggactggtgatgcgaccaagactctccgggagcagcacgttcttaggcacctctactctttcttcgtcttcaataatctgattgttttttctctcttctcggcggtgtggacgttcatcgcagcagtcatcgacctgaaagatgggaatgaggattcatggcaggcagttcaagatggt

SEQ ID NO: 25501 - DNA, 687 bp, Emericella nidulans
tgctccacacaagcctggagatgctcttgctgcccgaaaagcctctctcaccgaattagcaaagcgcgaagagctccgacaaccggcgcgcagccgtgcccgggagcctgaacctcagcctgtcgagacggaagaagaagccttgtccgacgatgaagacgagcgactccgtgcggaccttaataggccactagagcccgtacctacactagaccccttcctacctcaccaggattacacgggtgaaacctcgaaacctggtattcccggccaaattgagaggctttaccgcgatatcaactccatggtggatactcttgggataaatgcgcgctccttgtcttcttttcttctttatcaacaaaagtccactgactccaattggatcaacatactgagaagtgatagcccaactgatattctggatgagaaactgcttcttcggcaaattgaggatttggattctaccgtcagtgtccttgcagaatctcttgagaagcacagagtgcaaggggtggaagagaagcttgaaagctgccgagaactgttgggtaaggacatcttcacccttcgcagccaatgtgctagtatcagaaagacgcttgacgcgtacaccgatgctgcatcaatcgtttctgcacctctttccacagtgcaggcaaacctccaacaggatcttcggacatc

SEQ ID NO: 25502 - DNA, 267 bp, Emericella nidulans
actcgacctgcaaactgtgaggtagatggtgtcggaattgtaaccattttggacaaatccagcggcccggagctcctccttcagaagcaatacaggccgccaatcgataaagtcgtcattgaagtgccggctggcctcatcgatcccaatgaaactgtcgaggagtgcgctgtgcgtgagctcaaggaggagacagggtatgtaggcgtagcgacgcgacaagtacggtcatgtacaacggtaagtaatatatcttcgccacattcg

SEQ ID NO: 25503 - DNA, 318 bp, Emericella nidulans
ggccggggtgtctgggctcacgaccgcctaccttctgtcccaggatcccagcaactccgtcaccgtcgtggccaagcatatgccgggagactatgatattgaatactgttcaccctgggctggtgccaactaccttccgtatgcgcagtcctaccatccctctcgtccactctggaaacgaccggtgttgatcgttgacctcgattcagaaccggacagcctggcaccaaccatgctaaatgggagcgagcgacctggcagccattaaaggaactgaccgagaagcatccagaggctggaatccacttccaaggtatg

SEQ ID NO: 25504 - DNA, 524 bp, Emericella nidulans
atatcaaggcgagcaaaacgactgtaagctcttgcttcaaccactcagttccaggcaactaataaggtttctcagacattatcctctcccttacacgcactcgcacagttggatacctccgtgacgtacgccgtcttaccgtagcgctttcccgtgcccgtcttggtctatatattctcggccgccgcgaggttttcgagtcctgttacgaactaaagcccgcattcgatttgctattacaacgtccagacaaactcatgctcgctcctggggagatgtacccagctaccaggacgttagacgacgaggtcaagggcacccctatggaaggcgtagagcatctcggccagtatgttttcgagatgacccaagccaagatcaaggctcttgggggggaaggtgccattgttgatgagacgatgccagatgaggagggagatcttatcgaggatggagacgaagaaatgcttgggggcggtgaagaaggagatgaagatccgttgcatgaacatgtatacgcctga

SEQ ID NO: 25505 - DNA, 351 bp, Emericella nidulans
atggattacgacacagttgatctcttcacgggatggcccaatccgtcgctcctccctacgggcgcgctcgcggacgcattcgccacggtgatggccgaccccgccatccgcacgccggccctgatgtacggccccgacgaggggtacgggccactgcgcgagcacgtcgctcaatggctgacttcattctaccgtccagccgaccctgtcacaggcagtcgtatctgcatcacgggcggcgcaagtcagaatctcgcctgtatcctgtcggtcttctccgacccaagctatacgcggaatgtctggctgatccccataatcatccttacatttaagagtcatttatcctaa

SEQ ID NO: 25506 - DNA, 895 bp, Emericella nidulans
ctcttggttttctgatcacgctatatgcgactctcattacgctttttgggcttgcttgggtgctcttcctcatcggtatgcagccacgcctcagttcttaggcacaagcctcaactttcgatcagtatgctaatggactataggttggattaatgtcgggggccgacagtcgtatatcatcaatgttatcgataatgtactagtggcactctttgccatcatgggcgatgggctggccccgttccgtgcagtcgacacataccacatggtgttcatcgcacattatacattcctgacgtggagaattcgcaagaggcgccgcctcccggaattgaaggacaaaaatgatttgccatctcggggggaggcggaagccgatgctgatctcgaggccggagatctctccaaggaggatgaacacgaattcagtgtgctcagccctcagcagcaggcgaaattgcagcaccaccaggcaaaatttgccaagtctcatactttctacaaacctcacgagactataacacaccgtgctttcccgcaacgcattcttattgcaatcgtggttctcctagattgtcattcgcttctccagatagctctcggagcttgtacatggggtatcagttatcatgtacggccgttcgctctcaccaccgttatcctttgctgttcaattacctgcaacatcaccggaggtgtcctgatcatgattggggaccgcagaacccgcaaaaaggatgtggttgaacgaatgttccgccagcagctcaccaaggaggcgatgaaaaagatgcaaaagaagaggaagaaggaatatgagaaatacaatgccgaaaaccccgggctattgtcagattcgtcctcgaacgcccttcaggttcaccagagtacatga

SEQ ID NO: 25507 - DNA, 985 bp, Emericella nidulans
tttctgggataccggatgcgttgacccgctggctcagaccgccatctcttttaaatttcctcctctcttccttgaaccgatcaacttctactacgctttcgatgccgatgctcggggaaaaggccaggagccgatgaccaaggccggcttctggattggatatgaagcctacgtcaacaattctgccattgatatcaaccgcacgtctgagattgcggtgcgcgtgggaaacctgactggcacaccgtcgggcgacaacaatggatgtgatggcgtgtgggggcctgattgctccatgaatctcaaaagttacttgcagcagacgatctttactcttgtcacaagtggaaagtcttatgaagaccctcttcgaacggtgatcggttcgttccgtgacaatccgccgcctgtggccaactgcccgccgccgttatttgatgttcagcggtttcctgttgagggtaagtattgaaatgtcgactatcaatcttataataacatggaataatagaattcgcggtcgagaatgaggatgacaagacggcggtcattaagaagaccggaaatagcgacaatacctggtctacattcctgatagataatatgacggccgctcagcaagccgaacaagttgctgttggaatcatcagccgcaccccgatgtatgggacgacacagccgcggagccaggatgatattcagcttgaaatcgtttgtgctcaagcaccatcttcgggaacctcttcgagcgacgactgattacagagactaacgatgcgatacaccctacacatactgcacatattccgcgaacaaaaccaagtttggtctgtcgggcaactgcccaaacgtatttagccatgcacatggctctcacgcgccgctcgaattcgacgacgccaaccgatgccgcttcagagcagcatcagcagcattacgatgctcccgctcgctcaagacctaccaggatcctgctaggagcagg

SEQ ID NO: 25508 - DNA, 573 bp, Emericella nidulans
atgagggacaagatgaggtctttagacacaaacattaaagttgacttcatccagaaagacaagctcgaaagcacaacgcctcacagcgctgccagcacatacgcagccgagagtacaggccgccgcggccgcggaaaagacaagaaagaagaacacgacagtcatgacagtaaagggtctcgatcgcggtcgaggagtcgcggtttcaccttcagcaggggcaactcatcatcaccaaccaagaagcggccagagagcggaagctcccatcgacgaccgaagtctattgatcttagcgcccctgggctgtctaagattctcacacctaatgcatccacaacgtcgcttgcggttacggcacaccgtgacacagctaccgatccgtcggattttgtgcactacttgaaggagatccagaaacccgagattatcgaggttggcaaaatccacaagcttcgcatccttcttcgtaatgaaactgtcagctgggttgatagcttcatcgctgaagggggcatggatgagatagtacaacttgtctatcggatcatgaaggttgagtggaggtacgtc

SEQ ID NO: 25509 - DNA, 436 bp, Emericella nidulans
attcgctgccaccagcaccaccacttccgatcccaataagatccttgtcgagcagcgtctgcgccgccccgtctctccccaccttaccatctaccgaccccagatcacttggtacatgagtgccctccaccgtgtcaccggaatcatcctttctggtcctctgtacattttcgccactgcatacctcgctgctcccttgtttggatggcaccttgagtctgcctccttggccgcttctttcgctactctgcccttggccgccaagttcagcctcaagaccttagctgctctgccgttcacctaccactccttcaacggcctccgacacctgatgtgggatactggccgtggtatcaccaacaagcaggttatccagaccggctggaccgtcgttggtctgagcattcgtagcgctctttaccttgcttatgtgtga

SEQ ID NO: 25510 - DNA, 768 bp, Emericella nidulans
gatcacgacgagggttactcttcctatcgggatgagtttgatgacactcgtcctgcccaccgtgaacacaagcggcccgacggtgacgcgcgcaaacgagacacgatagacagccatggagcgaggaagcccttcaacaagcagtccccaccctcggtgtccggtagtggtctaggaacagccgttttagctagcggatactcagaaggccaagattatgacctcagttcgcatgctgatcgctaccgccatcgaggccgagtgcctcgcgaccgaagtcgctcgagaagacgctccagacgccgtggggggagcgagtctgatgagtgctcatcggatgacgacctgaaaaagtaccgacgagagccatctgtacgtccgaggatcaacggctccgacagttctaaggagaacgagcctcaccgccaccgctcacgctcccgtcaccacgagcggccgtcagataagaaatcagatcagaagaagacagactctaaggagcccgacgcgccgcccaagggtatattgaagccaccacgtgataagttcccagaggagccgaaccctgtccgagaaggcgttgctcccctgaaggatgcccacaagaaggggatcccacctggggcccgttggaccaagattgaccgccgacttgtaaatccagccgcactagaagcgggccaagagcgattaaaagagcgaccggaccatgtcatcgtcttgcgggtattgacaaaggaggagatccagacctacgctgcgaagtcc

SEQ ID NO: 25511 - DNA, 551 bp, Emericella nidulans
gtgtgtttgaaacgagactgttttaccatggcagctgctcactctcaaaaagcaatgttgtggcctacaccgtcagctctaaaccccctcgcccttaccgctttaagtcgacgtccttgaagttacaagtcccgggcctgaagagccttcctacttttctccagaacacgcaattcatcaaagccatgtcggagaccgattcatggaagacggccatgcggatattccatacggttcgtacatggtcacgaatgacgatctggggagataggctgttcctccaatttgacggtccctccactatcctcttacaatctcgcggggcccggatgagcgatgttctgagcactcaagaggtcaacgaattcgcaagcacacctagaggcctaacgatcgtccctacaaaacaagaggagaagcaaaagggttcggagcaggatggaaaagacgacgtccacaaggcccccggcacaaggtcagtggatgaaatcgagcaggagatcaaaggcgtcacccagagtatcgccgtcctaacgaaggagggcaaggtg

SEQ ID NO: 25512 - DNA, 1224 bp, Emericella nidulans
atgccgaagcgcaaacatacagactatgggtactcagacgacgcagcccccgtcatggccgacccaggctcacaaggtttcggtttaggccagactctctcgatgctatcgaagtcgaccgagcccgcgacggatgccagcactggttccacggcgcagccagccagcggaggctcgccggacgacgctgataatggcccggacggtgcgcgaccctcgaagaaaaaacgcttgaacggcgagaagatcaaatacccgacgctcacctatgttgagggccggacgttacaatcatccattcggatcgccgaccttcagaatttgctccttttctgcttcgcggatggggtcgcgccgcaatggatcgccgtgaagaatacaactcgcatccgaaaggctgtctttttgatggttcccggtctggagctgggaatgttaaatggaaaagttccgctggacgggtcagaggtgaaagaggttaagggagcagacgcagaagacggtacggaaaatacaaggaccgctgaatttgctagatggaaagaaggacttccgccgcaggaccggtctcacttcttcagccttcgtccgctatcgcgcgacaatgttcccgagcctcttcagccattagccgacgtgtttccccatgcctggccggtccgggctccaggggactccaaatataacaaggttcactcgcctctgcaagctgttctcttgacatccgtgcccaaagaaaaggagaagaagacaaaaggcccgaagccgcctcgggtggacaagaactatacttccaagcgaacgcctatcacggcgttcatcagtggagctgatgagcttcgcgagaatgattatcctctacatcccgctctttgcgcctctgaggacgaaaaattggccctgaaaaatgcccgcaaacgtgctggtcaatctgcggaggatggatgggtggatacccatgtagaaagcctcgaagaaggcaacgttcctgaagccgagattcagcaaggtagcatgacggcaggacgtgatgttctcgctttagactgcgagatgtgtataaccgaaggcggtagttcagaactcacccgcatcagcttggtccgctgggatggggaggtggtgctcgacgagctcgtaaagccaagactgccagttatcgactacctaacacgattctcagggatcaccaaggagatgttagaccccgttacgactacttga

SEQ ID NO: 25513 - DNA, 787 bp, Emericella nidulans
cattttggagaacatcttgaagggtttcgacaaccaggttattatgaactctactctcaaggagctcatcgaggtccttcgcgaccccgagttgccttacagcgaatggaacgcccagtcttccgccctccactcccgcatgccccagaaattggatgctcagcttcaaaacattgttgaccgcgctcggtcacgcaaggccgagtttccggccaggcagctgcagaagactatggtccgattcattgaagagaatgtcaaccctgctgacgccgagatcctgaagactacacttcttcctttggttcaggttattaataactacatcgaaggcttgaaggcgcacgaatacaaggtgttcgttggacttctcgagcagtactacgctgtggagaagctgttctctggcagcaaagctcgatatgaggatggtatcctcgccctccgtgaggagcacaaggatgatgttgccactattgtgcagatcgccctgtctcacagccgcatcggcgccaagaacgacctcatcctcgcgatcctgtcgatctaccgtcccaaccagcctggaatggccaatgtgggccagtacttcaagtcgattctgaagaaactgactgaaattgagtcgcgtgctgcggccaaggtcaccctgaaggctcgtgaagtcctcattcagtgcgctctgccttcgctggaggagcgtctttctcagatggagctcattctgcgctcctctgttgcggagtctcagtacggcgagaccggctgggcccaccgtgagcccgat

SEQ ID NO: 25514 - DNA, 2391 bp, Emericella nidulans
atgcctcgccagtttacccaacagcgcggtccgcgcgacgaggtgtcgaagaaaaaacccgcgcagaagagaaaatccggcaaaatcctcaacgcgctttcgatcgcagaagccgaaaatcctacgagggccaaaattcgacggaaccggcttggagacgatgatgattacttcaagcgcaagcgggacaccgatcgagacgaggacgattcacacggtcctggtaacaagcgtcgccgcactggcgatgacgaggattccgaaatagactcgaacgaggggagtgatggtgaaggccacaaatggaagattggcgtcgacagtgataatgacagtgagctggatagtgatgaagctatgggttccagcgacgaggagaggtttgagggcttcactttccgcggaagttcgacgttccagggaaagtcaaaggcaaagaaaaaacaaaagccgaggcatgagcgggagattaatctctcagagggagaagagtctgatgcggatgaagatatggaagatgatgacagtcttggtgaggatgccattgacttggttgctgcgtgggatatgaatgccgctgaggaagaggccgaagctaagaaggcggccaaatccaagaagcaggacgagagtgaggggtctgatgaggaggcctccgaaagcgaagacgaaagtgagtcagatgacgaagacggatccgaactttcattgtccgacgacgatcttgaagacgaagatggcctctcaaaacttcaaagctttgtggattccatgagagcggaaaatgctaagccagcaaagaaaacaaaaagcggcgaagagcatctcaacccgtccgagtttggattgccatctacacgaaaactaacagtcgccgacctccttccgtcggtcactgattctcggcttaagaactcactcaaacatgtcgactccgcaatatccgaacagaagacttcatcaggcattccagggaagctggatgctcctcttgccaagcgccaacaggaccgtctcgaacgtgaagccgcgtatgagaagagcaaagagactcttagccgctggattgagacggtcaaggccaaccgcagggctgagcacctgatgttcccactgcctgatccagatgcgcaagttgtgcaccgcatgggcgtcatcaaaccgcaaaccagccttgagaacacaatccaagatatcctcgtggagagtggacttgctgataagcaggaaagtctgccgaagaccaagtgcaggaattcgaagagctgcaggcgcggaaaataccgatcgaagaaatccgagcccgtcgtgccgagttgcgcaacaccgcgacctcatgttcagagaggaagtccgagctaagcggatcaagaagatcaagagcaagtcctaccgccgtgtccatcgcaaggagcaagagcgcatggaggagaaggagcgtcaagctctgcttgatgccggcatcgacctggatgagcaggaccgggagaagaatgagcgactacgagccgaggcacgaatgggcaacaagcacaaggaaagcaagtgggcaaagagcctgaaacagactggccgaactgcctgggatgaagatgcccgacatggtgctcttgagttagcccagcgggaggaagaattacggcaacgcatcgaaggcaagcgtgtgactagaggtgatgacgactacctgggatccagctctgaatctgagtcggaagatgagaatcctggaaagaacaggactctgatcagaaaagcgcaagctgctgaagaagctcaacaaaatcgaagcgacgaagctgtgatgaggaattcaaaggcccgcatgctaagctactgtccatgaaatttatgcagaatgcagaggctgctcgtaaggccgcgaatgatgccgaaatccgtcgcctgaaccgtgagctacaaggccaggattctcagtccgaagcagaatcggaagagggacgtcgcaagttcggcgtcacggacaagaaggccgataagggcaagaagcaagtcaacggcaatgagttcgaggaagcaccagggtcagatgaggagccagaacgtgatgatgaacaggagacgaaggctgccactaccggaaccaagacaacctcaaaagcaaacgacaagccccgcgctccaccgaagcctgaacccgtcccccaggagtcggacgccgaagaagaaaacccctggctcatgccaacagcagaagagaagcgccgatccaaggacgacgatgtgcagccaaccatcgacatcacgccggacgcaaagcccccaaaacctgcgaagtcctcgaagaagacggcagatccgaaaataaaagaaactccagccccgaaacaaagcaccacccaagacgacgataccagcaacgatgaagct

SEQ ID NO: 25515 - DNA, 309 bp, Emericella nidulans
atgaccgcgtcccactccgcttcaaagccagatagcctctcaccaccaatacctctagcgagcaaaccatcattgtccgctttggcgggtaagaaaaaacccccgcctcctcctccaaagccgcgcagtgcgtcctcgaacatgttcgtaacagcgctctatgatttcggtggacagggcgaaggtgatctggtgtttcaacagggcgatcgcatccgtgtcctgaagaggacggatagtacggatgattggtgggagggtgagcttcgtggtgtcaagggcagttttccggcaaactatgtggagtaa

SEQ ID NO: 25516 - DNA, 662 bp, Emericella nidulans
aaaacataaggttgtatttaacgccaacgggaatgtgctggctgccaaaaatacaggcaaacttatcatcttcgccagtcaaggaacattcatgattgactatacggagcttcttatccctacactgaaggccttagctggccgtgatgactgcatggttatcggagcactcggtatccggggagctaagttggagggcgtggaaataacaatcaatgcgaagatcgtcgacttcctgctctacgatgcagttctcaaatacgcggatgtgtttgtgtccaatgctggatacggtgggctcatgcacagcgtcatgaacggcgttctaatggtgttggctgggaccggacgtgagttctctgcttcactttcccacgcacgacaattcattacgcgcgcttgcatattccagcaagtccaatcaacacaattactctgatggtatattagaagacaaagccgaagtagcgatgcgcggcgagtgggctgggatcgccgtgaacctgcggacaaaaacgcctactgtcgaggctctccagaaagctgtcggtagagtcctgtcggagacagacttcaaagtgcgttgtactcagattcaacgtgaaaatgagcagttgaactgtctggttcagctggagaagcttattgacgggaaagcatag

SEQ ID NO: 25517 - DNA, 751 bp, Emericella nidulans
atcatgaccaaggaggccacttcaccaccccgagaaacaaccaccacatcaacgacccacgaaccaccctccctccctgcctcccctctagctaaacgcccaaaaccctcagacacaaccggtacatcagcgtccgcaatcaagatggtctctacagacagcactgctcccgttgccacagcccccacagcatcaacacccacccccgcccttctcgtgaaaaagctcacagacactgcccgcgccccaacccgcggctctgcattcgcggctggctacgatctctatgctgcaaaggagaccatcatcccagcgaaggggaagggcctagttgatacggggttggcagtcgctgttcccgaggggacttgtatgtttacccaatttccgctctttccctttgctgtccgctcgacgtttagctaattgacgagcttatagatggccgtgttgctccccgaagtggtctcgcctccaagcactttatcgatgttggtgcgggggttatcgatgcggattacaggggtgaagtgaaggtgttgttgttcaacttttccgatgtggactttacgattaaggagggcgaccgcgttgcgcagcttgttttggagagggtatgacactatctggctagattgatggctggacgctaacgtacttgtagatttatacccccgaggttgcggttgttgaggagttggcggaaagtgtgagaggagctggtggttttggaagtaccggcactaactaa

SEQ ID NO: 25518 - DNA, 349 bp, Emericella nidulans
acagtattaaaggtggcatctgctgtggattctcaaaacgtgattcacgtacgcgagacaccagcaagcgggaagacgatcctgtcccaactcctaagggaccattatctcgagaaccataggaatgtctttttacttgagatatggaagtcactggagttatttcctggcaatgactcctggctcgattcgtttgcttctgcggcaaaggtatcctgcatatagtattgaaaaaatttttgctcctcagactgtaatccttatggatgaggctcagggttcatacaccgactatggcttctggaacacgatcatcaaagagctaaggtctgccaaggtaaagacataa

SEQ ID NO: 25519 - DNA, 620 bp, Emericella nidulans
ggatacctctccgctccatttctgtcattatctcgcagacgccgaagcccaatttcctttcaacgcctcttgtcacttcatttagaagcactgccattacctctcatcgacaattctcctcaacacctctttcgtccgctcccgcaagttccacttccggcagatcccaagcggacctcatcgttgaagaactacaagagctgtacgttcatgcccaatccgcttcaaagtccagcatgccctccaacctgtatattgctaacaaaagcaaaagctacgaagaagcaaccgacgaattcgaaattgccaccgaatccaccgattcatccaccatatacgctgcctcagaccgcgagtccgctcgcgacgccctaaataacctcattgtcgcctacgagctgtacacatctccgagcttggcggctgagaaaaaggatgagcaaggacaggatcaagggcagcagcaagagcaagaagacgagggaaggctcgtaaagctggagtttgatcctgccgagttgagtgaagaggttagggaggaggtgaggaagagggttgggcagagggttagggaactgaagagtgcagttgaggcgttggaggggagggctcatgattga

SEQ ID NO: 25520 - DNA, 595 bp, Emericella nidulans
ttcgctcccccttgacggtagccggaaacgcaaacgggcatcgcacgagtatgtgctgccgatgagcatcacttcatatccgaagacaatgcttccagtcggaaacaaacgcattctgcggagttactacgagaaagcctttgaatgtctccagcagaccaactgtcgcatattggcaaaggcctatatcaaactcgtcgaaccacggaagcaggtcacctacccatacaacggccacaaggtcgttgccggtgtccctcagcagtttgaccctgaagagacaagaccgttgtggtggccaacgggcgtcacccatcgcgaaccggatcatctccgaaagccaggtaattatctaagacaatttgtttctagcacccatactgaagctctcacagagcgcatccgcctactcattcatattctctgtgagctccgcgagagccacgccatctgcgtcgaaaaattgagagaagccgaccaagcgatacgtcgccagatatcgcccgttgagcgtcttcaggtcttggacgagatctaccgagtccgcggtgaagaagaacgttaccttgacggtcgctccggtatgaagtacact

SEQ ID NO: 25521 - DNA, 827 bp, Emericella nidulans
atgcctaaaacacaccaagaatcaagcagagtcgtcgcaatcatgaaaaaataccttctctcccttctcgctgcggtgacctacaccaccgcgcagtccgtttctggatctgctgagggcttcgcctcaggcgtcaccggcggcggcggcgcaacccccgtttatcctgctgacacggccgagctcgagagccttctctccagcgaaggggagcaggtaatcgtgctcacaaagacctacgacttcaccggcacttctgctaccggcacagcatgctactcgtggggtaccggagaagggtgccagctaatcctgcaggacgactgcggcgacacccccagcaccacagtgacgtatgatgcggccggtaaaaccccgatccccgttgcttcagacaagacgctgttgggtgtgggcagtgaaggtgtgatcaagggcaagggtctgagcttcacggacaacgtgagcaacattattgtgcagaacatcaagatcacggaactgaacccggagtatgtgtggggtggagatgcgttgacctttgacgggtcaagtaacatctgcattgatcatgtcgaggtatgccatattggtcgttcttactgcattccgaagggtaaatcgtgtccaattcgaccaactgacaatgaacaaatagacgtcccttatcggccgcgtccactatgtcttcggctacaatccgaacagcggcatcaccttgtcgaacaacttcatcaacggcgaaactacctactctaccagctgcgacggataccaatactggggcttggagctagtcggcaagaacgactccatcacattcaaag

SEQ ID NO: 25522 - DNA, 937 bp, Emericella nidulans
tgccagcgtatccgatcccccctactactgcgacgacacatcctcacttttccgcggcggacttcttccgcgactcgccttggctcaatattccagctcaccgaaaggcggatattctcgttgaaccactttatcctcggcttgggcttctgggcggggctccggaaagcggtggaggaaagatgtctaaactagctgccctggcagcggcgcgaaagaagaaagagggcgacaggtcgcccgcgtctacgacaggaactgatgcgcaatccccaagcgaggccaaaggagctacattgtcgctacgagagagactcgcggcgagcaagcaggtcaagcaagagagcttaccctcgctacaaagtctgaagcgacgttccgagcagtcgcagcccccgaagaagtcacccgagccaaagccaagcgtcccagctgctactggcctggaggactctataaagagcgttcagatcgaggataacagacaccaagaggaaaaggagcaacatgtgaatatccgtgctccaccgtcaacatttgccgccaccattgttggagacgacatacgcccaaagatgaccgagcccagccacttgtatacgaacactctggatttgattagaatctacggtcaagatcttgctgaaccatttgacttctcaggacccagcccagacgatgtaattctaaacgcccagagttccgctaaaggtttggctattcggcgaaacatatgaacctccctaatagtctgcaggctttaagtcgaaacagcctgctccgaagccacaaggtgacaggaaagcagcaggattggctggtgacatgggtaatcctcagcgttgccgagaaggtcaatgtcaagagtaagaatctggatgtgctctcagagtacaagaaatctaagcggaaaaatgccatgaacttcgtgttatcg

SEQ ID NO: 25523 - DNA, 231 bp, Emericella nidulans
atgcccgggttcgcagattcgttctggaccccagattacgccacgggtctgggggtcctgtacggcaagctgcagcaggggatcgtggaaaacaagcagatacttacgattgcgtctatgcgcgcggatgctgaggagatatacagctcgaagctgggggatatcgcaccgactgttgacaaaatgatcgcggggtttgcgaaggatgacggagcaagcgtgagaaaggta

SEQ ID NO: 25524 - DNA, 215 bp, Emericella nidulans
tgccggaaatgcgagaaggccgggctgaaatgcctcgacaaaaggccgatccggtgggtgcagggagtcgctatccgagggggtatgcgaggtcgatcgcatcagatcgagataatctggtcgactccggtcagcgcgatcgagatggcgttggaaccgtcaatcaagattcaagaaccattggacgcacgcgcctctacgcagatagtccctaa

SEQ ID NO: 25525 - DNA, 685 bp, Emericella nidulans
gatcgaatctctaggagcgacctttgttcgacccgaacttctatcgaaatgcccgtcgatcgacgaatcctcgaatcttctggacgatgttattgaagaatccttccttgggtgtcctgagttcattctcaccgctgtgcaattcttctctttacagcgggatacgattgcaaatgagaacagccctggccagcctcgagctgaggatgtcctttcaatccttgatgctgtaagaaactttgactgccgcgcgtgggcttcggccctcccgcaagagtctgtgacccatgatcttgatggtctaacaaaattggcgcgagcgtaccaactcggtggaatactgtacgggcagcggatacttgatgccgttgagaaaacccgaacttctcgcgagacagtcctatccgaattaattgatattattacctcattgcagccgaccaacctcctcaagtgcaccctctggcccatcacaatagcgggcctagaatgtcaggcacgacggcagagagatctgcttatacaagctctcaagaagttctggcaagataccaagtgctcgaacgtcacaagcgccgccgacattctgcaaaattattggagcaagaccgaccacaatccagacgtggcgaatgattggatcttcgacattggccggtcaagccatgactggctcctcatctag

SEQ ID NO: 25526 - DNA, 236 bp, Emericella nidulans
catggaccgttctcgtcatccccctcttcaatttccccagctacatgagcgttactcttgaaactatgaactacgcctgcgtcgtgttcgttggcatcatcgtcatctctgccgtctggtactggatctggggatacaagaactacgctggtccgcctaccgatgccattgatccggaggctgatcatcccgctgggagtagccctgtgcaagtagcaaaggatatccaacgctag

SEQ ID NO: 25527 - DNA, 402 bp, Emericella nidulans
atgaatgcctgcaacgccctgacctacgtgactcgcttctcgtgcgacatctttggattctacgttgcgttcatctacctccagaaagggatccaggtcctcacgaggcagtggggattcgccggggaggcgtccgcgtatctgagtatcatggtagctctgctggttctcatggccgcgtggatttgtggagagctcggtaacagcagcctgttccagagatatgtgcggaagttcttggaggactatggcacgccattgacaattgttttttttactggctttgtccatatcggccacatgaggaacgtcgaggttgcgactctgcctacctccaaggcattcttccccacagctgatcgtggctggttggtacatttctggaatttggatgtcgcggag

SEQ ID NO: 25528 - DNA, 732 bp, Emericella nidulans
atggcggactctgcgccgacaaaggccattgtgccaaccaagcagcgcaaggaaaacaaacgcttaatcgaagctcagaagaaatacggccgtggcaaggccgttcatacccacagcgtacgagataagaaactgcgaagcaacttacaagccgtcgaagaaaagtacaagaatgccgcactccgcgccaaagacgccgagatccttctggagcatgaggctggattcctcgagccggagggagagatggaaaggacataccgggtgcgtcaggacgagatcgcagcgagtgtcgggattgaaacggcgaagaagaagtttgagttaaagctggaggatttcgggccttaccgagcagactatacacggaatggccgcgaactgctgttagcggggcggaagggacatatcgcgacgatggattggcgaaatgggaagttggggtgtgagttgcatctacgggagactgtgagggatgcgcggtggcttcacaacaaccagtactttgcagttgctcagaagaagtcagtctatatctatgacagccaaggtgttgagctgcacaatctggacaggattgttgagccctgctttctcgaattccttccctaccatttcctccttgcttcagctgtgagttatacataccgcatttcggtatctcatattctaacgaagtatagcaaatgagcggccatctcaaatacacagacacatcaaccggccaactcg

SEQ ID NO: 25529 - DNA, 862 bp, Emericella nidulans
gcttcggcgttccagcgccgcgccacagacgactcaaccgctgaggttcccgtcgccgcgaccactgcagacaagcccgaagtctctcctgaagccggtaggggtgctgaagatgctgtcgcaaatccccaggatgagattccgaccgaggacgcgcagcgtggtgtgcacgaggtcgaggctgtcaccctgacctggagcaaggcgtcgctgattgccgttttcatcaagtatactcaccacccctttttctctcttcctttaggaaaacgggaagagtaaaagtcattatattaatgctttgtgtgtagtatctggtgcctctacttcgtcaacgccttccagtcctccatcatcagtaacctgcttccctacgtgacttccgactttgaatcgcactcgcttctgacgaccatctacgtcgtcggcgactgcttttcggcagcagtcttcatcccgctgtccaagatcctagatatctggggtcgcgccgaggggttcctgttcatgaccatcctcgcgacgctgggcatggtcatcatggccgcttgccataacctggcgactttctgcgccgcttatgtatgtctccttaattgttagtccacgcgccattctcatgagatatgaaaggtcttctatacaatcggattcagcggcatgacctactgtattgatgtcatcaccgccgactcctccaagctcaagaaccgagccctcgcctacgcgtttacgtcgtccccctacatcatcactgctttcgccagcccgaaggcctccgaggacttctatgcgctgtacggatggcgctggggtttcggtgtcttcagtatcgtgttccctcatcatccgcggcgccgct

SEQ ID NO: 25530 - DNA, 324 bp, Emericella nidulans
gtcatggcgcgctaaaaacttcacacaagctccagacctaattgtaactctccagctatgtccaaagccgttgttaagacgacccttcgaggcgtctcgaacgcttcgtcctatctataccgggggaagcaccgcgctcgatgccagcggccgcctactggttgcttgtgtcaacgaagatgcgctcgtcgtcgaccttgagactggcaaccagctcgctacgcttgacggagtatggcttggtctcattttgagtgtctattcatgtgctaattcaagttgtaggatggagaagttatcactagcttggccagtacgttcctc

SEQ ID NO: 25531 - DNA, 569 bp, Emericella nidulans
agtataggacacaagttagagggcgtcaagagccaatataggacaacacatctcggacacttcctcctcacgaatctgatcattggaaagattctgaagtcggacacaccgcgggttgttaatgttagtagtgatgggcatagattaagtccaatcaggtgggcggattataattttcaggtaagaagcctgctattccgagcacaatggagcaaatagatgctaacagatagtataggaaggagagatctataacaaatggcttgcgtacggacagtccaagactgctaatatgctgatggctgtctcgttggcggagaaactaggatctagggggcttctggcgtttagtctgcaccccggtgtcatcattagtacttccatctcaggtggacttgataatatggatgaagatcttgctgcattgagtacgcatcgcaaataacatggtgctctgctggcgttcgattgctgatcggtaccatagaagctcttgacaggatgctcggaaatgcagaggctggcgcgatttcaaagtgaagacgagacagcaaggagctgcgaccacg

SEQ ID NO: 25532 - DNA, 228 bp, Emericella nidulans
cttcacacctacgtgtggccgttcttgatcatctggcccaccttcttcgctttctacctctcgcccgaacgttacgacacgtatatccaaggacaggaatggacttttgtgtattctggaacaatcatcacgcttcagtcgcttctttggttgatgacaaaatggaatactaacatccgatcgcagataacgacaactaatgatcggctcactgattctgtaccatcc

SEQ ID NO: 25533 - DNA, 510 bp, Emericella nidulans
cgcgagctcttcgatgccgagttgaagaagggtcttgtcatgacatctacctaccgcagcggcatcaacatcaaatttggccggccatactatgacctgctgggtcaggtcacctacaacacttccgatggtgcggactggagcaagggagccatcatgttcgactttccgagtttcaaacccacagtcggagacggatcacggtttaatgagccgttttgtaagttctgaattgtgatatttccgtagccttgtctaaacaagctgcagatggaaccctggagaaagccctgattgaggagtttccctgccggccgcattggacgaaaaacactcgcgaagtgttccaactggccaagaaaaacctggatcctgatgtaagtctatggccctctggaactgccgcgctgaccgttctagcacattgctcggttcaaagccattcgagagaagtttgacccgaatggagtctaccgcagcgtggttggagaaatcatcggtgtctactag

SEQ ID NO: 25534 - DNA, 692 bp, Emericella nidulans
cacgcagactcctcttacttcggatctggctctaaagccgagatttatgcgcaggtcattcagcaagccaagggccttgtgacaggacagcgcaactgggtcaggtacgtggactgtagttaaaacacccttcccttggactatctatatggtcaagtcaggatattgattagcattgtcagcaacttctccaatgtcgcctccctcctctggcacgcctacgccgcgcttccggccccctcctcctccgtgaattgggctggtttctacatccgccaagatcaattcccttccaaagagacagctgaatcgacagaagccgctcgtgtgaaagaaacgctctggctcggtcccttccagggccgtccagcttgccaggagatccggtttggtcgcggcgtgtgcggggcggcggcggcgaagcgcgagacggtcgttgttcccgatgtgctggagttccccgggcacattgcttgtgatgcgagtagtcgaagtgaaattgtggtgccgattctggcgggcggcgaggtaagttggttattccataccgttgggaagggcactgaccattgcagacggtcgcgattattgatatagactgcgccgagccgtcgggtttcgatgatgaggataaggagtatcttgaggaattggcagcgctactttctgagagctgcgactggtcagtatga

SEQ ID NO: 25535 - DNA, 288 bp, Emericella nidulans
taaaatcatcgtgacataaacttaaaaagagccacgatgctgtcccccataactcgagccactgctctttcgtcgggaaaggcccaggggtcgactttccagagggctgctgcaccgatgatgtggtccaagggcttttcaaccactgcccctggttccaagaaagcagctatcctgcttcaagacaagtctaacgggtttggatttgcacggtcaaatcctcgaccaaagaagccgcgatcacagggagtaactgagattagaggtccttattacacagtacgtgct

SEQ ID NO: 25536 - DNA, 1189 bp, Emericella nidulans
agaatggtatggcagagagtatattgagtttcgacaaagtccagcagcgtcttccgcccgcgctacctggcaccaatctggcggctgagctcgtgaatacgccaggtctaccggtcctcgttgtgctggatgacgatcccacaggaacccagacatgtcatgccgttaacgtgctgacagtctgggacgaagagatcctcgtccatgagctttagacgtgcaatcgcggcttctttatacttactaactcacgcgctcttccgactacagaggcccggaaattgatcagacagatatgcactgccatcacgaaagcagctgcaagagctcaaaggccattcgagatcgtgttgcggggtgactcgacacttcgcggccacttccccgatgagctagaggcggcagaggagataattggagcggttgatagctggatcctggcgcctttctttcgtcagggagggcgtttcactattgacgatactcactatgtcttggaccctgttggaaatctagtaccggctgcgcagacaccgcttgctaaggacgctacttttggagacgcgaactcgaacctcaggaactacgtcgtggagaagtcggagggctcgattacggcgaacagagtgcaatatatctccttggaggatattcgcactggcgggcctcgagctgtggcggagaagctcatcgcttctcaaaaggggagtatcatcatcgtcaatgctgtggtcgatacggatatggaaatcttcgtgcttggtttgttagatggtacgtctaatttcttccttcatgatcaagcaagctgacttcactagcaaaatcgaagggaaaagcatacatctaccgaacaggtgctgcctttgtatcgacgagactgggaattacgcacattcctccattgacacccagatctctcggtctcagcacccacacctgtcaatcaggtggtttgattctcgcaggctcctatgtgtccaagtctaccgagcaactgcagtatctgattgacggacgagggtcagatctgcaggtgattaccctcagggttgaagatcttctgaaaagcgcccaggatgcggagcagatagctctggacgcaaaggacaaggccggaaatttcattctcgcagggcaggatgacctagtcatgacaagccgcaaccacataactagagttgccggg

SEQ ID NO: 25537 - DNA, 1388 bp, Emericella nidulans
atggcctcaaatcacaccaacggagataaagcaatgcttcctctcataatcaacaatgagtcagtcatcacggacaatgtagtggaggtccataacccggcaacaggcgaactcctccaccgttgcgctggcgcatccgttgacgatgcaaaccgtgccgtggcggctgcgaaagctgcctttcctatctggagcaagacgcatccgtacgagcgcagggcgatactgagcaaggctgccgatatcatgttttctcggaaggaggagttcatcaaaacccaaatggaggaaacaggagccgggaggatgtttgtggaggtgacattcatggcaagcgtttcgttcttgagggacttcgcagggatgattcccagcgttgaaggaagagcgcctattgttgctgaagaaggacaaagcgcgttggtgataaagcagccatatggtgttgttctagggatcgcgccctggtacgtttgtttcttttggaaggaagcagtgtcactaaccaacgttcgcctccaggaacgctccttttatcctcggaactcgttcagtcgctctccctttggccgctggaaacacaacgatcctcaaaggctccgagttgtctccgaaatgtttctggttgatcggggatgttctccgggaagctggacttcccgcaggctgcttgaacgtgatctatcacaagacctcagatgcgcccgcggtcaccaatgcgcttattgcccacccagacgtgcgcaagattagcttcacgggtagcactcttgttggttcgatcattgcctccaccgctggaaagtatatcaagccggttctgcttgagctgggtggtaaagcctccgcgattgttctagatgatgccgacctggagaaggctgcgatgggctgtacactgggggcttttctgaacgtaagtaactcgttcaatggacatagttcgcggaagcccggtgaatgctaacaccaaccattagtctggccaaatctgcatgtcgacggagcgcatagtagtccaacgccctgtcgcggagaaattccagaagttactcgttgaaacatccgagaagattttcggcaagaacgcgcctgcacctgtccttgtggcgaccgctgcggtcaagaaaaaccaaggtctggtagctgatgcgatcgataagggtgcctctgtcgtttttggcgaccctaaagaaagcgagccatgcgcaaacgctctgcgccccgttatcgttggaggcgtcaccaaggagatggacctctatgccacagagtctttcggaccgacagtgtccctgatcgttgtcgacagtgaggaggaagccattaaggtggccaacgacacagaatatggcctcacacggcagggtttacgagcaatctgttag

SEQ ID NO: 25538 - DNA, 1022 bp, Emericella nidulans
cagcttcagctcgctgccaagtccagacaggccagctcaccccactactatgctcgtgccggagctcagcagaccaagggcatccaaatcgcacccagccagccgaaggctcaagaaaatggtgtcaatcagaagaatgggatcacgaagacaaagcccgcctcacggcagggctggcatgcgctggatttcggcggccaaggactgcgggctctggcaccgtcactgttcaagtacgccttcttggagaagctttatctcagtcacaacaaattgaaagtactgcctccgcagattgggcaactgcggaagctcacccacttggatttatctgccaacgatcttaccgagcttccagaagaaatcggcatgctcactaacttgaggcaccttcttctgttcgataacaatattcgcacccttccctacgagatgggatatctttaccgactggagattctgggaattgagggtaacccattggaggacgttctgaagtctctgatcatgaaagagggcaccaaagccctgattaggtatcttaaagaagagatgccaggtcagtatcatcactttgagtcacatcaaaccacgctaatctgtataagaagtgcatgttcctcctcccgcacgagactggctcgttctcgatgagaccgcagctacttctccagacaaggtttccgtactctcctacaacacactttgcgattcctctgcgacccaatcacactacggctatgctccgtcccgcgtcctgtcttgggaattcagacgagagaccatccttaatgagctcagagctcatgacccggatattatctgtctgcaggagattgaccaaggaagctacaatgagtttttcagggagcaattggcctacagtgattataagggtgtgttttggccccgaggaagggctatgggcatgcaggaggaggacgccaagggtgttgatggatgtgctaccttcttcaagggaagcaaattcattcttctagacaagcaggtgatcaacttcg

SEQ ID NO: 25539 - DNA, 1589 bp, Emericella nidulans
aaaatgagcatcccactaccaattcggacgtcagatggaacgggcaacttgtcttccagcccgccaaaatccaacggacttcctcgcctctcgccctccccttccttcgtccagaaacattctcccaggagctctgatacttcaggtctccgccgctctgcgagccatcataatgctcggcaaactttcaagcaacggcgctgcaaatcgcagtacccccgtgactctcccgagcgccatgttgagttcatccttgtcgcctcgttccatatcgatcgcggcccgatcatggagcatcaatacccgggtcccattagtagtgatgaaggtatgttggcggaactgatgctgccggaccagacgcacgtccgcagccaggattggactatcttctttctgcataaggacactggtggggaggggtagaagaccgacttggcgggggagaataataagcggaagggaaagagaaatagagtgcggtcctcctcgggcgatgaagggaccagtgcggacacaaacaatgaatccgaggtcacggaggaagaggagagcagcgatgaggaagatggcggggaaggaccgccattgatgtatgtgctcaatttggtgaacacgaaacaagataacactgttaagcggtatgttccccgtcaacatgttctttagcgccacagttgcggctgacattgtggacagcggtgctgtagtaaaggccatggccatatgtacacgacattcatttcttcatatctataaagtaagcactccataagcgtctctgattgtcaactaaccaggggcagcctattttgcttttagccctggaggactatttcaagaacccgtacccagaaactcttgaaaccctctacaatgccgtgaacgccatggatctgtctccgatgccgaaactgaacctgcttgagcgccagatactgcaagctacgaacagcaaagacatgttcatcgagaagttcgagcagatggtccagcagcgcgcgattgaggacggcgagaacgacatcgatgaggataatccaccctccccgagaaggggcactgctccccgttacaccctaccccgagatacccacgagtttgagtctaagattatctataacgacattcccatccctgtaaaggtacccacggtgatctggcctgagatcgtgggcgacttttcgctcgtcaagctcatccagattttctctgcaccacatgctgcatcgcctcaaccgtttcctcttcatcctcacttgaccaccagtgggccacttacccacccaattatcgtcctcgtcaatgccatgctgacccagaaacgggtcgtcttcctcggccacaaccgaccgtccggagaggttgcagaagcagtgctagctgcctgtgcactagcatctggtggaatcctgcgtgggttcacccgtcatgcctttccctacacggatttaaccaagatcgacgatctactgcgcgtgccaggatttatcgcgggagtcacaaatcctacatttgctaatcaccccgagtggtgggatgtgctctgcgatctgcctacgggtcgaatcaagatcagtaaccacata

SEQ ID NO: 25540 - DNA, 360 bp, Emericella nidulans
tatacctgcggggaaaccttgatgcatgggggggaacctaacctgctggacgccgggatacacccacgtcacgttaactagaactgggggaacaatgcaactctcacagacctttgcttctgcacgatgggaggaggccctctacccagagcggatggcggcgtcgctgtcaacgctgggctgacagaagccacgtatgctggtggtatcatgaccggcaccgctagcctaaaaaagcgaggaactgaggggtcgatacggcacactgtgagcgatcgtattggctctgatgatcataatcatgggggagcataccgtcatgatacgatgcagacgcgcgaacccatgagcccgacttag

SEQ ID NO: 25541 - DNA, 201 bp, Emericella nidulans
cccgacgcctacaagaagcttcgcaccctgcagcttgcggacggctccaagaccaagaacactgagctgcaggcaggtcccgactggtacatcatgtcggaaggatccgagtcctcgatgaagcccgtcaacatttacacccttcgtgacgagtcgaaccacggtctcgtaaacaccgagatgctcaagcccggcgatgag

SEQ ID NO: 25542 - DNA, 518 bp, Emericella nidulans
gagtaatcggtgcgcttgttaaaaacgactcttcagacgtcatcaacttcctcctcacgactgaaataattccgctctgtcttcggatcatggaaaccggctccgagctgagcaaaacagtggccatcttcattgttcaaaagatactgctggatgacatcggcctagcgtacatttgcgcgacctatgagaggttctacgcggtgggaacagttctgagcaacatggttactcagttggttgagcagcagaccgtgagacttctcaagcatgttgtgcgctgcttccttcggtatgttcaatccgcttcgtaatatgaactgctttctaaccctgataggctgagcgataatagccgtgctcgcgaggccttgcgccaatgtctgcctgagcctttacgtgacgccaccttttcctcggtcctccgcgacgacgcagcaacgaagcggtgtctcgcccaacttctcatcaacctctccgataacgtgtccgacggcgcagcgggtgttgctatgtga

SEQ ID NO: 25543 - DNA, 390 bp, Emericella nidulans
acttgcgtttggtggtagctctccatcatgaaggatgcatcagaaagcgcagcacaaataccgctgcttgcttctataaatgcagaatctcaggtgcatcttattgttggggcgaatcctcttgctgcagctcgttgcaccaaaagcgtgcaagcaggagccaaaccagtagtcatctcgcccgatcctggaagtctgcaatatactttggcggcgcattttgaaaatggcaatgcgaagtgggttcagagggagtttgaggatgccgatttgacgaccttagggagggaagaggtggatcatgttgtggacatggtctttgttacccttggtggaaatcacccattgagtatgtaccgcgccatagcatataaggcacgagtcgtctaa

SEQ ID NO: 25544 - DNA, 1041 bp, Emericella nidulans
tcatccgatttgcctaccacttctcgattactcgtaactatcgtcacaatcagcaagaacactggtgactggaacctgctcaatgaccaagtcctccttctttccaagaaacacggccagctcaagcaagctatttcgaggatggtgcagaccgtgatgagtttcttggacgagaccccgaatatggagaccaaactatcagttatccaaaccttgcggactgtcacggagggaaaggtcagtgcctaggcaaactttctatcgcacaagcatttaacataactctcagatctttgtcgaagtcgagagagctcgtgtcacacgcattctgtctcagatcaagaagtcccagggtgatctgaacgccgccgccgatattctttgcgaactccaagtcgagacatttggatcgatgacgagaagggagaagaccgaattcatcctagaacaagtcgcactctgcattgagcgtggcgattggacgcaagcgacagttcttagccggaagatcaataaacgatacttcgcccgaaagcccaagaagagcgctgaggagattgagaagctcaagaaggaggctgaggaaagagaaaagacccgcgcaccggacgaggctcctatggaagtggacgacgacgtcacggacctgaagcttcgttattacgaacagcagatcattcttgccaaccatgactacaaatacctggatgtttgcaaacactacagagaggtgcttgatacggattcggtacaagagaatcccgaacagctacgagcggtaagcttgctggccgccacaaagaagtccaacatgtcagaaactaattcatagtcaggtccttgcgcacattgtatactacatcgtactatcgccttacgacaacgagcaatctgatttactgcaccgcattcaacaggacactagactttccgctgttcctgttgaaatcttgtctggtgaagctctggtctgtcaccatacttatgcgctggcccattgtttcggagcaatttggtcctaatctgtgcaactctgatgtt

SEQ ID NO: 25545 - DNA, 754 bp, Emericella nidulans
tagtaacggtgatggcgacgataaatctcagagtcaagagaagcgcgaagagtccctgccgatgcccggcaaggatgcgtttggttatcagaacagcaacaccagcaacaccaacgccatggcagtcaacggtatgcctgtgacaacactcacggaagcccaagccgcccaacaagcctcgcaaaattcgacatacgctcaattcatgaagccgaaatttgcccgcgcgcccataaaggaagctggaagggttgcatacttgggcgagtcatcgaatctttcactcttggttcaagaccgccatggaacgaccgacgtggtccattattcactgcctaccaacatacgaggttctcgcgcgagagtctccgacttggataatcttgagttagatatcctgcaccagcgcggtgctttcctacttccgccgaagtcgttgtgcgacgagttagtggacgcttacttcaaatgggtcgcacctgtcgtgcccattgtcaaccgcagccggttcatgcgccaatatagagatcccaagaacccaccttctttgctccttttgcaggccattcttttggctggttcgagggtctgcaccaatccgcagctcatggacgctaatggctcgaccactccagctgctatgacattttacaagcgagcgaaagctctatatgatgcgaattatgaggatgatagggtgactattgtccaagctttagtgctcctgggctggtactgggagggacctgaaggt

SEQ ID NO: 25546 - DNA, 1678 bp, Emericella nidulans
actgcagaagagaaagcaatctggaagtctttcttatgttgtttttagaactgctatgtcctcatgaagctagatggatcgggaaacccgctcggtgttgctggcctagaaattctagcgagcgtctacatcaaaagtgaccttgagtaccttgaagccgatgcagatgctatcgttcgtgagaaccttggtctcgcttctgactcagtgctcgcaggagagactggtgcgctgaagatcggtgagaacagctcgaaggagaataccgatcctcgctcgggcatgggccgctcgaagaagtctcctaataagggcggaaaaacaggtaaacagaatggtatgtgcttccttttcttgtccatctaatcatttgtgacacgatggtaatgggtggatgatattccagggacgcctactaccgtgatttcaagcaagaacattagcttcgccgatctcaagaaatacgcttgtacccgtggactccgctccgtgccctactttatattatcaaaccttgaactcaggaccagcagcgctgtacacctttctcgtatgctcgctacccagcgcgccgcagagcaactcctcaccttcctgcctccagctaaggcatcagcaattccggagtctgccgaggaaggcaagagcatcatctggcagccaaatgacgggttgggagctaccgctaagcgactcctcgaagttaccgaatcaatcctcgctcaaaaaactaagactcaagctcaagaagtgtccgatggtgatgaaaatacttatgagagagctgagggttcggaaacagatgaagatactaagcgcaaggtacaaagtaagctggcgcttgaattcactcgacttacaaagcgtgtacgtcttgaagctcttaagcaggagggtacttgcgctagcgagtattgccattactgcgcttcagatgatggttgtttcgcgcgctcttctcctggaagatcgagaccgtgtggttgaggcatccaaaatcgaacgggctgaggcgcccttaaacactgaaggccctacctttgaggaaggacaggaagggttgcagggacaggagtacgtcttggaagtggagccaagcgttgaacaacctctttcccctgttgaataccttcccgagccgcagtacacctttcctcagtcttttgctaccgggccatttcatcccggagccaaattattcgacgaggagtttccagccctccagcctatcctccacgaaccaccccggctcttgacgaagcctgcaactaccgagcctgaggtagaggaggctgccgcgcccagtgtgattacaggtcccagctctagccctggttacccagcttcctctgagaacggcaccaaggcaaacggtggctctggctcttcccaccccactcgttcgggcaagggtaactcccgctttagtgtcgcgcagaaagcacgtaagagctcctggcgctataaccttcctactgagatctggcagcgcatcatcgctgacgccgtcggggctaacggtatccttgaccaagagcagcagcaacgtatcatgcagtatgccgccgattgggatgctgtagcttatgagctcactattaagggcgcggaagaccatcagcagatttggaagtttttgcagaccgttggttgtttcacttactcgcctctagcttga

SEQ ID NO: 25547 - DNA, 534 bp, Emericella nidulans
ccgttcatctttgtctccatcaactaccggctcaacattttcagcttcggagacggcggggagacgaacttggctatcaaggatcagcgattgggacttgactgggtgcggaggaacattgctggttttggcggcaacgcggtacgggttctcggtctgctccatgataagcggctaactgaagatcgataggacaacattactttggctggagagagcgccggcgctatctacgtccatgcgcacctcatcaccggcccgccggtaaagaaggccgttctcgcgtccggatcactgtacctgtcatccccgttacccgtggaacgaggaaatgctctcatcaaagctcttgaggcgaaggtacagcagtacggcgagtcctcgctccggcaagctactgttctgtctctactacgggcattgaaggagagcaacgtcaacactatgtggatacaggaggacgatgaactaagggactgggagactagacccgagcacgctgacgaggtcatgatcggtgatacagagtacgag

SEQ ID NO: 25548 - DNA, 585 bp, Emericella nidulans
  unsure (1)..(585): unsure at all n locations
atgttgaacctcactctctaccgcggctggctcgatccaaaccgctacgtctggtcccccttcgtagtcaaactcgaagccaggctacgtttcgccggggtcccatataaaacagcctcagggtctgtcaaaacagcaccgaaaggcaaaatcccctatatcgaaatcaccgatggcgatgatggcagcactcctgctagcattggcgattcaaccctcatcatcaagcatctgatcgagcgagggattctccaagatttaaacgctggcttatggcgttcagatcgagcacacgatctagccactcgtgctttactggaggataagctgtatttctataatgtatgcctggccctcaccaaccatatgctacgggatgcaggtgactggttaatgatttcccaatagacccgcgaaagatggacagaaaactactacaccatgcgcgaccacgttctcagcgctatcccctacctgattagagtattcgttggtctgctcatataccgctcaaccgtgcagactttacatggccaaggaacggngcgctactcggcagacgaaatcgagaaattccgcgaggaa

SEQ ID NO: 25549 - DNA, 818 bp, Emericella nidulans
gctctactgtgtctaacttcctgaaccgcagccgcgctcaacaatctacttctgcaccgtcaagcgcagatgttgagaacgcattaacacctctgttcgattacttcaacgacaactttgcaatcatggctgaaacccttactcccgaggccatgaaaatggtcatggctcgcctatggaaagaggtccttgctactatcgagagcttgcttgtgcctcccctttcagacaaaccatcacaccagaaacctcttaccatgcaagaggttgaaatcgtctcccgttggctcgtgcttcttctgaatttcttccacgcaccggacgaagaaacgggtgaagcggctggtgtacctatggacattctcaagtcgccgaaataccacgacatccagagcctgcactttttctattttgaacctacggagaacctcattcgcacatcggagcgaatggcctctgcaacgatttcccggcagcaagccaacaagaatagagcctccgccccccctggcctgggaagtcatgctagtgtgcttgcagttccgggtggacggcgtgccaagagtatcatgcactcgcggaatctaggtacgatgaaaaaggcaaaggcggagaaatggcgtgaagcgcaggcggatccaaacgacgacatgatcttgcgaattctccggatgcgtcctgaagctgctggatatcttcgtgatcgcagtcgccagaaagaacggcttgctgctgctgcggcagcggatgctatcgtcaagcaaagcctcatggctaatgttggtgggcgaatggctggcacactgggacgtcgatga

SEQ ID NO: 25550 - DNA, 360 bp, Emericella nidulans
atctttctctcaggccagattcccgcagacaagaacggcaaccttgtcgaaggtgacatcaggactaagactcaggcttgctgtgacaacatcaaggctatcctggatgctgctggctcatctgttgacaagatcatccgtgtcaatgtaagtcgtgtcgtatgaactgtcatgtagtgtgattgggttggctgatggtagtaatggctttaggtcttcctcgatgacatgtccaactttgcggagatgaacgctcagtatgagaagttcttcactcacaaacccgcccgatcttgcattgctgccaagcagctgcccaagggcgtcccagttgagattgagtgcatcgctcttgcgtaa

SEQ ID NO: 25551 - DNA, 2280 bp, Emericella nidulans
atggcgcaagggggaaatgccgacagagcggtggccatgccccggttagaggacctcctccgacacccggaggacctcgacaagatcaatggactgaaagccgaatacacacgcaagaaagctgcggtcgatgcgcagctccgtgagggtcttcgggatcagttagcatccgtacaacgaagcctcagcgccctcacggaaggccagcgccaggtatcaaagacgagggatgagctacagggtatcgacagactatgcgccgagtcgcagaacagcgttgatgacttctcgcgaattgaccagctcgctaaaatccagcgcaactttgaagctactctgatgatgaagaaaggactggagaactttagctctgatttagcggagattgaggagcttctgagggaggatgacgaggatcttgagaaccagcctaatctgctgcggacccatatgcggatatctcgattgcgggactttcgagatgaggccatggatcaagttcgcagggcgcaggacgcgagtaacgaggccaccctagaagaatatttccaagggctggatgccgtaatcgattggtttgatgaccatcttgggacgctgtgtatgaacctcattccgctcgtgcagagtgataaccccagcatggtggttcgacttgcggttgtggtggcgaacgaggagaagaatgatgagaccgttaaggccttgcaggaggcgcagaaggatcaccaggatttagctgggcggtttaagtcaatgaatgttggaccgaagaccgtaaggggatacaaggaaaaatttatacaagcgatcgagttctacgctcaaaatcagttcgaagacaccaaggagaaattcttggatgacccggaaggtctggagaagagtttccgatggttctttaacgacctcttcgtcgtgcagcagggcatgcagtcgttgatgccgaagaagtggaaaatcttcaagacctacactgatatctatcaccgcatgatgcacgatttcctgattgagatggtcaacgaccccgcattaccagctgacaacctgcttgcgatcctccactggagggaaaaatactacaagaagatgaagaagcttggctggcaggcgtctgaccttgagctagatattctggataaccgcgaacctgatctcattcggcggtggcagaatgtcattattaacgcggtagaagattggatggataagatcacggagacggacaggaaggcacttacggagaggatacctgactcacttgatactacagcagacggctacttccgcactcaaactcttccagatatgtggcgaatgctgcacgagcaggtcaccgtgtccagctcctcctcacgccccgacctcttggaaggtattatggatgcaatgttccgagtgctgaaggctcgccaaaatgcctggcagacccttctcgaggaagaatgcgctaaatacaaagcacccggcggtgaacaactagacgggttgcaactgctgcaagactggcttatagcagtagcgaatgaccagattgcctgcattgacgacaatgacgaaacgggacaatatgggcacttgacgcggttccgacgtgatatcgagcagtacgtcgacccgaaatacatggcgtcccgcgcaattcccgagattgatgctttacgagatggctacgtcgatttgagtacctactgtatttcgcaattcgtgaacgtaattttcgcagtcgacctgcagggcacgattcgcgatttttttacccagagatggtatggagatttcgccgtgaagcgaatcacttctacgttcgacgattacatggccgattactcgcctgtcctccacccctccctcacagacatcctcgtcgaagaactctccgacgaactcctagtccgctacctctcatcggtccgcaacaagggtgtaaaatttcgccgacaaactgacccctacaccgacaaattcaaggacgacgtcctcacagtctttgcatttttccagaaatacccggactcttttgcaggcaccatcaagcagaaatggcggcttgtcgactggttggtccggcttcttgaggcagagaaaggtcctgctgtggttaatgtctatgaagacttcaagaatgagtactgggacctgcagctctcgtgggttgaaacagtccttagggcacgggatgactttgagcggagtatgattactgccgtcaagactaacgcggctgaattgtctgttgaacggagaatggagactctaatgagtagagttcgctga

SEQ ID NO: 25552 - DNA, 576 bp, Emericella nidulans
atgcccgaatcatcgtctgccaacgactgggaaaaccccagagtttttcagcgcaatcgcctcaaggcccgcgcgtactggatcccagagacctcgctgctgctgaacggggattgggacttcaactatgtctcttcgccgcttttggctccttcgcctacaccgtcacgcttgagcggtgacggcggcgaggagaaagacgcagaacaggaccaggtcgaatggaagcccatccccgtccctggtcactggcagctgcacgggtacggccggccaaactatacgaacgtcatcttcccgttccccgtggacccgccgcgggtgcccagtgagaatcccacggggacgtacaagcgcagcttccgtgtcccgtcgacgtgggatagagatgcacagctgagactgcgattcgacggagtggacagcgcgtaccatgtctgggtgaacggggtgcaggtcgggtatgcgcaggggagtcgtaaccctgcggagtttgatatctctgatcaggttgaccgcgagaaagagaacgaggtatttgtcagggtataccagcggtgcgatgggagctatatc

SEQ ID NO: 25553 - DNA, 558 bp, Emericella nidulans
atgccgaaggccatggtgctcgttccggtcatttccggcgctgcttcgttgctctttatcctgcccatttgctttactcttccgcccctaacagagctcctgaacgccccttacggacaggcgctgccgtatatcttcactctcgtcactggatcccgcggtggtgctttaggtctcatgtccctcgttttactcgtaacgctcacatgctcaattagtattacaactgcaaccgcccggtgtacctgggccatgtcgcgcgacaatgccattccatattccggcctgtggtcgaagacgatttgggagaggccgcttccagccttgtgtctcgtcaccgtgctcgaaatgctcctcggactgatctaccttggaaatactagcgcgtttactgcgtttgcttctgtcggagtcatcgcccttgctgtcgcatacgccgtgccaattgccatcagcatcgcgaatggccgtcgggaagtcctggcagcccgctggaacgcatgtaaggtggccggcgcggcgacgaattggctggcattgatatggatcttgttagat

SEQ ID NO: 25554 - DNA, 355 bp, Emericella nidulans
ggtagcagttgaaatgcacgccacggattcgtaccagaacgtgctcttctcgattctccgcttccgcctacacacgggcagatacccagaccaggtaacagtagtgacgcacgagttcaagcgggagcggtttatgagttgccattttcctgctgtggggctggacaagcccgggagtgggaatgttattgggattaacccgccggaggaggtaacaccattgaaagagctgctggacggggaggaaaaaagaggacttgggttgtggaagcgtgatacgtatggtgttggggctgagttgaaggaaaagaggatgaagcgggggtgggttgacggcttggagaaggggctgtgg

SEQ ID NO: 25555 - DNA, 444 bp, Emericella nidulans
atggctgaacttggttccccgatccagccgcaactcacaccagtaggggagaagtcgctgccggcaaaatgcaagacggacatgatcacatactgtccgtcgatggacctgattgccgtggtctctgatgacgaggagttgcgcgtcttccgcctaaatggtcagaaggtattcggcggctcttacaagggggacccgtatttggataacgatgatggaagtggagagattcgggctgtgaggtggaaaattgatggtacgttcctccttgcacaagattcggaattccttgcgcagctgacactatttttgggttgtgaaggccatttactggccgtcgtgtgcgcggattccaccgtccgcatcatcagcgcgtatagcgggaaaatggcccatcactaccaggcacatggtggagagcagagtccaaagtcacctgcttag

SEQ ID NO: 25556 - DNA, 447 bp, Emericella nidulans
tccgccagtgaaatgaccatccgaatccccagcggagaagaggcagattacaccctccacctccctcgcatcctctgcctccacggcggcggcaccaatgcgcgcatcttccgcatgcagtgccgtgtccttgaacggttccttcggtccacctttcgcttcgtctatgccgaggcaccctttgctgcccagcccggctcagacgtaacatccgtctacaaggaccatggccccttcaaggcctggctgcgttgcacggcagcagatccggaccggtccgctcaggaggtcgtcaagaagatcaacctctccatcgccacggccatgtacgacgacgatatgcgcggcgctacgggggagtggatagcgctacttggtttcagtcagggcgccaaagtcgcagcaagcatcttatacgcgcaacagacgatccagcagcggctaggt

SEQ ID NO: 25557 - DNA, 711 bp, Emericella nidulans
atgacagaacaacctccgcagaaccactcggtggacctcaaccagaatgaagacaacaatgagaatgactataggagctcctctgcgaccgatgctgaacgtccctgtgagccaaagatcgaagaatcaaccgcgaagccccccactggacctcctgcccctcctccgccccccaacggtggcctagtcgcgtggctacacgtcatcggtggctttatgctcttcttcaatacttggggaatcatgaatgctttcggggtctttcaaacatattatgaatcgggtgctctgttcgaaagatcgtcgtccgacatctcatggatcgggtctattcaggcgaccatgctattgctggtgggtttcttcacgggctcgatctacgaccgcggatacttgcgcgctcttctggttgtcggcagcttctgtattgttttcgggcacatgatgcttagtctctgcaaaacatacggccaagtgctcctcgcgcagggattctgcgtcgggataggtgctggctgcctcttcgttccctgcgtctctgtcctgcccacctatttcagctccaggctcggtacggccctggggctggccgtgtctggctcctctatgggtggtgtcatctacccaatcgtccttaacgagcttatcggtcccctcggttttggctggtccgtccgcgtcatcggcttcatcgcgctgggcactcttctg

SEQ ID NO: 25558 - DNA, 942 bp, Emericella nidulans
gcgccatccaacagcaaaccctcgtcggtctcccagactccgccgaacaacgcaacagccaggttggaaaaaagccatcctggcattcgtcgttcgacccctgattcggaagccctcgcgtcttccgatgatgatggagagcatcccttgcctgcaccttctactagtatgcctgcgcagaagcccgtacgccggacctcgtggctcaatgagatcccggtttcaataactcgcaaggcaccagtggctggtcctctatcgactggagcttccaatccaactagtcctgctaccgaacaatctggatggcagaccaacacaagccctggattgaacagctctataacttggaacaatgtcggcaatagttcattcccgtggggtactggaatctggaacactgattcacgtaaagaaccccctcctcggctgtcagagcttgttccgtcgcccacgatgtccatcccatcgaccgcaagtaactacttggctgaagaactcctgagtcccactactcggacaacctctggtgactcttccatcccattctccatcccgctccacccgaccccgaagacctaccgctcgcagtcatactctgtgggccagctggatcctgaatattcggctttgaatacgggcaacaaaaccaccactgcttttagtggtggtcgttctcggaatggtgcacaattctccgctttgcagcatcgctcctctagacctagcttgcttggagagttaggccatgatcctgctacgcttggtcgggttcgtgaagatgaggacgatggtgttgaaagccctggtggatcggacggcagctacagcaatatcaatgctgatcaagcccgcactattcagcaactttcccgtgagaacgctcttctacgccaagcagccggacagatcgaatcttcgttcagagatcgtgccatgtaa

SEQ ID NO: 25559 - DNA, 613 bp, Emericella nidulans
ctgtatttgaggagacagtttacggagcgtcaaatatctatattatcggacccaatgaagaactctctcccgacagccctagcggcctccaatctgatcctggcgacccaacaacaatccgcggccatggttacgtctggcccgacgaagcctccaagcagcgcgaactaatggcgtcggtctcccgtatagaaggctggcgcaccacccgatcatactactctttcatccaagacatcgcagctatgtactggccctcccgaccaatccagaaacccgaccttcaccaccaccacgaccgcctccggaccctgaaactgtctgcctacgaggctggcgctatatacctcgcttttgcgcatgcaattaaagattacgccggaatctgccaactcttaactgttacaccggagagccaagcaggcctgttctatctctccatgggcctccttcacccggaccggaacgtccgcgaggcaacggcggatcttctcgagcgcatcgcctccaccccgcaggccgccacttctgggcgcacgtcaatcgcttcgcgaaaacggcgtacttccgtatcaagcgtgaaaaagaagcggccgggaactcgtcccctatt

SEQ ID NO: 25560 - DNA, 1277 bp, Emericella nidulans
atccaacaaatctcaatactctctcttgcctatcaatcgatcaagatggtctacctctctactcttctcactggcgccgtcggtcttgccaccgtcgtcttcgcccaccccggtcacgatgtcaaggctgaagccgctgagcgtgctgctgccttgaagtctgtccgtgcccgtggtctgtcccagtgcgcaacccagctgcaggcccgcggtgtcgaagccgcgagcgttgctcgccgtgacgcctcgctgcagaagatccgtaaggcccgtggcctctcgggccctctgctcaaggcccgggacaccacccccttgaccaccagccacgagtccaacctgacggtcgacctttccaccgacccgtccgtcctcttcgcgtcgggtggctcttgcgtccttgctgaggatgtcacgcagggcccctactgtatgcttcttacgaagaataagacagagcccatgctaacaccagtgcagacgtcagtggtgaactgatccgccagaacctcgtcgaggaccagccgggtgtgcctctctacctggacatccagcttctcgactccgagacctgcggtaagatgtccctgtgtaggcttcctacgctataactaacatgcttagaacccgtcccggacgtctacctcgacttctggcactgcaatgctaccggcgtctactcgggcgttgtggccagcggcaacggcgactcctccgatgagaccaacttagacgcgactttcctccgtggaatccagcagactgacgattcgggtgtcgccgagttcgagaccatcttccctggccactacaccggccgcacaacccacattcacgtgctttcccacccagccgacacgacggccaacgccaacgacacccttgaaggcctgtacacgaccacctcgtctcacgtcggccagatcttcttcgaccaggacctcatttcgctcgtcgaggcaacggacgtctacagctccaacacccaggagctcaccctcaacgcggacgacagtatcctcttacaggagctcaacgatgatatcgacccttttgtcgagtatgtccttctcggtgaagatgttactgatggtatctttgcctggatcaacgtggtcatcgactcgagccagagcacctctgtcacccccgctgcttacttgactgaggatggtggtgtcgagaatgaaaactctggcggctttggtggcggttctgacggccctggtggctccgctcctggtggctctgctcctaccggtgctcctccttcctag

SEQ ID NO: 25561 - DNA, 417 bp, Emericella nidulans
atgaaatctgttgtcaacttggccaagatgtacgcttcccttattgcggatggcacgctcacgttgggaatcctaaaaactcttaattttgcgtacttgcagccaaagacaaaggcctttgtcgaggtgcttatgattagcatcatacagcagtcgcaaaaacagaagaaaaataagaagtccaagtccaagtccaagtcggaggacagtctggatgaacaacccctagtcgagatcttcatgaaaactgaatatacgccgcaaatcataaaggggtgtattttcttcttgcggaaggttgttgctaaaacggatattgttgcgtcggagaaggaggctgtcatggtgaaatggggtgttagggttgctgttgatgcactaaaggttgtggagtcgaaggagagcaagttttcatag

SEQ ID NO: 25562 - DNA, 710 bp, Emericella nidulans
ggtcgtaaacgaccagagggcactgtcgaatcgatgcccggcggaatcgcgcatgttacgtgggtagaacggcgacttaagcaggtagagtttgccaaggaagagcctactgtcctcgttttgggtgccggtcagtctggtctaaatatcagcgcgcgcctgcagagtatgggcatctcatgccttgccattgaccagaacaagcgcgtgggcgacagctggaggaatcgctaccggactctggtagcgcacgatcacttcaatgtcacccatctggcctatctcccatttccgaaaacctggcccaagtactcctccaaggacaagctggcagactggttcgaagcgtatgcgacgatcatggagctgaacatctggctggagtccactgtccagtcggcggagtacgatgagggccagcagtgctggacagtcaccatccggcgtaaggaccagcagcgcgtcgtccggccctcgcatgttatctggtgtggtggccaatttggagtcgaaaaggtgcccagcctgccaacactttctgtctttcggggaaccgtctaccacagcaagtaccaccgagatgcgggcctattatctcccagcggaaagaaggtgattgtcgtttggacccgaaacagtggtcacgacatcgtgcaagactttcacgagcatggagcagaagtcactttgctccaacgcggaggacatat

SEQ ID NO: 25563 - DNA, 452 bp, Emericella nidulans
caggaagcccgtggtcagatttccggcattgccgccaaagatgccaagaagtaccaggaggtgcttatagcattgattttggagggtgcttatgctctgaacgagccgaccgtggatgtccgtgcgagaaagaaggacaaggatgctgtaaagaaggctattggggaggcggagaaagatttcaaggttgcggttggcaaagaagtcaagatcaacctggacgaggaggagccactgcccgatgacaagtacgtctcgccccacaacagatagctatacgtactaatcttacttttcccagtgctggcggtattgtcatcaccggtggaggtggcaagattgaaatcaacaacacctttgaggaacgactgcggcttctcgagatcgatgctctccctgttgtgagggagacactttttggaaagaacgccaaccggcgtttccacgactag

SEQ ID NO: 25564 - DNA, 419 bp, Emericella nidulans
aacgtatgcacagtctccagatcatggtcgaccagggccaggtgctgtacctgggcatctcgaacgcaccggcctgtgtggtcagtgcgcctaatacccatgctggcgcccgcggccagaccccctgcagcgtctaccagggtagttgtaatgtgatgctggtcggctttgaccgggacattattcccatggcccttcatttcggtatgtgtctggcgccctagtatgtgttaggtggtggtcgaatccatagcaatcaggctgtgcaggattaacgcaaggctggccagtgagtggtccgcttctttggccgcagggaccggaccccagatgaggccaatctgagtgccgccctagaaaaggggccagcccagccggaaattacgtcggtctcgcccgtccccttggcatctgtccaa

SEQ ID NO: 25565 - DNA, 417 bp, Emericella nidulans
catacaccaccaactgtacggacctggaccctcttaatgagctgttttgtgttcaacaagcaaccgcatgctgctgagaaagtgagagcaatgatggacaaacacggggttcgttacgacatagatgtttggaacatgattatcaacaattatgccaactcgcaaaacgtccccgcgctcgcgcgagcattcaagcaaatggagtctgaaggcattaagccggacagctttaccctaaaccctttacgctacctacgagatccggagcggctctgggttgctattgatgagttggatcgggccgaattccagaagggcacgttgggaagtgattggaatgccgtggggagtagggagaatgtagagtcactccttgagcagggtctccaaagattaaagacaaccccaaggcaataa

SEQ ID NO: 25566 - DNA, 390 bp, Emericella nidulans
tcccgcgccttgtcatccttccgcgacgaactcctcttgaacatccccgacgacaccagcagctactcccttctggaggggtgccaagctacgcagaatgaccatgaacacagaaaagcacatcgccgggggaggtccaaggggaagaagcccctgaaagataaagagggcgagcaggctgaccctccgtacaccttgaccgaactgaagaaagagcgagatctgcccagccggcgaatggagtcgatgggcgttcggaaaaacatgtgcagatcggagaatgttgacatcgataagaagaaggcaaactggcatcgcatgcgtcagataggtctgaatcgggtggctggcttggggatggagggagccgaactagagcagaaagggggg

SEQ ID NO: 25567 - DNA, 674 bp, Emericella nidulans
gaactacaatgctagaacatcagcattggtacaatgcccttcccatacaagcacatactcgtcattggggcaacctcaggcatcggccgtgccatggctgagcgcttcgtcgagaacggcgcaaaggtcattgtcgtcggtcgtcgcaaggagcgtcttgatgcctttgtctccaagtacggcgagaacaaggcgcagacatggtctttgatatcacgcagacagacaagatgccggagttcgtaaaagaaattactgcaaagtatccggatatcgacagcgtctacctcaacgccggtgttcagcgtacacacgatttgacccaggaagggggatgggatctcgaggcgttcaacaacgaattccacacaaactttacgagcgcggtttcgctcgttcatgcgtttttgccgtttttgaaacgcaaagccgagacgcagccggcgagctttatcttgtatgtttcatcgctgttacattggatgttgggactatgcgaataaactgcttgtggtacagtaccggaaccaaccttgcgattgtccctgcggctccgatgccagcttactcggcatcgaagacggctctgaatgtgtttgtcctctctctgcgtgagcagctgaaacagtcgagcaagctcaaggtgatcgaagtctcgcctcctgctgttcaga

SEQ ID NO: 25568 - DNA, 504 bp, Emericella nidulans
atggcggcaatcacgcccgaaaacgagtctaagatagcacacgatgcggatgcggcaatgagcactgaaatcggccaggttcttcatgatgctgctgggaatgtggaccaacttcagcgacgtctgtctaaccggcatatccagcttatcgccatcggcggctcaatcggaacaggcctgttcatcaacatcggtatggggcttgccagaggcggcccggcaagtcttctgattgggatcatcatccactgctgctttatggcgctggttaacaactgtattgcggaaatgaccgtgttgttcccagtaagtggagggtttattcgcatggcagacaagtgggtggactcggccttgggcttcatggccgggtggaatttcttcctctatgaggccattctcatacccttcgagataaccgcccccagtattgtgctacagtactggagagatgatatcccttcggctgccgtcacagcagtgacgattgccatgtacgggtga

SEQ ID NO: 25569 - DNA, 452 bp, Emericella nidulans
ggagaagacacttccccggccggttttgaaaaagccctctccgctctctccgaaaaaatcacccagactaccacccgcctcgacctacaccgccagcatgcccgccgcttcaaagccctctggaccctctacaccacctttatctacctcctttactcgataattctcgcgcttgtcctaggatgggaaaactggggcgtgaaggagtacgccgcggttctcgggggaccagtcatgtatgtttgagcagatctggctcgtggttgcctgtcgatctctaacgggagcagcatctacctggtccgcgctggaggcacgatgtttttctgaataccggattaatcacacccagcgataccgtcgacagtttacagaagcagcgcgatgagacgattgagaagctcaaggtggcgacgaaatacaactccacccagcagctgctggaaaagtac

SEQ ID NO: 25570 - DNA, 869 bp, Emericella nidulans
gaaacgtccgccccaacctcttcactctccaggacgaacaagtccccatcgacaccatcgtctcagcaacaaagcacctcttctctcttctttcaccagaccagcaacagacactcagctatcacatcgactcccccgaatggcgcacgtggtcgaaccccgagttcctcctcagccacaaaggcctgcgcctcgacgaagtcaaccctgaaatccgcgatgccatattggctgtcttacaggcaaccctctccccagaaggttatgataaggcgataaaggcgatgcggataaatcacttcctcggtgagctcgtggaatccccgcgcgtcatgaacgagtactcctacaattttgtcctcttcgggaacccctcaaccacaagaccctggggctggtctttctacggccaccatctgtgcctgaatatcttcctgtataagagccagatagtcgcgtcgccgtggtttaccggcgccgagccgaatctgattgactcaggcccgtacagcggaacccgcattctgcacgtcgaggaaacgctcggtcttaagctcatgcagtccctgcccccgcacattcaaaggaaggcgcagacctacgcgctcatgaaagaccccgccatgccgccgggccgctggaaccgcgacgaccagcgccacgtctgcggcgcctaccgcgacaaccggatcgtgccgaacgagggtgttcctgtcacactattcaccgaagaccaaaaagccactctctacgagatcctaaatcagtaccttctatatctccccacatacgcacgtgccctgcgaatcgcccatatcaagcagtatgagtctgagacgtatttctcatggatcggcgggtatggagac

SEQ ID NO: 25571 - DNA, 201 bp, Emericella nidulans
tccatcttcgagcgcagctttacgcgtactgtcggcctcgcgcgccttctggtgcttgagaagctgcccaagtcttcggatcgtgaagagtacctggcgcagcgacgcaaggagcgtgggcgacccccgccaaatacattttatcgaccgaacaggcttgctgggaacattaaaaatgactggcaagacgaaatcgccgaa

SEQ ID NO: 25572 - DNA, 354 bp, Emericella nidulans
tatctgatgcagcgaaacatgggtgctgctatcgacctggttcagtttgtgcatctcatctgggtgtggtttgccaaaaccttcctcgccccgacaccccggcagacgattgagtggacagcaccgccggcattcgattacgccagttactacaactatttcctctactactcgactatcgccatctgcttcgcaactctacagcccattgtgctgccggtcaatgctctgtactttggtctggatgcaatgatgaaaaagtacatgctgatgtatatttttgtgaccaaaaacgaatctggtggccagttttggcgtgtgctcttcaaccgagtggtgttcgcagctatttag

SEQ ID NO: 25573 - DNA, 399 bp, Emericella nidulans
ggtatcatgcggaccggaaactggcccagctgccctcgtttcatcgacacgcgatatccgttcactacccttgtacaccagggtaagattgagaccgttttcttggacgagatcaagaaggccggaacgaccgtcgagagaccgtggaccattattggtttcaagaacgatggtttggatgccacctacccggtccaggtccagctcaagtgcttggatacaaacgtcgttgaaaccgtccgcgccaagtacctgttcagtggtgagggtgcgcgcagtttcgtgcgcgagcagctaggtatccagatccgccacaaggatcccatctcgtacgtctggggtgttatggacggtgttgtcagaaccgatttccccgatatccaggtacgaatgtcctcc

SEQ ID NO: 25574 - DNA, 336 bp, Emericella nidulans
cagcaaaaattgaaggaagaaggtattggtatcactcgtgttcaatcaacgttcaaccgggatatgcacacgattttcaagtcactagaggctctgatgaagaatccttctcctgcgatggtgggtagcaaaacccttgttgttcagcacttccacacgtggcttccagagttgtcggctgtctttagccgagatgaagtgataatgattgcgctcagttttatggactcttgcgcagatgtgaagggaatgctagttttgtataaattggttctgattcagcattacactcggcttgagatctttggctccggtacggagagaaagagtcttgct

SEQ ID NO: 25575 - DNA, 783 bp, Emericella nidulans
ccccaagatttttgtgacagcccgtatgactgtgtggcagcactgaaaagagatcttgcagaccatctcgcgtggctcattgaacatgagaagtatgctgaagcctggaagcttcttgatgagcatcctgaagcggcggggtccagtgaaggtagcgataatgtctcaataacgcccgggagatcccagactagtcttggtgatctattcgttgacgatagatcttccatcacagcaacagaccgtggaaatgtccctgccgctgtacaagaaaagcgacgcattggtgagatgtggatagagcaacttatcagagataatcggtggcaggaagccgctagagtttgcgtgcaagcattgagtgccacttctaggtgggaacattgggcctggactttcatcaaggaaaacaagtttgacgagattacgtccgtcatccctgttgacctacgtccatctttgtcctcagagatctacggggccatccttgaacattatcttactcgagatcgccaaaaattcagcgagctttttgaaacttggcctttcgagctatttgatattgacagcataacgacttcgattgaggaacaacttgaattcgagaagatgacccctgacttagaagacgggccgatactgataaggggtcttgccacgatatatttgactggccgccctataccgatgccgtggatgctatattcggatcaggatgcgacgcagtcttgttttggtcaagaccataatcttttgactctttttgagaaaacccggttataa

SEQ ID NO: 25576 - DNA, 238 bp, Emericella nidulans
gctattcgaaatcgactggcgcactatggcgctggatacatccagcggatatgccgctcacagcagcctgattgaaccagatccgcttcctatgttcgacgtcaggcatgtccagcttcagttccctctcgctgccgactttgtggccgcgcaggtagccgacaatgtacttattctggcactatcgactgggcgcattttgcggatcgacttgaacaaccctgagcatattgacggt

SEQ ID NO: 25577 - DNA, 984 bp, Emericella nidulans
ccttctgacctgaatcgcctcaatccaatccatgttgccggcacgaaaggcaaaggctcgacctccagtttcatctcctccatcctctatcaatttacgccttcgcaatcatcttcaccggtattcaacaaggtcggcctgtatacctctccccacttgcgattcgcccgcgaacgcatcagaatcaacaatgaacctctttccgaagaactgttcgctcaatacttctttgaagtgtgggaccgccttgatgacgctgcccgagcggccggggaagatccaaacaacctacagacgaagccccaatatttcaggtatctcacgctgatggccttccatacctatctgagtgagggcgtggatgcagccgttatcgaatgtggaatcggtggagaatatgattgtaccaatgtcattgaacaaccagccgccacagcgattacaagcttggggatcgaccatgttgctcttctggggaatacgattgaggagatcgcatggcacaaaggcggcatcataaaggcgaacactaaagctttcagcgcgccccaaccgccaagcgcggagaaggttttacgtgaacgtgctgccaacaagcacactgagctggaattcgtgtccagtcatcccgatctaaagaaaaatggcgatattaaactcggcctagctggtgactttcaatatggcaacgctgcgctggctgttgccactgctggagaagtccttaagaaggtagggaagctggatatcagcgctggcttcagagagcagtccctccctgcggagtttcgcaaaggtcttgaacaggcacaattagagggaagatgtcagaccaggaaggaggaaaacgtcatctggtatatagacggaggtcacacgcaggaaagcatcaagctagccggtcagtggttcgcatcacaaatcaaggcagactcttcgtcggaagcttcagcagcgaagaagctacgggtcctgatcttcaac

SEQ ID NO: 25578 - DNA, 324 bp, Emericella nidulans
agggccatggcccaggatgtgggcgaagttcgagtccagcctcccaacgccagcctacaccctgacgatgccttgacagagaaatcgtcagtcgcagaatggtcttcatcgcctctgaagcattctcccggcggacacattagcgataaccctcccatggaagcctcgcgcgcagagtcgacggaccaaacagcgggattgccgcaaataacgggggacgaggtggcggaaaatgctggacccagtcaagcatggggtcgcaaactgcggacattgccgggtaaacaagtccctctcagagtgcacgagacaggaggaaactga

SEQ ID NO: 25579 - DNA, 527 bp, Emericella nidulans
aatatctctggtttcatggttggcgcagatgcagaaaagggcggtattgcgaagaacggcgcgaagctcgtgaccgccgttgcttgtgccgatgtaccgaagtttaccgtggtgtttggatctagtgctggtgctggaaactatggcatgtggtatgtactttttggctttccccttctccttgactcctactcagaggccaaatatgtacaagcaactaaccatctgccagcggccgcgcatactccccccgcttcctcttcatgtggcccaacgctaaaatcggcgtcatgggatccgagcagctttcctccgtgatggaagctgtagggagaaccgcagaccctgagcttaaggccaggattgaccgcgaatccgaggcaaccttctcctctgcgcgactctgggatgacggtatcatccctcctgcgcacacccggcatgtgctgggattgagtctggcggctgcattgggaggtaagagcgataaagatgtacagacgaaattcggtgttttccggatgtag

SEQ ID NO: 25580 - DNA, 588 bp, Emericella nidulans
atgaaacgccagacccggaagttgctattggcgggagtcaaaggaagtctgagacgcttgctctctggggatctactcgtggagcaaaaggagaaagcggcgcccaagggcaaacagaaaaaaaaggccgctgtagtagctgacagtcgcaacgctatcaagcagttgcacggttgcgggctggcgttcaaagtggtcaatgacgcgaaacgtggagtcctcgtatatgttcgtgtctactccgggtccttggaccgcggtagtctattatataataccaacttgaatgtttcggagcgcgcacctcgcctcctcaaaatgtacgccaacgatgcggttgaagttgattcgatcagtgaaggacaaattggggttgtggtcggcctcaagcacgcccgtactggcgatacacttgttgcttgcactaccaacaaggcgactccacctgaacctctggataccctccaactacgcccaattgacgtaccgccaccagtgttcttcgcaagcgtcgaacctcacagcctagctgaggagaaacggatgcacgagtcgttagctttgcttttacgtgaagaccctagcctt

SEQ ID NO: 25581 - DNA, 1077 bp, Emericella nidulans
accggaatgtcttcagcctggggaggagttatgggacttgctcatcgaccattgagaccgcgaggaggccgcattacccagactcagcgcgaagccgagggtgctactgccgccaaatcacgaaagcgaagatccgcaaggccaactccgccgccagctgctgtcactcctgtcagtcgagctgacacaactagtgcagcaagcacggtctataatgtgcattattatcctgtttccagtcccacgccaccggttgccatgcccttcatggaagaagaggatgaaggctctgatggcgatggggagaaggaacttgcggtcgttcagaatcaacaaagtagcttgcctactcaggacacctataccgagccgaggagacagaattcgccacaaatcgtaaatgtggacaaccgatggcggttcatcttgaaccccttcaagaacaggcacgcggccttaccaagagaagtcgcctcggcgcaggcggaggaagaagggttcctctccccagatgatcaagccccccgccaaggagacgaagaaaaccctcattacacccctcggcatcgaggtctcttctctttccatccaatgtcagatggcgcatcaaggcgacagagcggcgccgatcagccgttgccagtgacagtgatacctgcccggcgccgtggccaggatacatggtcaccgcaatggtttacaaattccaatcttgtagaccggtcctcaagtcgccggactgcgtcacgtactcgtgatcagcggatgaaagtgattcagccgcaggtccagagcgccgcaccgtggactgctgccgatatggaggcttctttcagctctatggattacgagcttcggtatgatcctgaagcagcggcgctcgtgtccgaggatattcctgaccatcattcgcagcctacgcaggctgatagtccggcccatcccactatgtctggtgggaatggcccttctggtggagagacacagtccgcactagatactgggcctggtattgaagggtcggttaatgaagggtcggttattgaagggccggaggagtcccactctcaacgatag

SEQ ID NO: 25582 - DNA, 717 bp, Emericella nidulans
cagatgggccctaataaccatatgctcacatttcccgtcaatggcggtaagaccctcaacatcgtcgcctttcatacaacccccgacacctggaccgaccgtactcgcctgactcgcgacggcacacgcgaagaagctcttcgcgacttcgcaggttacggacctaatgtcaccaagctcctcaaactctgtgaccccaagctcagcattgtacgtactcccacccccgcaaataccctcgatttcggccacaggaaacaggaatcactaacagcgaaatagtgggcaatctttgacttgggcgtccatcccgttcccactttccacaagggccgtctcgccatctccggtgacgccgcacatgccacatccccgcaccacggcgccggcgccggctactgccttgaagacacagccgtccttgctacgctcctctctgacccgcgcgtgcaaaataacagcgacattgagacagccctggctgtcttcgacgcctgtcgccgcgagcgcacacagtggcttgtacagagcagtcggttcatcggcgattgttatgagtggcgcgctgagggggtgggacgcgacttccggaagattgaggaggcgattaatcgccggaacgcgatcatcacggatgctgatgttggcggcatgtgtagggaggcgaaggagatgttggggcaacggttgggcggggaggagagggctgcgctgtaa

SEQ ID NO: 25583 - DNA, 2182 bp, Emericella nidulans
gcccccactggtggacaatcaagttcttttcgttcggtaacaacgttagccacttgagcgttggatattgaatgctcatccacgatgcccaagcccgatgatactttgcctgagacggagttcaaggttctccgtggacctgcggagacagaactggacaccaacaaacccgatctcgatattaagttcgataaaaccaaggatacagaagcatggactgagatgttcaagtctcaatacccagcggctgctaaccaagctgaaccaacgacagagacttggagagtttctgcgcagattggagtcattgtttataacccgaacgagcctcgtacagggtggatgcagtcctcatgccatcagttcaaccctcataaccttgattgggggtggaccaacttccatggtccctgggaccaaatccaccgtcgtcagcgtctccagcatcaagcattgcttcgcaacgacaccctagcgttcgatgcgtacattcgcatttttgacgatcctaccaggtctctttggtggcatcccagtgactccgaacccacttgggacagccttggcttgacaggctaccggccacttggtgactcagtcattaaccacagcgcagatgttgccgggcttgccacttggctgcatattgctcccttctccaaggtcattcagaatgtgaacgtcctagaacaccttacgaattgcgatctgaaacccaagccgttgtgcgatgcgctacagaggtttctctggcagttacgccggcgtgaccaatctcttcagtatgtcgacacggatacaatcacaaccactctcagcaacttgcatgagaagtctagtgacgtgtgcgagttttgggagcggttgcgccggtctctggaactagagctcgcaggtactcccgcggcagacgacctttcccggcttttcgacagcccttccccagcctctttcccttcaggcgctctgccgactcctgtgcacacggttccgaaggatttcaattcccgtattttcgttcctgccgacaaagccaaaaccacgagcgaagcgttcacctggtatctcagtgctaagcccgggcgatggttactgcccccagtcttgcaccttgagttgggccgccagacactcgataaagctgctcggcaatggcgtctactctacaaccgagtagatctggatgaagaagttgatttatcaccttggcttctcgacggtcagtgcgggaaatatatactgtacggatacatcgttcaccgcggacgacgcacatctggaaagttcttcagcatcctccgcccaggcgggcctggtaccaagtggctggcgttcgatgacggaagtgacaaccgagttgagtgcttgacgcggaagacggctttaggaccgcatcttggcttggatcctgacaagacgccggatcacaagacaggccatgacattgcaattgccgttatgtatattcgcagcgatgttattgcggacttcctacccggccctcaggggccatgggaggtttctgatgaactcaagcattactacgaaactggtgaagttacctctcagaagaaaaacgaaggtaagacagaggttgaggatattcaggtcgaagtttactccttggagaagtatgataatctcagcagtctgtttgattcatatgatctcatgtctcaggccaaggccgcaaacagtgtcatgtacatgagcgtgcctcgctccacaaatctcatagaggttcgcaagaggatagggctttgggcttctacacgttcaggagcagaggtcagcccggagaatattcgtctctggcaaattggccatgcacgcgattgctcggcaactgtttcactcaagcgcgtttctgatctcacggctactgtcgacctgccgttgaaccctgtgcgttactggatgcagatcgtgtcggacggtgagtttctctatttagctactttgaaaatcatccaacttactgacttgatggaaggcgacgccaagtacttcgcgatgaaagatcctgagacgccagttgctatcacctctaagcctgaagaagctgttgttgagcgtccaggctccgagacttcggacgatacaccaacgactacgtcttccgagggcgccgagccaagttcctctaataccggaaaccagaaccctatggacggaatatcgg

SEQ ID NO: 25584 - DNA, 496 bp, Emericella nidulans
aatgtgactatgtctctccactcgaatgccgcctctcgatcggtctttcccaagggcccgagtttcacccttgaggatttctcgagtcgcgactacattgtcaaggagtttatcgaagctctttccgattccgcaatttcaagccgccgttcttcgcttggccctgcaaatggaaaccagccctttgacccaaagcccctcattcggactttcgaacatgcacagcgccgtctaggggaattgtcaggggatctggaaataagagagaatgagttgtcggcagctgtccgtagggctgaagctcagcattcccagaacctcaatatactaggacggaagctgaagcaagcaattgagtcgtttcaacagctggatacatcatttcagagcgctggacctggcgatactgctttaggcagcggaaatatggctgtggaaacgggaagagagctggaagaacaagatcgacagagacgccgcgcgctcgatgctcacg

SEQ ID NO: 25585 - DNA, 468 bp, Emericella nidulans
tacaccgtcgatctagccacctccaccagtcgaatctacgggtacactgttctgatgggcgtcggcgtgggtgcctttatccaggcatcctttgccgtagcacaggccgtcgtcgagccagaaggcgtcccggcagccgtaggattcattacactagcgcagttcgccggtatcaccatcgtcatggccattgcgaacgcgatattcttgaacgagtgtttgtctgaaatccccaagatcctcccgaatgtctcccgctcggacattgaggcggcaattcaagggaccagtgatctgctggacacgctgagcagcgagacccacacccaagtactcaacgcaatcgtatctggtatcagcaaagcatatgcactggaaattgctgccggcgctcttgttgcggtgctgagcttgctcatgaagcgagagcggttgtttggggtttctgctgcagttgctgcagcttaa

SEQ ID NO: 25586 - DNA, 276 bp, Emericella nidulans
atgcccggcctgacccccgcccaagtcacctccttccacgagaacggctacctcgtccttccagactacctcactccccaacaaatcaacgctctgatcaccgaaacaacctccctcctcacatcgttcgacctctccacacaccccctaacacaatttacgactggcgatgacgaaaaagacaacaagcctcacgtcggcgacgactacttcctcaccagcggcgacaagattcgcttcttcttcgagccggacgcgttcacgcccgatccttct

SEQ ID NO: 25587 - DNA, 723 bp, Emericella nidulans
cgcggtgcagcctcccgacatatcatgtctgcccatggccctccggccgtcccttcgcgaaacgccctgagagtgcttcggaatcttgccgttgcgggctcaacagttggaagcttttgcacggttgctgcgatcacctacgatgtgcaccgacgagtctccgtcgcggagcgcattatcgagaataagcgagcccttcaaacgtccgctccgagatatgatgctacgtctgcagccagaagaatttcccggatgatggaagcagcagaagcaggcgaatttatgggactggaagcatggaaagagagcgagaaaaggtacaggaatgcgccataccctagcacggggtacgacgggaatggctctcccggtgaaagtcctggtacctgtacgacggatggcgccaattcgccggcctcagtcggctctatgactggaaccgcaacaaaatcggaagaggtcacagagctcgttacagaacttgggtggaaactcaataggttacggcatgggcccaagacagatatacctccttccaaaccacttccgccaagcctcaaaccaaaatatgtcgttcgacagccggacccagatgcagatattgctacgatagatgccaggctggatctaccttctgggaatcagttgactcttgacgaacggatagaaagtcttaccgagcgtggtcagtacattgattgctgctcaaatattcttggatga

SEQ ID NO: 25588 - DNA, 1317 bp, Emericella nidulans
gagactccactgtcttttgctgtggaaaaaggagacgaggagatagtccacatgttactgaaagctagggccaacccggacctagctgacaacagtgggagggtgccactatcgctcgccgcagaaaacgggaaccatgagatagtgcagctgttgttgaaagcaaaggcaaaacccgacatgagggacaaaaaaggcaggacgccacttctatgggcagccgacaaaggccacaaggacgtggcttgggttctgcttgccacagaaaaagtcgacgtcaactccacagatgagtatggctgcacaccactatggtgggcagctcgacatgggcatttgccggttgtgcggctgctcgttcggaagggagcagatattgaagtacaacccagaatcaccgacaggagcaaatttggaaaccctttgttccaggccggtcgaaagggtcatttggaagtggtgagatatctactgaagaagggcgctgatgtcaacgcgacgaatggcgagaatgagacctcactgctgctagcactgttgaatgatcgaaccaagcacgggagggaggtcattggcttgatattgcagaagggagcggacgtcaatgctgcggacaagtctggacaaacgccactcgacatagctaccaagcagaacgatctggaattgatgaacgttttaatggaacatggagccgagatcgactccgtaacggaagaaggcgcgaccccgttgcaccaagcaataatcaacgagcgcgaagatatagcggaggtattgctggagcacggggccgaccccgaggcgcaagattcgcacggggatgcgcctctccattttgcagcagcaagtggtcgccgcaagatggccgagttgctcctggacaagggcgtagatatcgacatcaccaactacactggagacactcctcttcataaagccgccagcaacggacatcgaaaaatggtggagttcctactctcaaggggagccacccttgagatacggaacgattatcgacagacaccgttgcacaaggcggttggagctaaacaccatatcttgaggctgctggtcaaccgagatgccgacgtcctcgcaaaagacatgtacggcaagacagccctccatctagctgcggaagctggtctgaaggaggatgtgcactttttgatgggtcatggggccgcaactgacggaagagatggtaacggacgcacagcacaggacttggctcgagtagagggacacgacgatgttgctgaactgtttaacaagatggcgttggttctcgcggagcaatctgggtctgattag

SEQ ID NO: 25589 - DNA, 1492 bp, Emericella nidulans
gggccattgagctagcagagagtgtggaagttggaaaacctgacgttgaactcggacaagttcttgtcgatggtgagggacaggtacagcgattgcctgtacccagcaaggacccgaatgatccattgaactacacaagatgggagaaggtcggtatcattgtgagctgttgctggttctgtaagtgattcgacactaggcgcggacgagatcttgtgctgatgatacctagcgacaatgtctttgtcgcttgttggggcctaggggcattccttgacgtccttttcgagctttacatacccgatggacatagtaccaatgaaatagtctggttgtctacgttcccatctctttttgtcggcgttggtcggtcaatccactcttcccactgtatgttccaatgctgacctagcaaggtaattttcttgttctcccgctcgctctgctttacggtcgaagattcacaacaatcctttcgacaatagtccttctcgcagccaccattggttgcgctgtttgcaatacctgggagcagcatctgggtctgcggatcctccagggtctctcagctggtgtaactgaatcggtaagtttcgtgcctcataccaagagttgtcaactaacttaggctcaaccaggtcctgcctctcattctagctgaagtaacgttcgtgcatcaacatggaatggtatatggcatgtattgggcagcacagagcaccattaccggatgtctcaatctagctgcttcctacgaagtggcagctcttggatggaggtggtactactgggtctttgcgatcacggtcgccgtcggccttctccttgtcatcgtcttcgggcttgaaactagctaccagcgcacgtcccagtttgtccatggtcgcatggttgtcacagaccagttcggcgtaactagggtgcttagcgaggacgaaacacgacagtatctcggcacccatggccacccatatagtcgcgacgacggccatataccggaagagctccggccaaagaagacatactttcaaatgctaataccatgggcatcgccaaccgaaagtcctctgatcctcatcccccgaaccacgcttcagatcttctcagccttcttgtcccccggcatcctgtacgcaaccctcgttgcctctgtcgtcctcggctcctcaatcggcatgtccctctcctacaacacagtcctgcagtacaactaccattggcccgcaaaatccattgggctaatcaacctcggtggtgttttcggtggcttcggcggcatgctctacgcaggcttcttcggcgacaaattcatcgtgtggatggcgaagcggaatggcgggattcacacacccgaacaccgcctccctctccttattctccctggtatcctgggagtggtggcccttctcctctacgggctcacagcggatggaagcgcaacttggagcgggccatatatgggtggacgctcttccaaatcaccttcgtgtct

SEQ ID NO: 25590 - DNA, 995 bp, Emericella nidulans
atagccatgtcggttgtttctcttctcggggttaaagtcctcaacaaccctgccccattcacctcttcctaccagttcgagatcacgtttgagtgcttggagcagcttcagaaaggtttgtcgtctcgctactacgcttaaatatcccatgctcatttcgaaattctgcagatctggaatggaaactcacctacgtcggctctgcaacttcgtaagaacgagatgacccccgaacttcgcgaccactaacatgtctagttctgagtacgaccaagaacttgactcccttcttgtcggacctattcctgttggcgtgaataaattcatcttcgaagccgacccaccagacctccgacggatccctacatcagaaatccttggcgtgaccgtgatcctcctcacctgcagctacgatggcagggagtttgtgcgtgttggatactatgtgaacaatgaatacgactcagaggagcttactgccgaccctcctgccaaacccatcattgaacggatccgccgcaacatcctcgcagaaaagcccagagtgaccagatttgccatcaaatggtattttctttacgtgcgctgtaatgagttgtggatgctaattcttgtttcctagggatacggaggaatctgctccagctgaatacccgccagaccagcccgaagcggatggccttgacgacgatggtgctgcttacggtcaagaggaggcggaacttgaggctgcacttctgaaggagctgcaagaggctgaaaagaacgagtcaaccaagggcgaggaccacgacatggagggcgcagacatggggaagaagacatctccgacgcagaaagtgaggatatcgaagacgagagggatgacgatgaggacgaggtcgacgaagaagaaggtatcgatgccgacgaggacgtcgaaatgggcgatgactcggaaccgaaagacgacaacgcaaacccggccgcgcaccattcgcagcaggaagttatgg

SEQ ID NO: 25591 - DNA, 303 bp, Emericella nidulans
atgacggtgactgcctcagctaaccacggctggacaagtgatccttggtggatttacaccacatgcaatatcttctgggtcgtcaagacacactacaactttggcatccttgagctggtgcgcgaatgccctcgctttgggctcatgctggcctccatgtgtctctccattgtgttcattgtcttagacgtgatcagcgtgactggagccctcgacgctgccatgccgctcggcatcaacccgttttggaaagtacgccgtcctcccctagatccagttctgaccaaggtatatcagttttga

SEQ ID NO: 25592 - DNA, 1678 bp, Emericella nidulans
atgtcgacatgggtggccctcaacatcgagcccgacgaggcaatcgaggaggaggtcgatgatacaaaagaaatccagatcgaggaagcgctgaagctatatcagaacgcgctgaaacttcactctcagggtccgcgatactacaagcaagctggcgaggcatacgaggccctcctagattcggagatcttcaaataccccgagtcgctttctatcacaagagagctgcgttgcaggatgcggacctcaagttggtggcacaacaaacgacgcagtggtaggagaagcagcgttggatttcaatataaatgatactacctcgagcactttgcaacagacaatctatctctcttacaagaaccacggacaatacgttctcgacgctctacgtgcatcccttcaggagctctccaagttgtctgaagactcatctcacctttcatctaaaattgccgagagttctaccactgctttggcacagtttgcggaagcgttagaacgcgatgacaccgacctgaacctgtggaggcagagcgcgagactgtgtagtgcgttgcagagctaccggcttactcgtttctgtctggagagtgtcttggctgatgatgataaccggttggaggtgcggtcagagcaattggggctggaggaaacatttgcagaagagggcctcagaaagacgttgcattcagtgcaggatcgtttgtctgtgtcgcttgttcctatcaaaaagccgaagaaggctctcctaaaattcttcaagcagcaaagcgatccgtacccctatttgccttcgctaccagataacctacaggacctggactcctcgagaaacccattggcgttccgtgcttctacgcatgagatcaaaattgactccctgacatgggccgctattggtcaggctatcttgactttcttagacgacaagaatggaacaccctcgcttgcccctggaacgtctatcactatttcgttaccagcagacagtcctgaactgaaaacagcctcaatcacagcgcagcggcgaccctcgaaggctcaagtcgacgaaaataacaatcaggatgtacaaatggatgatgcgcaaagtgtcggtgcccgttcggtcaccggagcccagggacgagagctcgccatggaacacggagacgaccagtcttcagtcgaccagcgagcagagaaacaattgatcgaatctcttgaagtccaatcaattcagcaccagcaaagtacagacccacaagaggatataaaagccgaggaagacgacttgaagtatcctgaaaatacgagtcgcaaacgttcttctggttctgctatcaccgaagatcaggcagagcgattgagggtcaaaagcaggagcgactcgttgcgcgactcactcgctgaagcctcaacacatactgacgacgttgtgtttgatcaggccaagtattatgaagatcttttagaaccctatattcaaaccgacgaaggggtatttggcacagttggggccttattgtcgaaacttggtgttgaggatctggggacatttgaagagttacggagatcagtggcatctgcaggtgaacgaaaggactcgccggttactccagtcaacattgataatgccgaggtgcttttacaggatcttaggaatgtcctcactcagggggatgaaagatcgtattag

SEQ ID NO: 25593 - DNA, 660 bp, Emericella nidulans
acaatttcgtctctcatatcagcactactccccttttccacaaagcgcccaccgaaaccgcgacaagaatctcctgaattaaaccaattttcccttagccagagtgcgcagacagaccagtacctaactgctcttgctcctttgaaaataaccgcatctttaaacgccattacaaagtcagatctaggcatgtttgtcgaaaggcatcagatcacgctttccgcaccgcgaccctttccacctaatgtctacaagattgacgtttcctacgagaccaacccggaaacgcagtccgtagtatctcttgcagcatctgtggatgggacgacccttaattatctgcaacaatggattaacgggcggctacaggacccgctcagacgattagatatttccggactatgctggggcatcaaccgctactgggaagctctagtgtcgcgggctcaaatctgggctcaaatctgggatcagcatccggctctgattccgagtcgaaacaaatcaccttctgtaaaggtcaattcagatattgatatacggcgaatattgccacacctcgaacgtacatccattctgtttaagtcaaagcagagaacccttgaagccctcttgtcgtgcgaactcaccatcgacccttggactggggagccggactaa

SEQ ID NO: 25594 - DNA, 423 bp, Emericella nidulans
aaagatcctcatgccgccgggtacacaattcccgaactcgctatgctcagccgctcctcgttccccgcgcaacgctgcatcgcatggcaggttctgggccgcattttatatcgtctagggagaggacagttcggcgaacgtgggagtaccttggttgaagggctctggtctgtcattgaacgcgaaggggtcgtcgctggtatgttacaggaggcggattcgtcgaatgtttcgtctactcgtacagacaggggatttggagccgagggagacgaaccacaagagtactctggtgtaaataggagtggcgttggacgtcacgccagcgcttcggcttgggctgtggaagccgtttggttatggcaaatgggcggtgctggcgataggggaatcctgaagcccggtgctgttcgatcgcaataa

SEQ ID NO: 25595 - DNA, 819 bp, Emericella nidulans
gaagcacaagatgccgcagcgcaggattcagacgcagacgaggggggaaacaagagagcaaaaacgttcccctcaaagcctactaaacgagccaaaccaatggcctcctcgaaatcccgtaaacgccgcaagacgagtacagagagcgatggaaatagcgatggaaatagcgatgttgatgacgaggatacagagggcgtgacaaccacagaaacaaagcttaaaacaacgccgaaacccgagtctagcttggccaagaaaaaggctgcagatgactctaatgcaagtagtaaaaacacaaagtcatcgaaaccagaggcagaagcggatggcgattcagagagtgagatgtcagttgtcttagatgaagagcctcaaccaaagcgtcaacgacaaaaaaagagcaccgggacgacatctgcaaaggggaggaagaaggcgcccacgaaagcaaaggatgcggacgttgatcccaaccaggcagagatcaaacgcctgcaaggttggctgatcaagtgtggtatccgtaaaatgtgggcacgggaactggctccatacgatacacccaaggcgaagatcaagcatctcaaggacatgctgaaagacgtgggtatggaagggcggtactcgttggagaaggccaggcagatcaaggaggaacgtgaactgcgggaggaccttgagatggttcaagaaggagcgaagcgctggggtaaagacactgcaaatgatgacagtgacagcggtcgtcgtcggcgcatgaatcgaggccgaaaggccctcgcattcctagagagtgatggagaagaaaccgattga

SEQ ID NO: 25596 - DNA, 501 bp, Emericella nidulans
aggcggtaagcccaagctgctcttctataacatccgagaccccccctaccctccgcgatgccgacaatgcctctgaacgcccgctcaacgccatcaagcccgcacgcaacttcacaaagtatgtagaatacgacttcagtaagatgacagacacaaagggcggcttcctagccgaggaagacgatcccttcaacaaagctttgcacgtaaaggatggcaaggacgagaagcccgcaaatatgacgcagaaggagtgggagcggcaacagctgctcaagaatctgcgtcgggatcgtgcaggtcccttcgagccggggatcagtgtgctggatgagaagagcgaacagaaggtctgtcgcgagtgtggctccctcgagattgattggcggtgggaggaggaactacgatgtcgcgtttgtcatgcgtgcaaggacaagtttccggagaaatatagcttgcttacaaagaccgaggcaaaggaggattatcttctgacggatc

SEQ ID NO: 25597 - DNA, 725 bp, Emericella nidulans
actacaaataccgccaccatgaaattcaacacactcatcctccccttcctggcagcaaccctagcaggtgcctccccctgccagccagctccaccgtcaaactccccttcaacaaccgtaacaccggcccaaattctcgcgatagcaccgaagtctcaatcttgcgccaacgctaccgactttgtgtccgaatgtgctaccgcatcccaggctgcacctgctctttccgcagccttcaagaagtatggccttacaaacaaggcggagcaggctgctgtgctgggcatcattgcctttgagagcggcgagtttcgctacaataaaaaccatttcccttcgccaggggtggagggaaaagggagtacgtatacttctaagacctaatatttcggggaaatgctaatgagatgtgtacagcgcgcaacatgcaatccgtcgacttcaacaagaaatacgcggcctctattccggaaatagctgaccgtttcgaagaaatccaggatcagccgggtccggttctggacctcctactggaagacccagtgagggactttggttcgggggtttggtttctgactacgcagtgtgaggagagcgtgagggaagggcttcgcaacaatggagagcaaggctgggaagggtttattgttgactgcgtgggaacagatgcgaacgacgagcggaagggatactggactagtgctgttaaggctttgggggcttag

SEQ ID NO: 25598 - DNA, 705 bp, Emericella nidulans
gaaacaccaaccacaatccttttctttccacgcttttcatgcctgttcggatcccataatccctgtttcgaccaagtagacccgaccaatgtcctcctcatgtcaaggcctccatctgcatctgagactaccccctcgactcccccggtgacacctgctgcttctgcccaacatgattgctctggacgcccgagctctctacatagcaagcagcggcgccaccgcgatgttcgggaccagctcgttcatattgatcctcaacacgttccctctccatcccgcgctgaatcccccacggctcggcagtgggccaacccctcgtccaattctactctaaaaagagctaaaaccactgcttcggacaccctctctcgtccaggtctgtcctataccggttacaacagccctcagctgtctgaaagggacagcattttcgcaacacattatcttccttctgataacgaagctgccagttcaccgcaacttccgcccgttgaagctgcctatcatgatgttccctcaaagctgaactctgacaatgcctctccttcctcgtttactcccaaggccctctcctaccaacatcgcggcgacgacgcacacatggaagttgacgtccgcagaacacagccgttacgctccgcgccgctcctaccctccgacactcctttcacaatatcgcctgggattcagatgtggggctag

SEQ ID NO: 25599 - DNA, 2319 bp, Emericella nidulans
ctcaagtgcgacgaggaaaagccgtgtcgcggatgtcgagatcggaagctgttctgtgattatgctgatgcgaatgcacaggatggtgagcaacaaggtacgtctccagtctatggactcggggcgacgcgggtgaacatactgacagggtagggtccaacgatgaacacgagcatgagcatgagcaggaggaatactccccccttgaatcgcagaccttttcgccgctcaatccggagatgaacttccagcaactggttacgcctgacgtgcagattgattacctgccgccgaatccaggccctccgccgccgatacccgcatatgatggcaagtcatgcttggacaaagcgcagacgcaagctgaccaggtcccagctcaaactgtttcttctcttgtcgaccacgaaagcggcgttttcagcgtcgacgggaccttttttcctgaatttatcccagactccctcgtctcattatcgcgtcctggagaagccgacccatccgcattccctccgaacgactattacgcccacggactctttgactataacggtaaattcgacttcgatctgacagaagttgattttggcctgatcgacttctacaactcccgaggctccgccaatcccgctcccctgcagcccgacgagaccgactgtgacgcagacagagacagcggcattgccctcggcgcagaggcatacagccggtccagcctctcagcctggaagccagggcattccgaccacgccttcgccgaccagaatgacctgtccgtgcccaagtcgatcgacagccctgaagcgagcgcgcagtgcagacatcagatcctttcagaacggttgtcaccgggtagtcgtgatctcatctttggaatggtcctgcagacgagccagcgcgctaacctagcacgcattatgaagtcgtttcccagcacggagctgctcgacagcctgatccaggatttctttgcgtaccaggctcagcaggtggactcgtggatccatgggccgaccttccatccgaacgaggagagccctgatatggtaggcatcgttgctgctgcggctgcagtcaagtcgactatcccaacgattaggaagttggggtatgcgttaatggaggttgtgcggttgcagatgagtttgaaggtagcccgtcactttctttgcctttactgcaaatcatgcctctctgggtggctgataataggcttcacagtatgaaaacgacaacactacaatccgcgacctccgggcgtcgcagacgtttgccctgacgatcgatataggcatgtggagtgggagtggacggaggacagaaatcgccgagagcttccagcagcccgtccttacggtatgattttattctatcaatacacttaccctgtgctctgtcctaagttacctaagttaatcgtggctatctagatgctccgccgcgggctgcgtttccgacgctcgctctacccgactatcgtaccgtgtttagaagacacgccgtcaacattagagcgcaaatggcgcgactgggcggaacaggagtcattcaagaggtctgcccgtttcattcctccttcgtactctatcagactgaccggcaggttagactcgtccatcacctctttctccacgacgcccaatccagcctgatgctgaatattaacccccttatctcctacgcagacctggaactccctctccccatgatccgagcactctgggatgcaaaatctgcaactgaatggcgagacatttacatcgctacgtcagcatcagccttggctccagagagactcccctctctcgtcgacaccctacgagacatgtctgcataccagggccgtatcgaccaccagctctcggcctcggtgattctgcatggcctctcggctcttatcaatgaataccaccggctcaaattaattgcgcaggggagctcaaaacactggaacgcgctggtcatcaattccagacagcaggagctcgagcaggtgttgcaacattttcgtatgatcagcgtcgacacagaccccaccgctatgtctagccctagttccagtcatgagatatcgcttctgcacgaggtgatctccatgttcctcttcatgtcgctcgaagacctccagctcttcgccggaaaagaggacaggaacgaagcgcggcgcgtgtatgacagcgccctggaatggattggcagcgccgacagtcgtaaagcgatctggcatgccgggcaggtgatccgggccgcgagagccatgtccatggccaaggaaggctcgctcacggggttccttgccatcagcgttttctatgcgtc

SEQ ID NO: 25600 - DNA, 950 bp, Emericella nidulans
atgggtacgggacatcttccgccttttgacgaatgatactaaccactcagactcctacggcggctacggaggtaactcatatggaagtggcggtggtggcttcatgcccggcgagacaaccagtccgtctggaggaagggtatacaatgcgttccacctcccttcttccaaatcctcaatactgacagctctctttcaatgtgcagcaagaatggaacaacacaacccttcgccccgtaacaatcaaacaaatcctcgacgcaacgcagccctacccggaagcaaacttcacaatcgacggacaagacgtatccagcatcgtcttcataggccaagtccgcaacatcagcacacaagccacaaatgtcacatacaaacttgacgacggcacgggcgaggttgaagcgaagcagtggataaatccgtccgaggcgatggacacgaccgaagatttcggcaaggaagggaaggacctgaatggtgtggagatcaacggctatgcgaaggtattcgggaagctgaagagtttatttggagaccgcaaggtcgttaacacgcattgcgtgcggccgttaacggatatcaatgaactgcatgttcactttttggaggccgccgcggtgcacttgtttcatactagaggcgctccagggcccgctgcaggtgctaccgggaaaatcgatggtggtgatgcggcgatgggagggcttgatggggccggggttggtggcggtggtgggttcccggcgaatatgtctgcaactgcaaggagggtttataacctgctcaggacggagccgcagaataatgagggcctgcatgcgcaattcattgcggcgaagctgggccttcctccgcaagacgttgtgcgtgcaggtgatgagctgatcaatgctggcatggtgttctcgaccgtggacgatcagacctgggttattctggagtattaa

SEQ ID NO: 25601 - DNA, 1047 bp, Emericella nidulans
atgccttcccgcgccgcctctccggcgttatcggagaatgaattcgacatcacaggcgcgcttttccagaatgacagcgactccgatgccgagacgcagaagccaacgaaacgaaagaaggtaccggcggcaccgaatgtcaatcttgattttctaggcgaagcaaatgcaggcgactcggacgaagatgatgaagctttcatcgcggagaagcagacatccgcgaaccggaagagtgcgaacctgaagggccgaacggtgaagaagggcggtggtttccaggctatgggattaaatgcgaatctgcttaaggcaatcgcgcggaaggggttctctgttcccacgcctatccagcgcaagactatacccgtcatcatggaggaccaagacgttgttggtatggcgcggacaggatcaggcaagacggctgcgtttgtgattccgatgattgaaaagttgaagtcgcatagtacgaagttcggcgctcggggtttgattctgtcgccgtcgcgtgagttggcgctgcaaacactcaaggttgtcaaggagctgggaaagggaaccgatctcaagtccgtattgctggttggtggtgatagtttggaggagcagttcggcatgatggctgggaacccagatatcgttattgcgacgcctggtcgatttttgcatttgaaggtcgagatgaacctggacttgtcgagtattaaatatgttgtgtttgacgaggcggatcggctcttcgagatgggtttcgcggcccagttaacggagattctgcatgggttgccgtctacaaggcagacactgctgttttctgcgacactgccaaagtctctggtcgaatttgcgagggctggtttgcaggatcccacgctggttcggttggatacggagagcaagatttcaccagatctgcaaaatgcgttcttttcggtaaagtcggcggagaaggagggcgctctgctttatatacttaatgaggttatcaagatgccaactgggccgacagaggcgtccctgcgactaaaggaaaaaggccccgaa

SEQ ID NO: 25602 - DNA, 1740 bp, Emericella nidulans
atgtcgtccgaccctaaagttactgccgagcattccgaatgcgttgacatgtctgtcaaggatggctctgtggagagctgtgctggaatgtcgcctcgcgcccctgtccttgacgatgagaagaaccgaaagttgcttcggaagattgatatgcatttgatgcctgttgtaagatcactcgcccttgattgtgctcctgataggcgacgctcacgaccacagatgtgcttcacctatgcactccaatactacgacaaggccctgctcagccaggctgcaatctttggactgagaacagatctcggcatcgaagacggacttaagtactcgtgggtctcattgatcttctactttggctatatcgctggttgctaccctgtgcgtcagcgtcccctgtaactggacttgtctgtgctctgacatctgctagatatcctggctatcacagaaattcaccgtcggcaaagtctgccctataatctgctttctctgggccgtggtagtcctcaccacccctgcctgcacaaactacaccgggatgctcgtaaaccggttcatgctagggttgatcgagagcggcgtctcgccagccttcatgctctgcacaggcatgtggtacacccactctgaacaagtcttccggtcatcgctctggtactcgttcatcggcggctctaacattgtctccccactaatcaattacggcctcagccacatcaccggtggcgtccttcacccctggcaatacatgtacttgattgccggacttgccacactcctttggtccatcatcctctggttcgtcttccccggaagtcctcacatagccaagggattcagcgcggaagaacgaatcatggttcttgaacgcgtccggtctaacaacgccggtgctgagaaccggcatttcaaatggtaccaagtgcgcgaggcgcttctatcatatcaattttggttcgtattcgtcctctcgcttctctcgagcattggaaggggtgcagtaacgacattcggctcgatcatctttaacgggatggggttttcgacctttcaatctctactactgaatatgcctatcggtgccttggcctttatctgcgttctgggatctgggtatatcggacgcaaggtgcccaattcgcggctttatatcgtgagtggtgcttgtgtgccggttattattgggagctgtttgatgtatattttcctttccttgaagagatacaggggcgatgttcactgttgacttctttagatggcaactaccctcctcccagcgtgccgcccgcattataggcttttacctcattaacttcttctcctcagcctgggtgcaatgtatcgccatgggaacgtcgaatgtagccggccatacaaagaaagccaccatggctgcggcgacgttcatgggctactccctaggaaatatcgtcgggcctctcacctttgatgcgtaagtcgtcccggttttattgaccacatgcaaccaaataccttttgctcctgcgcgactctaacatgcttcgtgaaaacaacagcaacgatgccccccgctacgacccagggttccgtgccacggtcatctgctttgccatctgctttgttctcgcccaggtatttagagcgctcatgttggcgcagaataaaaggaggaatagcaagtatggcccgccgacgcaggaacacgggttggaggacttgaccgatagggagaataagtcgtttcggtatcctctttag

SEQ ID NO: 25603 - DNA, 518 bp, Emericella nidulans
atgactcaggctgaatcttcagctagtgctactcgcaatgccctgaaagctaatactgctggggctcccccagactatgagctgccttggtacgctgcattatggaagcaccagagcttcgaaagttgacaacctactttagggtcgaaaaataccgcccagtatttcttgacgacgttgtcggcaatacggaaacggtagagcgtctaaagatcatcgccaaagatggaaatatgcctcatgtgattatttcgggcatgcctggtattggaaagacaacttcaattctctgcctggcacggcagttgctgggtgactcttataaagaggctgttttggagttgaacgctagtgatgagagaggtatagccgcccctaagttggcaataatagtgttttaactcgtcggtttatgaaggtatcgacgtggtgcggaatcgtatcaaagggtttgctcagaagaaagtaacgctgcctcctggtcgtcacaaaattgttatacttgatgaagccgatag

SEQ ID NO: 25604 - DNA, 1212 bp, Emericella nidulans
attgttcagcgcatctcgctcttatacagcgtctttcgcaacgtgaatgataaccgtgtaactcagattccgaacgttgttctcaacacggtgtggatcgacaattactcgcgctcatccgctatgcaggaaaaactgaccattgaagtgaacattgacaccactaccgaagaaatccaggcattgaaggacgaaattgaaaccttcgtccgtagcccggataacaagcgtgatttccaccctgacgttgatattgaggtctcgggtgtaggtgctctagacaagctagaactcaccgtaggcctattccacaaatctaactgggccatcgagtctgttcgtgccgcgcgccgttccaagttcatggtcgctctagttgccgctgtgaagaaggttccaatccgcacccccggcgctgcagctgaggatgccgctgcggcggacggtgacaggcctgatgacaagcctgatgacgccgagcagcccccggctcgtcagtcctccatcagcgagggaatacgccatcccaccgttccagacgacagcttcccttctgattccaaatcaactggcgtcgatctgggtcgcccaggatctgttcaacgccgaggcgcaagtgctactgctgcaaccggaaataactcggctggcagcgcctacagcgagaccactctcaacaacaccgtcagcgagccctaccagcgcagctttacacccaacacgggtgaccgggacacagaccactaccatggctccatgtcttcgcccgtcacggaacgccacctgggcgtcagccacgactccatagcccgtaaagcatccacagcatcaaccggccgtcggagggcgggcataatgactacagcaaaccagtcccttgcttctcccaccactatgcagtcggagtctgcgctgcctcctcatctgcagcccccaccgccgctccagccgtcgtcgtcgcaatactctcaacaatacccgcaacagcagtctcaaagcccgtacagctatacatactctgagcgctatgatcagcctgagtcttcgttgcagccgttagagcatacgacttcttataaccagtcgctacctcaggtgtacgagtatgcgccggcggcggataggaactcgctcgaaggacattcgccgcacgttgacccgcggcatatgactgaggaacagaggaggaattatgaatcgcggaggctataa

SEQ ID NO: 25605 - DNA, 525 bp, Emericella nidulans
atgagctcaatccagattcccatcgacgcgattacctcgcgattcggagatcggttcaacagtcttcgctcccaatcactgggatcacggtttgccaatcttcgtccaatttctgagtttctagacttcaagcgactttcaaagcctgccaattttggcgaagcccaaagccgggtcaactacaatctgtcctacttctcgagcaactatgccgccatctttgtgttgctcagtatctacagcctcttgaccaacccgctgctactttttgtcatcttcctggtcagtggtggcctttggggcattggaaaacttggcggccgtgatctcgacctaggatttgcccgatttaatacctctcaactctacactggactgctaattgtcgcggtgcccctgggtttctgggcttctcccattgccacgtttctctggctcattggagctactggtgtgactgtattcggtcatgccgcgtttatggataagcctattgagaatgctttttccgaggaggcggtctag

SEQ ID NO: 25606 - DNA, 587 bp, Emericella nidulans
tatcagcaacgtagaatactctgtcaatctaccggtttatgggagcgcctccgccgcatacttgctatcgatcccgaacggtcaaccggtgtgccattgaactctcagttccgtctgcccaccccaggagctcttcccccgctgtcttacgatgaccccgtcacggtcccagccggcgacatcgctgataacccatactggaagcgtgatgttcgcagaaactacccgagagtcagcacggtgaaccaagcggatgctgttggccttcttactgtgggaagccaggcagcgcctaaggaagaagtcctgcagattggcgaggcgggcgagaaacagctgatttcactcaagcaacatggtgaggagcggggtttggcgggtttattccagaaggacaagaatggcattagaggcgtcctaggtcccaatggtttgccaccaacaccttgtaacctgaactcttcttcaaagtatcagatcgacgatgatcacggatatccaaatgtgtacgttctccttcgcattgccttttcggatatcagcgtggctaacgtcataaaaggtatccttgccgcacctttgcctaa

SEQ ID NO: 25607 - DNA, 866 bp, Emericella nidulans
aagacaaaaaagacggcatcattcactggcgctggacccgctgagaatagaaaccatgctgagcgaaccagcagccaacataatctgaccactggcgtgtcgggatgcgcgctgcaagtgcaacaaagcgcagaggatacaaatgctgcgagacagaaacgtaaacttgacgagacggtctctgaaactctgaattctcaagagaatattgatgacaatgtagcccccgtggaagaagaatctgcacaaagcaagatcgcgggttcaatgagcgcgacaaagcagcccggcaagaggcgcaaatcggcggcgagctctgaaaggcagcaacaaccgcggaagccatcccctccatggccagatcatttcaaacacttatctcggacccaccgggccttgaatctaatctacaccttctgctgcacgcggaaacacttcgcgacgacattcgacaatatcaagaaggctgtacaagcgcagacagggacagaacttacaatcgaggatattgcgcgagtacgtgtccttataccgcgggctgtgagattcgagtatgtgaatgaggcgaggctggatgttttgagtgctggagagagagaggtcaaggggtggggcggggccatcgataatggaaatggagatgaaatgaatggtgaggcggatgcgaaattagacggcgtcatgtacgcgttgttattcgagtttctggatggagacttgaagaaggagaagaaaagtcttacttcagggaccagagacaaagacgaggatctgaggatgccggtttacagccagaagcagatgctgggtctgattgagaagcggaatggaaagttcgcagacgcagttgatgcgtttcttgtcag

SEQ ID NO: 25608 - DNA, 1037 bp, Emericella nidulans
cctgttcgggataggtcgaatcttcttatactccaaggatatgtggataggatcaagtgggcggagagcaacaggactaaggcgttggccgaaggggtggagtatacggcgccagatgggagtgtcaagactctatatgctaatgaggagatcattttttcggctggatctgttcggtcctcggctatcctggagctctctggggttgggaatccagagtatgtccttcatatttcgtattattcgcactaacttttaataggatacttgaggattttaaaatccccgttaaaatcttcctgccctctgttggcgaaaacgttatcgatcaaccgaacaccttcatagcctacgctagcaactccaccttctctggaatggccccttacgtgacctatatgacagcctcagacatcctgcgtactgaagcagggactgtcgcggccgaaatcgctgcacagctcaaaacttgggctgatcaagttgcagaggcaagcgacaacgcgctctccacctccgcacttgaacacctctcgaatccagcacgatcttatctttgcccaagacgtgccctgcgtcgagatcttaactacagcgctaggaacaaacgtcggcttcgcgttcttcactcttctccctttctcgaagggtagggttcatatttctttcgctgaccctactgcatatccagctatcaacccaaattatttaatggcacagtgggaccttattctacagcggaagattgcgcagaccgttgccagattctggaagactgctcctgtgagctcggttgctggggagagtgtacagccgcctggcactgacttacccatcgacactacggaagatgagtgggatgcgtggatttcaaggtcgtgtaagtctatcctgtcttgttctgtttcacggtctgctccgattctcatatctgatagtcagcgcaaaccaccactttctcggtacggcggcaatgctccctgagggagctgggtggcgtagtcgataacaaccttatcgtctacgggacggagaat

SEQ ID NO: 25609 - DNA, 826 bp, Emericella nidulans
atggccgattctgtcgcgacgcagcttaacacaagtttggggtatggagaccgttttgaattgttttggataaccctttactaaggctgcttgcctattattagtgatgcaaatccagatccaaagtggaaggaacaactaaagctcccagcaaaagatggcagaccgcagacggaggtttgttgtatttcatacaggatatgcttcgtcaatctaacatcttttccaggacgttaccgctaccaaaggcctagaattcgaagacttctatatcaagcgagagttaatgatgggaattttcgaggctgggttcgaaaagccatcgcccatccaagaggaaacgatcccggtagcccttaccgggagggatatcctcgccagagcaaagaatggcacaggcaaaacagctgctttcgtcattcctacactcgagcgcatcaatcccaaaagcactaaaacacaggcgcttatcctcgtcccaacacgagaactcgcactacaaacttctcacgtctgcaaaaccctcgggaaacacctcgggatcaacgtcatggtaactaccggaggtaccggactgatggacgatattatcagactcaatgatgctgtccacatccttgtgggaacgccaggcagagtcctcgacctagccagtaagggtgttgcggacttgtctgaatgccctaccttcgtgatggacgaggcggacaagttgctttctcccgaattcacccctgtcattgaacaacttctctcatttcaccctaaagaccggcaagtcatgctcttcagtgctacgttcccaatgattgtcaagtccttcaag

SEQ ID NO: 25610 - DNA, 489 bp, Emericella nidulans
cgcgcggatggatcacggccctttactaggcggccaacggtcaaggctgtcacgtcaaccattgcaacaatgatgaacatggtcgaaagcaagagcggtgacattgatgttttagaagttcaaatgaaaaagctgggctttgatacatgggttgctccccccagccggaagggatctcctttcacgaccccgcgaaagggtctgagcagagttcctgctactcctggatctcgcgggactctggaagatccagtcagttcgtaccacacaccggattctagttcccgaggcataaatatgcgttcgagcatcaacggctcagcaaaagcgagtagactccggcttgtggagcttgtgaacgacggaggggacagaagggaggtcgcgcagtggaaggccaaaatgcagcgcaagcagcatcttatgggtagcctcagaaaggccatcgaggagaaggagacgaaggtccgaagcgtggacgatatttag

SEQ ID NO: 25611 - DNA, 804 bp, Emericella nidulans
tagagcctcgtgtgcctgctgaaccactgaatgatactcaacatgatattggggaagacaacctgactgtggacgccgtcagcgaggaacaaggtcattataaccggatgaactgctctcgattatggtcactgattgtttgtagtgtctaatgaaaccgaggaagacgccgagcgggaaagtgcgtggataaattctttacgagaagccgccgatagacggcggaacgttgtctcgagtcaaccgagtcgaaaacgtgtgcatgaacaggaaacaccgccaacggagacaatcaagccaaccaaagtagcgaaatcacaacagcccgcttataaatctttggccttatcttccacaaaacccctaccgaaactccctatcctcgagcagctcgaatcgatgaccgcccgaaaacctgtagagcccaaatcagagccaccgaaaccgagacacgtcgacgaagacgacctccttctctcagctgcgcgtatagctgccgaatctttgagaaccggaccgcggcttcttagcgtctctgcaccctacgaaccatggcattcctcattcagccctggaagcagcgtttcctccgctgccttttcgagaagccaatcacctcaacaatcaccgtccattacgagcggatacgaggtatcttatgcgcctgatactgacctcggcttgggccgcagcctgtctcggacagaacagcggatccgcatgactggtggcaaggggctagcttataagcctctgaatctaacgccaaagaagaaaatgtggcccacgacaccgaagaattga

SEQ ID NO: 25612 - DNA, 1448 bp, Emericella nidulans
atgccggcagcaccgagaaagaaggctaccgccgctgcaaagcgagccgccgagtctcaagcgtcctcgggaagcgagagtacaccaaagccagaggggactaccaaatcccacaagcggtcacgctctggtaagacatccagtgtctatctaatctatcaggaacatctaacgagttttcccaccaacaaggttgcttcacatgccgtcttcgtcggaagaagtgcgatgaaaagcatccgtcctgtggagcctgcaacaacctctgcgtgaaatgcgagtacaaacgcccggtctggtgggggaatgcagagcagaggaagatgcacaaggaacgtatcaagaacaagatcaagcagacgaagatgaatgagcgcaatggctcattagccataggtaggccgatgcccgccatgcgaccctttccatctcgcgtccttaccatctaaccaatacacgatagatcctgccagtcgcgttcgaagtatggctgccaactcgccgacttcccctgagttcgaatatggccgtccgttcccggagccctcatacgacatattcgcctcccaattcccgacacctgccatggcccaaactatctacgcgccacaatatccgtacgaggtagacgtcaagaccgaacaccagacatttgttaatgatgtccaactgcgccatgactcagtgtcatcgaccttcagtacctttgctccaccacaattgaacgcgcctcttccaacttttccaggtgatgagtggtttcacgatgagtacttcagggcaccagttctccccggaatcgaccctgcgctctgtgagcagccgttccccgagacgtatgacatgcttcaaaacatacccgttagcgaccacgaccgaccccttcttgagcacttcattcacaacgttttgcgcgtgagctttcccgttcttgaggctcatcaacgcgggcatatgcgcgcacaagccgtccttcagaccctcgagacaaacaagtgctacctacattgttgccttagtgttgccgccatccacctgaaaacaaccgagggaatcacgggagaacagattgatcacgatatcatgcgaaatcgatttgaggcgatctctcaactatgccaagccctgggagacgacacagaacatcaggaaattttggatgccacgcttgctatgattttcttccactcttctgtaggacccgccgatgactatcttccggacattccctggttagaccacttccaggcagcggcaaatctagtgcaacgacttggccttacagcggacgctccgaacccatacgttcttcctccgttcagcatgacattaacggcatggattgatattcttggttccaccatgtaccggaggacgcctgagtttgcccacacctaccgatcgaaacacctgggtggagtgtctctgggcctacgtgagctcatggg

SEQ ID NO: 25613 - DNA, 1188 bp, Emericella nidulans
ctataggaactagaaaaaagttattgcccacctctcgatgctgctttgattaccgcaattgctctcgactatgaccttgcggaccaggtgcaacttcagcaacttcgcgaggcgcttgacgccctcgcacttacggcatgggaacaagatgatctaccattcgatccttcggggacaagcggcctgaactcaagcagtgagctaggactatcccaggctgacacaaatacaaacccgtcgcgagcgaccgataccacaagcgaattctcgtctcttagtctgagcgacaggagccaatcgacgtgttctccaggattgacatacactacaggcccagatgagagaccattgttatctggcgacccagaggagaataagatactatatctatgtgaaatgtttcctaacactgaacgtttcacgatcgagtatacactgagaaagtcaaacggagacgtcgatcgggccatggatgagttgctcaacttcgctttcctaaaaaatgagtcgcctaatgccgtaccgaaaggcgtcgaaggctttgggaatgaagatgctggccgaaagaagagtcgcaagcgcaaagggaaaaataagcacggtcgaaaccaagattcaggattaaccgtcagtcttgacagtgagcttgtgttgcaagattccagcaatacagtcaacaagtgggacgctgctcagaaggatgttgacttcatctgtgcccggacttttcctaccctcaccagggaaacggtcacgtcgacataccacgcaaatggggcctctttgtctgctactatccattttctagcgaattcaaatgcgcctaaggacaaatcgagcattgataaacatccggtcatggtccgccaagtcgacgagttgatgcaggatttcccggacatcgcaccagaaatccttgctggtttacttgtaatcacgagagattcaatttcggctgcacacgagttggcaaaggcctacatgacaaacccggcaccaagatctgctgttgaactgatcaagtttacaagctcgccccctccacatgaagttgaagaagtacccaagcgccggactgccgactcaagatcatatgagcaggcgaccgcttccgcagggtaccactcctatgctgcaccagaggcgcttacgaaggcttcggctgcctacaagacgcggcaagtctga

SEQ ID NO: 25614 - DNA, 203 bp, Emericella nidulans
gcgaccggcttgacgaccacgccgcgccgattggagatgtgctgcaagaattacgaacccagcttgcggagtatagagccctcaaggagcagattgctaccaatggtgctggcatcactggcgcatcccctagttccaccgcaacggatctacattacactccagatttccactccagcgcttcctcttcgtccttcacctag

SEQ ID NO: 25615 - DNA, 416 bp, Emericella nidulans
atatactcgtccatcattacctaaaccacaccaactaccagtactacgctctctacccccctgcttttatgcaagattatgcggattggtggtcggtcaaagcgggcggcttgccactcagccctgtatttacctgcttagttctccgtgtctgcgcatgtgctgtgccgtaccttgacgactctctacgtcaaaggctcgaatcagagctgggaacgggcgttgagcagctgtctatgcattatcacaatgcggcaaagcagttaagcaatactgtagggcctggtaaaggtggcttgatgcaagtacaacaattgtttctcacagcgcagtggttcaaaacagaagcaatgttcgtggaatcatggcatgccttgggtactgctattcatgaggcacaggagctaggtaccgcg

SEQ ID NO: 25616 - DNA, 456 bp, Emericella nidulans
ccgaacgtttttacgcccagactataccagacggagccatcgggtatctactctgcttggtacgtcatattttattggttgggtggaattttgggttgagttgtaactgagacgtggtttatacaggaaagcgaatgctatcggccgttccagcaagaccgtgcgagaattccttgagcgcaaccaccaggatgatatggaccgagagcagacgattcagcttacgatcaagtcgctgctggaggtggtgcaaacaggcgccaagaatattgaagttgccataatgtcaccgggcaagacgattgagatgcttcccgatgaccagatcgaatcttacgtcaagagcatagagacggagaaacaggaagaagcagcaaagaagaagactcgggccggcactactacggcggccatcctaacacgatccggtggtggggagtccagcgaggctcggga

SEQ ID NO: 25617 - DNA, 778 bp, Emericella nidulans
tctagaaaaaccgtcctgatcaccggttgcagcgatgacggcattggctctggtcttgctttgacctttcagcagcgagactaccatgtctttgcaacggctcgcaatatccagaagatgagcaagctccacggccttcctaacgttaccctgctcactctggatgtctgcaacaaggaccatatcactgcagcagtggaagctgttaccaaacatactggcggcaagcttgactacctggtcaacaatgccgacgcaatcacttcatgccgatcctcgatgaggatatcgaggttaccaagaagctctacgaaactaacgtctgggggccggtcgccttgacccaggcttttgccccattactgatcgcagctcgcggcacaatcgcctttattacatcaatagcgggctacctcaatgttccctacatgggtacgtcgtcgcttatctatattgcttgaaaattattggaagggaccatgtctctcaccgtgggtaagggttggaagctgactctcgcatgatatcaggcacgtacgccggctccaaacgctccatcgaactcatcgctgaaaccctccgtctcgaactggcgcctttccacgttcgcgtcctatcggtcgtcaccggcgcggtcaagacaatgggacagacgtacttcggtgactttaagctccctgaggattcgctttacaaacctatcgaacagacaatcgctagccgtgcgcaaggaggcgatggaaacgctcgcgaggacctgatgacgtatagcaagaag

SEQ ID NO: 25618 - DNA, 1121 bp, Emericella nidulans
taaccctacttctgctacctcgctgctggccaacaaccttccgctctccgcgaacttctacatctcttacattgtcttgcaaggattgtccttcagctctggtgctcttctgcagatctccgggttgattcttgggaaaattcttggccgtcttttggataacaccccccggaaaatgtacagccgctggtcgaatcttgctggtttgggctggggaactgtgtatcccgttttcactctcctggcggtcattggtgcgtatccctgctcatttaagtaatcagctcaactgaccgatctagcaattacctattcgtgcatcgcaccgctggttctcggcttcgccaccatcggcttgtatctcttctactttgcctaccggtacaacttgctgtacgtgtccaatgccgatattgacactcagggcaagacctttgcgcgggcgttgcaacagattctggtcggatgctacctattggtggtctgccttatcggtcttttcgccattggaactggtactgacccaatcgctcttggacctatgattctcacaatcattcttctcgtgaccatgatcatctatcacgtttcgctcaatgcagccctggacccgctcatcaactacctcccaaggaatctggaagcggaagaggaagctttgctttcacaggaaaccaacggggcgaaggatgaatacgacggcatgcgccagcccttccgccgctgacggtcaaaccgcggataatgttgactctgctgagaagggtctcactcaagccaaccccgctgaacccaagaccaacttcctgactaagtatctccgacctgacaagtactcgggataccgtcagctgcgcacactcgtacccaacggcacggaaactgtctcctaccctcccgaggtcgagcggaacgcttactaccaccctgccattagtgctcaggcaccacttctctggataccccgtgacgaaatgggcatcagtgctcaggaagtggctcacacgagccgcgttatccccatcacagacgaggacgcctggttggatgagaagaaccatatcgtttggaatgttgaaaagggtgttcctccgattttcgaagagaagatctactactaa

SEQ ID NO: 25619 - DNA, 1266 bp, Emericella nidulans
atgctatacgcccctaatccttggtgtggcttgatgattgtagcatctgcattgtcttatggcaaagggctctggaatctcagtgcttcagggctgacattcttcaacgatgacaattatcattacatccaggcggaggagtacggacgtggggtgctttttaggctccctgtcgccaacattcgtcactcgacgccaaatatgctcaaaaaaattacaagttctggatatgtgacagacgtccaccctgtcacatctaaatccttccacctactaatctccagtaacagcttagtagacaacagcatatggactgtggttgaccccgcgaaccctgctgatgcccatgtcatctcttccattggccatggcggagctgcttttggtctttcggcagctcaggtggacgaaatttggtacagaggggcagaagacaccccgatccacgcgtgggtggtgaagccgtccaactttagaccaggttccaagtaccctctggcatttctggttcatggcggcccgcaaggcgcatggaatgatcaatggagtacgaggtggaaccctgcggtttttgctgagcaaggatatgttgtcataacgccgaacccgcgaggcagcaccggttatgggcaggaattcactgatgcaattcgcgggtcctggggcgggttaccctatattgatctcgagaagggcttcgactatatcgagaaaaacctgaagtacgtcgacacgaaccgcgctgtggctctgggcgcatcctacggtggctacatgatgaactggattcaaggccaaccgctcggacgacgattcagagctcttgtgacgcacgatggcgttttcagcacgacctccctgcttgccaccgaagagctgtattttcctttgcacgatcttaagggcgtgcagtggatagttcctgagaactgggcacaatgggatccttctcgtcacctggataagtggcagacgccacacctcatcatccacaatgagaaggattatcggctgacgatagccgaaggcctctcggcgtttaacgtgctgcagatgaagggtattgacagcgctttcttgacattcccagacgagaatcactgggtccttaacccggaaaatgcactgatgtggcattatactattttcaactggatcaacaagcatgtcggtctccctgccgcctccgagcgcttcgagcagttttcaggtaatgaaaaggtggcgctccagaaccgtctggcgaaagtcagcctttcaaattga

SEQ ID NO: 25620 - DNA, 891 bp, Emericella nidulans
atgacggcaacatgcatgtgtccacatgttacttcgctccaagccgcggcacaacctcagattgatgggccaacattcagggacttattggataccctgaatgacagtggtatacgcgctttgcagtttgttggagtaaaccctggctttgtgaactcaatgtacggttatccatagatccatcttgaacttccgatactgacttctgcagggttcaaagtggtgcatcactgaaagaggacaccccggaacaagtgactcaagcaaggatatatcggcgcgcatatacagccttccagctccgtgatctcagcaacgaggttccattacctgtgatttcaagtcggtacaagattccccgtggaacaatccagactctagcgcagcagtgtcatggattcgccgcgggaatagtgaagttttgtcagcgcatgggctggggtatgttagccgcagttctcgatcatatgcgggatcggttggaagcaggtgcgcgagctgaccttctcgaaatggcccaagtgacctatgtcaaaggctggacggcaaggttacttcgcgacaatggatttcggaacctgagagcattagctgaggccgatcccaaggatgttgtacccgtattgaagatggtaaggcacttagactgtaactctattatcaaactaaccctatttctaaaggttaatcctcgtaagacccagcgaaaccagcttcacccaactgaagctgagcgctacgctgggaagttactcgctaaagcagaggtcattgtcgcatcggctaataggatttggggtaagcatactgaaacgcttgatttcggtgtgtgaggctaatcacgaccttgtctatccagaacgagaaatgcaggttgatctggatgagtga

SEQ ID NO: 25621 - DNA, 1365 bp, Emericella nidulans
atcagtcgccatggctgcttggatgaccccaccgaattgtctcttttgcaggtattcgtgaatcaaatcggtccctggatggatattgtggatgaagcgaagcacgtaagttattagcatcctagaaatttgcagtcgtttatctaactttccaagttcacgcggattctgccattgtatgctgtcgaacagccgcttctacgcgctgttatggcagcttgtgttgagttgtatgtctcaatacatctgtttaaagaggcaagtgagcgaatgcgccactacgatgccgcagccctgatgctctctgaatgtatagcaagcccacatcgtgacccgtccttgtgtgcaaccgccgcgctcatcattgaaattgctgaaatgctgattctcgggccgatcgagagcggaatgcgcatccgtgccggcaactcggccagatctttgattcgagattgtcagtggacaacccgtacacagggccttggcggaacgtgttcttggctcagcattctcatggagttgttcgattgtatagccttccggcagacagtcgtctgggaccctgacacctggggcatcgatatgggctttgttgtcgaaccatccattgctggaaatgaggagttttggatgcagcgcatcatctacatttgtgctaaggtctcagatctccgctcttcgaacttaaaagggatcggtaactctacccgctacgccgaggcgcagcggctcgaacaatggagtctctacaatgaatggtgtgccaggtggttagattccatcccaaggtcgatgttaccacttggaaatgtccagccttggcagagaaacccccagtcagtctttcctcaggtatggctgcttggacgttcggctatagtagcccaaatgctctaccatattactcgaatcatgctcctcgagaccgatccgctccaacaggaccatcttcccgaactacaggaagagcagcagcgccatgcgtacagcgtctgcggtatcgtttcgaatgacaagaacaatgggatccctgttttctctgcacatcttcttgctgttgctgcggggtatttggttgacaggaaagcgcaggaagaggtcgtcgcgatcctagatcagctgagacgcacgagtgggttgagcactgagcacatcagagacaaactccgggaaacatggggctggcattcacacgcccatcagtcatttccagacaccgtcgatacatcaactgtgtctatcgggatccacacgtccgatcatggccatgaattttcccaagtcggcattacggacccttttacgtactccttggtggaaactcatcagtatctagatcaccatctaatttacgaccagtcccac

SEQ ID NO: 25622 - DNA, 1015 bp, Emericella nidulans
atgggactcttgagccgacttcgcgggcgttccaagagccagagccgtgcggggaacgccgtcagttacgaccacctccgcatgaaccgcgacgtccctcctctgccttcataccttggggacctcaccaaacggctgccgccaccagtactcgcgcggatattctcgttcgtttgcccgcatgctgtcgataactcttacgatacctcggaagaatccatgaccgaggatggctgcatgctctgtgacatgcgcgatctggcgcactgcgcgctggtgtcccgccgttggcaccccattgctcagtcattgctgcaagtccacgctcctcataccaatgtcctgaagcgatctaaaattagtagatactctcacgtccgtatcgacgccgttcactactgcgaacttgaagagatccttgcagcgaagcgcaagcgccgctcccgcttcgaccgcaatgccgaccccattgaccctccacaagtgcgcctctccctcttcatgcgctcagtgcgactctcccgcgacctcggaaaccaagtcctctcccttcgcatgccctatatgacgcgcgaagccaataaggccgaaatcgcccgcaccatctctgttctcccaaacttgcgctacgtcgacctcccctcaggtatctacaccgacgacccagcctgtctaacgttgaagcaagagctcatggcacgctgcccggacttgcgccgtatgacctaccgatccggcgcagagggttcctttgcacagctccccaactcccagctctggagtaacctcgagattctggagctgcaggaacttgagatcgagccatcaacgctccgcctctccctcgcttccttcccgtatcttcgaaaccttacaatcgataatacgccctatcttgacgactccatcttcgcgtcagaccagtcccaacttccgccctttcccgccatccaacgacttaccctccgcaatacaccatccatcacaataacgggcttgatatctttcctctcaa

SEQ ID NO: 25623 - DNA, 381 bp, Emericella nidulans
ttctctccatcgtagggacatactgaccttcataggttataccaaagctgcggcatcctcggcgcaactgtcatgccccactccatgttcttaggcagtggtattgtacaggcccgcctcaaagaattcgacgtcatctccggctacgccgacccaaccgtctgcattggcagtacaaacggtgaagtcgagtaccgcccatctctccgtgcaattcgcggctgcatgaaatactcaatcattgagctcgctctgtccctattcaccttcgcactctttgtgaatagctccatcctcattgttgctggtgcttccctctacaacaccccctctgcaacagacgacgcagacctcttcggtatctacaaccttttatcgtct

SEQ ID NO: 25624 - DNA, 1197 bp, Emericella nidulans
gtgattggcggcggtgtcgtcggtctcgcagttgcgcgtcagttagcgtcgcgaccaaatacaactaccattcttcttgagcgccacgatgcgccggggacagagacaagtagccgcaattcagaggtattttatcattctatcagccacccatatccgcccaccacttgcttttttttttttttttgaacttcatgcagctactgaactatcatctcccaggtaatccacgccggcctttactatgggaaagacacgctaaaggcgtccctctgcatccgcggcaagcaactcctgtattctctttgtgcagagcagggaatcccataccgcaacacgaagaaatgggtcgtcgcgcagaacgaagagcaatgggacgtaacgatgaaggttcacgagctcgcgaaacaactcggcatcccaacacggctaatctcgcaaaatgaggctcgagagcgagaacccgaggtgcgggggcgcgcgggaatcctggagagtacgtccacgggaatagtggatagtcatgcgctcatgacgtatttgcagggcgactttgaggataagggcggcgactgtgcgttccttactgaagttacaggcattgaaccactgggtgggggaagaggcgggtatagaattactgcacgctcaggatcagggccagagagcgaaacgacgtctatcgtcgccgagacggtcatcaacagcgcgggtaactactcctgcaacattaataatatgcttctcccgcccgagcgccacaggacaccatactacgcgaagggcacatatttttcttactcggcctcctttccaacccgggctccctccgtgctcgtctaccccgccaccctcccaggaactggcgggctgggcacacacttaacgctcgacttgggcggccaaatccggttcgggccagatgtggaatgggtagacgatcccaatgatctcaaaccatcccctgcacgcatggaacttgctatccctgagatccaggcatatttgccgaatgttgatccggctgccctgactctcagctattgcgggatacgcccaaagttgtcgaaaggtggctcggtgaatacgggcaaggggttccaggactttgttattcaggaagaggaggggttcccgggttttgtgaatctattgggaatcgaccagtcctgggttgacgagttctttagcgattaa

SEQ ID NO: 25625 - DNA, 1492 bp, Emericella nidulans
ccatcaagccgcacggatttcagaatcgcgatcctctgtcccctccccctcgaagcagaagtcgtaaaaccactctttagtcggatataccatgccgttgaatttcccacgcttttgaaagtacgtggtgatccgaactcatacacacttggaaggatcgggacgtacgatgtggctctggtacacatgcccagtgcggggaaagcagtcgcttctagcgtagtggctcatatgaaaatgagctatcctcgaattcagattgcttttctgataggaatctgtgggggtgtcccattcatcgataagtcactggccgcgcgaggtaataccaacatttatcttggtgatgtgataatcggtacaggggtcgttcagtatgaccgcctaccccttggtccatatcgcaaagatgcactggaggagaacctgggaagaccgaaccaagagatacattcttttttgtcgaagataaagacccgtgttgataccttgagcgatcggcaatgccgttatcttgcgatgattcaacggcatgtgcgagcacagtgcccaggcgctcagtatgacattgtctacagtcggacgtacaatcatcgagaggttaattgccagtgctctctgggtgtggatgctgacgagacggtggttgctcgccggcgcaacttcgatgtagtaccatttctgcatttcggaacgctgggctcaggggatagtgttatcatgtctcacaaattccgcgacgatatcgcaaaaaaacaaaaggtcatagggtttgaaatggaagcggcaggtgtatggggccagtatccttgtatcctggtcaaaggggttagtgactatgctgatagccataagagcaaacgctggcagtacttcgcagcggcaagtgcagcagcctgcatgcgagcgcttctggacgaggcgccgatatccgttagtacgtcagcgggcctagaattaggtatgtttaccggctatttgacgactgcatatgttttctcagttactaagtgctatcatcattgcgatagaccaggaatcgacacttggttccatctcacgggaccacgtacagggtcttttttctattgaaaaagcccaggaggtcttcattcgtatgttgggctttggccgaaccactttccgtctgaacgaagtaccagaagcccacaaagagacgtgtatgtggatattcaagcggccagaatatcgagcgtgggtcgatgcaagaaattcagattttcagcgaagccttttttggattaaagggaagcctgggattggcaagtccatattaatgaagtaccttctaaaaaatgcaaccgaaacgaagacagattgtgtcgtcttgtcgtttttcttctccatcaaaggggctgatttggagaggtcggctattgagatgtatcgatccttactgcatcagctcttcagctcaagagcgattccgccagacgcaaaagatcgattttctgagattgcatttaatgct

SEQ ID NO: 25626 - DNA, 838 bp, Emericella nidulans
gtcgtattggtctttcgacaagaaggctcccaactatgccggtcaggataatctcttctcggacttgggtgttccgcttttggataatgccttccaaggctacaacaactgtattttcgcgtacggtcagaccggttcgggaaagtcttactcgatgatgggatacggcaaggagtatggtgtgatcccgcggatttgtcaggatatgtttgagcgcatcaggaagatacaagaggataagaacctcacctgcacggtggaggtctcgtatctggaaatctataacgagcgggttcgtgacttgctcaacccgtcgaataaaggcaacctgaaagtccgtgaacacccgtctacaggtccctatgtcgaagaccttgccaaactcgccgttcgctcttttgaggaaatagagaacttaatggacgagggaaacaaagcgcgaactgttgctgccacgaacatgaacgaaacgtctagtcgatcacacgccgtgtttacgttgatgcttacacagaaacgacatgatgcagagacaagcatggatacggagaaggtgtcgagaatcagtctggtcgatcttgcgggttcagagcgagcgaactcgactggagccaccggtgctaggttgaaggaaggagctgaaatcaacagatcactttctacgcttggacgtgtcattgcagctctggcggatgcggcttctggaaagaaaaagggaaagcaggtgccgtaccgtgattcagtacttacgtggttgctaaaggactctcttggaggaaattctatgactgccatgatcgccgcgatatcacctgccgacattaacaatgacgagacc

SEQ ID NO: 25627 - DNA, 348 bp, Emericella nidulans
atgaaatctccccctggtctcccattcttcctgagacccatccctcgtatagtggccggacaggttgaacaacaattcgtcaacccaaaccttgagcgcacacttgactttcttgaagaccagcttaagtccgcgcctggtggtgggccgtttttctgcggtagcaaggttacggctgccgatatcatgatgagcttccccttggttgcggccaacatgagaatgccgttgaaagagaagtacccgcgcatggcggcctttgtcgaagccattgaaaaagaagacggatacaaacgtgccattgagaagatcaaagaggtagatgggaagttcgaggcttccctttaa

SEQ ID NO: 25628 - DNA, 1080 bp, Emericella nidulans
atgtcatcccctccctttcagctcgccgtcttcagtacaaaatcctacgacagaagctaccttgacaccaccctaaaagcccatccaacgctatcaaataccgtaagcatagcctaccatgccttcccgctcagcctcgaaaccgcacccctcgccgcatcccacgcggcagtctgtgccttcgtgaacgacactctcgatggccccgttctccgcaccttacacgaaggcggcacacgcgcaatcctcctccgctgtgcgggctttaataacgtcgacctcgtggtagccgaagaactcggcctgttcgtcgcgaacgtaccctcttatagccctgaagcagtcgccgaattcacgatcacgctgctacaaacacttaacaggaacatccataaggcatataaccgggtgcgcgaggggaatttcaatctcgagggtttccttgggatgacactccacgggaagacagtagggattgtgggcgtggggagaattggattggcgcttgcgcggattgtaaggggtttcgggtgtaggttgctagcggcggatccgaagccggcggttccggcggaagagtttaagaatgagtatgggggtgaaattgtggagttgaggactttgctggcggaaagcgatgttgttagtttgcattgtccgcttacggcagggacgcggcatatcattgatgctgagaatttgggttatatgaagcggggcgctttgttggtgaatacctcacgcggtccgctggtcaataccaaggctgcgatagaggcattgaagagtggacagttgggtgggcttgcgctggacgtatatgaagaggagggggcgtatttctataacgaccattcggcggagatcatccatgatgatacgttgatgcggttgatgacgtttccgaatgtgcttgtttgcggacatcaggctttcttcacgagggaggcgctgacggagattgcggggacagtgttgagtaacatggaggattggattgagggcaggcattgtggcaattcgctagttagggaaggacatctggtcgcgccggaaggaaaggagcccgttagaatttag

SEQ ID NO: 25629 - DNA, 321 bp, Emericella nidulans
gcggctgatgcgtcgacgaaagggattctatggtcacattgtggcgacgatatagtggagggttattgggaaggcatcaaaattgactatcgctgtctcgggctttgggaagagcgccgttgggaaattttggaaaaacaactccgttcgataagggccacgcggtcatattctgagagcctttcaagagtggagcagttgcgtgaattcctcactgctcgaaccgcagaagtctctggggtattgatccctcgccaggttgatacctcactcacaccatccgcaatcgtgaaaacgcctacagcagtaagtaacttgcga

SEQ ID NO: 25630 - DNA, 680 bp, Emericella nidulans
agttggagcagtcaacaagcatgtttgcacagttagcggacacaaccggtgcgaacaatgccctaagtcaggtgctctatggtcttgctctaaggtaagctggtgtttttgagactacagaccctataggtagattgctctctaattgtatgccgcgtagacatggctggggttgcagaccagacccagaaaaagcggtcgtgtacctctcagccgcggcgtccaattcggcttccattgaagcccaagccctcgaggcagggctcaagaaaggcggcgccgctaaaggcgagcttgtcctagcgatctttgaattaggaaactgctttcgcaacggctggggtgtgaagaaagatccggcagccgcgcgacagtacttcgagacggctgctaacctgggcgacacggatgccatgaacgaagttgcttggtgctacctggaaggattcggaggtaaaaaggacaaagtaagtggctggctgagtggtcttcttgacccattgtcgcaattctctagtgctcttgggcatcgatgtctggctctcgcttcactattctggcaccgctgaacgtgcacattgacttactgacgtagctaaccctatatcttcctagtttatggctgcgaaatactaccgactggctgagagtaaaggaaacaagatcgtgggaaattcttg

SEQ ID NO: 25631 - DNA, 2035 bp, Emericella nidulans
ggacccgcgaaagcttgttactagtgatgataagtcccctcaaggtctcaagcgctccggcgcaaagagaatatctaaatatggtgaactcggcccccagagccctctctcgcctacgggtgcgtctccttcgactccgtcacggaatcgggaagaaatcaaacgcgcggagcaacctccatcgcaccatcagaaacaagccaccccaaagacccccactagagcggaatcgacggagagtccgcgagtttcctcagtgccttcagcggatctgccttctattcccaagctccgccaaggtagtagtacttcatacataccagatcccgagccagaagaagagtatgatatatactacaaccttcttcccgaaactccaacaaagagcaagaggcattcttgttccggctccgaatctgacgcgtcaaacggagatgggcctccaccgcctactccccattcgcgctcgcccagttccaccggctctagcctgccaggcaccccgattctgagtccaactgctggacgaatgagacggcggggttcttcacctctgaaacacgaatatgaaccttccaccgcgtccgattcttactctgactctgatacctctaccgtgcgccgctatgacatgtattctgattcggatagcgttacggacagttcagatgaggactcagaggacgaaatcccctctagagtacggtcaaggacctctcgaggggtctcccggcttgaggagcaagaatcggacctgagtactctatcgttgacgaattcgacaagtcaggccggttatcgatccgtcccatcccagccaagcaagtcgtcttctgctttcgccactgtttttgcttggtcggataagggctcttgggaaagcatcttcccagatgaatgcaaggtcattatcagccctgggcttgttgaagcctatgaaatgaaggatgacccgcttgcaaatggcgataacgcaccgaataatgttcgcccgattattgctctcgaattgacgccgctggtccctatacgccgtggtacagccatcgatattagcattcgctctcctccaaccccgcggtccagagtcagctggagcaataatatcatgttccgctccaggaacgcggaggaatgtgaggttctatatggcctgatcaaccaagcccgcactaacaacccgacatacatcgctctacaaaacgctcgaggaccgttggacgacattccagctccattagagcgtgcgactaagagctccggcttctttggctggccccgccgcagaaagagctaccgtgcctctgcctctccgcgctccctcgcagacaactctgaaagtagcgtaggcaccatgagcagcgctttctccgctctaaaacgcttcggtgcgggaagcaagatgttcagcatctcccggtcctccgtcagttcacgcaagaaggacgccgagggaagcttatattctagttccgccgcctccggtggattcaacagcggtggcatcggccgcatcgcagcagccatcaagggtgtcgacggaattggcctctcaaacgcgaagatccgcctctacgcccgcgaaacccagtccaaatggcgcgatatgggtgccgcccggctgacgatcatgcccgcaccctcacgacgctcatcggctgaacaccaccaagcagacaccgcaacaactacgcctgatgagaacccagaagcaagcacagacgcgatcagcccgccatcctccggcgctgcctcgccgcaacgggtcatggagcagcgcaacaagaaacgcatcatcatccgcgggaaaacacgcggcgaagtcctccttgacgtttgcttggatgagagctgcttcgagcgcgtcgcaagaacaggtattgccgtttctgtacgtgaggaggacgaagacgggccccctgttactgaaaagggtggtgtcaccattggaagttctcgtgtttacatgattcagatgaaaggtgaagccgaagcggcgtacacatttggacttgtcgggaagatgaagtattag

SEQ ID NO: 25632 - DNA, 255 bp, Emericella nidulans
gctttctatgaacatgaccacgaagtcggcgccatcaactattatactcctttctcaatccttcccggcctctcccattcgccgcggcttcctgttgaccttaatctgggtggaatcggctacgatgctgttaagagggctgttggtggtacacttgacttggatactatggcgaaagttggcgttcggattgagaattatattaatacagtgaattactgtgggaaagggattaaggcgaaggttaagctgtga

SEQ ID NO: 25633 - DNA, 1604 bp, Emericella nidulans
atgtcacgatccttcggcggctgcaagcgatgtaagtctcggcgacaaaaatgtgatgaggaacgtcctacttgtggtcggtgtaagtctgcggggacccagtgccggtatgcgatgcagctgcagtggggaggtcgggctttctcgaggtcaagatttggggcatgcatgcagaagctgggtaggtttgatgggattattgtgcctagatcagcactgataggaaatacctgccagaatactctcctggagaattcatctacaccaccgctaacgcatcaccgacttcaccgacatcgccagtatcaccgaccgcagtcaccgtaccctctacacctacagccattactctacccaaatcttctacgcctcccaccatcacaataccccagtccgtcgatccgttctcctcccttaatagcagccagaaatctctcctccatcacttcctctccgatgcttctcaaatcacagcctgccattcaggcatgcagcaggagatctgccgcatgctcgtgccaatggccttgcagacaccgtccttactgtacgcgacaatggcgctgtctgcaatccatatccaggccctgaacaatcacacagagaacgtcaagtcagcaccagacattgcacgactgatggcgatgagtttagagcatttccggaaggagcttcagagtccgggtacgaggggaacagatgcgctgctggcgacggcacgtacgctatgtctggcggagatccactcaggtgcaatccagcctaactcatggcgagcgcatattgagggtgcgcaggcgttaatgatagcggctcgtaaaaaagatgggtgggctccggattcgtcagagggtttccgcaggtatctggatcgttggtacagatcgattgtttcgctgacggcgttgacggggaacggtccgcctattggtggtgttacgtgccagactgtctcgacgcctgtcggaccgacgccagagacgccagactacctcgatgattactggggcttcacggtcagtctatcggcggtattccgaggcatcggagcagcagcctggcagacgccgccagaccaaccagcggatgccgaggaggtcacagcactggagtcatccgttctcgagctgattgatgagggtgagcgagcaccgcctacgttctacccaggtgtggtcgaaggactgtctcccgaccatattgttcgatttaccctttgcaacgccgcatttcagcacagcgcattgatccaaattgaacgtcgactccgccggacaccggcgtcttcgccaaaggtgcagcgctctgtcaagaagatcatcgaatgcaccgaacagatcggaccgtcgcccggtcttagtccgtggacgatgctcacaacgccgctgttcatcgcgggctgcgaggcacagggtgaggaccgggatcgtgtccggcagctcctgacgcagttgtatgataccatccgggtgccgaatgtgctgcagtctctgaagtttttggaggagtactgggctcaccagttggatgagaatgagagttggaatcggttcctaggtacgcggcttccgcttttgtcgatttccgtttatgttgaaatctaa

SEQ ID NO: 25634 - DNA, 1460 bp, Emericella nidulans
atggcttcagttgcccttccgtttcatcgacccatgggcaaggcatccagacaggcctctttagatacgagagacgagattctcctccaagctgatcatttcatcggaatcgatgttggaactggaagtgcccgtgcttgtattatagatgccaaaggagacattgttggattggcctccgagaatattgggctctggcagcctcagaccggatactatgtaggtatcacacatggttttaaagacttacatctatactgacgtaggcgtttcaggaacaatcaacaactgatatttggcgctgcatctgtgttgcagttcagcgggctatcaaccagcataacatcgaccctgagacagtgcgtggaatcgggttcgatgcaacatgctccttagctgttttctccaatgtcactgatgagccaatatctgtgacagggcctaacttcgatactgaccgcaatgtgatattatggctcgaccatagaccagttgaggaagccgagaagatcaatgcgaccaaccacaacctgctgcgatatgtgggtgggaaaatgtctgtggagatggaaatcccgaaggtcttgtggctaaagaacaatatgcccaaagagctcttcgctgattgcaagttttacgacctggccgatgctttgactcacattgccaccggcaatgaaaaacgaagctactgcagtgtcatttgcaaacagggtttcgtccctgttggtgttgacggtagcgttaaaggctggcaggaagacttcttggtccaaatcggcctgaaggatctcacagaagacaatttcaagcgcatgggcggcgtcgacggggtggtgagcctttttccatagctccggatactgaaagctgaccgttattttagaatggagattatcttagtgcgggcgaacttgttggcaaactgtgtgaaaaagcagcagcggatctgggattgcccgctggaatcgccattggcagtggcgtcattgatgcttatgccgggtggattggcactgttggcgccaaagtcgaactcgagtcggaacaattgacatcggacgccgcaaagaatgatattactcaggcgttttcccgtctggcggctgttgctggaacgtcaacctgccatttggccatgtcccctgagcctgtattcgtcccaggtgtttggggtccataccgcgacacaatcatacctggattctggatggccgagggcgggcagtctgccaccggagagctgctaaagcacgttattgagactcaccccgcctacaatcaggcgctttctgttgcggaatcttacaacaccaatatttatgaatacctcaatgaacatctgagagagatgatgactgagcaaaaggcgccgagcatctcgtatatggctcgtcatatcttcttctatggtgacttatggggaaatcgatctccaatcgctgaccctaatatggcgg

SEQ ID NO: 25635 - DNA, 564 bp, Emericella nidulans
agagctgatcaggatgtgcaggtctacttcacagcatggctgcgggatctcctgattccgaccattttcaccaccttacttactctagtgctctatcctccgtctcgcaagttcctcttccctcccgccccgatcgccctcgtcgatacgtccacgggcggagtacaaaagcccaaggcgggcgtgctaggatcccacgatagtatgaccggcgccccagaaaagtataagggtgaagccgcagagcaagaagcaagcaatttgatggcgggtattgcaacagtagctgttggtagtgcaaccggtaaacacgaccaggggaaccccgaaggtgccccaatggagtcgaaggtgcctgatgcaacggacatcgtggccaagtcggcggatgcgcaggcggcagccaacggggaggtcccggccgagactcatgagaagacgcccgagccgatgaagccgacggtgctgaatagcacagagcatgccatgagggtcatggctgctgctatcgataccggcaaaagaaccgcaaagcaggccctatattatctacatgaggcctaa

SEQ ID NO: 25636 - DNA, 397 bp, Emericella nidulans
cgtgaactctgccaagacatcgcgctccagtattgagcatgccagcggaacagagagaagtagcgttcttactaaaagcagctctattaccgatctatctccggatactccggatggattgtacgaaaaggatgagggcatgagtgtggaagacgccatctccatgtatctggatggatttagtgacgtgactgaagagccggcgtcgccagatttagtcaatgacaacaaactaaagcccttgaaccccttaccaccagcggaccttatcttggacgatgacaatctgtcgacttcctcacacaacctcgaccctatacctgattatccaccgccaccaaccaatctgcaaatgggcacccccgatgatgtctactcccgcaagcactacttttaa

SEQ ID NO: 25637 - DNA, 471 bp, Emericella nidulans
atgcctcgtctcaacaacaaagtcgccatcgttacgggtatgtatctttacaccttcaggtgaaagaaaaacccactgactccgatgacactgaaataggcggtggctctggcttcggcgctgctattgcaacccgcttcgctgaggaaggagcaaaagtcatcgtcgcggacattaacgcagccggtggcgagagcgtcgcagcccagaatcctgagaatctcgtctttcagaaggtcgacgtgacaagccccagcgattgggctgctcttgttgagactgcagtcacaaaatttggaaagctggatatcctggtgaataatgcgggaactacttatcggaataaggtgcaacccagtccccgttcgcaacttcttttggatatggctaatggcgtgcagcccacactagaggtaaccgaagccgagtgggagcgcgtcttcaatgtcaacgtaaagggcatctttcatg

SEQ ID NO: 25638 - DNA, 852 bp, Emericella nidulans
tttatcctgtatctctttttcggaccggaaacccgctatatcggcaccaacgaggatcccaaagagcctgcgtggaagagagaatacctcaaagttcgacgaattgatcctacccctctccactggtctgagttcatcaaaccactgggcctgtgcttccgaccttgtgtcatcgtacctgctgctgcatactccatgatcttcctcctcagcaacgtcttagccacagttgaagtgccacagctgctgcaggggaagttcggcctcaatgcggaacagctgggactgcaattcttaggccctatcattggttcactcattggagaacaactcggtggccgcttatccgatctttggatgaacatgcgggcgaaacgagtgcagcgaaaaccagagccagagttccgactctggctcagctacttgggctacgcctgttccattgtcggcatcatcgtcttcctcgactgcaccgagaaggccgaggatggcaagtggaatgtagctcctattatcggcatcgccatcggagctgttggcaaccagctggtaacaaccgtccttatcacctatgcggtagactgccaccccgaagatgcctcgagcgtcggtgtttgtatcacgtttgtccggcagatttggggttttctcggaccgttctggtaattttgaatttgactcgatgcgcgttcgactcgctaacaggtattcaggtttccgggcatgttcgaaaacgtcggtatcgctgcgagcgctggtgtctgcgtggcgcttatggttggagccagtgtcctgccaacaattgccctgcagtggaaaggacgctctcttcggccatcaatgaaagagtag

SEQ ID NO: 25639 - DNA, 743 bp, Emericella nidulans
acgggatcgcctggccgatcctccactaccaatccggtgtcgacttcaacgaggacgcatggaaatcatacaagaaagtcaacgaaatcttcgccgactctgtcgccgagtcggcgtccgatggcgatttgatctggatacatgattatcacctccttttgcttccagcgtacttgcgcgaccggctcgagaagcagggcaaaaagtgccccatcggattcacgctgcacacgccgttcccagcagaggacttctggcgcgcgctgccagtgcagaaggagttgctagctggtgtgctagcctgcgacctcatcggcttccacacggacgagtataagcggaattttatcgagtgctgttcgcgcgggttggacgtcagcgtcaaggatgacagtattgtttaccagggccacacagcgcgtacgggcacgttcgtcgtcggcgtcgacccggccaagttcacggatgggctgcagactaccgaggtgaagaaccgcatcaaggaacttgaggatgagtacaagcataagaccgtgatcctgggcgtggatcgactcgattacacgaaaggccttgtgcagaagctgcagggatacgactacttcctacggcagcacccagagctcaagaacaaggtgaggctcatccaggtggccattccgagccgcgaggatgtaaaagaataccaggagttggagagggagctgagtatgcttgtgggcaagattaatggagaacactgt

SEQ ID NO: 25640 - DNA, 1466 bp, Emericella nidulans
  unsure (1)..(1466): unsure at all n locations
agacggcttcgagagtgctgcgaaacgcacgagattctcgccaaacagtttccagaaaataccatcgcgaagaccgagttcagccgcgccaatgcacgacttgccgaacagcagaaaggtcagtatcagttcaagcgcctgcagcgtgaggcagcaaagcgtgttccaccgcagctcgaccacgccacatatatcggccctgtcgctgtgaagatgacggattctcgcggacgaggcctcttcacaactgctgccgtcaaagccggtgatttgctcctctgcgagaaagcctttgcgcatacctttcacacagcaaagaatccgaaacggaaccttagcctgcttctcaacttggaggcgaaagccatgacaataggtactcaggcacagcttatgtccctgcttgtgcaaaagctttccaagaatccaaagttgggtgaagtctttcgggatctttatcatggggggttccagcctgttgatgtatcggaagtcgacggcttgcccgtggtggacacgtaagtcttcaaccctaacaaccgaatcagctcggctgggctaacattactagcttcctcgtcgaacgcgccatgtctctaaactgcttcggttgccctgcttcctctcgcgaatcccacatcgagagcattcgcgtcagaggacctgaaaatggtgaaaaggtgttcgaatcatgcggtatctggccgctggcgtcgtacataaaccactcttgcgacagtaatgcccgacgctctttcattggcgatatgatggtcatccgcgcaactcgggatctccctgataacacagagctgaccttctggtatgaatcgccattgatcggcggttccgccgcaaaggccatggatctacagcactgggggttcaagtgcagctgcattatctgtaccgacattgctcaaaccaacaggaacgagttgaagagaaggagaactttcttaggcaccttcaaaaagctctttgactccccctctcgcgttccggatcccgtgcgactcgaggctcttttctccgcgatcgaagacacgtatagccgccctgtgtccgaaatccctcgtattgccctctggggcccggcgctatctctcgcaangttgtataccgcacgtagaaattcacgcaaagccattgactttgggctcaagagtcttgagtctcttggctacgttattgagggaggacatatagtcaaccaaaacaggaacaacagcactgatgctgaacttgtcgtcaaaaaatggggtctcctgccagacaccgtaatcatgtgctggatgaacctctcctcccttgtaccgtgatttggtgccacacctaaagctcgcggatcaggcggaggagtatgcaaagatggcgtaccggatgtgtgttggtgaggacgagacgtttggtgatacttacagtcgctactcgcagagaagggatggcttgtttgttcgcgcact

SEQ ID NO: 25641 - DNA, 626 bp, Emericella nidulans
atgggtgtcctcgagaagctgtcccgcaagaccggtgtcatcgtcggtgatgacgttctccgtctcttcgagtacgctcaggagcacaacttcgctatccccgccattgtacgtgttcttgatcgcccaattgcttagatatcttgattctgaccacagtacagaacgtcacctcctcttccaccgtcgttgcctgtctcgaggctgctcgcgaccagaactgccccgttatcctccaggtttcccagggtggtgctgctttcttcgccggcaaggtatgttttaaaaacttctgggaaccgagtccgatctaactcgcgtagggcgttagcaacgatggccaggccgcttccattgccggtggtatcgccgctgctcactacatccgcagcattgcccccagctacggcatccccgtcgttctccacaccgaccactgcgccaagaagctcctcccctggctcgatggtctcctcgacgccgacgaggcttacttcaagcagcacggcgagcccctcttctcttcccacatgattgatctgtctgaggagcctgtcgactacaacatcgacaccaccgctaagtacctcaagcgtgctgctcccatgaagcagtggctcgagatg

SEQ ID NO: 25642 - DNA, 360 bp, Emericella nidulans
aggaaagtacaggggtggacggcgcccaacccggcgcgaagaagaccggtttcgaatgtcgaggttccactcgtcctcaaacgaggcgtccaaggccagttgaaagctgtcattgagcgcctgttcgagcagtgcttccttcagaaacgatatcgccaagtgattggtattgctattgaagccaagcacctggaagttcttcgaacagccataatgcgcgctagcgaggatgcaaaacagcagaatggtgaatcccgccagagcgaggagttgatggaatatgtgctggacatttgtatgggtgttgtccaagagcgaggattccgcaatgaggtacggcatgattgtcccgcttgtcag

SEQ ID NO: 25643 - DNA, 649 bp, Emericella nidulans
aggatggattatctagcctcgtactataaccgcttgccaacccaccttgatccggatgacctggcactatggcgagcagcgggcctttcacttgatgaccaaggaaatctagagtcatcagaggtctccagaagccattggtcgcaagaagacgtcgcgacgaacgtgctgacacgcctccttaacaagctcacaaattatctcgcagcggcgaaaaagtcccaacttgaacaatgggttggaggccaatccccacaatccatcaactcgaccagatccagttctgactcccctgactcccatcccacaactgcctcatggctcaaaatctcatttgagtttcaatcctgggtggagcgcattccggaaacatttcgtccctgtttgcgcattgaacgaccaaagcttgccccaaccgaacccagtcacatgccgttcccagaaatattttacagcctcacttcctgcgccgtagcaatgcagcagtaccattttggccgcctcgcattatcgctcaaccggccatccgacgacattgcaggtcccagcaccgcgtttgaccgcctccaagcctaccgcgagctaacgaaagaggttgactaccgctgcaaggaaatatgcggcattgccctcggcaggccacagatcg

SEQ ID NO: 25644 - DNA, 363 bp, Emericella nidulans
tggctcggggggatacgggtaagccagcccagctgtctcacacatttgtaaagtcccagtctcacatatctgtctagagctatgaagctaggcaaggccgctcagacaatcttcccgcagacgcacactctcggagacctagctggctccgcgttctacgtaatgggcagcttggtagcgctgatcctgtgggcgtttggcctagtgtggcttttctttgcgtctgcctctattgtccggtgcaagacgttcccgttcaatatcggctggtggggattcaccttccccatcggcgcctatgcgatgtgtacctaccagatcggcatcgagctcccctcggcatttttccggattctagggacg

SEQ ID NO: 25645 - DNA, 580 bp, Emericella nidulans
ggagttcctaagaaagccctgcttcgcgaggccgggaagatgacccacggcgacgacgtcaaggacctccatcaccccttggggcccttggtgtcacaagaggcttttcaacggttccagcagtttgtcgacagggcacagagtgatggacacgagctagtctacggtggtaaaacggatggcagccgtggcttcttcgttcagcctgccattttcatggccagcgacggcgacagcgacagcgagctgatgacaacggagctatttgggcctctatttgccgtgcagacctatgatgatagctcacctactggcttcgagagggtctgtgagctgattgacaagacattcgagtacgggctagcgggcttttgtcttttcccgggatcgggatggccatcccggcttgctgaccagaagctgcgagacttgggcggcattgttttggataaagaaaaagtcgggggcaattattggggccatccgttgggggggcgcggccttgtgttaccaatgacaaggcaccttggttatgcccgttccattttagcattgctgtgtaggcacctccaaactgtag

SEQ ID NO: 25646 - DNA, 1095 bp, Emericella nidulans
atgcaagcgcggctcatcaagtcgtcgacgttggatgcgcgggcacgcaaggtattggaatttgtgcagcgagcgagccggaccaaagtctcagaggtcgagaaagggcgcaaccatccagaagaccgcgctctcatgcgaaccctctgttcaaatagcattgtgctgctaaagaacgaggaaaacatcctcccgctcccgaagaacgtaaagaagatcgcactcatcggatcccatatcaaaacgccggcgatttctggcggcggcagtgcggcgctgaagccgtactatgcttcgaccctgtacgatgcagtacgtgaggctcttccgaatgcagaagtgttgtatgagacaggagcgcatgcccataacatgctgccggtgatcgatcgcctgttgagcaatgcagttatacacttctacaatgagccaatgacccagccaaaccgcaaatgcttggggaccgaaccggtcaccaccaccgcgttccaattcatggactataagcttgcagggctcaatagggctcttttctggtccacgctgatcggtgatttcacgcccgaccaatcaggcatatgggactttgggctgagtgtttttggaactgcgaacttgtacatcaacgatgagttgatcattgacaacacgactaagcaaactaaagggacaagcttctttgggaaaggcacccgggaggagattggctcgatgaagcttacggccggccaaacatataaaatccggatcgagttcggttcagcaaacacaacaacgatgaagacaactggaatggtgaattttggcgggggcgctgcaaatctgggggcctctctgcgcctggacgctgaggagatgatcaatcgagccgtcaaggcggcagaagatgccgattatgccattatctgcactggcctgaatcaggactgggaatcagagggattcgatcgtccgcacatggatcttcctccaggtattgataaaatgatatcaggcgtgctagatatactgcgcacaaaacagtgattgtcaaccagtctgggactccagtaacaatgcatggcaagccgggccaagtcgatcgtacactcatgg

SEQ ID NO: 25647 - DNA, 456 bp, Emericella nidulans
cacccattgatcttctctatactggctctcttctgcggcgtcttcgtcccatacacccagatgaacgtcttttttaagtactggctgtactacctcaaccctttcaactatgttgtttctggcatgctgaccttcggtatctggggcaacaatgtcatttgcaatgatgatgagtacgcgcgctttgatcctgtgaacgggacctgtgccgaatatctcaaggactacgtcactggttctggttgggcgattaacctcgcgaatccagaggcgacgtctgactgcagggtgtgccaatttcgcgatgggagtgacttcttgacgacgctgaacatcaagcactactactacggctggagagatgcgggtatctgtgtgatctttgctatcagtgggtacgcgttggtgtttgccttgatgaagttgagaaccaaggcgtcgaagaaggcagagtag

SEQ ID NO: 25648 - DNA, 333 bp, Emericella nidulans
atgccgcccaagaagaagtctgacgcccgtggaggcgtgcccaagcctgggacaaagcaggcaaaagctgccgctgagcggacagcggagagcgcgaagaaagcgcaacaaccagcggacgagcaaaagaagcctacagtcaagcaggtcattggtggcgcatcatggacggggaaattgccggtcaatttgatgtcagaacattgccagaaacataaatgggagaagcctgaatatactatggtgagagcttgaacaggaaataatcatgcgcgcattgtggtgctgattcagtactaactattgcacgctataggacaaagttgacggagg

SEQ ID NO: 25649 - DNA, 836 bp, Emericella nidulans
acgagttggtaggactgcggcccagcatggaattcgagtcactacgctctatacggatccagattcccaagcgcagcatgctttgagtacaccatatgcattcaatctcggctccgtgtccgcgtacctcgatggagaccgtatcattgaaatcgcaaaggcccaaggatgccagggaatacaccccggctacggcttcgtatgtataatctgcagtgaagtgagcatgatgctaatggattgttcattgatagcttagtgagaactcagagttcgcacgaaaatgtacagaagcagggctggtctttattggaccgccgtggaaagctatcgaggatatgggagataagaggtgcgtctacttccttgaggcttctctacgatatactaacattgtacttctgcagtcagtctaagcatatcatgactgccgctggagtgccctgtgtccccggctaccacggtgaaaaccaagaccctaatttcctcgaagcggaggccgataaaatcaaatacccagtgctcatcaaagcaatcaagggcggtgggggcaaaggaatgagaatcgctcgttcaaaggaagagtttcaagcgcagcttcagtcggcgaagtcggaggctatgaactcttttggggatgaccatgtcctagtcgagaaatatatcacaacaccgcgacacattgaggtccaagtctttgctgacaaacacggaaattgtgtagcgctgggagagcgagattgcagcatccaacggcgacaccaaaaaatcctggaagagtcaccggctcctcacctgcctgatgccacaagaaaagacatatgggcaaaggctcg

SEQ ID NO: 25650 - DNA, 356 bp, Emericella nidulans
atcgtacctcgtcgaagggattatgggctatcaagcttacgcgcgagctctggaagaggcagatttggacggatgctaaggccgttgagatcatgaaggaagcgtctttggcggagaacgaaaaagtgattgttggcggagtgcgcttcttcctaggtggagataaggagcgcgaggagatggaagaggagagtagtgacgaagaagccatcgatctcgggcgggtcaaacaccaagtcggaatcaacaagaagacgaagaagaaggcgcgcgctattgaaaaggcaaaagcgactgtccaaaaacgagagcgcaagaagaaccagcctcatcccctaaatttctccggcctgcat

SEQ ID NO: 25651 - DNA, 279 bp, Emericella nidulans
acgcagctcatcgctgatcccacaggacaagcccggcagactgaaactgcactcctagaatatgagattccggccgaggaccgcatcggagagacagccgaccacctaagccccatcagccaccttcagaaaatggctcagatctaccgtctcgcgactctgctggagatatataggaatttcccctcgctcctgcggacggagagtaataccaccccggaatcgacaaccagagacaagaacgtgaacggccctggaaaactccagcggcaaggataa

SEQ ID NO: 25652 - DNA, 343 bp, Emericella nidulans
atcctcgctatcttaagatgacacgatggacgcgcttttcgacatccaattcttcgaatgcgatcccctcacccgtctagacagcgacactcccctgcacgttgcagtgcggtacgcaatggagaaagacgccgagttaggtgcagagatgatcaagatgatgtgcgaggctgggtgtgacccacgagtaaggaataagcatggacagaagccggcggatttggtctataacaaccaggatatcaagacgacgctgcagcaggcggagtacgttcttgcggagggtttgagaaatgaggacctcgctgatggggatgagggaagtgctagcgatagcgactag

SEQ ID NO: 25653 - DNA, 1313 bp, Emericella nidulans
ggctactgccgatgctaataagacagacaccggtgccggcggccaacagaagccctacctggttaatggcgccaacagtctgaccttcggtatcatggtctttggctgtccgttgttctctattctcgccaatcgctacggccttcggcgggttcttatcctcggtacactaggatacgcgccgtactcagcaagcctgtatgtcaacaatcgctacggcacggagtggttcgtcctctttgggggcgccacttgcgggatcgcggcttctgcactatggtcgagtgagggagcaatcgcgttagggtatggaggtgttagagatcgaggcaagaatagtaagctcctccctttttttcccccctacgtatattctcctggagcggacatgtgctgatggagacagctggcatatggcttggactgcgcgaactgggccaactcatcggctcctcaatccagctctccctgaatgtcaaggacggcgagcgcggtaaggttgggtactcgacgtaccttgtcttgattgcgctccaatgcttgggactcccactcgcccttctcatctcgcacccttcaaaggttatccggtccgatggctcaagcattcccgacccgacgagacagaaagctgtcctcggcgagttccgcaaactctgggctcaggtcaagaagaagcacatccttctgttgataccaatactggttggattcaactggaacagtacataccaggggatctatctgaccaactacttcagcgtgcgcgcgcgcactctaggctccctgacttcgggcatctcgccacggccgccaatatgttttggggctggttctttgacacacaatacttgagccggcccaaactggccaggatcacatggttcacctttgccactatgatgcttgccctatttggatggcagttcggcaacgagaaactgtacgatgatacgcagccaaccattgactgggcgcagtcaaacttcggtcgacgattcgcagtcaacgtgctcttgcgattcatgaacgagtctcactttttgtttgtttattggatccttggtgtcttcaacgacgatctggagacgttgaccttgacggtcgggattgcgcgctgctttgagagcgtaggatcttgtcttgcctttggaatcggtgctgcgaaagtctcgcctatggtaaatctgattgttgcctttgtcatgttcgttctctgtatcccctcgacctcctgggtagtgttcatggtgccggagcatccagagactacgcccaaggatgatgagagttcccaggagccgcgtcggtag

SEQ ID NO: 25654 - DNA, 1155 bp, Emericella nidulans
gagcctttttacaaagctcctgaagtactggaagatttcgtctaccgatctgtccacacgggaatcgtcgtcgggaagcagctcacaaagctcttctacgatgaaggcttcgacacatcctactacttgggttgctctactggagggcgacaaggttttaagcttgcgcaggatttcccaggcgaggttgacggcatcattgcaggtgcaccagcaatcaactttgttgggctgctatcttggagtgcgcacttctaccccattaccgggcccgttggatcagctacatatctatcacttgatgattgggatttggtccatgaggagattcttcgtcagtgtgatggcctagatggagcggaagacgggatcattgaggacccggacctctgccatccaaacgccacaacccttctttgcagtcctggtgcgacatcaggctcctgtctcaccgcaactcaggtcaacacagtccacgaagtgtacgcgccgctcctcagctccaacagcaccctcatttaccctcgtatgcaacccggtggggagcaattcgcggcacctgccatgtacaatggccaacccttccagtacagcaaagactggtggcgctacgtcgtctacagcgacccaacctggaacgcgaccaaatggaccatcagggacgccgaggcagccctgcgccaaaatccatacaacatccagacttggaacgcagatctctcgccgctccgtgattcaggcagcaagctcctcacctatcacggccttcaagatcaactgatcagctcagacgattccaagctctactaccaccgtctgatgaagaccatgggcgtcacctccaatcagctcgatgagttctatcggttcttccagatcagcgggatggcgcattgccaggatggtgacggggcttacggtattgggaaccgggctgagacggagttcagtaccgaacctgaggataatgtgcttatggcgatggtgcggtgggtggaagagggcattgctccagagaccgttcgcggagccaagttctctgacggcgttgggtcggaggtagagtactaccgcaagcactgccggtaccctcgcaggaatgtgtataaggggcccggcgactacactgatgagaccgcttgggagtgcgtctga

SEQ ID NO: 25655 - DNA, 1085 bp, Emericella nidulans
aattcccgatggagtcaaacttgcgcgtgtggattacagtagtgatgacgatagcgccctcgtcgaggtcctcaaaggccaacaagtgctgcttatcaccatgaacgtgatggcgccgcgcgatacagtcgtgaaaatcatccgcgccgcagccaaagctggggttcgttatatcgagccgaactggtacggccacgacgccgcgaacgatgcgctttgcagagatagtatgctaacggagaaccgagaccgcgccattgaggagatcaagaagctcggtgtaagtgcgtacttgctcctcgtctgcaacttctggtatgagttcagtctcggaggagggaccgatcggttcgggttcaacttcgcgaagaggacatttacgatattcgataacggggatgttgcgattaatacgacgacctggcctcagtgtggccgcgcgattgcgagtctgttgagtctgaaggaactgcccgaagacgagagtgacaccagccctacgctctcacagttcacgaatcggggcacttacgtgtcgagtttcagactcacgcagcgagatatgtttaaaagcgtcaagcgtgttacgggaactgctgatagtgagtggaaaatcacacgagaattatctctggtgcggttcaaagaaggccaagaagcattgaaagtccatgactggaaggcatttccgaagatgctgtatagccgaatgttctttcccaatggggacggtgactatgaatcgagactgggacttgacaatgctgtgcttgatcttcctgttgaagaattggatgaagccaccaaggaggggattcggatggggttggcgggtgaagtgcctttctcccattaagaaatgagcgtactcaagtggcaataccgccgcaacccggttctgggacgggattaccctgccagttaagctcttgagaagtttcctgatgtcagtataacccaaatgcagagatttcaaacttgctcttaaggttcacgaaagattgaaggaggaagatgaagcaacctacgatcagaggcggcgcaatcaagattgtatctttccagggaacctaaggccgtacaag

SEQ ID NO: 25656 - DNA, 262 bp, Emericella nidulans
agctgtttacgcaatgttgtctccatgttccacatcctcgagagggagatgaagtggcgccatgagaacggtaagcctgagggctttgacgcattgcgggctcatcccccgattgtcgcactcggcgcagaggatcctctcgatgatcagaagatgctcgcagactacttccgtgagtctagcctctccccatcttgcatcctgcaccctattgctgacttttgaagatggtattgatggcttgggtggaatccatggtagc

SEQ ID NO: 25657 - DNA, 325 bp, Emericella nidulans
gcgaatggaaatgaccgctacgtctacgatgagattaacccagacgacaattcggactactcggatgtggacgaaaaattcaaacacaattggcaacattccgttgtcgttctacgatcaatacccccatattggctatgacattaatggcaagaagatccttcgccctgctaagggagaggcccttgatgcgttgctcgccagtatcgaaattcccaaaggttggaccggtctcactgatccctcaaccgcaaaaccgttggaactgagccaagacgagatggaattgctgcgcaaagtgcagaatgaacgaaattccacataa

SEQ ID NO: 25658 - DNA, 663 bp, Emericella nidulans; identical to SEQ ID NO: 21136

SEQ ID NO: 25659 - DNA, 231 bp, Emericella nidulans
gacgatggtgaggacgtcaagaaagacgaagaggatgtggacgatgtgaatgtcaagctggaagaagaaccaatctccgtggctgatgagctactccgactggaaaccctggatttagtctccatcctcaaacgcggcaggaagctgctgggcagcgggacaaagaccaggaactttccttggcagctatggactctgcagctcgattacaacaccagaaaaaattgctaa

SEQ ID NO: 25660 - DNA, 387 bp, Emericella nidulans
ataatggctgacatgcgaaggggtaattatggcgccgctcggcttcagcatctagaaagcgatgttcatatgtcggggtccgaattccaggcggcattgagcattttctacgtgggcaccatcctgtttggggtaccatcaaatatgctgctcaaccattttggccggcaatcattgcacatcggccttgccgttctcttttggggaacggtcacgagctgcacggctgcagtcaacaattttgagtggatgatggcttgcaggaccattctaggcattgctgataagttctggagcaactcgactatcaagtcaacggctaatcttagacagaggctcctctatgtgcgggaatcctattctacctctcagtacgtggggctttga

SEQ ID NO: 25661 - DNA, 361 bp, Emericella nidulans
agcttccctcccggtccactccagttttccagtaccgcgaatacgaacgtttggatttcgagcacgccatgacgaacccgacaacgtccctgataaacgcctacatcatccgcaaagctctaattcgaaaacactacctcgctaacaccgtctcaaactgggtgaccaagcacccagaaagcgtgttggcgacgacgtcaaggtctcagtggactttgaactcgactatgctgaattccttgacgacgctctacttgaggcttacgaacttcgcgaatgctttgaggagaacgaatccagaccggactcagagaaggtatggtggattcttaaaccggggatgagtgatcgcggacagggg

SEQ ID NO: 25662 - DNA, 847 bp, Emericella nidulans
gtcgcggctttgcggttaagtccctgtaccggtaagtaatccttgtacgaccagcgtaactgcgatacaagcgggtccgttagattgataacatccgttttgagccgactcagtccacacatggctttaagtctggactgtcgctctccccctgttactcgcatccatctcttggtttccctctttcatactttgctcctcctctctctctgttaggaatctagttgagtcgagattagactgaactaaattgaccagcggagatgtctagcttcgagcaagcccaacccttcaaggtcttcatcccgggcggctcttatgccggcctcgcagcggccctgaacctagtcgacctttgccacggtagacggcaccgcttctctattactgaaggggacaacggcaccgggaagagaatccccgtgcaggtgaccatagttgatccccgtgatggctactgtacgccctgtaaaccctaccttctacctgatcaaatgcttaatcaatatagaccacctaatcggccaacccctcgcgctctcttcccaagaatttgccaagtccttttggatcaaatacaccgatatccccgccctccagacccccgaaattcgctgcgtacaggggagcatcgactccttagactgcacggcaaagacagccacaattgcgactgaaagcggtgccgtccaagagaaatatgattacctgattgcctgcactggactgcgtcgcgagtttccaagtgctccgcgctcgctcacgcgggagacgtatctcgctgagacggcggagaatctagcgaatattcgaggtgcggaaaagggagttgctgttattgggggtg

SEQ ID NO: 25663 - DNA, 256 bp, Emericella nidulans
ggcatatctgtcgcatcgaagctgttcgcagcagagatccgttcacccgcgctaggtacgttatccttttcctgaagactaggcatgttcagtgccgctgacaacggcagccttcatcttcctcatgggacagattggaggatcgatatttccggccgtcaccggcgttattgctgcgcggtctggagtcaaggtcctgcagcccatgctggtcggtttgcttggagcaacgggagtttcctggttgattatacca

SEQ ID NO: 25664 - DNA, 534 bp, Emericella nidulans
atgcctatcaaggagcctgtcaaaatcgcatttacgctaaggccctacgatgacctattgccccctgtcgtcaaaccagagacgtaagtgcgaattgaaataagccgcagaatgctcgttgacaatctgcagaccaagcctcaatggcacatccaacaactcccgtctgaatgcgaaccggatgcttcgagccaagaagatcctggcgtacgtatcagaacgcattgaagagccaaccaacgacccgctgcaggacgcactcaaaccggaggagtaccttgagctgtactgccagaacaaggtgggcttcatacactatatatagcgttaaagaaagatttgctaacaaggaaaagctcatacccccaaatatgaccctcgccaccatcagggtcactcactggcgaaacgccactgacatggtccttcactacaaggccaacggtaagaaggcgatccggctgataggatctgcgaatgacgccaacggtcagggtgaagcccaatccaaccagcaatctcagtcggaatcat

SEQ ID NO: 25665 - DNA, 483 bp, Emericella nidulans
caagtctacttagcatcgaatgtgcaacctccccgcggtgtattgttgcatggtccgccaggatgcgggaaaaccatgattgctaacgccttcgctgcagagctcggggtgcctttcatatccatatccgccccgtcaatcgtttcaggaatgtcaggtgaatctgaaaaggcccttcgagagcactttgaagaggccaaacgattagctccgtgcttgatcttcattgatgagatcgatgccattacgccaaaacgagaaaactcacaaagagaaatggagaaaagaattgtcgcccagcttctcacatgtatggacgacttggccctagaaaagacggacggaaagccagtaatcgtcctcgcagctacgaatcggcccgatagcctagacgcggcactgcgtcgaggaggcaggttcgataaggaaatcaacatgactgtgccttcgagccggttcgcgagcagatacttcgtgcactaa

SEQ ID NO: 25666 - DNA, 728 bp, Emericella nidulans
agacgaggcatggccagtttttgagaacgctgtgaattcgacacgtctgaaattgggtatcgcgatgaactggttctttggacgtgtgcccgcagaggcagcccccggtgaccggatcttgccactgcactttttcgagaacagcctgcttgtccagggaaacaatatggcagtctcacttgtttttgacactgttttggatccgtcaattctgcggagttcgttggagggtctggtgaagcgagaaggctggcagaggttaggagggcggctgcggaagaatgtatggctctattctcctgccgtatcccctgactgaaacatcttctattggcaccggccttgatctaaactgacgtctctaggcctctggcaagattgaatggcatgtgccgtcagagttcagccctacaagaccagctatttccttcgcgcatgtcgaccacggcattccagcctcacaacacccagccgcatcgcgcatcccaaagccaagccctaacccggcaatcgtcggtgaccctgacgcattggagagtctggcttgggatccgggatacacgcccaacgggataaacgactatctcacttcggaccgcccggttctcggtttgcgcgtgaacagcttcacggacaagactgtcgtgacgctacagtggcagcatgttgcttttgatgcgctgggcatgcagtacgtcgtcgaaggatggagcgctatgctctggggg

SEQ ID NO: 25667 - DNA, 415 bp, Emericella nidulans
cacgtttcggctgaatgggaagccctacttccagaccctgtgtctcgaccaaggctactggccctcgacgggcctgaccccgccgtccggcgacgcgctgaaagaagacatcattctcgcgaagaagatggggcttaacggatgccggaaacaccaaaaggtcgaggacccgctattctactattgggctgatcggctggggtatctggtctggggcgagatcgggaacgcatacgaattcagcggcgagtatgtggaccgcttcaatgaggagtgggagcgcgtagttatgcgcgatcgcaaccatccgtgtgtggttgcatggacgcccgtcaatgagagctgggggtataagaatctgaagggtgatgcggttcagagggggcatatccgagaactatatcggttgaccaag

SEQ ID NO: 25668 - DNA, 561 bp, Emericella nidulans
atggcctccgccgacaaactccccctgatccggctccctgagccatacaatacaacctaccgactccaggtggtgtccgtccagcacggcacgcgcaacgttcaattgcgacggtcgccgcgcgtcgacgatggcctgccgcctccagaaccccttcaccgcgactcgttccacttcactgaccttcgcgagcccgatccctatacgacaccgctcgatgggaacaactcggcatgggccagggcacagcgaagccccgtcacatcctggaactgggaaggacaggatccgccgacggtagcgcagatctggaatgttctctatgcgctcctgacattgcgcaccgagtttgagatcttccgcgctgtgctttcgggcgagggaagggagctgttggctcaggagttacaagcagtcgggctggcgacttcacatcccagcccttcagcgccgcccggtcagattctcccgcagtctgcaggcacgcccgatcagctggtgatataccgcagcacgttctggcagggcgccgggtcgccgttcgggtcgaggccggtatgg

SEQ ID NO: 25669 - DNA, 388 bp, Emericella nidulans
aaacggatagcaaaggtacaaccttactcacctttccctgccattatccacgcgacaagcaagttaacagcacgcctcaaggaactcgccgagctcacagagtctcctccagcgggcataacagtcgaactcgcgaacgaatccaacctctatgaatggaaggtgttcatggatggtcccgagggttctccctaccacgtaagttgcacctctttccctcagccaaccctgcagcgattcaagaacggccaaagtgaccttatgttcatatagaaaggccgtttcgaactaaagctcaccctccccaccgagtaccccttcaagccaccaagcgtctcgttcgtcacgaaaatttatcaccccaatgtaacgaacgacgacaaaggta

SEQ ID NO: 25670 - DNA, 263 bp, Emericella nidulans
gacgaaaatactacccccccgacttcgacccggtgggcgataaccggcacgccgaagcactccgcttctcaggccccaaggtaataaccgtgcgcctaatggcccccttcagcatgaaatgcacccaatgcggcgaatacatctataagggccgaaaattcaacgcgcgtaaggaaacaacggaggagaaatacttctcgattccgatttaccgcttctacatcagatgtacgcgatgcagcccggacaccacgttccttacg

SEQ ID NO: 25671 - DNA, 495 bp, Emericella nidulans
ggttcggcgaaccgcagaaccctcatgcgctgggacaagcgtcataagaagtatgttagtcgccaaaacgacgaggacggatccaagggcaccaaactcgtccgtggtgagagcggcgccaagatcgcggctactttacgcagcggccggtttgatgcgtggaagaaggggaagagagtgggcaggttaccgagagtcggcgaggcggaaacgcctggtctggctgcggaccttggtggctctggtggttcttttggtgggaagagattcaggcacaagagcgagaaggcgcccaaggctgcagacccgttgagaggggattatgaaaagatgaagaagaaggctgaggctgcgagggagagggccgctagcaaggttgggggcgtgacgagtggaggaaagagcgagattaggaatacggacgatatccgcaaggcgaggaaattgaagcagaagaggagagagaagaatgctcggccgtcgaggaagaagtag

SEQ ID NO: 25672 - DNA, 1101 bp, Emericella nidulans
ctcagccactgccgatggcggtgcaaaatcggagcggaccgcaaaaggtaaagcaccgtgaggtcccgatccgccgttttctccctctcaatatcatcattccgttaaacgactcttcacctagtctttaccccaacagttgtgcggctcaacatgctgcgttcatctgttctacagggccggcatatactgtcgtcttcggctcgcccacggccagcacctcaatggcttgcgagagctggagcaagtagccgcctcgccggtcaggtatggtgacgaaacactccgcttagttttcatattttgctgacggttgctaaattatgtgcagagattcttcgctgatgcaaaatctcctactcctgttacaccttcatccgccactccagttcccgcagagaccgccgcgaaatcgaccgcaggtacgaatacatcgcctgccgcaacccggcaagggaacaataacattagatactaagataagatgcaggccccagtgctactgagacacccactccagcgccaacccgcaagactggccgctttcgaaagtttctgatctacctcatccttacatccgggttggcatacggtggtggtgtcttcttggctctcaaatccgataacttccacgacttcttcacggaatatgtcccatacggcgaagaatccgtgctctactttgaagaacgagatttttaccgtcgattcccgaacacgctcagaaataagaaccgtctttctcccgcatctcgggatgagggcagtcgggttactatcccaagcaagagcgggctttcttctaaggaagttgaagaaactggaactgatgtgtcccaacctggcccacacatgagtgctgttactccagccaaggccgatgaggcgactatcaagcctgcggctgcaaagcccgaggagaagactgctgcagttaaagaggcgaagaagcaagcgcaagaacctgagaaacctagggaagagcccaagcaagagcccaaactgcctggatcagcccccatcacaacccttgaattcgccaatgttagcgaaggagacgagccgattgttcaggagctggtcaaacattcaacgacataa

SEQ ID NO: 25673 - DNA, 954 bp, Emericella nidulans
gataacctgaatgtcgatagggagttgatagctcacggtgtgacaaatgctctttcagggtttgccggtagtatccaggtaatatcgccgtcaaatttctgagggtcttagcctaacatgttccagaattacctcgtatataccaacagcttgcttttcatcgacagtggtggaaactcccgcttagctggcgttatgcttgcaggagctactgcgggaattatgctggttggacctgtgatagtggggttcatccctgtaatggtcgtaggggctttgattttcctactggggattgaattgatggaagaggcgctggtcgatacatgggggaagttacatcgacacgagtatttgacggtgagttagagtccgcagtttatgtggttccagctgattttctaggttgtcattattgttgcgactatgggcgtttgggatttcgttgcgggtattttggtaggcattattctggcgtgtttgagcttcgttgttcaaacatcgcgcaaatctgccattcgtgccacgtactcgggcaaagttgctgggtccacagttcgtcggcccccgatccaacagcgatatctgaaagaggctgggcagcagaccttgatcctcaagctcggtggttatctctttttcggaacgattgtggatgtggagaacacgatgcgaggactgattgaagatgaagcattcagtagacttccaatcaggttcatcatattggacctttgtcgggtatatggcgttgacttctcagcggcggaggcgtttacgcgtatcaatcgaatcctgaagaagaggaacgtgcggatgatgatctccgggctcgatgtggggggcgatgttggtaagagccttcagaatgtgggactgttcgagccacagctcactgtgcgggttttcgagggcttgaatttcggcctggagtactgcgagaaagagtccctt

SEQ ID NO: 25674 - DNA, 438 bp, Emericella nidulans
ttatggttcagggcgcccgtcacaaacctgcttcagaatcacctcccagagcatgtcttcgtgcctattatcaccagagagactcctgggttgctgcccaagccggatccggcaggtatcttgcacatagcaaaagaatggggccttgaggatggtggtaaaaatctaatcatggtatttgttctcctgatctcttgccagttcctcagccttcttgcatccttagggttggagcggcaactgatcgtgttgcgctaggtcggtgatagccttgatgatatgacagccgggcacgcggcgggagccgcaacagtgctgctgctcaatgaccataacgaccacctaaaggagcatatgcacacagacctggttattgagaagctccatgagctcattgacgtgctggaaaacggatttgtcggagtaaaacccgcatag

SEQ ID NO: 25675 - DNA, 366 bp, Emericella nidulans
cttgcctgccaatacactcacccctctttctccatatactacccgccgacctggtacgaagtgcacaaccacatcaacttctcgcagcatattgcggaccctaagaagccggacgatgggctgttcttgtacttcttccctaattgtacattgaacgtttacgggggaggaatgtcttcgttccgcgtctgtccaacggatgaccctggggtgacgagaatggaattcgactactaccatatggagtccggcgagaaattcgaagagtactaccgctttgttcgccaggtcgcgacggaagactatgagctttgcgagaaggcgcaggcaaatctgaacaagggcgtttaccgcgagggatactga

SEQ ID NO: 25676 - DNA, 387 bp, Emericella nidulans
aatacaagggaaatcctgttggcagaccgggatttgcttgatggtctggagaagtcagggttccagctagactacggacccaataggcagggaatcatcggcctctatgtagagcgaggaggcggatactacattgactttggctgcagccagctaatcatcgacggcaagatacgactccagcagtgcgcaaagggcatctttggattcgatgagcaccatctgctgcttggagatgggagtcgtctagaagcagacattgtcgttcttgcgacgggataccatagctccctcgaggcagttcgcaaggtgctcggaccggaagttgcaagacggtgcaacaagcaggtgtgggggctggacgccgccggggagttcaacacggta

SEQ ID NO: 25677 - DNA, 522 bp, Emericella nidulans
ccaatcagatcctggatgacctacttcttcaaacgcaaattttccctgcccgaaggcaccttgggaagcatcttcttcacaacctccatcatcgccgcgatctccatgcttctcgcatcctccatcgcaaaacgcatcggcaatataaaaacaatggtgttcacgcacctaccgtccgccatttgtcttgccctaatcccgctctttgatctgccgcttgctttaacgctgcttatcctccgcgcgtgcacgcagaatatggacgttgcgccgcgctcggctttcctggccgcggccttgcctgcggataaacggacggcgatcatgggtgctatcaacgttgtcaagacgagtacgcagagtgcagggccgttgattaccggggttttggcggataagggcgtttttggggcaagttttacgcttgccggcgtcttgaagtgtgtttatgatttcgggatcctagttagctttctgggcctggagagagagagagagaggaatgagccgggaggggtttga

SEQ ID NO: 25678 - DNA, 384 bp, Emericella nidulans
atgtctaccgaggataatcacgattcgcaaattttgacggcaagacatcgctcggacgccagcgagcagtcgttcaaatccctgttcggcggcccatcgagtgaagacggaaaagagacggagcccgatacccacgatcataaccatagcttcagcaacgcaaaggcgcccgcaaagtttgcaaaccagaatgtcgcacccttcctcgccagacacatccctgaacaatatgcacccttaggtgctcagtcgattctaccagcagatctcagcagcgcaaactccaaatactgttatcgccatcgcccagatcagaaatgtagacggcaagccgacgagccatctatggataagctacagcgggtgagtaaccccgcttcactc

SEQ ID NO: 25679 - DNA, 694 bp, Emericella nidulans
aaggtgacccaattctgtgtggcacccactgccctgcgattgttgaagagggctggtgaccaccacatccaccacaagatggaacatctacgtgtcctgggatccgtcggcgagcccattgctgctgaggtctggaagtggtacttcgagaaggttggaaaggaagaggctcacatttgcgacgtaagtcatttatgcctttggagtcctgtcttctcatttactaacggtgaatctttgtacagacctactggcaaaccgaaactggctccaacgtcattacccccttggccggtgtcactcccacgaagcctggcagtgcttccctgcccttcttcggtattgagcctgccatcattgatccagtctctggagaggagatctccggcaacgatgtggagggtgtgcttgccttcaagcagccctggcccagcatggcccgcactgtgtggggtgcccacaagcgctacatggacacatatctgaacgtctacaagggttactacgtaagttttatccattctatcaattcgctcactcgaaggtgactgacatcgtatagttcaccggaagatgagccggtcgtgcccacagaggaatactactggatccgtggtcgtgttgacgaatgtcgtcaacgtttctggtcaccgtctgtcaaccgcgaaaattgaggctgccctcattgagcacc

SEQ ID NO: 25680 - DNA, 606 bp, Emericella nidulans
atgaggtatctacctagccttcagcaagagttcgatgagctcaagccgtcgctctttggtaagtctcgccagctctatgcggagaagcgcccgaaagctgacaatcatcttgctagaactgctcgcggaacaacagctatcagaccttctccctccctcaatacgttacattctcgccgtcgctacacaccgtcacccgcgatatctgctacgtgtcctgaactcctttgatgaggtttacgcgttgctctcccttgtcgttgagcggtattacctccgcaacttcggcggctctttcacagagaacttctactcactcaagcgcgagcgtgtcctcctaaccaagaatggcgagatacctcgcgctcagcttggtgctcccggacctgtccgcgagagcttgaagctgcgtaattcagacgtgtggaagaacctcctcgtcatggtcggcattccgtatctcaagcgcaagctagacgaaggctacgacatccacgctcgtccgcaagcctcgctgatcatgaatggcggccctcgatataatccgagcgacgatttaccaccacatccaaccatccgtcaacgcttcatgcacgcctacaaatg

SEQ ID NO: 25681 - DNA, 579 bp, Emericella nidulans
atggttctcaggccggataatggtgacttcgctgcagagttccgcaggactcacctccgcgagttctcgttctgctttccggataagaagcctatatatgtcgatgatgtccgagtccgcggtatcggtgcgagcgaaaggaaggactgggagggagatcagctgggacagcagttgcgtgagacgaccttcaggcctcctgcaaaggggtaccttggaaggctcttgacgaatcaggtatacttccccaaactgggatatcaagatacgcccgtctatttggtgcagaatcttccagcgggtctctcaatagatggaccggccatcatcgtcgatcagacgcagacccttgttgtggcaccaaacacggtggctaaggtgttgcgctcgcatatcgttatcgaagtcttgtctacggcctctgctgtgacagaacagccaacaacagtggaccatattcaactctctgtatttgggcaccgatttatgagcattgcagagcagatgggacgggcgttgcagaagacagcggtttcattaaatatcaaggagcggcttgatttctcgtgtgcactgttc

SEQ ID NO: 25682 - DNA, 567 bp, Emericella nidulans
gccggccatacatattgtgccgtaaacaccctgacgttcttaaaccgtgtatcagacgactcatggcgagtaccgctcgtctcgcccggttctcaccagttcgaatcacttgtccgctggctggtatcgagacaaacaaatgaattgggagatgaagacgaagacgaagacgaagacgaagacgatgaaaaggaggaggatgatgttgatgactcgaacagcccaacaaatgttgttcagggtctatcggaggcggtaaatgaacttgatctgaacaacagcattgacgcgcttcccattattctgccaccgggggaagaatctttacaatgggctggctttaatggacggtgcaataagtatgcggatacctgttattcattctggaatgcagcaacgctggatgtaagagcctatgaggatctaccggatgaagctttggctaatactcagctatagatgctaggcagactgtcgatggttgatgcagagcggaacaggcgatacttgctgcagaagacgcagcatcttgttggcggttttgggaaaagcgtgggagagctacca

SEQ ID NO: 25683 - DNA, 553 bp, Emericella nidulans
ggcaaagaaggccatcagcattgggctatcattgggtccccttgccggacgcagttcctcaacgtgcttcgcggccagtacatcttgtatcccacccactggacgcagctatccgtacctcctcacagacaacattgcgcagaaggacactcggttacgggaccccgccaatgcgattcagtatattggttttagtggcgagggctcgggggcgattggcggcacgcgcggtgcatacctgagtgctcggtatgagagtttgcgggaggagaccgactggaccgtccagcaatacctgaagggccaaacgtcgctcaacccgttggaggaagaaaaagacggcactgttcgtgatgaggacctttttttccgagttgtcaaggatttgcgcctgggggatctgctagacatgcccgtcgcaaacttgagcaatggtcaaacaagacggacgcgcatcgcaaaggctctgctcggcaagccggagcttctgctgctcgacgaccccttcagtaagtttctcggggtttcggttggattagaacgtcaattaaca

SEQ ID NO: 25684 - DNA, 1371 bp, Emericella nidulans
  unsure (1)..(1371): unsure at all n locations
atgagaccccctactgtgcagtgccagttctacctcattggagatgaaccttcgtcagcacaatccgtcactgtcgacacccggtggaagttcgaggatctacagcgtgctgtcggcttagtgtttcacgttgcgcaaccgttgggtatgtcattaggtctactgatcctcggcctcgaagctgacagagtaggactctctttcaacacctcctcaggaaccctgtcaacggtagacgaagtcctcactttagcaaactcctcctcagccatcggcatcctcgtagatgggaagcccgtgcaatcccctcaggggccgcctggtctccccctcgtcggcagcttctacgagatcttccccgaccatctaggcaaccactaccgactcttccgcaaatatgggcccgtcatcaagacaaccaacatggggaaaacaatctacttgaccgacagtccccaagtggcggcgagctgcttcgccgagtcaatctacatgaccaagaagattaccgaagaccacccgctctgnggcgtcaaggacaacacggccattttcatcggcgatacggagacggagaactggcgtcttgcgcacaagtatcttccccctgccatgggtccgatagccgtgagacactacacgggactaatgcagaattgcgcgcgcaaggcactcccagtattcgatgagcttgatgcccgcgatgagagctggaatgtttaccagtacatggtgaagctcgcttcgcagacgatcgggtcgttctcgctgggcaaagattttgggcatttcgcatcaatagattcccctttgcatccgattgttacgaacattgcgtccttgctctcactgaataagaaaatcacagcacgcggagagtggtatcgacttctcccgtttggcgacccagcgcgtctgcggtctgtccagcacaccatatataccctactacaggaggctattgacgaggttgcggcccggtctgccagcaaagatgcacccatgagtgatgccgcgctgagcgcatcctgcgtcgtggattaccttcttcatgcggttgacgagaaaggcgagcacttcccaactggcctgatcctggccaacatgttaattgtcacgggtgccggattcacaacgacatcggccctcttatcgtggctgatctactgtctcgtcacgtacgaaggcacccaagatcgcctctacagcgaacttgtagagtacggcattgtcggccccagtggcgagcccaacaagacaacctggacccctgacttagcacacagccttccttacctcaacaactttgtcaaggaaacccaacgtttacacaacgcctccttccagccgggccgaaccacaaagacagac

SEQ ID NO: 25685 - DNA, 216 bp, Emericella nidulans
ctcctctatggtcgtctgtcggatatctggtctcgtaaatcggtcctcttcgtcggactggcgatcttcttcatcggctctctcgcgtcgtccctagctcaatctggaacccagctcatcgtcttccgcgccttcactggcgtaggtggcggagccctgatgacggttgcgcagatgactgtaagtgatgtcgtgccccttcgagaacgatggaaa

SEQ ID NO: 25686 - DNA, 807 bp, Emericella nidulans
atggcgcgagacgagcctgattctggtgtctgtgtcgttgacggccgtgaatacgtcgagcaacctcctcccgagaactcttccgcttggggaaaaacagtacttaataaggtatgaagaccctggcggatatagttgtccttgtctaaaaaacggcgcagttccgtgatctcaatccgggtgaatatcctccaaatttcaattgcgggtgggcttacgaaactgtcgttactgatccctcacgacacctgccctggctccggggaaagattatatccctcgggggccagttcgttcgcaaacgagttgagtctttggaggaattatacgccatgtttcccgaatcgaggatcttcattaatgcgagcggtattggaagcaagtatcttacggacgtgcgtgatgacagatgctttcctgaacggggccagaatgtgttcttccgtacaagcaactgccgaactctctactttcgaaatggcaaggagtacacatatattattcctcgaccattatcccaaggcgtgatcctgggaggggtcaagcaaagagacactctgtaagctaggaaacctgctttgtggctcttttactaacgacagcaggtcaccagaagtagacatggagattgcaaaggacgaaattgcccgggcgcatcgccttgccccggagatcgtacccgcagatccgacggaagaagtcctcagttatatcattggaattcgtccttcgcgagaaggaagctttcgactggactctgagaaaatcggggaccgcacccgttatgtcagcatatgggtttggggg

SEQ ID NO: 25687 - DNA, 983 bp, Emericella nidulans
ctcaaaatggttgttgatactagctattacgacgcccttggggtgccgcccactgccacagaacttgaaatcaagaaggcatatcgaaagcttgccgtcgtcactcatcctggtgtgatctcttggctgatattatggcgttaacccggtctaactaatttcgcagacaagaatcctggcgatgagaccgcgcatgagcgatttcaagcggtacgctgtcaacagcccagccctcgacatggtactgatttatttccgtcaccagatcggagaagcatatcaagtcctcagcgatgccgaacttcgcaagcgttatgatacccacggcaaggaaggggctgtcccggaccaaggtttcggtgcgtggtcagaggactattctcctttacgactcgcgctaataaatcgcagaggacccgaacgagttctttggtatgatctttggtggagacgcgttttacgatctgatcggcgaaatatctttgctgcaagaccttacgactcgcatggaaatcacaacggaagaggcggaagaagatctagctgcgtcgacggaagagaagctgaacatcaatgagcaggaaggcacgtctgtaggtgaaaccaccagttcaggtgcgggctcaagagccagcgcagcctcgccgtcccccgccgcctccggtacaagcactcctcggcctcgcttgggacagcaggctatcatggataagtccgatgaggaaatccgaatgcaggccgccggtgtaacagaggaggagcgcgagctcaggaaaaaggagaagaagaagggcggtcttacacgtgaacaggccgaaagactccaagccttcgaactcgagagacaaaaggcgcgagaagagcgagtcgacatgctggcgacgaaacttatcgacaagatcagcgtgtggacggaaactgacaagggtgccgatgtgactcgggcctttgaggagaagattaagcttgaggtggagacctga

SEQ ID NO: 25688 - DNA, 612 bp, Emericella nidulans
atgtctgacaccgtcccagacaaggaggtcgagcagcagcgcattgaccatgacgtctacatcgacccggctgcggagaaggcccttctccgcaaactcgacttgtggattgtgcccccggtcatgctgctctacctgctcagtttcctcgaccgtgttaatattggcaatgcccgcttatacggattggaagaagatctaggcctagagggcgaccagtatcagatcgcagtctctatcctctttgtcacctatatcctctcagagcttccctccaaccttgttatcaagaaattcacaccatcccgctggctctccttcattaccaccgcctggggcatcgttgcaaccctgacgggaatggtccagagctacggcggcttgatcgcttgtcgtatcatcctcggcgctcttgaaggtggcctgtttccaggtctagctatctaccttacctgcttctacacaaagaaagaatacgctctgcgaatcggctatctgttcgtttcggccgccattgccggctccgtcggcggtcttcttgcttatgggatcggccatatggacggtgttgcaggtcttcgtggatggcgctggatcatcatcctcgaagga

SEQ ID NO: 25689 - DNA, 880 bp, Emericella nidulans
gcttaccgatgccacggttacgcgatgatgcgcggtggtactatccgctcgattattggagagttgctcggtcgtcgcgagggtattgcttacggcaagggtggttctatgcacatgttcgcccccaacttctatggcggtaacggtattgtcggtgcccaggttcctgttggtgccggtcttgcctttgctcagcagtacaacgaggagaagtccaccagtgtggttctgtacggtgatggtgcttccaaccagggtcaggtctttgaggctttcaacatggccaagctctggaaccttcccgttcttttcggttgcgagagtaagtttcgcatggcatattcattttaatttccactggctaatgatcgcagacaacaagtacggtatgggtacctccgccgctcgttcctctgccttgaccgactactacaagcgtggtcagtacatccctggtatcaaggttaacggtatggatgttctcgccaccaaggctgccgtcaagtacggtaaggactatgccatctctggcaacggtcctctggtctacgagtacgtcacctaccgctacggtggtcactccatgtccgaccccggtaccacctaccgtagccgtgaggagatccagcgcatgcgcagcacccaggatcctatccagggtctcaagcagaagatccttgactggggcgtcatgagcgaggaggaccttaagggtctcgacaagagcgcccgtgctcacgtcgacgaggaggttgccattgccgagaagatgcctctgcccgagaacaactctcgcatcctgttcgaagacatctacgtccgcggcagcgagcctcgatggatgaggggtcgcactgttgacgagactttctactactag

SEQ ID NO: 25690 - DNA, 459 bp, Emericella nidulans
acaatggctggcttcgcatccgcaaatctgctggagagagttcccgaagacgaagttctccccgcagaattcaccgtcaaagctccgccagaaacagatatttgggccaaaccgccttcaaccgagcgattcaacgctcctattctgtacaagtccattccactggacacttttaagcgtgctcgagtggcattctcggccaactggagccagaaatacgaccagggcggactcatcatcgttctcaacggaaacagcggggatcggaagtgggtgaaaactggcatagaattcactcatgacaaaccgcatctgagtaccgtagccaaggaccgctgggcagactggagcctgctcccggttccatcaggtggtactggcgcaaccctagaagtggtcagagagccagacgatagcttgtggatgtacacatccttaccctaccttatccattcatga

SEQ ID NO: 25691 - DNA, 713 bp, Emericella nidulans
aaggttgctacagatgatgcttccgttgagctcagtagcatgaaatcggagcgcagtccggccaagtccattccgttgggtgaagatataatgcaggtagctcgaattggggaggtttcggttatgcagaagctgtttgacgagaaaaagttcactgcgaactactccgacgaagaagggattactccgttacatgtgcgtcaatcttcccgggacatttggtttaggaaatttcattctaattgtatacttctactagtgggctgcgattaacaaccaatatgcgatgtgcaagttccttatagactctggagctgatgtgaacgcgaaaggaggagagtcagttgcgacacccgcgatgtgggcagctcagcggtgccactattatatcgtgcatctgctactccaatacggcgccgaccctcttcttactgatgtccaaggctacaatattctccatctcgcgacgatcgacgggaacgcatttctgcttgtcttgctccttcaccaagagataccggtagacgtggttgatcaacagggacatacggggctgatgtgggcggcttataagggatatccggcgtgcgttgacctgtttctacgttggggcgcgaacccgaacgcagtggatgatggcggattagcgcccttcactgggctcttgtcaaaggatcattgccgtgtgtcctaaaaatcctcgagtatggtgc

SEQ ID NO: 25692 - DNA, 816 bp, Emericella nidulans
gtcggaagaatcggactgcgaggatgaagatacaacacccgtcgatgaacgctggtcgccgcccggctttggaagaaggtatgattttgtcccatatagcgggtggtatagacaccagccctatacgcgcaagatcgaccacgagcgattcgggctgaaaccaaccgtgggagttagtccaacacagtcgcgcgaagccagtccgcagtatgaagatgcgccagaggctcccgcagtaggacgccgtgccgtttccaccgagacgggggacgtcatcgttgccgccaacgtaccgttaccgccagaagcagattcaccactgaagggccggtcgcccagtccagtgcgaatgcctttacggccgatccctgacgccgagactgtggacttcaagcccgaaaataacataagcaattgtaggctacccttggtttgactaccctgtccagcttgctggcgcgggatatactaacacctagacctctcaaagatatccggttcgctgtgcgcgcagaagttcagcaccgggaaccgttcgtcgcattctttacttacctgcgctctaagttcgatcgcatcaccagctccaagtccaataccaccctatccgtcctgattgccctgctgtctatcgctttcttgcgcacattattcatgccgagtatcccatcagcaattccagacctggtcaaactgtcgggctttgcgcgctctttcgagccgcttatatattactccgaaaatggtgtgcagcagattggaacattacaagagactggcgtggctgtctgggatctcagcgaatcggtgcgcggg

SEQ ID NO: 25693 - DNA, 943 bp, Emericella nidulans
aacgtcgcaggagtccttctacgagcgtaacgcggaagtggatgacgatgggttctctgatgttactcccgactcacgtcagccagacatcaggggattggcaatgctccgtaagatcgagttctggcagcttttcctgaccatggcactgctttctggcattggtctgatgaccatcaagtacgttcccttctacccttatttggttcttggctaacatcttccagtaatattggcaatagtgtaagaagatttcccactgccctggatcctgtattgactacccataggccaaatcactctgggagcactatgatgatagtgcgtcgcctaaatttatccaggaacgacaggttatgcacgtttcgattctgtcctttggcaactttgctggccgtctttctagtggttagtatatagacaggactgtcacggcatgccaggctcacactcgctaggcattggatccgatattcttgtcaagaagttcaacatgtcacgattctggtgcctcttcatgtcttcggcggttttcaccctcacgcaactcgcaggcgcatcgatctggaacccaaaccagctggcaattgtgtcggcctttaccggcatcgcatacgggttccttttcggtgttttcccatccttgacggctcatactttcggcatcaatggtctctcgcagaacttcggcgtgatgaccatggcgccagtgctgagcggtaacatatttaacctgttttacgggatggtttacgaccatcattcaatcgtggatcgcaacggagaccgggactgtcctgacgggctctcgtgctaccaatccgcgtattacatgaccttcttttctggagtcggtggaatcattgtgtgcttatggagcatttggcgcgacgggcggcgtacacggacccatgctaagcttgagcatgatagacttgcctga

SEQ ID NO: 25694 - DNA, 582 bp, Emericella nidulans
gaccgtaagcgccacgaaggcctgcattcgggtgagaagaagtttgtttgtcggggtgatctctcgcgaggcgggcaatggggctgcggccgccgatttgctcgtgccgatgccctggggcgccacttcagatcagaagctggccgaatctgcatcaagcctctattggatgaggagtctcaagagcgagaacgcacgctcataaaccagcaacagcagcatctgcagccggtcaaccaaccactcatgctccccggccagggaacggaggcccaacatacgggcagcttcatcctacctgcagcgctactagcacagtatccagctttgcaaacattgcagtgggaccaaataccagccggaactgatgacacaagcgatattggcggtcgaaatagtttcgacgccagttccggcggagagttcggtttcgacgacgatgaatcggggatcagtgtctctggtatgagtacgggctatgccagcgatcagggcaatatctacaatgtggatgcccaagggcagatgcttggggtcaatccaggtgaagctggctacgcaaatccgaactgggggaaatag

SEQ ID NO: 25695 - DNA, 594 bp, Emericella nidulans
ggcggcaatacatcccttccgacataccaggaggcttcgggggcgccggttgaggttgtctcgccgctgggctacgaggctgggtatatcacgttgatcttcatgaatgtgagcaaaatggtcggcactgggattttttctactcgtgagtaatctttccgtacttggaatgactttgtaagtgacaccgagttatcatgtctagcttcctctgttttcgagggaaccggttctattggtctcggtctgttctactgggtgatagggtttgccgtcgctgcaagcatgctctccgtctaccttgaattcgcttcttactttccaagtcgatctggatcagaagcggtctacctggagcaagcatatcctcgtcctagatactttttccctaccgtcttcgcggtgcagactgtggtattctctttcagtagtagcaatgcgattggtacgtcaatttgcctacgcaagcctgcacacactgacccgggtggactagttttggccaattacctctttagacttgcagagtcggagcctacagcttggcaatccaaaggagttgctcttgcgtcgtatacagtcgcggttttaggt

SEQ ID NO: 25696 - DNA, 766 bp, Emericella nidulans
ccagcaacctgcctcgaaagacgacctcaagtccctaaacatggccgcaacctttttcaccacccttgtcccagctgatgggccatgcaactacgtacggttcatgactcgcatgagtacagcctttgagcgtatcgctcgcactgttctagaacgagatcagaagacggtccgaccgggcccagatccgcttgtcaaagcgaaagcctctaaaagccgcgcagcaaacaactcgcgaagtcaaccaccaccacatactctgccccagcatcaatcttcctccgcatcagcatctgcaaccacaaccgtcaacatccccaacctcgaaggtttacctccgatcaactcctccggctacgtcgtcattgagagccctatcattagtcccgatcaaagcccacctccaccttcaaatcccacaagcagcacaaacacaaaaccaacctactcaagccaaccgcaaccacaaacacatgcatcaaatccctcaagcgtaccccagtatcagtatcctcccacactccactcccaacaacattcttttgcgccttccaccatacccacagatacgacaacatctttccccttaccaactcttgaagaatcctccgtcacgacttcattacccgcctccttcccataccccttttcccagacaaggcctgaaccatggcagatccctctaacggcagaatgggagttcggctttgagggccaattcctcggcatgggcatgagcatgggcatgggcgcggggcatgggtaa

SEQ ID NO: 25697 - DNA, 2756 bp, Emericella nidulans
atgattccccctcctactgagaaaggcgagggaccggaagtcgccccgctgttgacgcttaaaggtaatttcccggcgcatcccatctaatcgaaaacggtttggtgcgctcgtatagctgcagctagcaatcacttgaccgtccgcgcctttttcagctccgcagagcagccctcaacttccttccagcaatcaccttttggggtgcagatatagagctcgacatgacagagacgccttcccagacaccctgggccctgaccaaggctcacatttttgccatactggacgaggatgtctaccgacccgataagaacttgggacttgcccccggacttatcccagcggaggtacgacgcgcggatttcacggaaagaggcccagccaacgacagagaaaaactgagcaccttgcaaaccagagcatggattgagcagtggtgcagagatgcatttgtccttgtcgaggcgaagcaggagaacgagaatctgaacacacattttgaacaactcgatgcgctgttctcgaccctgatgatctgcaacttccagctcgaaaggcataaaaaggacagggctaccgttgtggacagcgcttataccgtgctgcaacgcctcccacgacacccgcccgaactgacattcgaatatagtcggcgctcgagaagcaacaagacagaatcggtcggcaaccaatggccacctgaatacttttgtggttcctctgcagtaggaatagaggaagtggatgcgccacaggggtacaggtggacagatctgcgagttctttccagaccctgtaccaacgtcgtccgcactgctctctggctgtgcatgaataggacaaatgcaatcgcaatccacgaatacgcggacacaatagtcaagctccttgatacagtgaccgacctccaaaaagcctctacgacagaatctgacgcgcgagcatggttcgttctgactgctcttttctggtcagcttggcagcaaacagtgatgctacagctatgtttcgatgccacaattcgtctggactacgggtacgcatcggacgaaaactaccatatcatagcaagagagactccctcggtaatgccgccgcgcgagatagtggagagattgagaccgaagtatatgtgccaatgggcgtttgaattgctgcgcgcagacctgagctctgtcacccaggactttagggcacttttcgaagtatatgagcgtcaatttggtggtcgggaatcgcgatgtaacgtcattgacagtgggagggtatgtgatggcaaagcgcctgcaaactgtgagagattcctgtcaaacagggtggaggatcaatccgctcatgatttccaatgccctggctcttcctgcagcctcttgacctgggacgagcagtcatacatgagtatcaacggagcgagggcagtctgtctggagaccacggacgacaagcatattcgatatcgccccgtatccggcgaaaacatggcagtatcccatgtctggagccatggacagggcggacgaccagagacgggattcaacatctgccttcatcgcaggtataccgagcttgcaagatctcttggttgcacgtcatactggatggacagcccatgcataccaacggacgatgagctccgcgacgaagcaatcggccagatcaatgacaattttatcaatagcaagcttgtactacttgttgaccgcgacctcatggacatagacatcgagccgctgactttagccgcggaagaggcaatactagcaacccttgtggtgtgcgactggaacgtccgcgcgtggactctactagaaggcattcgcggccgagcgaacctgcatattctctgcaaggacaaccgcgtcatccccctaaagactgtcctcacggatatcctctcaaagagctgcctcagtcttgtttcgccctgcctagcggtccagcattacacaccgactagagacaaagttgacctggtcaagaccgagcaggcaacgtgcctcttgaaccaccgccacccaaccaaggatagagacatcataatcatctggagtctggtctgcggctcaaacaaagtggtcaagaccgcggaggcgttttggaggtccatggtgggcggacggcttgccacgggatttcttgtctcgagctcaccacggatcaaggggattcgcgggttgagctgggcgcctgaaaggccaaatctcgttcctcctgcgtcagcatcgtcgccaaaaggcgctgctagcacacacgccaaaggcagtctacagcaacagcagtacccggcgttcaatggggagaacagcgttgccggcaagatcacgccggacgggtttcgggctgagtggctggtttgcaagatccagcgccgcagagctcttcctggcgcgggcctcttctggctgcacggcgcctcagatgatgatgatgggtacttttatgtctacaataaaggcgctaacgataagatggatgtcaaaagtcttttctatttgcgttctgtggtcgcgccgttgtttaagcggtatcgttgggtttcactattgctgccgccgtggtcacaacgagggggcgagcacattgaccctccggtaaggccattcaagtatcagggcgagtgtgagggtcttgtgatggctattgttgcgagtaatgatgaggccgggtcggaatgggagtggcagggcgtccatgagtgggatgtcaagtttaaaatgcccgaatttcccattgctaacattttgattgtttag

SEQ ID NO: 25698 - DNA, 390 bp, Emericella nidulans
atgcttcctcgtttgttcagcttcctggctgccaccgctggcgtcgccagggctgtcaacatcaccggctacgagtatgtcgtcgttggctccggtgctggtggtggtcccttggcagcacgcctcgctctggctggccacaagactctgctactcgaagctggtgatgaccagggtcaaacctacaactatagcatccctgcctactcagctagagcttcggaggacgagaaactcgcatggaactttttcgttcatcactatgccgatgatgaacgccaagctcgcgatttcaagacgagctacgaaacacctagtggcgaaatatacaccggtctgaatcctcctgaaggctcaactttactgggaaccctctatcctcgcacaggt

SEQ ID NO: 25699 - DNA, 1693 bp, Emericella nidulans
  unsure (1)..(1693): unsure at all n locations
attcttcccataatggccaccactaccgagttccccgcaagcgacgtcaacagctacgactatgtgatcgttggaggtggtactgccggctgtgttattgccagccgtctggctcagtaccttcctaacaagaggatcctcttgattgaggccggtcccagcgattacatggatgaccgagtcctcaaccttagggaatggctcaacttgttgggaggcgagttggactacgactaccccacagttgagcagccgatgggtaagaacacttattcggcgggaattcaaggcactagctgactttctcgcaggtaacagccatatccgtcactctcgcgccaaggtgcttggaggctgctccagccacaacaccctgatctcgttccgtccgtttgagtatgactgcaagcggtgggaaagccaggggtgcacggggtggtcgttcgagaccttcacgcgcgtgctcgatagcctccgcaacaccgtccaggccgttcacgaccgtcaccgcaaccacctgtgcaaggactggatcaggtcctgctcgaccgccctgaacattcccatcatccacgacttcaacaaggagatccgttccaacggtgagctgacncagggtgttggtttcttctcagttgcgtacaacccggacgatggccgccgcagcagcgccagcgttgcttacatcccaccctatcctgcgcggtgacgagaagcgtcccaacctgacgatcctcaccaacgcgtgggtgtctcgcgtcaacgtcgacggcgataccgtcaccggtgttgatatcaccctgcagtccggtgccaagcacactctccgtcccaagaaggagaccatcctctgtgccggtgccgtggatacccctcgccttctgcttcactccggtctgggccccaagcagcagctggcctctcttggcatcccagtggtgaaggacattcctggtgttggcgagaacctgcttgaccaccctgagagtatcatcatctgggagctcaaccagcccgtgcctcccaaccagaccactatggactccgacgcaggtatcttcctccgccgcgaggcacccaacgccgctggctccgacggcagcgccgccgacgttatgatgcactgctaccagattcccttctgtctcaacacgtcgcgcttgggctatgacactcctgtcgatgccttctgcatgacccccaacatcccccgtcctcgctcccgcggccgtctttacctgacctcctccgaccccaccgtcaagccggccttggacttccgctacttcaccgaccccgagggctatgatgccgccaccatcgtccacggtctcaaggccgcccgagagattgccaagcaatctcccttcaaggactggatcaagcgcgaggtcgcccccggccccaaggttcagaccgacgaggaactctccgagtatggccgtcgcgttgctcacaccgtctaccaccctgctgtacaaccaagatgggtgatgtgacccgcgaccctatggccgttgtcgatcccaagctgaagattcggggcctgaagaacgtccgcatcgccgatgccggtgtcttccccgagatgccaaccatcaaccccatgctgactgtcttggccatcggcgagcgcgccgccgagcttattgccgaggaagctggctggaagcgcgagcagcccaggctgtaa

SEQ ID NO: 25700 - DNA, 459 bp, Emericella nidulans
attctcaaaaaaggcgaggagcacgcaaaagcaaacaatatcccgctcgaggacttggtcaatgcgtccctgatcgccgacatgaagcccctctcattccaggtcttcatcgccaccaacacagccgtcaagctcgtttctcgcgcgacatttgtggagccaccagctcaaagcgacaccgacaagacctttgatgacttctataagcgcattgacgaggctcttgccgtgctcgagaaggccgatgcccaaaccatcgcggccaatgagggcaagacgttcaaggctcccttgggccccagggagtttgaatttacaccagaatcgtatacgaatagctatgcggtgccgaacttctatttccaccttgtgacagcgtatgatatcctgagggccaagggagtgccagtgggcaagatggattacctgaaggatttcctgggagatattgcggcttag

SEQ ID NO: 25701 - DNA, 1265 bp, Emericella nidulans
atgagaatccttcttcccgtcttggccactgccagccttgcccatgctgtgtccataaccggctgccacaagcatggtgacgatgtatactgtttgaccgacgacggcggcgaggtgcaggtacttctagataatccgccggccggagaccctccctctgaatataccgactgccacgagcacggaagcacatggtaagcactcaccgtctggcctccccaccctagctgaccgctgtaggtactgtgtcgatgcaggaggaaacgatgtcgagatcctgggagagataaccgacagctccaccagcacgaacagtactaacgaagagacgacgaccaccgaatcgacggaagagagcacggaaggagagaactgccatttccacgcaggcgtagagtaagggcctcttccatctgtgtcgcataattattgaccagacaggcactgtcttgcccctggggaatcagaaagtggtggcagcaccagcgagtcgtcgtgcgggatccagactcgagattatgacatgcccttgcgtatcgggacgctcttcgtcgttctcgtcaccagctctattggtgtgttcctccctatgggtctggtgaagcttccttccgcgaccatcaatgtttgggcgtccaccattatcaaacagttcggtacaggtgtcatcctctcgaccgcattcgttcacgtgagtcacatccatcatgccctctctggaagaaattaacaaaaccagctctacacacatgcagatctcatgttcggcaacgagtgtctcggcgagctcgactacgaggccaccacatcagccgtcgtgatggccggtatcttcctttccttcctgaccgagtatatgggccatcgttttattctcgcccgcgcggcccgttccgccgaacgatcccagccagccgagaatggctcgaacatctcctccaagtccgcggccgagcaagaaccgcagccgcatcaccacgccactctcgccggcctgggccaccatcatggcggcgacccaaccaaccccaacacaaagctctccgtgctggtcatggaagccggtgtcatctttcacagtatcctcatcggggtaaccctcgtcgtcgcgggcgactcattttacaagacccttcttgtcgtgattgttttccaccagttcttcgagggactggcgctaggagcccggatcgcgcttctgccaggtcgtacgttccctagcaaagccatcatgggcggtgtcttcgcgctcatcacgcccatcg

SEQ ID NO: 25702 - DNA, 538 bp, Emericella nidulans
tgttgtcgggacgtttattcctgctaagcactgtgcgcaactcttcaagcaacaggggacgggaggaagcattgtgatgattgcgtccatgtctgggcagatcgcgaaccgggtaagccatcttctcagccatcgtgtaacagacaccagaagactaagtgtcgatagggcttaacatgcaccgcctacaactcctccaaagctgctgtgcaccagatgtgccgctctgtcgcgcaggaatggggccagtatggtatccgcgtaaacacattatcggccggcgtatgtctcttatcacatttttctagatgaagtctctgctaattctgttgggtagtacatccgcacagcgatgacagacgcgctcttggtagccaagcccgaagtcgaggagacgtggatgcgcggcgccctgttaggcagactcggtgtccctgccgacttcaaggcgccgagtgtgtatatgttggcagatgggaacgggtttatgacgggggcggatctgagggtcaatggagggcattgtgcttctgcgtga

SEQ ID NO: 25703 - DNA, 1670 bp, Emericella nidulans
tcggctccatggctgcgcttcgcagacttcatgctactgctcagcagttggtcccatcatctacatccgcggctagcaccgccacgtatgccctcgagcccatgaagccattcccaatcctatttatattaccaacttccttagcaacgagttcgtgccgtcaaaggcgagcacatggtatgacttgtatgacacggctagcaatagcctcgtcagccgtgtgccccagagtaccgatgaggaactccgcgccgctgtcgaagcggcccagaaggctttccctgcatggagggctacgagtattatggctaggcagcagattatgtttaagttcgtgaacttaatccgtgccaactgagaaaagtttgcctgcgtcgcattactctcgagcagggcaagacactttgctgatgccaagggtgatgtcctccgtggtctgcaggtcgctgaaactgcctgtggcattaccacgcagatcaccggtgaggttctggaagttgccaaggacatggagaccaggagctacagggagcccttgggagttgttgctgctatctgccctttcagtatgttttcccgcacgcgtctttttatggcaaacgctaatgagtctagactttcccgctatgatccccctctggtgtattcctattgctactatcaccggtaacactatggtgatgaagccctccgagcgtgaccctggagcggccatgatcctcgccgagttggccagggaagccggcttccctcccggtgttattaacatcatccacggatctgccaagaccgtcgacttcatcctggatgcccccgaaatcaaggccatcagctttgttgacggtaaccgtgctggagagtacatctacactcgcgggtccgccaatggtaagcgtgtgcaggccaaccttggggccaagaatcacgctgccgtgcttcccgacgcaaacaagaaccagaccatcaatgctattgttggagctgctttcggcgctgcaggtcagcgctgcatggctctgagcacactggtcacagttggtgaaaccaaagagtggctgccagagatggcagagcgtgccaaggcgctgaatgtcaatggaggcttcgaagagggcgctgacctcggccccgtcatcagtcctgagagcaagaagcgtatcgaggatctgatcgctagtgcagaagaggagggcgccaccatcctcctagatggaagaggttacaagcctgaaaagtaccccaatggcaatttcattggtcccaccattatcaccggcgtcaccccagggatgaagtgctacaagcaggagattttcggccccgtccttgtctgccttgaagttgagaccctagatgacgcgatcgagctcatcaataagaacgaatatggcaacggtgccgcgatcttcacccgctccggccctacagcctccagattccagaaggatattgaagccggccaggttggaatcaacgttcccatccccgttcctcttcctatgttctccttcactggtaacaagaagagtattgccggtggtggtgccaacactttctatggcaagcctggtctccagttctacacccagcagaagacagtgacgagcttgtggcgcgctgaggatgccgtcagtactaaggctcatgttgtgatgcctacacactcataa

SEQ ID NO: 25704 - DNA, 734 bp, Emericella nidulans
atgtcctctatgattaccacctccgcttgggtgcggcgcggcgtcgcagcccagtttccgaccaagtatgaaattgatgagaaggagatggatcgcatatcaaaacttgcgcgaatgcagcttgaagatgcacgcgaggatttgagcgcggcgcagggtaatggccctgttgtggacaaagatgaggatgctatggaggaggacaatgtagagaaggacaacaagaaggatgctcctgtgaagatgtaagaagccaaaacaacgtgcttgtcgacagctttggtggtgctaatattgatggatagtgacgatgacgacctgaaagaatatgacctcgagcactacgatagcgacgaggtggatgaggatggcgagaagattaccatgttcggcaacgtaaagtcgcttgcataccatcaacccaatgaggaggatccctacctggttgttcctgaggatgaggaggacgaagagcgtgaggaactacagattcttccaacggataacttgctgctggcgggtaaggtcgaggacgaggtagcccactcgaggtttatgtctatgaggacgaggcggacaatctctacgttcaccacgatatcatgctaccggctatcccgctgtgcttggaatggttggacttccccgttggaaaatcccgcgagaacggcggcgcgacaggcaatttcgtcgctggtggaacgatggagcccgatatcgaagttgggaactag

SEQ ID NO: 25705 - DNA, 1819 bp, Emericella nidulans
tgtcttgactgctagggctatccatcgcttgctgattcattttgagcgcgagctgcacgtccaggaggatgaagacccggcggagctggataaacgatttaaaggtatcctggattcaactcgtattcggcaacggaagctttaccgattctctcggtttttgcgccaattgtttgaaaacgcctctgaatataatcttccggcggacatctcatgggacttcttcgaagccctgtttgtatcggatcactttcttatcaaatccaatgcgtcctccgctcagaagggtgtttattactttgcgcatcctgcgctctggaaccgtccagatgagattgcggctattctcggaacatcattccgtgaagaagaggtcgggaaagagctcacccatgtgccatacgtgcttgctgtacgtcctgaaaagccgttatcctgggcgggcaaagagatgcaggttgagctggttgagcaacccaccgacttgcggcttgggaagctgcgccttatcgttgagggatcacagcagcgcctagtcaacgcgaggcttgaactaactcacttgaccggcattcaactcgacatggccattgagcaacgtgcaaaccttagtcgtgtcaacgccgaactcaataggattaagaagatatcgttcaaactctccatgactattatggacagcgtcgcgattcttagaagacagttaagggagaaaggcgtggaaaacaccgaactcattcaggcatcgtacgccttcgcgacagaattcggtaaacgttcatcgaacgttgatcctaaccgacgtgcaatgaacagtgctagactggcagagttatctttagactgggtctcgttcatctgtgatgattgtgatgctgctgatcggaagaccttcaagtgggccgtggctgcccttgagtttgcgatggccataacgtctagcagacatcttctttcaatggacgatgcacattttgcacgattgcggcagaaagtggcgggctgtatgtcgcttcttatctctcactttgatatcatgggcgcacggtcttcacgtgcagcccaggctgagaagcaacgtatggatgaaagcgctcgttcctggaagattggcgctggccgaatccttactgacgaggaagccatgaggctcgttcgtgagcagcgtctcataagcttgaatgccatcgaggaaggtcgggttgaggcagatgccaaacgtcaggctctaggaagggttcttgaaggaacaaatgaggctgataaatctctcgcggtgttatcttcgtcggcgacgaacgtaacattacgttggcagcagggtcagtacatcggaggtggtacatttgggtctgtctacgctgcgatcaatctggacagcaattacctcatggcagttaaggagattcgtttgcaagacccacagcttattcctaagatctcgcaacaaatccgtgacgagatgggtgtcttagaagtcttggatcatcccaacatcgtgtcataccatggcattgaagtccatcgcgacaaggtgtacatcttcatggaatactgctccggtggatccctcgccaccctccttgagcatggccgtgtcgaggacgagacggttatcatggtttatgcgctccaacttctagaaggtttagcgtatctccatcaatccggaatcgtgcaccgcgacatcaagcccgaaaatattctgcttgaccacaacggcattatcaagcacgtagatttcggagcagcccagatttatgctcgtcacgggaaaactttttctgcctatggacgccctcggccaccggaggaataa

SEQ ID NO: 25706 - DNA, 1320 bp, Emericella nidulans
tgctcttctcgagagtatctctcgccggcaatgccgtggacagtttctaccctcccctgaaccacacgacctatatcaccaatgcttcgttcggtacctatggcggggtctttcatgccccgtcagaccaggctagtgacactggagacagcgtttacaattactgtactatgcctcatccgcacgtagacacctattccctgccttcgccagtggcaaacggctccgtgggcgcgaagttggtgtatctggagtatatacagagacaccagaggcggacgccatataatattctaccgggtggagaggtttgtttttaaatttccccttcgtataggatgtttgttctcacactcccatgcagaaccaaggatacaactgcgacgcgatccacccacatctcttcgcagccccttcatctggcgctccagcaccattgcaggcctatggacaggcatatacagatcccaccaatcctttcttgacagactatgtcaacggctcctgccagtacccgcaactcacaatcggcgggtatctcgatgggtaccagcacgggcgtgatctgcacgaggtatacagcaagaaactaggtcttgtcccctccaatcttacccatgacgacagacgtgtgtggctacgatccagcacgtcgccgctgacacaggggtcagcgggcggcgtccttcgtggtctatggccgagccgcaaggagccattgccgctccatcagcaggctgagagcgtcgacacaattaaccgcgggtttccatgcgcgaaacgcgatgcacttctagacgcgatccagtcaacaaccgagtggaaggaacatcttactgttactagcggtttgcggaataagctcgcggatatgtttgatgcacaggatgaatcctcctggctggacacctgggatcactttgcggataattttcagggtcgactgtgtaacggctatgagctgccttgtcgtcttcaggaccagtctcaatgcgtgtcaaggcaacaagcagaagaagtcttccgcgcgggagactggatgtacaactactggtggcggaagaatccgaatgttaccgagtacatccagactgttgaaggtctctttattgcggagcttgtgagaaactttgaactagtgcaaagcgggagctcagaagttgtgtattctcatacatttgcgcatgacggagatgttgcgccgctccttggggcgttgggtatcaaggcgctgaggtggccgggaatggggtcgaacgttgcgtttgaaatttggtatgtttgcatcctttttctttttatagcttgtttctactttag

SEQ ID NO: 25707 - DNA, 273 bp, Emericella nidulans
aagatggtaattggcctactagcaataacggcaattcccacggtgacaggcattgcgctcgggtgtagcgaacagcgcaagcagaacgcacggcaagacgatgaaaagcgcatggcgaagttctatacggatgtggtatgtacggaagatgtcgaggaggcagatgagctagatgagaagagggttgtattgcggaacaacaaggtacataaattgcaatcattgccgcgtcttccgctccagaccgtcattaaccaagatactggaagatag

SEQ ID NO: 25708 - DNA, 1849 bp, Emericella nidulans
atggcctcactttcagcggtctcgggctggccaacttatctacctgactggtccaatctcaatgtattgcaccgcaacactctacccccttgggcacacttctactcatacccaaatgaggaggcagcgctcacattcaaccgcgatgagggcctttttcagagtctgaacggcacctggaaatttcactacgatgcctcgccatttgaagctcctatctggaacacggccaatactacggagtgggatgatattatcgttcctggcgtgtggcagatgcagggatatgggcgcccgcaatataccaacatccactatccaatccctgttacgccgccaaatgtgtcgtatatgaaccctacgggctcgtattggcgggagtttgacgtccccgccgactgggatgggcagcagatccgcctgcgatacgagggcgtagacagcgcttttcatgtttgggttaatggcgaggaggttggctacagtcagggcagccgcaatcccagcgagttcgacattacgggttacctctcgtcggaaggcaccaacacacttgctacgcgcgtataccagtggtctgacggcacgtatctcgaggatcaggaccaatggtggctttctggtatcttcagggatgtgtacttagtgccgtttcccagctctgcgatcacagacttcttcattcagcctgaagtcgatgacggattcgctagcggcacgctaaaggtcaatgttactatccagggcgagcacgggaacctcagcgtcaaggtcttgtccccaggcggcaacgtggttgacgaatggactgggtcttcgtccaccatttactccaaggatatcaagggcgacgactttctactctggtctgcggagacgccgaacttatatactgtcctgattgagttcaatggacgcaccatcagccaaaaggtcgggttccgccgagtagaaatgagtggctccaatttccttgtgaatggccagccgattatcatctacggtgtcaatcgccatgaacataactacacctctggtcgaacagttccctacgagtcgatgcgcgcagacttgatccgaatgaagcaatccaacatcaacgcgatccgcacagctcactaccctcagcacccgtcattctacgacgtcgctgacgaactagggttctatgtgataaccgaagcggatcttgagtgccacggcttccgcgatattgcagggtctgaagagaacgccgcggcttggacctccgataaccctgagtggacacatgcataccttgacagggctgagcaactggttgagcgttacaagaaccatccctccgtcatcatgtggtcgctcggaaacgaatgccagtacggccaaaaccaggctgccatgtacaaatggatcaaagaacgggatccctcacgtttcgtccactatgaacaggaccacaatgctgaaactgccgatatatacagtcagatgtattcctcacccgatacaatgctggagcatatggccaaccacacggacaagcctctcattctatgcgagtttgcacagtaagtttccccgccctctataacagcaggctgctgactactccagtgccatgggcaacggtcctggtgggctgaaagaatacatcgagctgttccgttcacatccgctttcccaaggaggactagtctgggaattcaacaatcacggcttgctgaaaaaggagggcgaccttgaatactatgcctacggtggcgactttggcgatgagccgaacgatgcagacttcgtcatggacggcctaaccctctcagaccataccccgatgcccagtcttctcgaatacgcaaagattatccag

SEQ ID NO: 25709 - DNA, 468 bp, Emericella nidulans
cgtatcaccatcctccgcggaaaccacgagtcccgccagatcacacaggtgtacggtttctacgacgaatgcctgcgaaaatacggcaatgccaatgtctggaaatacttcaccgacctcttcgactaccttccccttaccgccctcatcgagaaccagatcttctgtctgcacggtggtctgagtccgtccattgacactctggataacatccgatctctagaccgaatccaggaggttccccacgaaggtcccatgtgcgatctgctctggagtgacccagatgatcgttgcggctggggaatatctccccgtggtgctggatacacatttggacaagatatctcagaggctttcaatcataataacggcctgacacttgttgcacgagcacaccagttggttatggagggatataactggtcacaggaccggaatgtcgttacgatcttctttggtacgttccct

SEQ ID NO: 25710 - DNA, 237 bp, Emericella nidulans
aacatgacctggtgtatggttggcgacgcttgtttgcaggagggcgtcggtcttgaagctctgtctctggctgggcactggcggctcaacaacctttgtgtgatctttgacaacaataatgtaacctgcgatggaacggcagatgttgccaatacggaagacatcaacaccaagatgcgcgcgacaggcttcaaggtgattgacgtgtatgacggggattcggacgttgttggtatg

SEQ ID NO: 25711 - DNA, 828 bp, Emericella nidulans
cttgattccgccagcggcactggcggcgatgaagatggcactgaaagcagcaagctaacacgcgaggcgcccgtcgctgcagcaagcggcttcctccacatcctctgcccaacccccgaactctggacggcgtctcttccccaccgcacgcaagttgtctatacccccgactacagctacgtcctgcaccggctcggcgtgcggccaggctccacgctcatcgaagccggcgctggaagtggttctttcacacacgccgctgtccgcgccgtcttcaacggatacccggacattacaccaccaccgacaaagcgccgccgccgtctaggcaaagtatgcagctttgagttccacgcgcaacgtgcgggaaagattcgcgacgagatccacgaccacggtcttgacggcctcgttgaagtaacccaccgcgacgtctaccaagacggattcctcctcaatgaccctgacggcaaaccatccacatcccctaaggcaaacgctattttcctcgacctgcccgccccctggctcgcgctcaaacatctcgtccgtaactcgccgtctggcgccgaatcaccccttgacccaaatacgcctgtccatatctgcacgttttctccatgcatggaacaagttcaacgaactatcagcgcgctgcgccagaacggctggctgcatatttcaatggttgagctgcagcaccgccggatagaggtgaagcgcgagaagacggggttggagttcgagggcgtccgtggtgcaaatgtgttcccgcaaaacatcgatgatgcggttcagaaaatgcgcgttgtcgaccgacgatcctaa

SEQ ID NO: 25712 - DNA, 905 bp, Emericella nidulans
accgcgaagaaaagcaacatccctccgttaatgagctcaagcgccgcatccgcgacgtcaagcgtctcctcgcgaaacctgacttgtccgccgataagcgtgttattcaggagcgggcgctggccgggtatgagaaggaattggcggatgaggagaggcggcgtgagaggtcgcggatgattaagaaatatcatttcgtcagatttttgggtatgcttcccagctcatgtctaaaatatcttgacttattcattgtttgcgctgggtggagttggtactaacatgttctgtgccgtacagaccgcaaaacagcaacgaaggaagtcaagagactcaccaggaaaagagacgagctagccaagaatagtgacatcgatgaagcaacgaagcagaagaagctagagcaactgaatgtgcgactgcatacggcaaacgtgaatctcaattacactatctactacccgctgacggaaaagtatatctcgatttatgcggagaaaaagaagaagaacgaaggtcagaatgaggatgaagatgtgcagatggagggggggccaacccaggaggaggagattgtgaccgctgctaccacggcccagaagaaagccatgctgcaaactgtcgagaaatgcatgcaagatggaacgcttgatctgcttcgggaaggcaaattgaatttaaacgctgacagcgtaactgaaggtggaacgaagacggagacaaagtcgaaaccaaaatcgaaaccatcgtcgaaggataccggcgttaagacagtcggtggcaaggaaaatgcgaaaccaaggaccaagacgtccgatagcaagagagggaagagcgcgaaacacaccgctccagcgccagctgagagcgatagcgaaagcgatggtgggttcttcgagatctag

SEQ ID NO: 25713 - DNA, 555 bp, Emericella nidulans
accacatttctcagtacacactgcagaacccggacgacgtgtctcagataggtccaggatactccagtgcgccatttaacccgactctatacactgctggggccgcaggcgctgtaggcgctgcaggggctccatacgccgctagtcctctgcacccgcaccacgctgcgatctaccatgcatcacccttccaaggtggagctatggcgtttcagcaacgccaacgcggcccgctagacaagtttatcgatttctggcgtgacccggaaggtgttggcaagttcgaagattataccgaagctatcggagtctgcaaatactgctttgaacctggtacaacttcgagggatgcaccgcgaactcaccactacagacgacgccggtcgtcagatcgcctcagtggtggttctcgagtggacaaattcagccgctacacatcttcagaagacgaatgccggcggcgaaaatcaaaatcatcttggctaccagccatacttggtggatatgtggccaagtcgctcttcgacagcaaggactttgacgactcgtacaagc

SEQ ID NO: 25714 - DNA, 897 bp, Emericella nidulans
tatgaaggcagggaaatccacgtttccaatgtgaattggagtgcaagtgaggacgatctgaaagagttgttctccaggttcggcacagtggaattggttcgtcttcctaggaaagtcgacgggggcagcaagggttttggttatgttgtatttagttcgaaggaggaggcaactgcggcgctggctatgcatgagcaagagttccgaggccgcccgctccacgtgaaggtgtctgctcctcagggcgcaaaacggatcgcagcaaccgtggtgacacgcgtcgggaagtcacaatctcccgctccggaggctaatggcgctccaccggcgaccgacttggaagagcctacgggtgagcggagggaccgtacgctgggattgatgaacgttccagacacggtgaacgatgcgcgcatccgggctcttgctgagccatacgggaaactcgttaaagttgtactccgaccggatcaccaaggagcgattgtcgagtatgcggacgtcaaccatgcaggaaaagcggctctggaactgaaaggacaggagatcacgccgggacggaaactgcacattggaaccgtgggcgagatgctgaagcagtccgcagagaaaaaagcgccagtgcaggcgccgaaacccaaggacaaacccaagagctctttccttaccccgacggcgcctatcaagcggccgccccagcccggagggcggagtgggaagcgcgggcacctaggggtgaagcgcggaacggcccagccaacgagtaccacgacgacaatgaccacgaccacgacgaatgcctccggcgaggggagcaagaaccagaagagcaacgatgacttccgtgcgatgatccagcggagtcaggaggattcgaactcggaatcagcatcataa

SEQ ID NO: 25715 - DNA, 611 bp, Emericella nidulans
gagatggatcgcaggaataaagtcggaggtattatggatcggcgttttggtgagaacgacccgaccatgacaccggaagaacgagccgcggaacgattcgccagagccagccaaaagaaactacgcaaagactcgatgttcaatcttgaggaggatgatgaagaggagtttacgcttacgcacaagggtgaatcgctatcgttcggtgatgaggatggcattcgcgatgatttccaggaagatttagacgcaggcgacatgtcagatactgaaatgcctcgaaagagaaaacgattcattgacgatcccgaagccgaggaggacggatcgcaagatggggaagatgtcccggaacgaaagaaatcgaagcacgaagtcatgcaggaggtcatcgccaaatccaagttttacaaagcgcagcgacaaatggcgaaggaggacgatgatgaattacgtgaggagctggataagggtctacctgaactctttgatatgctccgaggagtgaaaccccctccaaaacaagaaccgccaaaggacgatcttgcaggaatgaatcccgatcgcgcagccatcatgcaaggccactctcagggagacccagaaaagga

SEQ ID NO: 25716 - DNA, 852 bp, Emericella nidulans
atgacaggcgtgaaggaagctgtcaaagagtccttggtcggcactaccgtcgacgagccgtccctgtccaagcaggtcaaggccaacttcatcaagcacgcccgcaaggatgaggccactggtgagctgtacatgactgaagcagacttcgtcgacgcgatcgctcccaaacatgaagattacgtgagtttccacccctatgtgtcatgctttgaccgaacggccaattgacatggacctcagcataaaatcaagcgtgaacactacggaatcctcttcagagtcgcagacagtcgccggaccggccgaatcaacattcacgaatgggctaccttcgagaacctgcttgcgaaacctgacgccgaatacgagatcgccttccgacttttcgatactgacggaacggggacggtcaagtgggagaccttccagaagctatacaatgagaacaagacgaaagacagcataccctttgattggaactccgagtgggcggcgttgtatacagggaagaagaagacccggcatgatatgacatacccccagttcgcgcagatgcttcgaggcctgcaaggcgagcgcatccgacaagccttccatgtgtttgacaaggacggcgacgggtacatcgagccggaggaattccagcgtatcatccttgagacgtcgagacacaagctgtcggactatgtgctggagcatcttccgagcctgtgcaacatctccgcgggaacgaagatttcgtatgccaccgtgcgtgccttccagaatgttatgcgggagatggacatgattgatttaattattcgcgaggcgacggataagagtgaggatggtaagaacacgcgctag

SEQ ID NO: 25717 - DNA, 558 bp, Emericella nidulans
ccccgcgagctcgctgctcaagaatccagcccctctaccatcttcaacagcttcacctcaaacacagccttcaagctcggcctcgccctccgcacgcggatcctctccctcccatcctctcaacgcaaaccagccctgatctccatctccctaggcggcagcaacggccctactggagctccgcacgtcgtgttccaatgcgctacggaaccaggcacagtccctgacaatgaggtgtgggttcgtcgaaagcgcaatacagttgagcggtggggtgtctcgagttggttaatgaggcggaagatttttgctggacttgaaggagcgagtgcggatggtattggggcggaggaggcgtttgttagaaagtatgcgctggtgagttcgtccggtgggaagattgcggatgactatgcgatacatgggggtgggtttccgattcgcgtaaagggggtagatgggatagtgggtgtggttgtcgtgagtggattgaagcaagaggatgatcatcaggtcattgtggaggtcgtgcaggagttgattgcacaggggaactga

SEQ ID NO: 25718 - DNA, 736 bp, Emericella nidulans
taccgcaagtcagatcccgaggatgccgtccgtgtgctttctactgctatccagcactacgtgctgaacgggaacctgcgtcgggcggcttctcagcagcagtatctggcagaagtttatgagcaagaattaggggatataaagaacgcgctggaggcttatgagaaggctgcggagtggttcgatgctgataatgccgaggcgtgagtatacaccaactccctgatcttacagcttttcatgtctctaatattcgccccgtgcagcctcgcaaacaagcattaccttaaagctgccgatctggccgcgctggaaagtgattactacaaggctattgagcactatgagcgcattggccgctcgtccatcaacaacggtctgatgaaatggtccgtcaaggattaccttctcaaggccgggctttgcacctagctactcaagttcgttacctgcacataatctactatgtttctgctcactgattcgcaaacaggacatggtctccgccaaccgcgcgctagagagctatcgcgacattgatcccacattcgcctctacaagagaacaccagcttttagtagacctgattcaaaccattgaagcgcacgaccaggaagcattcgccgataagctcttccagttcgaccagctcagcaagctagacaagtggaagacaaccatcttgttgcgagtaaaaaacggaatcgaagggcccgaggaagatgattttgcttga

SEQ ID NO: 25719 - DNA, 844 bp, Emericella nidulans
atagtgcgaggagggctgttgaagcagcggataatgttgtccatgcttacgatctcaacatggaggtccctaaaacccctcaggtggagcgagacagcatcgttttctctgcttctcctatttcaacatccgagagtcggccaaacgtgtttatagagggcaacaacatggccgccaatccctacaaacgtcgaaggagcaacccgccagaacttgggaaaacccctactccgaagccaaaagctcgtcgacttacgtctccgaaagagctctccccgcgtaccgaggaggtaaaaaatgccgtgcatgagaccgacaagatcttcaatacttcaacacctgctcatcaaatagaagccgtaatggctagtatggtcaatcctcggccgtccttagctgttcgaagatcggcacctcatcttctgctggagggcatcaacgtcaatttccagggtccggcactacgcttcaccaagcttcgtgatcttcttcgattggtggttaacgaatcccttcatgttggcggcaggcccgattttgtggtcagcggcgcgacagagttgggtgaaatgattgaggtccggacgcggtcatctaatggagaagtattttctaagaccatagactggtccgtggacaatgcagtacccgatgcgctgtttgcggatgaccgagacctggccaagctgatttcctgcgtttttcttaacgctgtcaaattcacaaacaacggtttgatcacggttagggccacgctcagccgcaaaactaacgatatattgatcaacgttcgtgacaccggccccggtatccctatggcattcttgcccaatcttttcaaacc

SEQ ID NO: 25720 - DNA, 378 bp, Emericella nidulans
gatcttgagcaatggaagcgatggcgagcacagtctatcccggaggaaccagacatgggcgtcaaagacgctgtccgaattagtatccgactaccctcaggtgaccgagtgatccgcaggtttgcccctgatgcagtcatggaggagctctacgcttttgtcgagtgttatgatatcacgaaggaagctgaggcagcaaccccaactccagtagagaagccaggtgggtacgaccatacatatggcttccgacttgtatctcccatgcctcgagtcgtctacgcggtcgatgctggttccatccgggacaacgttggccgtggcggaagtctccttgtggagccgattgacgatgaaagtgacgaggaggatagctag

SEQ ID NO: 25721 - DNA, 441 bp, Emericella nidulans
atgtcgtcttttctaggaactgggacttttaataccagcgtcagcccatcgcaggcggtggaatcacgaggaatcgagaatcacggtaatgcgatcacagagaccgaaactttgcacaatgaatcccatgccgagtcgccaggcgagaagttggcctctagttcaaacagcatcctcagctctaccgaaaccgcccgcgagaaggacgagcgcgattatgaattggatgccgaagaggaagtcacacggctcgcccagcagctgacgcaccagtcgaccaagtactctacgcacaatatcgagaacccgtttcttgaggttggtgaggactcgacactcaacccacacagccccaacttcaaggcgaagaactggatgaagaatcttctggcgctgtcttctcgcgacccggagaggtacctcccgcgtcaggctggcgtt

SEQ ID NO: 25722 - DNA, 391 bp, Emericella nidulans
ggagttggtcacgtcaactacggcgccatccccagtttcatgtacacccaccctgaagtcgcctgggggggccagaacgagcaggaggtcaaggctgccggcatcaagtaccgtgtcggcaccttacccttcagcgccaactccccgcgctaagaccaacctcgagactgagggtcaggtcaaattcatcgccgatgccgagactgaccgcatcctcggtgtgcacatcattggccccaacgccggtgagatgattgctgaggccaccctcgccgttgagtacggcgcttcctgcgaagatatcgcccggacatgccacgcccaccctaccctcgccgaagccttcaaggaggctgccatggccacctactccaaggccatccacttctaa

SEQ ID NO: 25723 - DNA, 422 bp, Emericella nidulans
tatacggacaatgtggtaccggcgcttactgcctcggcggttgcgatcccctgatgtcgtactcgcttgattcctgcgccccgatgcccgtctgtgagagcaagagctacaagtgggagaacctggacagcgccgcctcgaacaatgagtacctcggaaacgccacagaatccgactgggtgtacagcggaaagcttaaagtcgaagacggaaaccttgtgctcaccatgcccaaggagagcacgggctcgctgatcgcgaacaaccactacatctggtacggcaagattggtgcaaagatcaagagcagtcgcggtgccggtgttgttactgccttcattcttctctctgacaccaaggacgaaatcgactacgaatgcgtcggctccgatctaaaagaggttcaaaccacctattacttc

SEQ ID NO: 25724 - DNA, 1283 bp, Emericella nidulans
caaaaatggacagccaaggccatggcccgcgcttatcacggtgaacaggttcgcgagagtcaatggacgcgcatgttctcgcggcgcctccgcagcgtcgtgcccatgagtccctggaagatggcgcaggatgatggatccagcatggctgctgggcgtggttcgggcctggaaacagacatgcggtctcgtgctgcagacgtcaggacaaagacaccatacacgaatatgacgtttgccccattggagcggaggctggatgttgctattttccgggcgctgtttgcgagcagtgcaagacaggcgaggcaatttgtgctgcatggcgctgtaactgtcaatgggaagaaggtattatttaatccctggcattcgagaggatgatctgacaaagctagatgaggtaccctggttaccttctcaaccccggcgatatgttccaggtcgaccccgagcgtgtgatgtatgctaccggtgcgccgaaagacaaattcgaacgccgcgaggcccgtgttgagcgcaagaaggccgtggagaccgaaaagaaagaggagggcgagggcgaggaggccaaagagggcgaggaagcagaagctaaggaaaccgaggaagagaagcttgacacgcgcgagacgctgaagcgcctcctttcccaggccaaaaacatcatgggaagcaacaaggacgtgctacccgccaaacgcaagcaggaactgcgtggcttccaaaaagccgtccgtcgtgtcatgtccaagagtggtgcatccacatctacgctgaccgataacctcgagacccaattcgccgagcttctgaagctccttaaggccactaagatccagcccaaagaagagaaggagtccaagaaggaaaatgcagacgccgcagccaagtcagaaccagcagaaacagaagccactgccaacgcgtccaaccctgtggacaccaaacccacagaagcccttaccgaggccttccgccaggccacgcagaatccagaaggcgaagttgatacatcagagctgactgaggaggaactcgacgtgctcaagcgcgccctcgtccagatgcgcgacaaccccatcgatcactcaaagccctacgctaccccttggcggccacgcgattacatgagcgccttcgctttcatccctcgatatctggaggtcaaccagaacatctgcgcagcggtataccttcgacacccggtcgctcggcccggacactcagaagtgcccacgccgttcgggagagagcatttgaaacgcgcatgttgtctctaa

SEQ ID NO: 25725 - DNA, 654 bp, Emericella nidulans
cacggccaaaagatggtccaccagaccactgatgaccttatcaactggggaccggttgtggacgacgtgtatgacttccctgccatcgcaaagagggtccgactaacttgtctatgctagtgcctatcctacttatacagataggcctggaatgcctgtcgtgaccaaggtataacctcgttcactctcgtatcctccttgactaacttgagtaagcttcccaatggtaaatacttctacgtttacgaatacggctcatttttcaacacatcgacctactcgtttcccttgtactaccgcatcagtgccgatccagagggcttcatcgatgccgagcaccatgagctggttgtctcgagcggtacgatccctacctcctctccgtacgttacttggaccccgtggggtggcaagaatggaacacttgtggtcagttctggtacgcaagacagtatctttgtgaaccaggcgctgggtgagggcgagtggacggaggtgcctactcctgaaccacacagctacactaggagtctgcgcattctcaaggaggatccccgattcctgttgctgcacggtggcggtgtgcttctgggagaagagaataaggttactgtgagcttgattaacctggaggaggcgctggctgctttgtag

SEQ ID NO: 25726 - DNA, 975 bp, Emericella nidulans
ttttgcggcggtagtggtattactgcttatgccagccacttatttgacttgattaagaagatgcgcgagggcaaagccgtcacgaaatcggttcgagttatatgggccctgagagacccggaatctattgactggttcaaggaagagctgcgcatctgcagagaccatgcacctctcaacacagtgcactgttacttcttcctaacaggtgccaaggatgacagcggccacccgtttccatcccgggaccaacaactataccgtgacatcgtacaggagaaaatctatgatacgcttcaggagattgaaaagcgcagctcagcatacattcgtgaagaagcagccggagacgaggagcgagagaaggaattgcgtagagaaaacgaagataccctcactgcacttcctcctcgcatctacacagcaaaccttccgcgttcttccaactaccaaccctccttgcaaagcaccggcctctcaccctaccaacattactcttaccagtcgcctaatcagtctccctatcaattacaacagtcccaattccagtctccatccccgtatatccacaaatccacctacgtctctccgcagacccccacaaacatccccttcgacttcggctttaaccaatcccaatcccaatcccaatcacaaccccagccaccaacgacagcccttccccagctgacaatccaaactatttccgccgcaactgcccgcccaaacccacgctttgcatctctacctcttcaaaaacgcaacgggtggaaaatcgattattgccgtcctgacgtttcccaaatgctcaacgatttctcaaagacgttcgggcggcggacctgcgtttatgtctgtggccctccgagtttgcgcatggaagtttctgatgctgttgcgaggctgcagtcgttggtgttgacggattcatccaaagatgagattttcctgcatacggagaactataatatttaa

SEQ ID NO: 25727 - DNA, 293 bp, Emericella nidulans
cccgacgctcttaagtatttctttcaggacaagtacgctccgctcaatgtcaagggtaactttttgaccttatgcgcttgcccaaaaaatgtggaattgggagaatggctggcccatcagagtgagtatgtcgcaactcccttgcgagacttgggctaatatctcgcttctcatacagttgtcgaacaaaatcgtctactacaagctatgcttaaggtcatccaagaagtgaatagtcataccggcctccctatttgcaacgagaccagctgccccaccatgtccgcgggtcg

SEQ ID NO: 25728 - DNA, 209 bp, Emericella nidulans
aggactattctgatgcaacgttcattgtggcaaatggagggctgtaccaagtcttcgttgcagcgagctttatggcccaggaccgcgcattgcgagaggagtatcagggctatgctgatatctgcaaacataatctgaacacgacgttggcgaacttgcaccttttgatgcccgcgaacatagattcaatcgaggctcttgccatggga

SEQ ID NO: 25729 - DNA, 938 bp, Emericella nidulans
atgagactgtcctaccgcatcggggcggccgccctccttgtcacgctcgtctttcttgttgggcgcctcttcaacttcggttcccaggtaccacgcccacggacgccctgggtctttaacgtcggtagcaggccagatcctaccgaacttgcttcatggaaatcgcgatggtccacagcagagtcgggggtcaacccgcagaattacgattcaacgcccatcatcgtccccaatgaccgaattatcgtgatggccaaactggccgcggaggatacaaactgggtcagcgccgatctcacagagtgcgttatatttctcttggattaggggcaaaagacggaaccgtgtgctgataaaaacaacaacagttggcggaactacatctacgtcgtcgacgacccgaacgcgccccgtcacacgcccatgaataaaggccgcgaggccctcgcatacctccagtatattgttgagcattatgacgaccttccttctacaatggtatttatccacagccaccgcgatggctggcccggtgcctggcacacggacaccatggactacagcaacgtggagtcggtccggtcgttacaaatcgactttgtgcagcgcaacggttacgccaatcttcggtgccaggaaacgcccggctgccccgacgagatcaggccgttccgcgacccgccgcgaccgggaaagaccgcggagaagtactacgcggatgcgtggaaggcgctgtttggaaacaccaacgtccccgaggttgttgccgccccgtgctgctcgcagttcgcggtgtcgcgcgaccaggtgctgaagcggccgctgagcgattaccagcgatactacaattgggtgctgacgaacgatctcccggatgacataacctcgcgaataatggagtatacatggcatattatttttggacaagaggctgtcta

SEQ ID NO: 25730 - DNA, 587 bp, Emericella nidulans
atctcatctatagggatcttcgcgggtttcaatatcattgccagcaaagtggctagtattgtactgggtgtgtgctttctgctcacactctggtgggcgaggagggatcttttgacgatcgtgacagtcttgttggcggtggggctgttggttgcgtgctggtttattgcgcatggggaggcactgaagtgggttgttgtatgtttcccccttttctgtggtatcgggagaggttacactcgtgggtgctgacgaatgattgatttgtagttattcattggcgtcatgtccgcgctgtatagcgtttgggatattgtgagtcttcaccccaggtcctacctctacctagctccgctaacgggatgttgttgcagtgcgacgacctcatcctccgcaaagtgaattcctcagacgcaagtgtctttgcgcagcgctatggcgggtcctcacgctgctggggtcttctttggtccctgatctctctcatttttatcgccattgcgattgttgcagcaatagctgcgtttccgcagtcgtttagccaacaggaggatgattcgaagagtttcgtgccgacgaagttctag

SEQ ID NO: 25731 - DNA, 1175 bp, Emericella nidulans
gttttggaccctccttaagccctaagaacctcgtcgacttcctcaatagcgaaggcaacatcctccttgcactttccggaaagtccactacgcccagcgccgttagctctcttctcttggagtttgacctccacctatctaccgatcgttcttccatcaccgtcgatcacttcaactatgataccctctctgcttcagaaaagcacgatgtccttcttctcgagcgccccggcaagctcagatatgacaccaaggagttcttctccggcgagggtgttgttgccgttccaagcgccagtcctcacacccttggtgacaactcgcttctcgcacctattctgcgcgcgcccgccacggcttacagctacaacccaaaggaggacaccggctcggttgaagacgtctttgcgactggctcgcagctggccctagtgtcagccatgcaggccagaaattctgcccgctttactgtgcttggttccgtggagactctgcaggacaaatggttctctgctaccgttaaagcacccggtggtgaagaggtccaaactgtcaaccgggaattcgccaagcaattgaccgcgtggacatttaaggagaccggtgttctcaaggtcggaaagattgagcatcacctggcgaaggatgacctcacagccgaagatctgaatcctagcatctaccgaatcaagaacgagaccgtatgtgcttctcttcactatcctgctcgcactaaccttgctcaggtcttctccatcgaaatttccgaatataactacgatggctatgtacccttcgaggttcccgtcaacgacaacatccagctcgaattcaccatgctatccccattccaccgtcttaacctacaacagtctgcaacaacaccaaatagcaccatcttcagcacccggttcactgttcctgaccagcatggcatcttctccttccgcgtcaactataaacggcccttccttaccaacatcgaggagaagcacgaggtcacggtccgccactttgcgcacaacgagtatccgcgcagctggaagatcaccggcggctgggtctggatcgctggcctttggtctgttatcgtgggattcctggcctttgtagttgtttggctttattcggagcccgcgacggcggagaaggcaaagactaagaaaacgcagtaa

SEQ ID NO: 25732 - DNA, 536 bp, Emericella nidulans
ctgctccttctggcggtctgtttgggggtctgggtacatcaaaacccgcggaaacctcgacgacgaagcctgcagcctcgacagggagcctgtttagcaagcccgctgagacagcgaccacgcaagctccaagcacgtctgcggaagctactacaatcggtactggcgccaagccagcgctgactgcgacatccggacctactacgaccgcaactgcagcaacctccggtacgagtggtaccaccacggccggcggtcctgctctcggcgcatcgaccgctggtccacctccaccggctcaatcacgccttaagaataagacgatggatgaaatcattactcgatgggcgactgacttaaccaagtaccagaaagaattccgggagcaagccgagaaggttgccgagtgggatagaatgatagtcgagaatggcagcagggttcaaaaactgtatggcagtacagtggacgctgaacgtgccacccaggagatcgaacgccagcttgcgtcccgttgagggcagcaagacgaactg

SEQ ID NO: 25733 - DNA, 1794 bp, Emericella nidulans
atggatgccgtgacgaaagcccattctgatgctcacagctctacctacttcgacacagttgtctttctgaccttgttcattctcgctggtcgttatatggaggcgtacagcaaggggagagctggcgatgccgtcgccgcgctcggaaaattacggccgtcagaggctttgattgtcgtgaacgccagctcagacgaggcgcagagtatcgatgtcgatctcctcgaaatcggagacatagtacaagttccccatggagcctcccctcccgccgatgggaggattgcagggctgggatcattccaattcgatgagagctcgctcaccggtgaatcgaaaccagtaagcaaaacagcaggagatcaagtctacaccggatccgtgaacgttggtcagcccgttgagattcagatcaccgctattggccgttcatcgatgcttgatcaaataatcgctgttgtgcgcgagggtcagggcaaacgtgcaccccttcagcgggtcgcagatacgctcgtgggccattttgtgcccgctatcacattgatcgctgttctgaccttcgtaatatgggtctctcttggagtatcaggagcgttgccctcagactacctcgacgtaagccgtggcgggtggccattttggagtctcgaattcgccatcgccgtctttgtcgtcgcttgtccatgcggccttgcacttgctgcaccaactgctctcttcgttggtggcggattagctgcacgatatggtatcctggtcaaaggtggaggtgaagctttccaagaggctagtcggctcaacgccatcgtcttcgacaaaaccggcactctgacggaaggaggaagcctgcaggtgtcagaccatgaatcgttaatcacagactcgagtcatatagagattgcctgggctgttgctcgaaagctggaggaaagcagcaatcacccgattgctcgtgcgatagctgccttctgcaaagcacagccgtcagcgtcggttgtcaactctgagatagaggagaaatcaggacagggaatgcagggcagatttactgtatcgctagtagactcgtcgaatggtacagcaacgacccgacattttgaagcggctatcggcaaccagcgtctatatgaaagcctttcctcttccgatcaagaccactattacctatgcaacactctctccagataccaggcaacaggcagatccaccgcgattctatctctgcgagagatatgccctactgagcctgactcaccaaccggaagtgaaacccacttcttcccagccatagtattcgcaatatctgatacaattaaacccgatgctgcaaacatgatttcgcagcttcagcaacgcaaaatcaacgtcttcatgtgcacaggtgacaatgaaaccaccgcgcacgctgtcgccgacatgataggcatccctcgaagcaacgtcctagccaacaccctcccagccggtaaagccgactttgtccggcaaattcaaatccaacccgcacaggcaggcggcggcggcacaacccgccaaattgtcgtcttcgtcggcgacggtgtcaacgattcccctgccctcgccgccgcagatgtgagcatcgccatggcgtccggctctgacgtcgccatcaactccgctagctttatcctgcttaattccgaactcaccacaatactcaaccttgtcctcctcagccgccgagtcattaatcgcatcaagataaactttggctgggcggtaatttacaacctctgtctggtccctgttgcagcgggcgtcttctatccgatt

SEQ ID NO: 25734 - DNA, 378 bp, Emericella nidulans
atgtcggggtttaccgccgcgtcgagcagcatgcctgcacacacggccaatgctgtcgacggtggcccatcatccctcccgatcctgcggggtgcggtggatacagtgtcccaggagtgccatgctcgtctggggttaactcccgatgaacttcaggaaaagtcacctacggttgatgtctttttcgatgccattgccggcgagcggctgcggcggatgcccgcggatggcagtcgtctcgacagcactttgcgacgagcgtctcgattagcttttgctgttgcctctctacgcgattccgttacaagtttcatggatggtgccgaagaggcgacgacgatgatctggggagcaaccctgcttttgttagaggtacgt

SEQ ID NO: 25735 - DNA, 261 bp, Emericella nidulans
acggcgaacagcttcgcgtctttcgggtccgactttgatccagaacatgaagccattgcatcaaccagagagattgatgagagcccacgacttccaaagatgaaaggcgcgtttagcaagctgtcacaggttgacgaagaagaagagccagattacgttttcaacacttccacatttgaacaatacctccccaacatctcgccgatagggacatccgaagaagaagaagaccacgagattgacgatgatatctcccttgag

SEQ ID NO: 25736 - DNA, 447 bp, Emericella nidulans
agtatgagtcctgatattgagaaacgcgagtcttcttctgttcggagtgttacacaagatggaactgaaaccgaaatccctgcctgtgataacgaaggcaggtccagatatcagagatgggcgcagaatgtcaagggcctggagacgcgagggatcgagccggtgccggttgaggagcggcagcccgtcagcgcgtctgcctcgttccatatcctgctcacgtggtttagtatgggaatggcgctaaacaacttagttgttgggacgctggggacggttgtgatgcaattaaattttctcgatgcggcgctgtgtgcgctgtttgggaatgtgcttggttgcgtagcgattgggtatatgtgtacctgggggccgaggagtgggcatcgcacacttgtgaggtcgatccattgtgatcttgaggagatggaagctcacaattgctag

SEQ ID NO: 25737 - DNA, 405 bp, Emericella nidulans
cctcagaaatccattccgcttatggttcaaagcgtacgggatgtcagggtcgaattagctgcaaaagacatggatcgactgcgatcacggattcagcggacccgaagcaatcacagagatctgagttcagctccggtcgttcccagctctgatgctatgagtgagacgggtaggatgccacaggctgaaattccagacttggtggcagaggccgagaccaagccatataaagttcttccgttcggccttgatgccacagtcaatatgagagaccttgacccggctggtaagattaagtttttatttcccggaaacccaaatcgctgacggctactagatatggacaagttggtgagcattaagggtctagtgatccgagctacgcccatcattcccgatatgaaa

SEQ ID NO: 25738 - DNA, 597 bp, Emericella nidulans
accgagtctattgacagcgtctacaacgcatttggaactgttggtgattatgctcgatctgatgttcgcggctacttggaggatctagcttacgtgctcgactcgggtattaaggtcgccctcgtttacggcgaccgcgactatgcctgcccgtggaacggcggtgagcaagtaagtctgcaggttgactacagccatgccgacaagttccgcgctgccggatacgcaccgctgcataccaactcctcatatgtcggcggctctgtacgccagtatgggaacttctccttcacgcgggtataccaagccggacatgaagtgccggcatatcagccggagacggcgtatgagatcttccaccgtgcaatgttcaatcgggacatcgcaacaggaaagatctccacggctaagaacagcacttattccaccaaggggccttcctcgacatggaatgtcacaaacaccgtgcctgacagcccggagccgacttgctatatcctctcactgtcatcctactgcactgaggaacagactcaaagcgtggcgaacgggactgcattgatcaaagattacatagtggtggaggaaagtctctaa

SEQ ID NO: 25739 - DNA, 360 bp, Emericella nidulans
atgccagaagaacagctcgaggcgccgagtcacgaagccgccatccagcgcaacccccacgccgacttcggggcggtcgagagggcacgccctcccttcgaccatagatcccagatgaccttcaccaagacaccaaatccggactggaaggccggtagtggtgcatcgaacgaggaatggaaggagcacgagtatgtgacgattgacccctacgaagagggccgcggaccatggctcaactacaagctcttggtttcggctacagtgccgcgcccgatcgccttggccagtaccgtgtcggctgatggcaagacggcgaatttggcgccgttttcattctgccagtgcgcagctgtcgat

SEQ ID NO: 25740 - DNA, 1591 bp, Emericella nidulans
atggggaaccaccggcttttgccatggaaatacacgtatatgaacctcccgtcccaagaaacctggagggctgcttgctctagccttgcgcgagactccaagacagaagatttcgaacgggctgtctacggacttttgtgtggtgactcagaagcagctagtaaggtgtgcacgagctgggacgattatctctatgtttggttcaacaatcaggttttagcccgttacaggggcttctgcaagcagttccagcgaaagctcaatcattctcccacaagccctgtggccttccagccggaacctgccgggtatgcggatttcaacaaatttgtgcagtacaccaaaggaaacgaccgagtcggtggcgaggctcgaaacccctaccggacaattcaagctgcgatattaggtaaaaactatgacactttctttacgtccttggcgaaagctgtctcgcaggcagctaccaatagagacggaccgtcatacgtgcctgacctggaacccacttacgtggatgactctctcctgattgcggctgaggatcgtgatgcgttacgaattgctgctcacctatatgttgtcgcggactcggccggctacgtgcgcaaagatcatcagtttcttgaaactgcgtcggtaaatgtgattgggtatattgctgacctagaggaagctgggcttgtcgatatcattccgctctatgcgtcgcttctaccggagcttgggcagtatctggtgcttggggatgtgttactcgagatcgttgatgagagagagaggagattgctagttcaattgataaacaaatacggaatcgacatcgaagcagttatcgcacagcagtgggattcggtcacagctgtaaaatctgctgtcgagcacacgaggacattcaagtgggtgtcaaaagtcattgttcgcaaggatggtatccgcgagctggcacctgtcaagaaggatttcatcgggacggaaatttcgacgcaagacgagcgactcatacgtagcgttgaatggcttcgttttgtcgacgggcaatggggccggatctgtcttcttgggacagagctctacaagaaattcttcagtgagtttgtttgtatttgactccgaatcatgctaacctttccgacagtatccggcaaacttcctgctgctagagagctgagccggcggatgcgcctttcggacctctcgcgtgaattcttcgggtttgatattgcggacttctacccaggggactatgaggatggaaccgaccgcggcaccccagagccctccagtccgtcaaaactgaggtcctttggtcacaagcggaataagtcatccaatactagcttgcaatccaccagtcagactcgacttctttacgtccagtcacagactatgcgcgacctagaacagctcatcctcgcctttgacgctctggaagcatttgctcttacctgcgaaaaagtcgacaagctcaaacgccgacgagactcggggaccatcaagggcattaaggaggaagtccacgacgccctagacgccattagcgtgcacattgacaatatcccctacgactggctagtcaccccacgagacg

SEQ ID NO: 25741 - DNA, 664 bp, Emericella nidulans
atggctgaggaagtgcgcgatgcgtctgtggcaatcccgcgcgcgatcatgctttcggtcctcatcaacggatcgctcggattcggcatgttgatagcagtcctcttctgcctgggcaacctcgaagaggccctaaataccccgaccggctacccatacatggagatcttccgtcaggcgacggattccgtctccggcgccttgggaatgacctcaatcatcctcattatcggcatctgcaccatattcggtcttctcgcagcaacatcccgccagttctggtcgtttgcgcgcgatcgtgctgtccctggttggcgcatctggagcaaggtatctgcctacctacctgactgcttgcttgtttatgacacttaactgcctactaacacgtcgtctcttcattcaggtctcgcccatcaactgcctccctacctactcgatcctcctcacaatgagcgtcacctgcctgctgggcctgatcaacatcggatccagcgtggccctgaatgcggtcgtctctatgaccgtgtcgggtctgtacctatcctacctgaccgtcggcagcctgctgctttggcgccgatgcacgggcgcaatcacgcatttccagaatggcgaagacgaaagtaaataacgtccccggcgcaaagcaggtctggggccc

SEQ ID NO: 25742 - DNA, 499 bp, Emericella nidulans
gctgacaagtggaccaagatcctgcaggaagaatttgcgaatcagggcgagatgtagaaggaagttggaatggagactgctctctttggagggccgcctgagcttggcaacgtatacaagctcgcgactggccagatgggtttcatgtcgatcttcgcgcttccgctcttcgaaggcgtctcagatcttctggatggcttgaagttcactgtcgaccatattcgacggaaccacacgcggtggcactatctcgcaaatctggaaaaagggaagcccttcttaatggtgggacccgggcctgacggccacgtttcgcctcgctcacacagtccatcggcaagctaccgggacacccaagcgacaccaaaggtgccgacagtaacgccgccaacaccagtgacaagtcatcccaagcccactgcctcattcccagcaaaggaaccgtatcagcaacggattgacgaggctgacgactacttcggtcctcgaaggtcggccc

SEQ ID NO: 25743 - DNA, 1490 bp, Emericella nidulans
tcaccagccgctccgaaacacaaacctttcaagcaggcctgtgacaactgtcgccggaggaaaatcaagtgctcacgagagctcccgtgcgacaagtgccagcgcctgctcctttcctgctcctacagcgatgtgctgcgtcgcaaagggccgaaatttcggactctataccctctagcgcctatccatccactagtggccagagaccgacagattctccagtatgatcctccacgattctctgcagagagggaatggtatgcagagcctacgagctacccggtcggcggctcgcccacgtctccgcccttcatggaagagccgcaatatctgccgcctgaacaccctgactcattcagccggctgcctccaccagaactcgtctcttcgccggattctctgaactccctatcggactctccgactgcggtgctgtttcgttcgccgcggattctgaccgcacctgtgcttctggcgcacgtcaatgtctacttgaaatatatgtttcctatcatgcccgtggtccgaagagaagagctccagcaggactgccaccatccagagcgtctaactccccagcggtacgcctttctggcctccctatgtgccgccacacatatccagctgaaactcgacggagcaacgcccgtcgcggatccttcgcattttcaggccggtgagaactcatcaatgtccggtgaagaactgctcgccgaagccgtgcgcgcaaggaaagattgcgacccaattgaggatatgaatgttgagagtcttctaacctcattcttcctatttgcttcatacggaaatctagaccgccaggaccacgcatggttctatctttgccaggcgacatcaatggttttcgcattgggcttgcaccgcgaatcaacatacgccgagttgaacaccgaagaagcagaacagaagcgacgggtcttctggctgctcttcatcacagaacggtatttacctccgtagagctgaatagaccataaactgacaagtgctgcagaggctatgccctccaacaagcgaaacctgtcatgctccgcaactccatccacaaaccgcaagtcctgtgctccgacgacccgattctcgcctacggcttcatcaacctcatcggcgtcttcgagagcctcagcgtcaacctttacgactgggtctcagcagggggaagcgtaagcggaggtggaaataaccgagacggctcctccgagatgccgcctacatcagccatccaggcaactctcagcaaaccgatctcgctcgagggtgtctcggaaatccaaaaggttgatatcctcatcacacagcagtggcttcaggccatgatgtggaaactctccatgacgcgtgcatcgcagccaggctcgcggaatgagacggtcctcccgttccatcttcctgtaatggtgggcaaggctgttatgtctgtcattgcggaggcatcgcagggggctgtcgacgcgcatgggattgggatg

SEQ ID NO: 25744 - DNA, 339 bp, Emericella nidulans
atggccccagaacccaacaatcccttacgggacgacgaatcgccctctccaccccctcaaccgcccattgcccaaactcccggcccccgcgttacccgcctgcaagagatctacgcacaagcactcgcgcgtacactccgcgcaaactcgtactctaattttgctgcctgttttcccacacccgcgaaacatgtcccggctagtctggagaatgtgtggcgccagctgaatgcgaagttagaggagagcgccaaggccgaatttgaggagattttagctgagaggaatgcaattgcgcagttgaatgagctggatcggttggttggggaacgaggctag

SEQ ID NO: 25745 - DNA, 597 bp, Emericella nidulans
atcacaagcttttttcatcacctccctgaatctaaagcagagcttttgcgccccgacgggaccgttgacgagatgatgttccaggcgacaatggtggtgaatggcacggcgatttacctccatttcccgcgttcagacttgctttcatcgccagccgttgcggccgaagtcatttgcggtcaccacgggccatgttccgtcccggcattttcacaccactcccacgccatgaaagcccttaaagcagccagcgaaatttcctcgctagcctccatccgcatgcctgtagttaagcacacgccgttcttcatctgctcgcttgttatgagttcgattgtgcaacttgccgcctgctcagtcaaagcagggcaaatgccagatcccagccgcgatcgcttggcgctgactatcggagttttcaaaactctggccaacacctgggcaatctcgcagtcgattatgcgacagatcaaggctgtcgctcgggatgtgatggatatgggcttgcggccgacgatggccatggatcagattgatttgaatacggttcttgataacaatggccgattttggctcgcagaggctcttccgaggtag

SEQ ID NO: 25746 - DNA, 1407 bp, Emericella nidulans
cccgtgagcagaggctggtcattcggcaaaagctagttacctgtctcactaccgagtcggcgaatgacgtccgaagaaagattggtgacgcagtggccgaaattgcgaggcaatacaccgacaacggtatgcacaacactgggggaagagttggaaggtagttgataatctgtctaacgaatgattcttcctaaatatctaggagatcaatggccggaattgctaggtattctatttcaagccagccaatcccctgacgcgggtctccgagaggcttcctttcgcatattttcgacgacccccagtgttattgagaagcctcatgaagatgctgtcattggtgttttcggaaagggtttccgggatgatgtcgttgcggtatgtttttactcgcctcaaaattgttgcggtccaggaataatttggtctgatatcgtatgttgtaggtgcgcatcgcagccatggaggcttttgcttcattcttccgctccctccccaagaagtctcaaccgaaattcttcggactcatgccggagatgctcaacgttctaccccctctgaaggagtcgtccgagagtgatgagctttcatcagcatttttggctttgattgaattagcggaaatctgccccaaaatgttcaagggcctgtttaacaacttggtcaaattcagtgtcagcgttgtcgcgaacaaggagctcagtgatcaggtcaggcagaacgcgttagagctgatggctacatttgcggattacgcccccgcaacttgcaagaaggatcccgatttcacaacacagatggtgacccaatgtttgagcctgatgaccgacatcggtgaggacgacgatgatgcgtctgagtggaatgcatcggaagatgtatgtctctccctcattatctggcatcttctaatgtgctgacaatcgcagttggatttggaagaaagcgatttgaaccatgttgctggtgagcaatgcatggatcgccttgccaataagctcggaggccaagttgttcttccggttactttcgagtggattccaaagttgatgtcttcggccgcctggcgtgaccgtcatgccgcgctcatggccatctcagccatctctgaaggctgccgggatttaatggtaggtgagctggaccaagtcctccgcatcgttgttcctgctctgcaagatccccacccacgagtccgctatgcgggttgcaatgctttgggtcagatgagcacggattttgcgggcacgatgcaggagaagtaccaccaggttgtgcttagcaacatcattccagtccttagcagcgctgaacctcgtgttcaagcgcacgctgccgcggctttggttaatttctgtgaagaggctgagcgtaatatcctcgaaccctacctcgcagatgcctata

SEQ ID NO: 25747 - DNA, 1305 bp, Emericella nidulans
atgtacggaacgtcaacaggtcctcagactggcatcaatacacctcgttcatcacagtcattgaggccgctcatcttatctcatggatcgcttgaattctcgtttcttgtgccaacatcgcttcacttccatgcctcgcagctgaaagacactttcacagcgtcactaccagagcccacagacgagctcgcacaggatgatgagccttcgtcggtagcagagctggttgctcggtacatcgggcatgttgctcacgaagttgaagagggtgaagatgatgcccacggtacgaatcaagacgttctcaaattagctcttaatgaatttgagcgggcattcatgcgcgggaatgatgtccacgcggttgccgccaccctccctggaatcacagccaagaaagttctggttgttgaagcttattatgctgggcgagcagctgccggaaggccgacaaagccctacgattccgcactcttcagggctgcttcggatgagaaggccaggatctactctgttttcggagggcaggggaacattgaggagtactttgacgaattgagagaagtttacaatacctacacatcctttgtggatgacctcatatcgtcatccgccgagctactgcagtctctttcccgcgagccagacgccaacaaactgtatccgaagggtctaaatgtcatgcagtggctccgggaaccagacactcagcccgatgtcgattaccttgtgtcagcaccggtcagcctgccgttgatcgggctagtgcagttggcgcattttgcggtcacctgtagggtgcttgggaaggaaccgggtgaaattcttgagcgatttagtgggactacaggtcattcgcagggcattgttaccgccgctgcaattgctacagccacaacctgggagagcttccacaaagctgttgccaatgcattaacgatgctcttctggattggtctgcgaagccagcaggcataccctcgaacatcaatcgctccatccgtgttacaagactcgattgagaatggggaagggacaccgacccctatgctttcaattcgtgatctaccgcgtaccgccgtgcaggagcatatcgacatgaccaaccagcatctcccggaggatagacacatctcaattttactcgtcaacagggcgcgtaactttggtggtactggtccccctttctcgtttatggccttaaccttgtttgcgcagggtcaaggttctcacggcctggaccaaaatcgctttcccttatccaaggaaagtccgtttggtaacctttcttcgatacggcccttt

SEQ ID NO: 25748 - DNA, 1993 bp, Emericella nidulans
cttctagaaatagcggttgcctgggctcgctttccatcgcatgatggagagctcatccaaaagatcgagcccttcggaactgcctcggagcagaaaacgagccaagtacacgcagctggcctggtacgttcctcctcacagcaacttgttgtgctttcctaactgccgaaagtaacgagtgtaaacggcgcaagctaaagtgcgacggtttaccagtatgctcgcgatgtgttcgccagaaagctcaatgcatctacacccctagcagccacgcctcgactaatatccccacaacgccgacggttgagaatggaaatggcgggtgagttaatccatttggaatcgtatcatacaatctctgacaggctaagctcacgttcattgggtgacattagactctcgaataagtttaggacagtcgatcagcagatccagtccctgcaccgtgagatgcagaccatgtccgcgcgaatgcgtgagctggaatcggcatccgccatgccgagcgccagtcacaatgcttctgtctcatcgtcttcggtcagcactgggctacagcggctcatgaaccggccgggctctccagactacgtgggccctacgagtgcggagtttggaatcaccccgcggcagaggcctgtggccacagcggatgagagtgatgttgaggaatctgattcaacatctgcaacaagccctgctgttatgtcggacgtcgaggcgatgtctaatgatcctcttgggtgtctagggaaggaagaagcgctccggctggtcacggtgtacgagaacaatgtgggtgtgatgtacccgtgtatcgaccttgatagcgtgcggagttatgtgcatgattactataaagatggaaaaggactagggccgacgccgccggtgataacggaccaagagtggttcttcgctagagatgtggaggtgctgaagatactgctggccacggcgctgctggctgaatcccatggccggagtgaacgggctgcgttcctggctgatagtgtagaggaccgattcgcgacgcgtgtgaaaataccagaagttgatatgaaggaacttctcatcctgaccctgctggtatgtttctccgtatcatacagattttggcatactaatattaacatgcagtctatcttccactcctaccgcgacgacgaagtcatttcctggcgcctcatcgggatggcagtgcgaggctccatgcaacttggcctacatcgacaagaaacttggctccgaacagggggcgtcttccccggcgaactgcaatggactttcgctagccgcctcttctggtgtatctacgtgctcgaccgtaaatggtcattcgggacaggcctcccctttgcaatccaagactcagatatggacacaaaccttcctgaacccggcaccacaaccccatacctcacctgcatgatcaactacgctcgactgagcacaaaaatttggagtctcgtcatgggatggcgcagcagacccaaggccgcaacgtccgattactgctcttacctcgactttcaagttcagcaatggatccaatctatccccagtcaactgcgcttcagcccagaccctcctactactcctggaacgggggagaatacagacacagcacactcagactcaactggccgtaccaacaacaccatgctacaagtcctcctcgccctgcaagcaaaccaactccgtatcctggtctaccgtcaaaacctcctgtctacagaaagcatagaaatgaacgcctccggtgcactgatcgcagtcgaagccgcaaagtcaaccgtccacatgcttgactacttctctcgtgtctcagacatctacttccagcggccagaaccattcaattattttcttctctctgccttggcagcattattcctcgcggtcctacatgcccccgcgcggtttagccaggcctgcaggaacgagttctatgcggctgttgatatggtcagacgctcgagtaccagggcac

SEQ ID NO: 25749 - DNA, 1080 bp, Emericella nidulans
cgatgcgagcatgactttattctcactcctcacccgctgtcgcttgggggtcttgttcctcttgcacccacatgcgaacccgacagcgagaaggcacgccgtgtgaaggctgttgccgacaaggctgtagaggaacttcgcgatcggagggcaaaatgggagtgtggacagctttctgaaagcagcaaggagaccgcggggccggatataaccgagggggatcttaagaaggaagttgcaaagaaacgcagaaaaggaatgacggatgcggaattcgatgatttgtggaaaggggcgctgggcgatattattgcgaaagaggaagttgtggccaaaacagaccagtaagttgtccatgactcatgtattgatggaatccttgcgctcctactgtctaggtagatggcagcatccgatggatcagatttctgacgtatatactggaactaacagactcgacaacaccatcacagatcatcgtctgtccttaccctcacatctacatccgtcgcccgcctccccctctcctgcgccatccgccgctacgtcaggctctctctcctcgcgtatcgactacctctttcacttttaataatatgcatcgctgccgcgacatatgcgcgcgctcgggtgcgtgcacgccgctccgacctcgctcgcgtccctgagttggttgcaacgactctagaccgcctagcggcgcaggcggctttgcatgcacgaggtcatgcccatgaaccctacatctcaattggacaactccgcgatgatgtgctccgatcggaattgcgaggcaaccggcgcgaggagatctggaagcgtgttcgtaatgtcgttgaggggaacgctaacatccgggcagcggtccgcgaaggccgtggtggagacgttgcccgcgtttgggaatgggttggaggcattggcagtgtcggaagacaaattgagggaagcacggataaggcgcagttctcccccttggcaactccagaaacccgttcccctggtgctctggatgcgataccctgtgacagccagcaacaagctgtgcgcaaatgggatgaggggaggccgatatactga

SEQ ID NO: 25750 - DNA, 324 bp, Emericella nidulans
atgagtgaaaagactcgtctgaagtgcacggtttacgtcggaggcctcgaccaagctgtgtccgtacagacccttgccgaggcgtttgtaccctttggagaggtcgtcgatattacacttccgaaacccgacttgcccaactctaatgacaatcaccgagggtttggatatgtggaatttgattcaccggaagatgcgaaagaagcgatcgacaacatggacgggagcgagctgtacggacgtacgataaaagttgccccagccaaaccgcaaaaggatgccaatgaaggccttggaagcaagacagcgatctgggaacaggta

SEQ ID NO: 25751 - DNA, 345 bp, Emericella nidulans
atggatgcctacgcctaccttatccgccacggctggtccggccccggaaacccactgaacccggaccgcgcaggcgttcgcggcggactagggctcacaaaaccgcttctcgttgcgcgacgctcagggaatcaaggcgtggggaataagacgaccaaagacccgacgaatcaatggtggttgcgtgggttcgaggacgcgcttaaggggattggaacgccgaaggaggatacgatcattgggaaggggaatgcattgacgagtgagctgtatcgacattttgttcggggggaagttgtgccggggacgcttggggggaagaaggatgaaaaggaagggcaggag

SEQ ID NO: 25752 - DNA, 484 bp, Emericella nidulans
acttggtctctgagaagaaaaacgggttggacattgtatattcgctggcgatgcggacgatcatgagtcgcgagtacgacataaagcacatcaatctacgttcatcagctgaagaatacaactggaactatgcagacaactatattgccggccaccgggactatttgttcaacccagcacagcagcttcatttctggcgcgtgcgttcgtcctgatcccggtccgtctgcatgtacatgctcgacgccacatgcaacctatcaatgaggacaacgaggaggaaatccatctgcttggtattaatcaactcacacttatctggcagcgacataagtacgtgcctcctgaggaaaagaggattgagaccagcagcaagagtagggaccagaacccgctgaatatcttatatcaaacgagaaatccgtcagaagtggttgcggcagagttaaatcttctcgcggatccggggctggagagctcccgg

SEQ ID NO: 25753 - DNA, 336 bp, Emericella nidulans
caagaaatcatctatgggcagattcaaaacgtacgccagacggttgcctcccaggctaaccaactgaaggatctagcggaggagcgcacctaccatgctaccggtgtggtgaaacagtatgttggagactacagcaacaaagcccaggaatatatcggccgtcgttccgcctctcccgaggtcgccaaaggccctgctgcagggcctgtagtcaagagggaacccgagcccgaggctgtcgtcaagacgtctgatttccctgaagcacctaaggttgagccggtggcgcaatcaatcgagactcaatcagagaaggagcctctcctggctatttaa

SEQ ID NO: 25754 - DNA, 539 bp, Emericella nidulans
gtgagtctttagcaccgctgatacacggaggttgcgtatgcgtaccgagcgaagaggagcgtttgaacgacatagtccaggcaatcaacaggatgaatgtcaactttatctgtttgacgccatcctttgcccgattcgtcaatccgtcgagtattccccaggtgaatactgctctcttggtcggagaagcaatgtctcgaacagacttagaagcatggtcgcatatcaagcttctgaatggatatggtcccaccgaggccgcggtttgtgctgcaatcaatagcaccatggacattaactccgattgtcgtgatattgggttagccacggggacgcatttctgggttgtgaaaccgaacaatcacgaccagcttgtccctgttgggtgcccaggagagcttctgcttgagggtcctacccttgctcggtgctacataaacaatccggagaagacagatgaagttttcatatataatcctacctgggcacggcacgatccaaagcgcggtgatcgcaggttctacaagactggagacttg

SEQ ID NO: 25755 - DNA, 264 bp, Emericella nidulans
aacatgacgcgcaggtacttgggcctccaggcgcaaaggctccagctcgccatcagtatcatcgctggtatggactttctgctcttcggctacgaccagggcgttaccggtggtctcttgacccttcaatcgttcatcaaatacttccctaccattgctaccaatggctcgtactatgagagcttggatagcgctgcaaagagcacgcagtctacgcgtcaaggtattgcgagacgaaggtcccagtgctatacgggttgctga

SEQ ID NO: 25756 - DNA, 282 bp, Emericella nidulans
atgccgtttgtcgactgtttcctcggggaggatctctttaacgagctcgacaaggagcatgatttgctcgaccgggacggtcgtccatttgcagaaaagtgtgaccagctactggccttgcacatattcacttcatctgatgatgctcggggcggcttcacagccaggtatgtggacaggctagttgatgagtacggaaagaaggccgtcctgctgtgggctattgaagatggttcaaggattcatcaagcaagtcatacaaccggcctaaaaccggcctaa

SEQ ID NO: 25757 - DNA, 1131 bp, Emericella nidulans
atggtcacgaccctacgatatgtctcccaacttccttcgcaagaagagttcgccgcccttcatcctcagcagcagccgcaaccttatgacaccataccctcaattgacacggggctagcttctgatgctggctccaagtacggctcacctgttgaggaactacgatttcccatgtctccaaatcacaatcagtatctcactgcccttgatgctccccttcctgcttcgttcgatagtcaagggatctcccatgccgctcgttatggacccgttgccgcctcggtgccatccagatttggattagatctagcctcccctcctgcgcagagaacgaatccgcctcgaactttccgcgatccctggggtgttgacgtgaagaaggtatcgtcccctttcatcggttcgtcgccccctggtacgcttgaggacggaattgggccgcgattcttacactctcagcgacctctgaaaccgcgaatgctatctgcaagtgttcctcgacccaatgttatggatgattgggaggagagcaacttcccaatggaagaggattatctgccaatgaacctacatgacgatgtcctaacgccccaggaaaggctccgccgtctgtctcgcacggacaatgagctaagctctagccaccgcgacctcggcggattgggcatgagcaccagcttttcgaaagttagttctcctcttgcctccagtccgtctcgatttggggcgctgttcgccaagcagcgacacgaaaagaaagaggaagaggctcatcatggatcgcttacgcatattgggtctcctctgcgggagtcatccttgcaatttggtggaagccccagtctcggccctatcggcagtccaccacggacctcgtcagcctccatgatatcccagcagcttagcggtctatcactccatccaccttcgactcgtcatactccgtcaatcagtgcaagcagccgcctcgaccgcactgtgccatctcccgttagcaccagcaaaattgaagaagaacaggagcagggcgagggcgatctcgttttctctatggaggaagaagacagcagtaaacgaaatggcaacgaagataccacgccgactggaaagtcgtctagcttacaagtttga

SEQ ID NO: 25758 - DNA, 426 bp, Emericella nidulans
cacattaacacctcccgctccctcaaagcggcaatgactatctaccgtgacttcgcctacatgccctcgattgacgaaagcaataattcctcatgggatgcccccgttccgatccttcccgagacgtacacccaccatgagccagctgccccatcgagcgccccgatgaagccgcaggtttacaccgtttctggcgacgggatcgacgtctccgctagccccatgtccgaggttgttgacaacgactccatggagatcgatccgttctccctaaccgaagccgtcgggaaatcgagatatgcagcccaactcaagagccaacaagaacagagtggagccaagtccattgcctcggaactctggaacgggctcctggacgaccttttaggtcctaaacagcagaggcagagtcctatgcgaaagtga

SEQ ID NO: 25759 - DNA, 2192 bp, Emericella nidulans
atgccgcctccgccgcatatcaaacctgaaaatgtcctgaaagtaggttgcaaccgcctctgaagtctgggagggaacaaaataatttacgggcatgttggttctaacgtgcatttcgcctgaagagggcccaggaacttatcgccgtgggccaggctccggccgccctgaccgtcctccacgaacatgctacgtccaagcggacgcgcagcagcccgatcgcgtctctcgagccggtcatgctcctctttgttgagctgtgcgtcgatctccgcaaaggtaaggctgccaaggatggcctgtatcagtacaaaaacatcgctcagaactccaatgtgggaactatcgaggtatgaaaagccaggatgatattgtgggttggcggtggtctaataagattatgcagatcgttctcaagaagttcatcgagcttgcggagaagaaggtgactgaggcccaggctaaggccgatgagattcagtcatccctcgagtcggccgctccctcgtccaacgttgaagatctggaagcaatcgagacccccgagactattctccttgctaccgtttctggtgagcagtcccgtgaccgaaccgaccgtgccgtggttaccccatggctcaagttcctgtgggagacgtaccgaactgttttggagatcctgaagaacaacgctcgcttggagatcatgtaccagaccaccgctctacaggctttccagttctgcttgaagtacacccgcaagaccgagttccgcagactctgcgaacttctccgcaaccatgttcagaacgccgccaagtactctgcccagatgcacgctattaacctcagcgacccggatactctgcagcgtcacttggacactaggttccagcagcttaacgttgccgtggagctggaactctggcaggaagctttccgcagcatcgaggatatccatactctcttgagcctcagcaagcgccccgctaagaacgttatgatggccaactactacgagaagctggctcgtattttccttgttagcgagaactatctattccacgctgctgcctggagccgttactacaacctcctccgtcaatccgccgtcacactttccaccaaccagggttccaagaaggaccacccttcagttaccgaggccgatatgacgaaggccgcttcctttgttcttctatctgccctggccatccccgtcatcagcacgtctcgctcgcggggcgcgctaattgacgtggacgaggtccgtaagaacaagaacactcgtctcactaacctgctcggaatgttgcaaagccccactcgtgctgtcctattcagagatgccctgaacaagggcttgctcaagcgtgtccgccccgagattcgtgaactttacaacattctggaagttgacttccaccccctgtctatctgtaagaaggtcacccccatcctcaagaagatcggtgatgatcccgagatggagaagtatgttgtccctctacagcaggtcatcctcacccgtctcttccagcagctctcgcaggtctacgagtcggttgagcttaagttcgtttacgaacttgctcagttccccgaccccttccagattactccttccatgattgaaaagttcatcatgaacggttgcaagaagggtgaccttgccattcgtgtcgaccacatctccggtgtcctcacctttgacaccgacgttttctcatccgccaaggctttgcactctggcagcgctgccggttccgcagaaagcgaactcggctcggtacagcgtctccagaacacccctgctgaaattgcccgcctgcagctcacccgtctggctaagacccttcacgtcacatgcatgtatgtcgacccgtcatacaacgactctcgtctccaagccaagcaggccgctcttactcgcgctgcggctggtgctgccaaggaacacgaggacactctcgaacgtcgtgtcatcattgagaagaagaaggaggctgctacagatgccctgcagcgcaagcaaaaggaggaggaaactcgcaagcgcatccgcacacagcaactccaggaggctgagaagcagcgacttgctgaagagcagcgtgagcgcgagctgaagcgcatcaaggatgagcaagaccgcatccgtcagcaggaactcaagaagcaacttgaagaactgaagagcggcgtcaagg

SEQ ID NO: 25760 - DNA, 1371 bp, Emericella nidulans
atgtcttcaactgtgacaaccgaaacctcaactgccccattgtcgttgttccccgacgggctcaaaacctccgggcagcacgaaccagactggtcgctcgtccgcccatatgatgagttccctaagcaaatgactggcccgactgtctgggatgctgccgagtatagagatagccccgagcgctggacgtattcctttacagacgaggagaacgcggaaataagtgctgcggcggaccgcttcatcgagtcgggcacgcccttgaccggcattactagggctttatttccccttcctgtcctctccgctagattggatgcactgcgcgaggacttgttgaacggaaaggggttcttccggttcaggaacttgcctgtccggcaatgggggcttcacaagtccgctgtcgcttacatgggcttggggacgtatttggggtactttgtcagccagaatggacgtggccatgtacttggtcatgttaaggatctcggggaggacccgacgcagacatttagagtccgcatctaccggacaaatgccaggtatgcccatatgtcgttcttgtcaaatatgatctaaccatcaaagacaattcttccacacggacgctggagacatggttggccttctatgtatcgcgaagtcgctttctggtggtgaatcagacattgtctcaacgcacagcgtctacaataagttacagtgtgagcaccccgacgttgtaaggactttggccgagccgaactggtatttcgacaggaagggtgaggtatccgaaggccagttgccatggtacaggggagcggtgttctggcttgagactggccctaacccaagagtatacggcaagtttgatccgaacaatgccacatcgctggctcgcttcaactctggccctgatgctcagatcccaccgctgtcggacaagcaaaagtacgccatggaggttctagagcgaacgtgcaaggagctgtcgctacatatgatcctcgagcctggcgatatccagttcttgcacaacccccatgtgttccatgcccgtactgcatacaccgactaccctcctggttcagtcgacgaagacggtaacccgcggccccagagacacctcatgagattgtggttggcggtgccgcagagcgagggaggttggaagatcccgtttgctgacgccgacaataagaaaagagggggtattcaagtcggcgaccagccaccaaaatgccctatcgatgcagaataatccctcggagattggcagctaccgatgtatataccactgttatgagggaaatgggaattgatgaacccagctggccgtttcttgtccgccacgtacaggtgtcccaaccaaacaaggatgcgtga

SEQ ID NO: 25761 - DNA, 821 bp, Emericella nidulans
atgcggttgtcttctgaagccaagattgccgagagcggggggcagcctccgaccgctgggtcgcggtcggaaactggatctgaatccaccgaggctgaaagtgccgatccaaaggcgcagaagtggtaccagcgcagcctcaacccactacgctggcaaaaaatcccccccgtacctgaagaacggacggtgtcgcgtgaatatggggcctcgttcttcagtatcgcgtcctttcaatggatggccccgttaatgaaggtacgtcgttcgcgcgcgagtcacgtgcgcaagctaatcgcctccaggtcggctatctacgcccgctggaattgcaggatatctggaccgtcaacccagatcgagaggtcgacgttttgacgaagcgctttgaggtttccctggagaagagaacaaacgccggggcgaagcggccgctgctctgggccttgtacgacaccttccgcttcgagttcctactcggcggtttctgccatctgatctcttcactgctgatcgtcttcgctccgtatctgacccgttatcagatcgcctttgcaactgaggcctatgttgctcagcgctcgggccagccggccccgcgtatcggccgcgggatgggctttgtcgtcggtatcaccgtcatgcaggccatccagagtctgtgcacgaaccagttcctctatcgggggcagatggtcggtggtcagatccgtgcggtgctgatcctccagatcttcaataaggccatgaaactctcgggtcgggccaaggccggtggcgttcaagagcccagagcagcaggaaaagatcaaggagcttaa

SEQ ID NO: 25762 - DNA, 1456 bp, Emericella nidulans
atggcatgcctggagtatctaccaaacgaaattatcgaaaccatcgtttccctcctagaactaaccgacatccgcaatctccgcctcaccagccgaggcctcgccctgagatcatccggacaccatttcaagtcccacttccgacggaaacacgtagatatcactgaaagcacccttcgagactttgtccaggccacaaaacccggccggctcggtagactcgtgcaatacctagtcctcgtcggtgtggtcataacacaaactggctacgttggcgtcttgaggctcccaccttcctacagagaagcaaggcctcgaagcagaagatgaggcaaagacaagacaggatctagaagtacttgcgcagcggcgaacagactatagggtaatgcgcagttcagggacggatgtacggctactcagcgaagcattcgggaatctcatggcacaagatggcggcaacaacactgcaggtgggccgaggctgcgcacgctgtcgctgaaagtggtcgtgtatcacacagacgccgaacaaagacttcctccgaaaaccggcggctgggtgcccatctggcaagtggcgacagagacattccacacagcactacgtgccttggcaatcagtgcaatgccggtagcgaaacttgacatctacacccagcagagccgctccagcctggcgtgcagcgagctaagcgccgtagaccacgagtccagcggactagtagcttcgcttgcgtctgtgaagagcctgtccgttagcttctcagaccggatcatcaacgggagaagggagaatctcggaatcacaggcggctcggcggacgaagtggaccgtgatgcacctgtgattgacgactttcgagacaatgaggatgtcgaagcagaggcgtgcgacgagtcgactttcattggccttgtgaggttggtccagctctgcagtggcctcaaggagttagaactccaccattacaagctggggaatcacactgtttttgttgatctgcaccgggagcagtttctgcagcgcattgttgcaatgaccacgttaaccactctcaagcgctgtgcactccgcgggttaacagtaagagaggtagaccttctggcattcatcaaggagactgcacctgccattgtagagctaaccctgcaaaatgtcagtcttgtttccgggacgttcagggccatcttcgaccactgcacaagcgaagcgagctgtctgacaaggctgttctttgatgacctgttcgaacagaaactgctctattttgtaggggagcccgggcagtctaagctgcgaagcttcaactaccagtgtagcgagacgctagatcgcacggggccggaggtcagacggccgatttcctatttcatccctttgggcaggcccaaggggagccctgcgctttggcagtggaggatgcggcgtcgccgagaattcggaccgccgtag

SEQ ID NO: 25763 - DNA, 513 bp, Emericella nidulans
atgtactggggcttccacgcacgcgaggtgcacgaagacgagcaaactatccaggtgctcattaagacattccttaataaactgctttggaggcgacctcccctgcaggtcctgacgaacgagcctatgattccgtctgagctgggtctgggcaaatacccccaagattggacagctcttcatattcttgcttatttcggaattgtgagcagatgcaggcgcctcatcgcacaaggtggaagaattgacgcaggtgacaattctttccgactcacgcctttgcattgcgcggctagcaggggacactcagacatggtagagtttcttcttgataacggtgcagatggaaacgccattgctcgcgacggcagtacggccttacacctagccacgcaatatggccaacgaaaagtcatgaaactcttacttcatcgaccggttaatgctcaaatagccaatcttgagggcgcgacaagcctccagctagctgtgaagaccgaagcagacgaagcc

SEQ ID NO: 25764 - DNA, 585 bp, Emericella nidulans
aagggtcctattacggaagcgtttgcatcgagagttctccgtttggtgtgcgatgcggtgataactctcacgtcgaaccccatggctcagcttccttcaccacaaaccctccgcgccctaccaccccagacaatcccagattcgccgcgtgtctcagaccagcagctcctaacttcacaactcaagagccaaaatatctccgatatccttgtgcactcggctatcctcagccggacctggcaacaggtgcttccaagcatgtactcgaatcaaaaaacattccaacttgatacatccttctacgacctaggtggcgacctctttgcccttggtcaagctacttggcttcttcagcaggagggctaccaagttcgaattgaggatctcctggcccgtcccaccttcttgggacacatggccgtgttagctcaggatgtcctgggccagaccttccaggaagatctcacgaacacgagccaggatgaaacctcaacaccggtagggaaatcagagaagaaggtgcggtggaagaaggcatttggattgatgggcaagttctcgaagcgggagtcagtctcgtcttga

SEQ ID NO: 25765 - DNA, 219 bp, Emericella nidulans
cctacactgtcccttactaatgccgccaggcgcaatgctgagatggagcgcgagattgcggctctccgccagcggctttccagcgaaggcagccatgcccatgttcctgagaatagagccagtaccaaggtgtcccagtcccctgagggcatctgctacggccctgatactgcgaatgtaagtcgagggcggactctgtctgctaagctggaaccgcag

SEQ ID NO: 25766 - DNA, 2048 bp, Emericella nidulans
aatgatgaccgtgaggtgaaagccgtacgttccgggaaggtggttatgatctcggtcttcgatatcaccgtcggtgacgtccttcatgttgagcctggtgactctgtccccgccgacggtgtcctcatttctggccatggaatcaagtgcgacgaatcatctgctactggcgagtctgatcagatgaagaaaacagacggatttgaagtatcgcgacagattgccgatggcacagccaccaagaagcttgacccctttatgatctccggcagcaatgtccttgagggagtcgggtcttatctcgtgacaagtgtcggaaagtactctagctatggcagaatcctcatgtctttgcaagaatccaacgaccctacgcctctccaggtcaagcttggacgacttgcaaactggatcggatggttaggatcgaggtaagatcgagatgccccgccccctgcatgtggtcatgcactgattgtggcagtgctgccattgttctcttcttcgctttactctttcgctttcttgcaaaccttgggagcaaccctggcagctcggctgccaaaggtcaagaattcgtagacatccttattgtggcagtgacggttattgtcgtggctattcctggtgagtattcctcgtccaggtattttccgttctatctaactccgactagagggccttccgctggccgtgactttagcccttgccttcgccacgacaagaatggtcaaagagaacaacctcgttcgtgttctaagggcttgcgaaaccatgggcaatgcaacagtcatctgttcggacaagacaggcacgttgactcagaacaagatgaccgtcgttgccgggacgttgggcacgaaaggtttcagtcaggatgaatctacctccatgtctgctgcggagctcttcaagatatgtccaagggaagctcaagacctccttgtcaagagcattgcgcttaactcgacagcattcgaagaagtcaaagagggcacgaaagaatttatcggcagcaaaactgaagtagcactgctgcagcttgctagagactatcttgggatggatgtggccactgagcgagcctccgcgacgattattcagctgatcccgttcgactccgctcgaaaatgcatgggcgtagtctaccaggtcgctgatgggcattatcgcctcctcatcaagggagcagccgagatgatggtcgacaaatgctcgaacagaattaattacgactcggacaagctgtgcattgaacccgcagctgcaaaggacaagcaagaaatccttgagatcatagagtcatatgcaaagaaatccttgcgtacgattggattggtctacaaagacttttctgcacctacctggcctccacccgaagctgtccgcgttcaggatgacccagactctgccgaattcgacaccatttttcatgacatgacgtggcttggagtgatgggcatccaggacccccttcgcctgaggtccctgctgctatcgagcgctgccatgttgccggtgtccaggtgaaaatggttacgggtgacaatatcaacaccgcgactgccattgctgagtcgtgtggcatcaagaccgaggatggcatagccatggagggtcccacattccgccggctttccgaagaagaaatggataaggttatccctcgacttcaggttctggcacgctcttctcctgaagacaagcgtatcctggtagctcgcctgaagaagctgggtgaaaccgtggcagtgacaggtgatggcactaatgacggaccagccctgaaaaccgcagacgtaggattctccatgggtattgcaggcactgaagtcgccaaagaggccagctccattattctccttgacgacaactttaagtcaatcgtgactgcaatcgcttggggccgtgcagtcaacgacgctgtcgcaaaattcctccagtttcaaattacagtcaatattaccgccgtcgttctcactttcgtctcctctctttacaactccgacaacgagagtgtgctcagcgccgttcagctccaatgggtg

SEQ ID NO: 25767 - DNA, 487 bp, Emericella nidulans
aaagaagagatcgaccaggccttccgggaggagtctccagagatgcgggcacgggatggcgaacttccgctgctccagtcgtcgactcgaaagcgagagaaacggctcgactttgacaccatctcggcggatatggtcggtcagcaggtgttcttccaggcaagactgcatattatccgtcgtatgagtgcaaagctggttttcctggtctttcggcaacaattgtcgactttccagggtgttctgcacgaggaacccggcgccaagtctattgccatgattcaatgggctgagcatctgaagacgggctgcattgttcaggtccgcggcacaatcaaggctcccgatgtccctgtcttgggatgtacggtgcacgatgtcgaagtagatattgacgaggtccaccttgttgtacgtcgtgaagacccggttcctttcagtgtctatgaggcagagatccgcactgccgaggaagatctcgtcgaag

SEQ ID NO: 25768 - DNA, 487 bp, Emericella nidulans
atccgaactatccttcaactgctaccacaagtgcagatgtgcaggtcagtacgcctgcgaatctttgtcacaagcaggcctgagctaccaatacggctcggcttcagagatgtcggaagtcattatcaggatctgattctccatgagatacctaagccgataatagaacatgacatatccttgttccttgagcacaaattcgctatgattcggagagaacggtctctgtcagcagaatggccagggaaaaccaattttcaggctctgcttacgatgtcggttccactcttcattgttgctgccaccatgtgccgtctgttcgaggatcataatctggacccggagcaatgtctcactgaaatccttaaaaatcagaaccaagagtctcaattagatggaacatatcttccagtattcatcagactcctttccaactatgacgaagaaagacgatgcaagctgactcatgaaacccaagagcttgttg

SEQ ID NO: 25769 - DNA, 217 bp, Emericella nidulans
gatcaacatgcctccctccgcaacggaccccaccccctctgctgccaccggcaaaggcaccaccaacagtcaagaatcctcggcctcctctgccaaggtcaagatgcaattccctaaacctccagtctttgaagacaagctccaagaacgagaatactggaaaggccgtcttgccgctgcattccgcattttcggcaagaacggctatgacgaaggt

SEQ ID NO: 25770 - DNA, 352 bp, Emericella nidulans
tagatactcagcatatctatttacgtggaacaaggtcctccggtccgtgaaaaactccttttcgggaaacacgagcgagctacgctttaccaaggcgctccagactatgctacagtggtttcaacggagctctcccgtgaaaagattgagaagctctccccgatccgggataatcaagggcaagttctactgattggtaagatggctttttgtccatttagtattcaaaatgctgagtcaattaatatctgcagtttccgcccctggtgtcttgcgtgatgaattgcgacacatcgtgagagggcatttgcatcaacgcatcaagatggtagagcttgagtatcaaccatga

SEQ ID NO: 25771 - DNA, 590 bp, Emericella nidulans
ccgtgaaccagtacgcccacaaccagtccgcgcacccagcagacccaggggatcacgaattagcctaccgcgcccacatctctcctcaacatgaactcgaccccaatgatccaaacgcggaactcaagaaaccacgggcctgcgagtcctgccgacaattgaaagtccgatgcgagcccgatcccaacccagacaagccgtgcaagcggtgcgcgaaagccggccggtcatgcgtcgtgacggtcccgaaccggaagcgccagaagaagaccgattgcagggtaaccgagcttgaacgcaagatcgaagtgttgacggccacgctgcgtgccacacagaaaatcgactcactcctaccgtcgaagaacaccgcccagacttcgtcgtctttatcttcgagagacgaggagagtggagggcgccgctggttggttccagggcagagtgacccggaccgttcgaatgctgttcccgcaagaccaggtccgttggggactaagcggcatcacagcggggatgtcaaggatcggaatacggtggctacgcaggcgaccccgtcgcaagctagtaatctcagcccggcgacggat

SEQ ID NO: 25772 - DNA, 489 bp, Emericella nidulans
ccttatcgacacttcaatgatctcgccagtccatgctttaacagactctgggacctagaaggcggcgacggcattgacccagaaggtgctgaagctttgcatcaagtccccgaacagatgatcttcgacgacggtagtgacgacgatgaagaaccacaacaatgggtgatggatcgtgaggctaacgagccgaggaacggacgacagcctccaccaccagccccagttcctccacgtgtcaaccaagttggtggaaaccgcgctctaggacgcaatgccaacggtcttgatgcagcaggtcgagcagccgcagctgagcggcaagctcaggcccgagccatggcggaaatccgagccggtcgtgtccctgagcgcgctgggcatgaacaaccccccgtcccacatgctggtctccagcgattcctcgaacttgttcagaacgaccgcgaagatgaatgggatagtgacgagctcgaagacggtttttaa

SEQ ID NO: 25773 - DNA, 2192 bp, Emericella nidulans
  unsure (1)..(2192): unsure at all n locations
cgcaaaaattcctacgtgaactgaaatcgaagatctcctctcaatcgaaaaagaatttcgtactggaaaaggatgttcgttacttggattcgcgaatcgctttgcttattcagaaccgtatggctctagaagaggtaaatcaaaccaattgctccacccatgattttattatcttacaaaaatcatagcaaaatgaagttgccaatcgcctggacgataccgtcgatcctcaagaaggattcttccccaatgacgagaaaacacaaaaatatggcaaccttcttttccttctccagacagaaccgcgtcacattgcccacctgtgccgactggtctccatgtccgaaatcgattccctcctccaaaccgtcatgttcaccatttacggaaatcagtacgagagtcgcgaggaacacctgctactcaccatgtttcagtccgtgctcacctaccagtttgacaatactcccgaatactcctcccttctgcgacaaaacactcctgtttcgcggatgatgaccacatacacccgacgtgggcccggtcagagttatttgaaacaggtcttggcagagcagatcaatgcactgattgagttgcgcgacgtcgatctggaaatcaaccctttgaaggtttatgagactatggtgagagatatcgaagaagaaacgggctcgctcccggatcatctccctcgtggcgtcacgggagaagttgctgcggaaaacccacaggtgcaggccattatcgcgccgcgcctcaagaagctgaccgagatcgcgaactccttccttaccaccatcatcaattcggtaaatcaagcaccttacggtatacgttggatttgcaaacaaattcgaagcctgtcgcgccgcaagtacccggacgctcacgatcaaaccatctgtaccctcatcggaggctttttcttcctgcgcttcatcaacccggctatcgttactccccgatcgtacatgctaatcgacgccacaccgacggacaaacctcgtcgtactttgactttgattgccaagatgctccaaaacctagccaacaagccgtcatatgcaaaggaaccatatatggccaaactgcagcctttcattcagcagaacaaggaacgtgtcaataaatttatgcttgatctttgtgaagtgcaggatttctatgagagcttggagatggacaattatgttgccttgtctaaacgagacctcgagctacagataacacttaacgagatgtatgctacacacgctttgctggaaaaacacaacgcggccttggcccaagaccagcattcccacctccaagagatcttgcaggaactgggcccggctcctccacagctaccacggaaagaaaaccgaannatcacggttccgctgttcagccgatgggaaacagcattggatgacttgacttctgcgctggacataacgcaggaggaagttttctttatggaagccaagtctacctttgttcaaattctgcgttctctcccccctcactcgtccgtggctcgtcgtccccttcgtctggatcgcattgctgaagccgccgcgactttgaagaatgacgcggtcatggttcgcaagggtattcgcactatggagctcctgagccagttgcaggagatgggagtcattgatcggtcggatgagttcagcctcctccgcgacgaggtcgaacaggaactcgtccacttgggttcgttgaaggagaaagttatggaggagactaggcagttggagtcggtgtacgccaccattcgtgatcacaacgcgtatcttgtgggccagttggaaacgtacaagtcttacctgcagaacgtgcgcagccagtctgaaggcaagtcaaggaaaacgcagaagcagcaagaattgggcccctacaaatttacccatcagcaactcgagaaggagggggtgattcacaagagcaacgtccctgagaaccggcgcgcaaacatttacttcatgttcaagagtcccttacctgggacttttgttatcagtctgcactataaaggtcgtgcccgtggccttttggagttggatctcaagctcgatgatttgctcgagatgcagaaggacaatctagaagaccttgatctggaatatgttcagttcaatgtttccaaggtgctcacgctcctgaacaaacgcttctctcgcaagaagggctggtaa

SEQ ID NO: 25774 - DNA, 389 bp, Emericella nidulans
actgttacaaacgagaaggaattgagtcagagatttgaagccagtatggccgagttggctgctacaattccgccggaaaagatctatcttttgcaaatctcggatgcgtatatcccgcttgacggggagggcagaccgaggccgttggagaagggagttgtggacgggacagcgccgagaggccgctggagccatgattacaggcctatgccgtatgatggggggtatctgcctattgaggctgtgggaaacgcggtgctgaagacagggtttagagggtggttttcggtggagattttcgatgggggggctgatgggcgtggaaaggaatatgaattgaaagagtttgctgggagggcgaaggacgctgtggagaaatttattgagag

SEQ ID NO: 25775 - DNA, 963 bp, Emericella nidulans
gcgccgacttggctccaatgctatcttctcactcgtcgcgtctttacccagtactggcgtgacccgtcctactactacggcaagctcttcacctctgttatcatcggtatcttcaacggcttcaccttctggatgctcgacaactccattgcgtccatgcaaaaccgcatgttctctctcttcctgatcatcctcctcccacccatcttcctcaactccaccctccccaagttttatatgaaccgcgccctctgggaagcccgtgaatacccctctcgaatctatgggtgggtcgccttctgcaccgccaacgtggtcgctgagatacccgcagccatcatctccgccacggtctacttccttttgtggtacttcgctgtggggttccctgtcaccgcatccgcctcgggctatgtcttcctcatgaccatgctcttcttcctcttcatggcatcctggggtcaatggatttgcgccttcgccccctccttcacggttatctccaatgtgctgccgttcttcttcgttatgaccggtctcttcaacggtgtcgtccgcccctacgatgactaccccgtcttctggaaatactggatgtattatgtcaacccggtaacctggtggattcgcggcgctatctccgctatcttccccagcgtcgagatcacctgcgccgccactgaagcgacccacttcaacccgccccctggctcgacttgctctgactacgcctccaacttcgtgaacaacattgccggcgctggatacctggctaacccggatgcgacaagtgactgtcagtactgcccgtacgagaatggaacgcagtacatgagcactctgaatgtgcggcccgacgacaagtggcattcttttgggatcttcctagcctttgtcatcatcaactgggtgcttgtttacttcttcatctacaccgttcgggtgaagaagtggtcattcgga

SEQ ID NO: 25776 - DNA, 1426 bp, Emericella nidulans
atggttttgcacaaacggtccttgtcggaaggaggtacatctacgcaggcttggaaggttctgtcccagacactcccatctcgtgggccagatgtcgatgcttggtggcagcttacggggagacacctcgcagttctcttggacgctgctgcgtatcctatcgagaaacagtacgaatgtcttctgtaccattaccactacgctgtatgtttgacgacctcagtatataaggtcactgactaacttgaagttgtctaggcgccttatctaggccccgcgcctcgagaaggggcttcgccaccaacctggaagtccatgctccagttagacggcacgcccttcgaattctcatggaaatggaacaatcccggcggcgagccagatgtccgcttcggtttagagcctataggaccaatggcaggaacgtccttagatcctttgaaccacttggccatgcgcgagatcctctacaagctctcctcggctgtcccaggctctgatctcacctggacacatcatttcctagccactctgttcgatcatgactatgccaagtacactcaaaaggccgctactatgggtagctcgattggcactagcttggtgtattccctcgagtttcaacgcaagtcaactgggctcaagacatactttcacccgcgcaagcttgaccagcaggcgttcctagatatacccagctgggaagcgtccttccggggattgcatccaaattctccatcccgcacagctgtccatgaattcctaagcacgaatccggaaggcaagctcctgaagccattctgtctcagcgtagacaattgcagcccggcaaaagcccgtataaagtggtatttcaacagcccgcacaccaacttcagagcgattcgcgaaatcatgaccctaggcggccgtatcgcagacactgagacccgcacaaaacagttctccgagctcttcaacctacttaaaactgttaccgaggagcacgctgatttcccagagacttcagagtttccatacgtccccaacaacggcgacagcataatccccaacttcgtgacgccccggacatgctcaagggatgcgtgtacttcttcgacatcgcgcctggaaggaatctccccgcgataaaagtctacttccccgtgcgtaaccactgccggaacgacctcgccgttactcagaatctcaaccggtggctcgagtcaaggggccgcgggcagtacggggctgcgtttgggcgggccctggagactatcgccgattatagacgattggaggacagtggcgggttgctaagttttctttcctgtcagttcatggaggacggggagttggatcttacgtcttattttaatcctcaggcgtttcattcgggacgcctcacgcatcggagggcgacgaggcggaggggggatgatcggtg

SEQ ID NO: 25777 - DNA, 270 bp, Emericella nidulans
atgccctccaaacgcccttccgcaacaccctcgtcctccgcacccgcatcagcttcaacatcaggaacatcaacacccctaccaactctctcctccggccccaaaacgctatccgcaaactcatctgtctctgatattgctgtccatgtctggcaccagtacctcaccagtacgccgcagcgcacaatgctcctagacgccttcatggcctttctcgtgcttgttggtggtgtgcaactcgcttattgtgtgctggcagggaactatgta

SEQ ID NO: 25778 - DNA, 1311 bp, Emericella nidulans
ctaaccaacacagcattctacctcaaaccggttaaggactccaatgtatcgaccatctaccttctccagtttggcaacgagcccgaaccagcgtactctctccgctacccggaccgatcctctcccgattccaggaaccgcttcgccgtagccctctacgacccctacgtgccagacgttgtatacggcgaagtgttaataatacccgaatggactcagccaacactatcggcggaagctatccgccagaacaatggtgtctcccctccgccagaacctattctccctacgcgcttcacgattcagctctacaaccctgaccaacaggtcattgtgcactacaagccgaagagctggaatagcccgccttcatggtccttcgagatgccgcagcacagtttccgggtacccaccggctctactctcgaccgcgtccaaatcgatcctgccgccgcggacacgacgcccaagctacgctttagttggaagaaggatggcaagctgtcaaaggaccttacttgccttcttcgtgggaaaacgactgcgatacccgaaacaaagaccaaaagcaaagagccagatatcactgtctccatattcaaaggattgcgtgagctgactttgtacgaaccaaacctgtaccgtgtcgagatggaggactttaaaggtctagaagttgtactcctgctcggagccattaccatccgcgacgtgtattttgccagcccaaaagaggccttccgcatctctaggcaaaactccgcttccgtctcaccaacatccaactctcctacaaccactccatctacgaataggctgcccgccagcccaagcggcttggtgaccgatattccaccagcacctcaacccccacctgtccacagtcctcagcttacaaagcaacaggagcaggcgaggaaggaagaagagcgacgaacaaagagactgcttgaggaggaggaaaaagcccatcggagacggcaggccgaggttgacaaagaaacgcgccggttgcagaagctctatggtgaagaggaaagaaaagctcgtgcgcagacttcagctctgcctccaaggaaacccccacgtcctcagtacaatcatgctgggccgtcaatgccgcactcaggctcccgaccgtacctgcaattgcccggtcaaatgtctacaatgtccttgctaacacccccagtagcaggaccacaaaccgcggccaagccgcatctgcagaacaagcggagtagttttttcgggctgcgacgagtctctgaggatgggaagctgtcgaagaaacgtagctccatgttttga

SEQ ID NO: 25779 - DNA, 400 bp, Emericella nidulans
ccccaacgcatccgtgtccgtggtgacgagaatgctccctttcccctcgccgcgaccaagacacttcaccaacgaacgaagtctactactgcattgtccgcaaccttccagaacggtgccagtaagaatggagcccgcagagccgcctttggagatgtcagcaacaccgccagcctagttcacggcaaccgagacgatgcctcccttgctggcaggaaaccatccaaattgctggagaagggatctatggctacggaaaagaagtcgaccgcgctgtcacagcccgcccaacgtcccgtttccatgtcgggtttcaagggcctgctgaacaatgtgaccaaccccaagccccttgaggtcacgaagcaggcagctgggcagcagcaaagcacaaactccc

SEQ ID NO: 25780 - DNA, 956 bp, Emericella nidulans
tattcgtggctcacgacctgtatctacatcgccgttctgatcgtcgagtacccgaccaactggatcatccagcgcgtgccgattgcaaagtacctgggcatcaacatcatcctctggggggccgtgctagccctgcacgccgcgtgcaagaatttcccttcacttgtcgccgtccgcaccctcctcggtatcttcgaggccgtctgccagccctcatttgtgctcatgtcgagtatgtggtataagcgtcaggagcaggcagagactgtgacatactggtacgtcgtctctccgcaaatcctccccaatccatgcagacaatgctaacactgatggaaactctaggtacatgatgaacggtatgcaacagatcgtcggtggcctgctcgcctactgctttagtctcattggcaacgaccgcgacgtcaaatccttccaggcgctcttcatgacctacggctgcgcctctgttctctggggcttcttcgtcctctggtggctgaacgactcgcctatgcgcgcgaaatgcttgagcgtggcacacaagaagctcatggtcgagcgtgttctatcgaaccagactggtctgcagaacaggaagttccgtgcgtaccagattaaggaggccctgcttgatcctcaggtaagttctgctctttttctctctccctctccctctccctctccttcaaatgacatcgtgagcatggcggctaatgatggcgacccgtatagatctggtgctactgcgccatacaaattttcactactcttcccactagcggcctcggtgccttcgccaacatcgtcatcgccggttttgagtttactgtcctgcagacgcagctcctcgccatggtgcttggtttctacatcatcatcgtgctgctgacgtctgcgtatctcgttcgaaagactggacagaacctctacgtcatgctgggcttcattatccc

SEQ ID NO: 25781 - DNA, 325 bp, Emericella nidulans
atggccttccctattgtggactcgcacatccatctatttcctgaatcccaccttcccacactagcctggtatacacctgacaatccactggcatctcaacattcagtcgacgaatatcgttctgcagtgaaatcctccacatctttacgcggctttatatttcttgaaactgaccgcctctcatcggtcgaagagtcggagacgggaaagcatggctggacccatgccctcgatgaagtttcgctcctcgcacgaatcgcaagcggtacacctcttccgggagaggggcacaatgctgaagatcgcgatctttgcctggggatag

SEQ ID NO: 25782 - DNA, 924 bp, Emericella nidulans
atgtcacaaaaggtctttgtcaccggcgcaactggctttattggccgcaaggtcacagagttcgccgtcaaagaagggtacagcgtgcgcggtctctcacgacgtgaagaaggcgatgcgctgttcgagtcgctgggctcgactcccgtccgcggtgacctcaagaatgcagaccttctcacagaagagagcagaaacgccgacatcgtcctgcaccttgcgttcgatcacgattttaccaagccgtaccaggagctagttaacactgacattgccgctgtgaccgcccatgccaaaggccttgaaggatccggcaagcctcttgtcgtttcgaacgggacaaccaacgtcgcgcccgatcccaatggaggcgagaccgacgaggatgccccgttagcagaccaccttcttaccaaccgtgacggcgccgaaaggcatgcgctttcgtttgtagacaagagcgtgcgcgttgtctccatacggctcccgcagtacgtctacggtcctggtagtacaaccggcttcgccgcgcaattgatcaagctagcgatcagatccggcgaatccgtgtacattggcgatggcgagtactgcttctcggatacatacgtcgatgacgctgccaaactgtaccttcttgccgccaagcacgcaaagcccggagacgtcttcaatggtactgggcacacaaccacgacatacagggccatggcgactgcgatcagcgagctcgtaggagtacccgctcgctctattactcctgatgaggcagtcgctcgctggggcccgttccttgctggattcattagcatcagaaaccgtgcgtcgaaccgaagggctgttgagcagcttggttggaaacctgttggaccggggctgctatgggaggttcgcaacgggagctatgtacctgtggcggagaag

SEQ ID NO: 25783 - DNA, 1273 bp, Emericella nidulans
  unsure (1)..(1273): unsure at all n locations
ctaacagcacagaaacggtcatgggtcaggggaaatacggatacatacgtcgtcatatcaccctttgaaggtatgctcaattggaccaaatcggttcccaacaacgggctactacgatactatatcatcggaaacatcgaacaagtccttgtgacaacacctaaagcattaagtgagcttcttgtccagaatgcttacgactaccaaaagcccgagtctattcgaatttcccttgcccgtattgccggagaacatggtattcttcttgtagaaggccaggagcacaaggtgcattctaccgtgttatagtagctctgagctcgatctaattcttcggcagagacatcgaaagaacctcatgcccgcattctcttatcggcatataaaagatctctacccaaccttctgggctaagagcgtggaaatggtgaaatgcattgagaaagacttgcaggatcgcagggacactggtgatattactgttactgttcggccctgggcatgccgagccacactcgatattataggactcgcaggcatggacagagattttgggtccctcgctgatccgcagaacgagcttgccgcccagtaccaccgaatcctcgaggacccgcctctctggctgaaacttctattcgccgncgcgttcgtcctgggaaacgaagaactcgtcatggcgctgcctgtaaagcgtaatagggatatagccgaaggagccaaatacgtccgacaagtggcgcagcagctcatcagcgagaagcgagaacggatcaagcataacccgtaaaaagcataggacgtagggggaggtaaggatattctctcagttgctctaaacagcgggaattttacagatatcgagctcatcgaccaaatgatgacgttccttgctgccgggcacgaaactacctcgtcggcactgcaatggtcggtctacgctctctgcaaacaccctgatatccagacccgactccggcaggaaatccgctccaatctaccctctgtctcttccaatgatccaaagcccataaccgcagaagctgtagactccctcccatacctccatgctttctgcaacgaagtcctccgcttccatccctccgtccccatcacgtttcgcacaacgacccgcgacactacacttgctggtaccctgcttcccaagggcacacaactgaccatctctcccgaggtcatcaaccaagacccaaatctatggggaccagacgcacacatattcaacccagaccgatggctgcgccctaacaga

SEQ ID NO: 25784 - DNA, 1015 bp, Emericella nidulans
gtcggaggcccccgctcctaagaccgtcaagtccatctccctttctccatggaacccgccacctcatcacctccgtcagaagggacacttgctctacctccaggttactaccaatgagggagagcagttccagatcacctcccacgtttctgggttcttcgtcaacaagtgctccaacagcagattcgatcctttccccaaaaccattcccaagaagggcagcgcgcattcgcttctcaacctgatttctcagctttctccgtcctttgatgctgccttcaaggaactccaggaatccaacaaccagaaagatcttctgactaccttccccttccaaaactccattcctagcagcccatggcttgtcgctccaccagcctccaacgtaaacgctcatcagcccgatatcacccggtctcaggaaaactacctcatctccggtgtggacaatgctgaaactctgcgcgactggaatgaagagttccaaaccaccaaggaactgccccgcgagactgttcaagaccgcgttttccgcgagcggcttacatccaagctgtttgctgattacaacgagtctgctgcccgcggtgctgttttggtcgctcggggtgaagttgctcctatcaactccagtaggctcagtacgctcatatcttcgtgtacaacaacatcttctactccttcggtgctgatggcgttgagtacctttgcttctgagggtggtgatgaagctgcgcgtgtagctgtcggcaaggatgttcttggtatcaaggccgtcaaccagctcgacatcaatggcttgtttacaccgggaaccattgtggtcgactacatgggcaagcgaattgttggacagagtatcgttcctggaattttcaagcagcgagaacctggcgagcaccagatcgactacggtggtgtggagggcaaggatgttgtcgctacccaccccgactttgttcctgtttttgagaagctttctaaggccctcaggatcaagaaacaccctgtgtgg

SEQ ID NO: 25785 - DNA, 1020 bp, Emericella nidulans
catcacacagtacaaatggcatccgaaaccgtcgcctggatcggcctggggaatatcggccgggtaagtcacactgcccctcatcaatcagaagccacagctcacatttgacccaagggaatgagccgcaacatcgcattgaaaggaccccagaagacacccgtgattctctacaacagaacggcttctaaggcatgcgctttcgcagagtccatcaacgccgagaaaccccaagcgcgtgtcgcagtttcatctctccccgcagccgttaaagacgcctctatcgcctttatttgcgtcggcgatgactctgctctcgatcagatcataaataccatcacttcagatgactctcccgacctccagggtaaaatcatcgtcgactgctccactgtccacccagacacatcccgccgcgttcacgcgactctctcctcgaagggcacgtcattcatcgcctgccccgtcttcggtgctcccaacgccgcagatgcaggccagatggttgttgttcctgcaggttcccgggcggcaatcaaccgcatccaacccttccttgaaggcgtcacctccaaagctgttctggatgtaggtcccgaggcggagaaagatgttggccgcgcctcgctactcaaggtgttaggaaacacattcattttgaacaccgtggagacgctggcggagggccttgttgctgctgaaaagtcgggcctaggtattgacgtgtaccagcagtgggttactaccatgttccctggcccctttgcgaagtatgcagagcgcatggcgaccggggagtactttaagcgagaggagccgctgtttgcggttgacctagcgaggaaggacctgagacatgctgctgatcttgctaaagcagcggggatgactctgcctagtgtcaaggtgacggacgaccttttgaaggttgtcaaggaggaaaaaggggagaagggggatattgcgggtgtttatggtgccattagaaaggcgtctggattgccatatgacaaccagtga

SEQ ID NO: 25786 - DNA, 1657 bp, Emericella nidulans
tctgatggtcccaaagatttgcctgttcgggctgccgctgaggctaaaccggccagtgagtcgtattccttgccccgctgaatcttcgaacccctcctgactatgtcgattgttgtaggcggcgacacgctccccgacttcattattgagcggaacaagctgtttgaggagttatggcaggagcatctggaggaggtgaagaacaggcctcaccctgaaatcaatgtcacccttcaactcggcgatggaaatactaccacgattccctcgaaggcttgggaaaccacaccagcgcagctactgaaacacgtcccaaaggagatcagcgcggatattgttattgcaaaggttgatggacagctctgggatctaggccgcccattggagggagaatgcacagtgtcgtatgttcctttcagcgatcctgagggaagggaagttttctggcattcgagcgcacactgtctaggtgaagcttgcgaatgcgagtacgggtgtatgctctcccacgggccgcctactccacaaggtttcttctacgatatggctatgcctgataagtacgcatctcgttcgtccgttcgctacagtcactgacatctaggcagccgtgtcgtaaaagagtccgactggaagaccctcgacaacagggccaacaagattttcaaagagaagcagagtttcgaccgattggaagtcaccaaggagaatctccggaagatgtttgcgtacagcaagtacaagctgcactacatcgacaaacttgtcactggggagaagagcaccgtttaccgatgtggtactctggttgatctctgcaggggtccccatatccagagcaccggaaaggtcaagaccttcaagatcatgcaggtcagctatactaagcgaatcccctaaaagcgttaaggctaacccctagcagaactcctctgcctacttcctcggtgaccagaacaacgactctctacaacgaattcgtggtgtcgcgttccccgacaagaaacagatggcggagcacctcaaatttcttgaggaggctgaaaagcgcaaccacctgagaatcgctaaggagcaagaacttttctttttcgatgacgtgtcgcctggatgcccgttccttcttcccaacggtgtcaggattttcaacgccctccagtccctcctgcgttccgagtaccgcaagcgaggataccaagaagtccagacgcccaacatgtacgacgtcggcatttggaagacctccggtcattgggctcactacaaggatgacatgttcaaacttgatgttgaaaagagagaatgggctctcaagcctatgaactgcccgggtcactttgtgctattcggccaccgcgagcgaagctaccgagagcttccgctgcgaatcgcggactttggtgttttgcacaggaacgaggcgtctggtgctcttcacggtctcacccgtgttcgaaagttccagcaagacgatacccacatcttctgtacccacgatcaggtaagatgctttgcaaagaatgtatcctacagacctgctgacgaggacagattgaatccgaaatcgaaggactctttgacttcctgcagtccatatatggactgttcggcttcacctttaagctcaagctttccactcgtcctgaaaagtatctgg

SEQ ID NO: 25787 - DNA, 1311 bp, Emericella nidulans
ttcacgataatggactcggaacggtacagtgaaaccaaatgcacgaatttcatcgggcaagctcgaatcgtcactggctctggagctttcgatgatggaacccttaggagtgtacgtagtggtgtcggattgaaggagttgggtgtcttgggcgatatggaacatattacggacctgtggggtctgcaagtcgggtcaagaggtgactttttggatacacttcttgtcacattcgtgaatgaaacgcgagtttttcgtttcagtcccgacggggaggcagaagaactcgaaagcttcctgggactaagcctctcagagaacaccttgcttgccgcgaatctaccgggcagtcggatactgcaggttactgagcagagagttcttattgcagatattgaatgcggaatgactatctttgaatggacaccaaaaaatcaattaatcatcacagcggcttctgctaacgacgacacgatagtacttgtcgcgggcggcaaacatgtgactgtgttggatattcagtcagaggctcgagtcgtctcggagaaagactttggcgcggacaaccaaatttctggcgttacactaccgacaactccgactgatgtttgtattgttggattccctcaattggccaaagtctcagtgctgaagctgcaggatctgtcccacatcagctcgacatcgctgggtcctgctggtgaggcattcccgcgctcagttctcgtggccagtgtactggcggagaatgcacccacactcttcatttcaatggctgatggaagcgtcataacgtatgactataacgaccaagaccattccctatcgggcatgaacaagcttgtccttggctcagaacagccaacattcaaaaagttacccaggggcaacggcctctccaatgtcttcgccacatgtgaaaatcctagtctaatttatggatccgaaggccgcatcatatattcggctgtcaattcagaaggagcatcacgaatatgtcatttcaactcggaagcctatccagagtcaattgcggtggctacagcgcaggagctgaagatcggcctggtcgataaggaacggactacacagatccagactcttccgatcaaagctactgtgagacgcgtcgcatactctccctcggaaaaggcttttggtatgggcacaatcgagcgcaagttggtcagtggggaagagattgtcaagagtcagtttgtactggcagacgaaattctattcagacgcctagatgctttcgatcttgaaggagaagagattgtggaatgtgtaattcgagctgaagctccg

SEQ ID NO: 25788 - DNA, 762 bp, Emericella nidulans
atctgcctaaccttctcgttgagactgtccaagatggccccagttaagccaactataaaagtgtcccccataacatcccccaccgactttacttccttcttcgacatttctgcatcggcattcggctctcaggtgcacgatggagtctggatcgccatgaatcccgggtgggatacccccgagggaaaagtgcgtgcaataagtcggctggttgagaggtggtcttctatcacgaccgatcgaaacggaaacccaaacaccgtctttctcaaggctaccgtcgccgacgccaacggggaggaagtcatcgccggggtagctatctgggtgcaggcgtccatggtacctggacacggagacacgccagttgacatcaatgcagaggcgatctaccctgggaatccagttgaacagcgatacttgctgcagctggaccgctcgctgcataagcggcgggttgaggtggtcaaagaaatcgcgtcgagctcttcgccagcagtcatggtgctggatctgtgtgttgttgacccggcgtttcaaagacagggggttgcgtcaaagttggttcagtgggggcttgatgaggctaagcaccgagggggcctggaggccgtgctggaggggtcgagtatgggcaggcatgtctataggcaactggggttctggcaggatgggggagagtgcgagtatgatgtggacgaggagtttcgggacagggaacagccgtcgaatatctttatgcggacgggacggccgcaatag

SEQ ID NO: 25789 - DNA, 393 bp, Emericella nidulans
atggctctcggtgtcggccagacgaacccataccccatatcgaagaccgtttccgaacagaaaggaaatcccttctcctcgatgccgccagggacaggtatggccgagcgcacccgtatagcctccgaaagctccttcggtattttgttgaaccacggctgggacgaagctctaacccgtgccaaggagttcaagcgcatcggtgtcgacgcggtctttgtcgaggccctgccggatagggagtcaatgcggcggcgtgtccaggacgttggcattcctacttttgccaatatcattgaaggtggtaaaacagagaatatctcggccaaggatctcgccgagcttggtttctgcgctgtagcatatccttggacacgcgccacagtcctctaa

SEQ ID NO: 25790 - DNA, 1515 bp, Emericella nidulans
gagtactctaccgatacactctcccaaatagccacttaccttttctccacatctaccaccccacgccgtctagtcgtcctcgacgacgacccaacaggcactcaaacctgccatgacatttccgtcttgacagtctgggatgttcgcacgcttgtcgccgaattcagtaccaattcggccggcttctttattttgaccaactcgcgcgctcttcctcccgacgaagcggaacttctcatccgtgaaatctgccagaatgtccttactgctgcactggagatgggattgagcagagagagtctagatatcgtccttaggggtgatagtacgctaagagggcattttccgttggaggttgatgttgcgcagagtgttttttactccgtctcggacgagaatgcaacagcgccaacatgggttctagcaccgttcttcttccagggggggcgttatacgatcaacgacgtgcactatgtcctcgaaggtgaagacttagtcccggcgggacaaacgcaatttgcccgagacgcaacgttcggctataagagctccaatctgcgggactatatcctcgagaaggcgcctggtcggtttaccgcagagcagatccattctgtgacactaaatgatatccgcactggtgggccggagggcgtaagagatcgcctattgagcttccctgctggtggtatagtgattgccaatgcggcagctgagtcggatatgcatgtttttgtcatgggtttattacttggtacgtcgtccgcgcattccattacttgctttgcgattgggttgaagacgtgctcatatggttaatggtgaagccgaagcaaaaggccttcggtacatctaccgcaccggcgccgcattcgtctcaacgcgccttggcatccctcacaaacctcccattacaaaagcggaactgcaacttcctaacccccagcaaacaggcggactcgttctcgtagggtcctatgtgcccaagacaactgcgcagctcaaggtcctcattgagcgtcgcggcgatcttctctccgtgattgaaatgcgggttgaagatctcattgagtcgaaagaaaaggcggcagaagtgattcagagtgtcattacgcagacagagagctatctaaatgccgggaaggatacgcttgtcatgacaagtcgggcgcttgtgaaaggtgacgatgagatttcgtcgctgaagatcgggtcgagagtcgcagaggccctagttggtgtcctggaggggatagaggtgcggccaagatatgttattgctaaggtatttgttctccactcgaaacccatgaagtaaactgacgcgggattcggaaaatagggtggtattacatcctccgacgcagctacaaaaggtctccggatgaagcgggccttgattgttggccaggctgcggcgggtgtgccgctttggaggtgctacgaggagacttcccgccatcggggcgtgccatttgtggtctttccgggaaatgttgggagtgaatctacact

SEQ ID NO: 25791 - DNA, 542 bp, Emericella nidulans
ctctcgcctagttccctccaaatggctgaatcgatccccgttatcctctgcggccgtagagtcgaagtcggcaagcccgtctccgaagttctccgcccagaatacgagggtatggtgggctgggctcagcccctcctcccctcccctcgtcttcgatccggtttggccagactaacaacagcacagtcatccatttcatcgcctctcctgaggcagtgcacgctgagcttccgcttctcctctcaggccaggacccccagcctgctgttaccagtccgaacgacgtgggcacgcacgactacagccgacccccgcgagcagtggtatttggtcgtggttacgccccagagttcgtccagcagctcaaggagaggtaccagagctactgcccggaacctgtcgcctgggttatgggagatccagcaacggcgcctacggaccctccgccgccagggtatgcagaggccacagcgaacacgatcaagaatgtgctcgcaacctggagagagcagggtgaaagggatgctttcctggtgtactga

SEQ ID NO: 25792 - DNA, 240 bp, Emericella nidulans
tggctgaagactgaactcggcggcggcgacgcggccgacctgactgccgatgagggcgcgcgcctttcgctagatattatccttggaccatcgcgcggtctgaacggacagtttactaggatccatcttccgggttgggagaactcaaggcaccaatatgacggtagcaatgctccatggtaggtggaagtagcagccagatgcaaccacgcaggaagcgagaagcgggatgcaagactt

SEQ ID NO: 25793 - DNA, 723 bp, Emericella nidulans
atgagcgtgctagacgacaagattcttgataccacttcctcagacttcacatcgcctgccgaccaccggaggcattcatacgaacaaggcccagacgcttttcaacatcgtgattctgtctggtccgatatctcccaatcattatcaagcacgcagtcccgtcaaaattcgcaagtgggccatccgttctttgaatctgctcccaatcctttcatgaggatggacgggctcccgtatgtgcactctcaacagtggtcgatttccaaggactctggttcatgtacaccctccgccatgtatgagaactaccccaccgacatggagaatacttcggtcgccccctttgctggtggcgctgtgggaccggtgaataccgtcagcatgccatccatgacctatcgccagcatatggcctttgcgccggcgggtgccgtcgccatgtcaccacagtcaagtcagggctggatgccggcgtcgacggacatgcctgaccctagttctcgaccgaagaacagccctacctaccggaatagctctcctcttagcgtccgccgagatggcatccgcaagaagaacgctcgcttcgagatccctgccgagaggactttgagcaatatcgatcatcttatcgcccagtccaccaatgaggaggagataaaggagttgaaacaacaaaaaaggttgctgaggaatcgtcaggctgcgtaagtggtttccccctca

SEQ ID NO: 25794 - DNA, 313 bp, Emericella nidulans
atgccagacaatcgcactgatgggccgcccgaggtcactgtcagctccctaacccgggaaagccgcagaccgagccctcgattagccaagggcaaggagccccgagagtcgatctttgatctgccactatcaccggttcctctggccccggtcaaagaagaggaaccagtacaatcgtcgaacttaacgaaggaaacgacagctctccccactccatatatgtttccggctacaacggtcagttctgcctcccctgctgcaaccacaggaccgcgcccggactaggtatgcttttgacgattccagcatattt

SEQ ID NO: 25795 - DNA, 525 bp, Emericella nidulans
atggtgctggcaaaatctaaaaactcggtggggctcggccagagcctcatgaacgatcgctttggtaaaggaaaggcctctaacatgaagaagtcgtctcataatgctggaattgcacgcaaagatatgaatggcgaaacttacatcacgaactccgccaaagaggcttcttgggttaagatgcgcagtatcacggaacaagcggcgctagacgagtttttgaccaccgccgagctggctggcaccgatttcacggctgagaagatgaacaacgttcaaatcatccatacggaccagaagaacccctacttgctctcggccgcggaagagaaatcagccctacgaaaacacaagaaaaacaaaggccgcctaacggttccgcgtcgcccggcgtgggatgcgtcgaccactcggaacgagcttgatgctatggagcgtgagagtttcatggactggcgacggggtttggcggaactacaggagaacaacgatctcttgatgacgccgttcgaacggaatctcgag

SEQ ID NO: 25796 - DNA, 435 bp, Emericella nidulans
gaagaacaaatggagagtgtcagctttggtctgaacgatttttaccacattcgcgattggtcggtcgaagcccaccgagaagcgcatgctgcggatctttcctggttgaatgctgaaactggctcgatttcgcgcttggagcctgaccgaaaagtcgtcatcttgacacattattgtccatcaacgcatgaagaagtcgtcgatcctagacatagcaacagcaaactttcctctgggttcatgacggacctgttagatgagcagtgttggcgaagtgagattgtcacactctgggcctttggacacacccatttcaactgtgatttccgagacgtaacgacagggaaaagagtgatggcaaaccagagaggctattacttctcacagtctacgggattcaatgcggaaaaggtggtggaactgaaagatacctaa

SEQ ID NO: 25797 - DNA, 295 bp, Emericella nidulans
actccccgtccaagatcgatccttcatttgctcctggtgcgcgcactcggttcgatgactttgttgctgtgcacatcaaccagactttctttatccacacaactgtaagcgccattgattcaatcatcaaccctatctccctttccattcaagtaactaatctgtgttgtgtccagggcaacttcctgacatggcaccgctacttcacctgggcctacgagcaggccctgcgcaacgaatgtggctacaagggctacagccatactggtcctggcccaagtacgccgatgacccc

SEQ ID NO: 25798 - DNA, 1869 bp, Emericella nidulans
atgggtgcgtctctgagagaccactctttccgcccgccgacccgcgaccgcccgtcgacgcgcgaccagggcgagaattcgctggtcgttcctagccgtacatcctcgctccattctcgtatcacacagccgatcccatcccagtccaatgccaaaccggcccaacgcacacccaaaacactcactcatgcgtatatggtatgtggtgtcggccgcgagcccgcccagtgggtgaaggcgcccacgccttcccagggaaagatcggtcatatgaagggcgctgtcggccagttttggctgcctgagatcctgggaagcagtccccgcctggagcaggacaatgagatcgccaaagctttacattcagcaatgagggtgtgtatttggatgatagtctacactcggttgaatagactaacctatgtttacaggcctgctttcctcatgatgtcgagatttgcaccggcaagaatcaaccgcactgtgtccaccatgctttcgtcctgcagcaggactcatcacacaccctatacggcattgccctccgcgtctggtcgcgagccgatgagaagcgtgctgagaccatccgcgagctgcgtaagaagaccgagtcggattactacgacaatcccgaagagacatattggatcccatactgtttgagtttcctttctcgatatccgttgtacgacctgctcggcgactatctccgtggaatgtggatccactggaacaaggccacgaatctgttccacgctgaggaggtctcccgcatcctcagcttccccgcgcctcgcctcaatgatcttgtccggatcgacatgaaggactatgcgctctgctaccagttcccgtcctcccccacgggcttccagaacttctcgatgtggccgttgttcacgtgtctctcgatccccaacattgtcggcgtaattgaagccgcagtttccccgactcgccgtattatctttgtcagtcattacccggccatgctcactattgcggccgaaactatccgctactgcgttcgtgtctacgagtggagcggcttatatgtacctgtggtccatgcccgccatatcaaagaccttgtgcaggaacctggaccctacattcttggtgtgacggctgagtgccgaacacttttcaacgcgccatccgacgctctggtagtggacctggaccggaactttgttctcacctccagcccaccgaacatcctgaaccccggccagcgaactaagttcatcaaccgcttgacgcaggcgttgaacggcgatgtctccccgtcgggtgttcccaaccatctccgttccgccttacgccggcggcaaactcatcccagctggccagatcatcgtcatgagaggtgaggtcgagagtgttgaggaacccagctggtggaaccaggatgcggtcatgggtgttatggaccacgtgtgtgagaaattggttagtacaccgtaccagcttctagtctctgtaaactgactctttagggacgcaacaccggcatgaaagccatttttggcggatcggtcaagaagcctctcatgaccaaggtgtctatgagacatctgaacgagattgtccgtgagcgtaaccagtactctcgtgacgccatggaagcctggcaagatttcattaacctcaagggtcgcatggataccgagctgggcaaggtcaccaagcgcaacaacttcttggttgaggagctggagacctggaagcaacaattcctcaagttccaggccttcgctgaacaactcaccaaagaaaccagtgaactcaaggtcaagatcgagaaccataagcgtgagaaccgccgtctttctagtctcatcgatcagcagaaggatgacgtcgctc

SEQ ID NO: 25799 - DNA, 994 bp, Emericella nidulans
gattgcttatacgaggggaaatccgacccaaagcacaagctgaggggtcatccaccctcgtatccgaggagcgactcccaaccatcagcatggagcatctccctctccatgccggcaagaaacactttattgtagccccctatgaagcccctgaatccgactggttcgatatctcccgagaatccttcctttcttttccctccgcacggcactggactgaggctcagctgcacggcggcgacgagacaaccaaagacgcacacctcgaccccgacgggttccacagaaaaggtagtccccagaaggtggaacagttctttcagacatggctcttctttggcctcgccatcgatgttctcagatttggtggtgtcagggcctcggtggaagatttcctgaaacccgcgacgcaaacgcacgccaaagcacggatcgtgaacacgagtaggctccccggaatgctcgtagattgggagaaggggattaaagcgaggggccggctcatgaaggactgggatacactgaacgagatgttcgagcgcgcgggaagcatcctcgaccgattctgcaggttacccaatcctgaagaggataactcgctgctgcagcaggagaggccgcgcctttggccggtgcgggatgagatcgcgacgacgttgattgcaatggcatgtactcttcgccgcacagcatataacgtctgcagcaaggagatcagcggactcgtcgacggggtctcaccatggcccaagaccgctcgctcggggattctgatgcgacggctcgagacgaaatggtgcgttgcagatatgatgacgaccctgacacagctgcctatcgatgggcattactaccttgctgcctcggccggtctggagccagacgagctggaccaccattccaagtgcgtgagggcccattgccggtatgaatatgacgcgaatatgtaccggactcgccatgtgacggacgatggatgccgcgaggaggtcag

SEQ ID NO: 25800 - DNA, 504 bp, Emericella nidulans
agatcgtatgcgcgcaatctttttattgaaccagcgacatacggaatcggcgaaccgacccgtgtccagtcgttttctaatgcgttggaatccgttggcgccgggagaaataggttgatttttgttgataacggctttgttggtggttcaatcgagcaagtgatcaacgaggtcgcggagccggcgagaactagccaatatgaagtccacgttctttccgatgagtctgagatgcgggagctgtgtcgaacatcgcttcgtggtatgtccagatgcatagcggcggctgttttttactcgtctccaacagaaggcccggcagaggcgtggaactacaccataaggacggattcagtgctgggtaaaggtattgatgtagggaactccaacaatgaccagcaagtataccttctcccgttccagcgatccattgactgggcgatcgcacgaaccaattcatcgttcgacgccagtaccctccctgaagaggtatgtcacctaaat

SEQ ID NO: 25801 - DNA, 606 bp, Emericella nidulans
aatatcctagtcagcagcaactttgagcgcctcctctggtttctcgcccttcgaacaaacacctcctctgactccattgaggagcgccgcaagcaagcctctgaaaacgtcagccaatggctctcacagctcaaaacggaaggcggcttcaccgtcccgcccgccgtcattgaggccgccaaaaccgaatttgaaagcgagcgcgttagcaacgacgagacgatcgcccaaatccgttcaacatacaactcctccttcccgtctaacctcactcccggtagtgctacctcttccaagactggcggctacattcttgacccccactccgccgtgggtgttgcggcttcactgcgctccatccagcgcaaccccggcacgaaacacatttctctttccacagctcatcctgccaagtttgctagcgctgtagatctcgctcttcgcgccgaggacggctatgacttcaccgaggtcctgcctcaggagttcattggtctcgagcagcgtgagagcagagttacgcccgttcgtgctggtgctgggtgggaaggtgtccgtgagattgtcaaggctgaagttgagcaggagcttgagggaaagcggtag

SEQ ID NO: 25802 - DNA, 267 bp, Emericella nidulans
atcctccatatcaatgtcgccaacgttggacatacgtcttaaacaaacaaccccccatcaagcaattgtgctaagttctccggctccggaccaaggcagtacgactgggttgtggagggagatcagatgcacgagaagcaggaaacaagaccattcacaaacgggcagtgggtgtgtttgagggataattcgaacctgacggaactgctgaacaaggagttgggattgaatttgccgagagatgtttacagcgaggttgacgagtag

SEQ ID NO: 25803 - DNA, 381 bp, Emericella nidulans
gtcatcttcgagggcaccacctcctgggagtacgaggagtgggatggaccgctgctccagatcaagggcaacggcatcactatcaagggcgccgatggagccaagctgaaccccgacggatcccgctggtgggatggtgagggctccaacggcggcgttaccaagcccaagtttttctacgcccacgatctgaccgactcgaccatccagaacctctacattgagaacacccccgtccaggccgtcagcatcaacggttgcgatgggctgaccatcaccgacatgacaattgacaactccgccggtgacgatgcgggtggtcacaacacagacggcttcgatatcggcgagagctccaacgtggtcattaccggcgccaag

SEQ ID NO: 25804 - DNA, 2467 bp, Emericella nidulans
gatctcccggtccttttcccgtaccctcgtatataccccgaacaatatgcctacatgtgtgatcttaagaagaccctcgatgccgggggtcactgcgttctcgagatgccttcgggtactggaaagacggttacattgctgtcgctgattgttgcctaccagcaacactatccagagcacaggaaactcatatactgttctcgaacaatgtccgagatcgagaaagcgttagcagagctaagggagctgatgaagtttcgttctgaacaattaggatatactgaggactttcgtgctttgggcttgactagtcgaaaaaacttgtgtctgcacccatccgtcaaacgggagaaaagcggcacggtggttgacgctcgatgccgaagtttaactgccggtttcgtcaaggaaaagaaggaaaagggcgaagacgtcgagttgtgtgtatatcacgaggtatgaaacggaactgctcattgtatggagtgcgcagctgattttatccagaatctagaccttctcgagccccataacctcgtacccccgggcgtgtttacacttgatggcctgttaaactacggggagcaacataaacaatgcccttatttctctgctcggcgtatggtaagtccacacctaatgagagcgcacgtttatttatcagcccttaacgccagttcagatgccatattgcaatgttatcatttactcctaccattacctcctagacccgaagattgccgaaagggtctctaaagaattctcgaaagactgcatagtggtattcgacgaggcacacaatattgataacgtttgcattgagtcgcttagcattgatataacggaagattcattgcgaaaagccactcggggggcaaacaacctggagcggaagatccaggatgtaaagagttctgacgcagaaaagcttaataacgaatacatgaaactcgttgagggattgcgggaggctgagcaggctagagacgaagatcaattcatttcaaatcccgttcttccagacgatctgctcaaagaagctgtcccaggtaatatacgcagggcggagcattttgttgccttcctgaagagattcatcgaatatctcaaaactcgaatgaaagtcactcacaccatctcagaaacgccgctttcttttctaaatcatgttaaggaattgacttttattgagcggaagccactgaggttttgcgcggaacgcttaacgtcactagttcggacactggagctcatcaatatagaggattatcaaccactccaagaggtagcgacgttcgcaaccctggtttcgacttacgacaaaggcttcctcttgatcttagaacctttcgaatcagaggcggcaacagtcccaaatccagtcctacattttacatgtttggacgccgccatcgctattaagcctgtgttcgatcgcttcagctctgtggtcattacgtcgggtaccttatcaccacttgagatgtatccgaagatgttaggatttacgactgtcatgcaagaatcgtatagtatgacccttgcccgtcgatctttccttcctatgatcgtgactcgtggatcggaccaagcacagatttcgtcttcatttcaaatccgaaatgaccctggtgtcgtacgcaactatggaaacatagtccttgagttctctcgcataactcctgacggagtcgtcgtgtttttcccatcctatctatacatggagtcaattatcagcatgtggcagggtatgggcatcctcgactctatttggaactataaattgatccttgtcgaaactcccgatgcccaagaatcatcattagccctagaaacataccggacagcatgttgcaacggcagaggtgccttgctattttgcgtcgcacgaggtaaagtttccgagggtatcgatttcgaccaccactatggccgggctgtgctatgcatcggcgttccattccaatacaccgagtcccgcattctcaaagcgaggctagaatttcttcgggagaattaccgcatcagggaaaatgatttcctttctttcgatgctatgcggcatgccgctcagtgtttaggtcgcgtccttcgaggcaaagacgactacggaatcatggtcctcgccgaccggcggttccaaaagaaacgaaatcaacttcccaagtggattagtcaggcgcttttggagagtgaaacgaatctcagtacggatatggcagtggcgactgcaaagaactttctgcgcaccatggctcagccgttcaaagctaaagatcaagaaggtatctccacatggagtcttgcggacttggagagacatcgtcagaaacagatacaagagcaggagagactacagcgggaaactttcgctcagggggatagaacgaacggttctcgcaacggagcgggagatgagtttgatgaaggaattgatgaggatctcatgatgttggatgcgcagtga

SEQ ID NO: 25805 - DNA, 459 bp, Emericella nidulans
ctggtcccgatgcaaacgctagcacagcttgattctaacggtcctagtgatgatgccattggattatcgagtgcgagggcactgatggaagcaatacacgagggcctgagctcacgagaggaacccccacaaaaccgaacgctgggctggaaaatttatgtggaaactgccatgtggctagcccagggtctatcagatcaggacacgattgagcttctgcaaggggagctttctccgttgatagtgcagtacgtgaggtccgagcaggaggcatctcgatggtctctcccgatgcaatcttcagaagccatttgcactgaatatttgaccgctctgttttcgtttggctatgaggtcgcgttcaacgagttatggacgaagctgtctgagggcttactcgaagctgtccgactttcgtcacccgaacaatcgaaggatttcaagtcttcgcaggatgcg

SEQ ID NO: 25806 - DNA, 1836 bp, Emericella nidulans
tatcgcccatgttgtctccgcaggacgagctgctactgccacatgtcaagcatagtcgttcatacgacccgccgaccctcgcgtatgatctgaaaggccccgaggagaacctacccaccgaaaagcagtggctggctctcatcggcgggacgaagccatcctggcggaaggcattgctgacgctgaacgagattgtgcaggggaagatgctggtggagaatcctatcaagggcctcttcgctcctcgcgccggcctctccgtgcgtatcattcaagctggacgaccccagaagacagtcatccttatgcggcagaaaagcagccaaggacaggaaaaggatgaagcgacggtggaaatccgcgctttatctacctcagagatcatgctgacactgcgagctcctatgactgggggcagtgctggcaaccctccggtcgatctggtgctgtacttcacttacaagccgacatacggcaataacccgatccacgaggttatgggtacacgcaaccagcgcatcagccggttctacgaacagctctgggtcggcaacgcaggggatgagggcacgagcctgcaaaaatccgccgacgacgtgcaagtgctgacccgcgaagcgatcttaaacttcaccaaggccattgacaaccggaacagcgcatacaatgggaaaaagaactctaagctgcttgcaccgcttgacatggcgattgtggttgcgtggaagccgttgatgcgttgtctcttcacggacgcagtcaacggcgatatcctcaagctcctgcatttgaagaatgatttccgggttattgacaacgcgagtccgatgcgcgaaggcgacgtgctgtcttcgacagccgcgatcgagtcgattcgcatccgcccggactcagggaaggtggtccgcgctgttgcgacgatcttcaagaaagcacgcccatcattactgttgccagtgagttcatactccagggccggtatgaagactaccacaacacgttcgagacaaaagaggagcaggtgtacaagttgcccttgaagtcgaagcgggacgtggtcctgctggcatcgaagccctggttccgcatcgccgcggccgacctcagcctcgacgaccacctggatgatgagctcactttccggctgaaaagctcataccattttcgcgacgccaacacgtacagccagatcgaaacctgtgggaccgtcagctgtgccgtggggaataaggacatgacgatcggcacagtgatgttcaaaagcaactcgcacttcctcaagaaccccgtcatcgacttcctgacccgtcgaggatttgcctacgacgaggtcaagcagcttccaaatgctgtgcccttggccgcagatgtccgcattgagatgcccacgtctagtgaccagtacgctgccgcctcgggagacagcaacccaattcacctatcgcgtgcgtttgcgcggtacgcggccacaacgaaggtcgggtcatccacggcatgcagactagtggtctggtacgaggcgtcgtggagttgcatgcggcaggcaacgatccgcggcgcatgaaggcctggtctgcttcattcaagggcaaggtatcccctggcgagaccctcctcgtggatatcagccacacggggatgaacaacggccgcttgattgttgttgctactgcacggtcggaatcgtccagtgtagaagtgtttcgtgcgacggctgaagtggcccagaagccaggagcctacctgttcactggccagggcagccagaagccggcgatggggatggatctgtacgagaccagccaggccgcacgcgatgtatggcacacggccgag

SEQ ID NO: 25807 - DNA, 862 bp, Emericella nidulans
gccgaacttggtgctaacagtgtcctgtttcagaccgaactccccgacaacaaagacaccgagtgcagtttccttcccctcaatcctcgcatccatgtctcccccactcagctcgcctggcacccgtttgacatcgaagagtctgagaccgatttcgtcgccggtctcaagactgttgccggctccggcgaccccaccctccgtgagggcattgcaacacacgtttacacagctaacaagagcatgacaaagagggcctttgtcaactccgacggcgagttccttattgtcccccagcaaggcgccctcgacatccagaccgagttcggtcctctatttgtccagcccggtgagattgtcgtcatccaacgtggtctccgcttccgcgttgagcttcccgatggcccttcgagaggttatatccttgagatctggggctcgcagttcgagcttcctgaattagggcctctcggtgcgaacgggctcgcgaatgcgcgggacttcctatacccgactgcgaaatacgaagtcgttaaggagccgtgggagattatctacaagctaggtggcaaattcttcaagagcacccagcagcacagtccattcgatgttgtggcgtggcatggaaactatgtacgtcatgcgcttccgaaccttcttccttcctcttatggtaaacgtaactgacagttattgcaggtcccatacaaatacgacctgacaaaattcgtcaatgtcggctccatctccgttgaccacatcgatccatctattttctgcgtccttactgccaaatcccgcgaccttaatgcccctctcgccgatgtcctgatcttctcgccccgctgggatgttgcatcgc

SEQ ID NO: 25808 - DNA, 342 bp, Emericella nidulans
atgggtctcatctacggcgattacggcggccgctccgacgcattcaagcccggctctatctcgtttgaatgcgggatggttccgcacggagttgcgtacgaggaattctccgctgcaacggcgggcgagactgatcctcccgctatgcgcatctctgaaggatctatcgcgttcatgtttgagtcttcacgaccgttcacaatcacggactttgcgtggaagagcgagaagaggcatgagcacgagccgaagatgtgggacaacttggtggatcatttcagtgagcatgctaaagaggttgaggagatattggcggcgaaggcgaagggactccggatctag

SEQ ID NO: 25809 - DNA, 519 bp, Emericella nidulans
caaagaaagtgtccctaccttcaacaaaaatcctaaaactaaataaccgaccaagagccgctagaacgttaaaaaacggtgtacagcccaaagaatgagatcctccgcgatacaacacattctgaaccacatggcccttccttcccggaggacaattccaactccgggaccggcaacgaccaccgacagaatggaagtaacgagccagcgcagaccggccccatggtctactctcctacgaacttttacagcaacctcgtacttgagggccagtcagcgcggttgcatcgagtaacgtactgcaaggagactgggcagcggttgctggatgcgggggcgacgtgggatcttatccagagtcatgagatgtttaaacggggacttgtagatattgcggcggtcacgaggaagttgaagactagtgcgcagtgtgatgggcagggaccggcgtttcgagagagtgttgttagacaagcaattgaggagagtgtggtgcaggacccggatgggttgttgtga

SEQ ID NO: 25810 - DNA, 1112 bp, Emericella nidulans
ggtatctctcgtgtttgtcaacgcaggtgccggagaaggattcatcagcgtagacggaaacgagggtgaccgcaaaaaccttaccctgtggaagaacggcgagaacctgataaaggcggccgcaagcaactgcaacaatacaatcgtcgtcatccactctgttggcgccgttctcgtggaccagttctatgagcatcccaacgtcactgccatcctctgggctggtcttcccggccaggagtctggaaactcgcttgtcgacgtgctctacggccgtgtcaaccccaacggaaagtctccgttcacctggggcaaaacccgcgaggcatacggcgctcctctgctgactgaagccaacaacggcaatggtgccccgcagaccgaccacaccgaaggcgtcttcattgactaccgccacttcgataggaccaatcagactccgatctacgagttcggccatgggctgagctacaccacattcaagtactcgaaccttactgtccaaaagctgaatgccccagcgtactctcccgcatctggccagacaaaggctgcgcccacattcggcaccattggtgaggccgaggactacgtgttccctgacagcatcacaagggtcagggagtttatctacccttggatcaactctactgatctaaaggagtcatccggagatcccaactacggatgggacgatgaggactacatccccgagggtgccaaggatggatcaccacaagacgttctgccgtctggtggaggtgcaggaggaaacccacgcctttacgacgacctcttccgaataacagccatcattaagaacactgggcctgtggctggtacagaagttccccagctggtaagtcgcttaatctttcccttttttttttttttcagctaggagctaacccggctagtacgtttccctgggcgggcccaacgaaccgaaggtggttcttcgcggctttgacaaacttgtcatccagcccggcgaggagcgggttttcacgacgaccctgacccgccgtgacctgtccaactgggatatggagaaggacgattgggtcatcacgtcttatcctaaaaaggtgttcgtgggaagctcctcacgc

SEQ ID NO: 25811 - DNA, 254 bp, Emericella nidulans
gcctctgggagcggcaagaaaagctcgcgggaacaggcatggctatgacagccgtgactgtccttggtggcagggcatttggtggtatcagctggctggacagcgccttcagtgccgcaaaattcctgggcccaaaccacatgcggcgtctcctcctccctggtattgtcgctgctggtaagtttactttttgtctgttcgttatcattgttagctaacttgcccagctgccattaccgtggcctatgtgctct

SEQ ID NO: 25812 - DNA, 610 bp, Emericella nidulans
gtctttatgaacactccagtgatcaagcgttacaagatccgatggcatgagtcacagcatgactcattccgcgagtttctgctagtatggactggtataaatgagcggactccaataatcgagtctccgcacactgtgaaactcaccatcatggcctccaaatctccgccaccaactgcgtccgctaaacagttttactcgacatcatcgccgttcgaggaacgaatcgggtattaccgagccgtccggcgcggccagcatatcttcgtctccggcaccacttcagtcgaccccgcatctcccgcccatgccccgcaaatccttttcccaaacgacgctcgccaacaaacgcgcgtggcgctccaggaaatcatcaaggcaatccaagctctcggcggcaagggcgcggaggacgttgtccgcgtgagaatgttcgtcagccaacctgaacactgcaccgccgtgggccagggtttcacggaaaccctcggtcgggaaagccgaccaggtgttggagcagcggcgacaatgctggtggtgcgggatggatttgtggacgaaagaatgctggtggagattgaagtggatgccatgttggatgatactgaga

SEQ ID NO: 25813 - DNA, 278 bp, Emericella nidulans
gttggagaccgcgcagagacgaacattgcagcacaggctgtggaatggtggaactggggtatgaaagagcggcgtcccggcggttggttacactgaatcagactttgcaagttgcagcagtaacgccccatagattgggagggcgcctacacccccgaaaccagctcgtttgtgtttgcgtcgcctcggagaacttgaccttcaaccagttcggtgaccagaacaacctcgtccttgacaggcgagggtatagcgccatcattcaggcgaagccagca

SEQ ID NO: 25814 - DNA, 325 bp, Emericella nidulans
tgaagtatgcggcgactcctgtcttctgcgcaaattccgctttgccgacggctggaccctgaccaacggtcatgcgatcattaagtacagcaaagaactcagcctggatgatcactcaatggagttgacctgggatggagaccacggcgccaaccgtgaagccttcatgcatgaactcgggcccttgcgcgagaaagacgatggaaaagtcagctatctaatggccgactcagtcacagacggcaaccaagttcgccaatggtacatccgccgtgatgagtccaacggcgatgcagttttcgaattgacctggcgaaggcagtag

SEQ ID NO: 25815 - DNA, 546 bp, Emericella nidulans
cgcccgcaagacacccggtacaatgtccatgactcacgaaaactgcgccgtcgtgcgcgacggcttcccgcgccccgtccctgataccccctccaacgttctcgagcagtttaagatggccggcaagacgatcgttgtcaccggcgctgcagacggcattgggtacgcggtcgctgaggcgatggccgaggctggcggcgatgtcgcgctgtggtatcactcgtgcgtgaccctttaggatccagcagaaaatgcgaagattgtagcaaagcggcaacaatgtgctgatagatgtatgtgcagaaacgatgctgcgattgcaaaagctgagggactgacgaaggagcatggtgttagggctgttgcttataaggttgatggtgcgtattgctggtagttggccggggtctattgtgtgagtgagagcgagtgtgtttctaacattttgctctaactgtacagtatctgaccctgatgcggtccagagcaccatctcgaccgttgtgaaagactttggcaagatcgacgtcttcgtggccaatgctg

SEQ ID NO: 25816 - DNA, 1233 bp, Emericella nidulans
ctcactgcacagcccaccggctttccaccttcttccggatatcaagccaatgttgcagttcaaggtcaaaatcagggccttgtcccgcaggccaccgtatttcccggacaggcctcatcacaaaatcttcaacctccccaaatgggtattctgaataatccgcagccaacaggctatacaggtccccggccaccaatgcctcctatgccaactggtttcggttcgaatctaagtccctctcagaccggtggactggtagcacaaccgaccggaattcctggtcaatggggctttgtcaatcgtcccgcctcaggactgccgaacattgaggcgctgaaacagcagctgatgcctcagccaggtcgcgagggcggcttttctgccgccgggctttctggaaatgcgagtatcccttgggctatcacgaaggaagagaaaaagatctacgatgacctttttagagcctgggatggtcttcacaaggggttcattggtggtgataccgccattgaaatcatgggccagagcgggttggctaggaatgatttagaagcaatttggacattagctgaccctcataatcgtggacggctcaatatggacgagtttgccgtggccatgcatttaatttacagaaaactcaatgggtatcctgttcccaaccgtctcccccctgaactcatccctccatccacaaggaatctgaatgattcaatcggcactatcaagtctatgctttctcaagatgcagagcatcgaaaggctacaggtgcatttttgcagccccagaagacaggtgtcagttatctgaaagaacattctttccggggcggagcagtatcccctggtgctggccgtaaggatgctacactgttcaaaaacaatgacgaggcagctgctggttatcgctcaagtgcgcgtcggcgcgtcggaaacagcggccgtacaccctcacctgcggcttcgcaagcttctgaggaggaattgtctgtcgaacaactgaagaagaaaattcgtgaaacgcagatcatgttggatgcggttgattttgaggatgagaaccgtgcggaggaagaggacgcgcttgacaggcgggaccgtcgtgaggccgagagtctaatggataggattcgacgtgtgcaggacgatatcgatactcatcctcatgcggctcttcgcagccttgatactggcgctgagcgaaggactgcgccgtcaactgcaggcttatga

SEQ ID NO: 25817 - DNA, 489 bp, Emericella nidulans
ccagtcgaatgttggccgcggcgccttctacgaggccggcgaccagcgcaccgctcctcagtctgagatcaaccagcacgagagatatgaggccggcgagaaggccagccacaagaacattgactccagtatgtccacctattcgccctccaacgccggtgtggaaaaagtatgaagctaaccgaccactttcaccatgtagaggaccaacgtactatcgcaaacagactcgctgctcagagtaaagaggacgacccatcctcgcatcataacagagacattcagcccgaggctgagctcagcaagaaggacccattgaaaccggtaagttgcctgcgattgaagagtcaaatagcaaggcgagaatagaagctgatattgtcgatgtaggctaaacttcatggaaacgagccatctaagggcgctaagattgataagcagctgcaggaggatgatgagcagcggctacgcgagaagggaatcaaataa

SEQ ID NO: 25818 - DNA, 1507 bp, Emericella nidulans
atcatgcaacagtttccagtgcgaacctaagtcatgcccaagctccgccgcagcaggctgaggacggtcctctccatagtcgcagctctgttcctggttattggtgtcttcaagatcaattggactccagcgcccgcctccgtggtagtcccgaatactgcatttgaagtacctctcactgaacgtcaaaatgtattctggaagggctttaagccgatcctagaagccaactctccgaactgtcctccacctgctcatgagcaaaacgccgactctattcacttcaatgctaccacgactgaagtccggcccgatctaacgttcatggacgaaagcagcgtgtcagcgatgcaagatgcacatgcgcggttcttacacgatatcgaggaaactaaacgtctgaaaccggtccatgctcctggtacccgaggcatagtgtcgactgctggaggccagtattctccggagtttcttagctactttgcggatgctacgacgtaccggttcgaagctaccggtggaggtgtatatgaaggatgcagacgagtacgaagagaatatttgcgaggatgtgcttccgaagttgaacgcgcggtgtctgcttctttcagatgtggtcggaaaagatcccatagagcattttcagctcaaggtttttgcggtacttctttcgtctttcgaggaagtcgcttggatggactacgactgcttcccttttcatgatccggacctgttatcagattcagacatgtttaagacaatgggcatgagcacttggcccgactcttggcagtcctcagtttcacctgtctactatcgcatctcaaaccagccggaaattcccatgaatgcacgccagaccaccgaggctggtgttttccttatctcgaaaaagtcccacttgcggacgctattgctgtcagcttattacaattactacgggccgtctcattatttccgcttgttgtcccaaggtggaccgggcgaaggcgacaaggaaactttccttcaagctgcatctgcagttcaggagccattctatgctgtgagcgagagggtacaggcggttggccatccggcgccgaacggcctatccggctccgctatggcccagtcagacccaattgaagaccaagctctggttagtcaggggctccttcgggtgctcgatcctagtgtggctcaggccccacgggtttttttcatccatgccaattaccccaagtttaatccaggaggaaacgtctggggaacagaattcgagactgcaccgacagtccggcctgatgggtccgacggacgggcatggattgtcccggaggatgtcatccaacgatttggttatgatgccgagaaggcatactgggaagaactcaaattcatcagctgcgctccagacattgagttccagacctggacctccaaaggcaaaatatgccacaaggtcggacaatactgggacaatgtctttgcagagccgcatgacgatgattttcaatggggttga

SEQ ID NO: 25819 - DNA, 875 bp, Emericella nidulans
atgcctcagaggcgccatcggatcgatttctcgctgctaagaaggcgtcagaacttttcgtcggcctcctcctcagacctttctcctggcattccggtcctccagtcgccaatgtcgtttcatgcgatggcgtcaccagaagtccccgaggcaacgcttaagcggaataagctggacagagctccagtcaagccgtccatgtttttcgaagatatggatgaagaggacgatggaccagtcaccaagtcaacggcccatgaccacaaggacgttccagcgccacgcacggcacagaaagttatcagtggcgagagtccaccaaagacccaattctttgaagattcattcagctccggtgtctcctttgtaccgccggttgcacgaatagggcaggattctcttgtcgtgattgaagtcttggtaaacgtcagcgtaagtcggccaagtcaactatgacggctccaagctgattcagtctgcaggtcaaagatgaggaggctgttatctcgagaataactacacgaatggcgcaaatctaccagagatccgagtctttcatgttcgtcagcatgcaagtgatcccgtcgctgcgattcggcaactcgacagtgccagcatactccatgaaagtcttcgcgctgccgtatctcattgccccgatcacgaacctccgcagcaccatactcattcaagcggcgcttcacgacattctacatatccaaccctcccggggaatcatcctgtatattccagttgcagaagagaacatggcgaccaacaatactactatgatgggtgaggtagcccgtttacaaagcgatactcatggctggggccgggagtctggaatctttcagtctctttctcgatccctg

SEQ ID NO: 25820 - DNA, 838 bp, Emericella nidulans
atgatccttaaacacgctgctttggccctggcggccctccagtgcgttgcgggtctccgctttgcaatgtatattgacgagttagttttgcttctaccctcaacctagcaagagcgagtgacaagagctaatggagacagatggcacgtcaacggtctaccgggcagcgatcagacacaggggatcacgcatgccattatgggattcgccaaatctacggatttcaccggtgacgcgcctgcggcattccagccttttgagccggtctcaactttccgcaaccgcttctcacccgatacaaaggtcatgattgcgatcggcggatggggtgattctgcaggtttctctgcgggcgcaaaggacgaggcttctcgggaacggtacgcgaagaacgtggcggccatgctggagagtactggttttgatggcgtggatatcgattgggagtaccccggcggaaacggcgaagactacaagaaagtgccaaacgatcagaaggttgatgagatcgagacgttcccgttgctccttcaggctttaaggacggctgtcggtgacaagaagatcatctctattgcgacacccggcaaacgcgaggacatgattgcgtacacgacagagcaaggtcctaagatctggccgtctgtggatatgatcaatatcatgtcctatgacctgatgaaccggcgcaacaacgagaccaagcaccacaccggcatcgcggattcgcacgacaccatcaaagcatatctcgagatcggtgcaccgccggaaaagatcaaccttggctttgcgtactatgcgaaatggttcaccacccaatccgacgtagactgcg

SEQ ID NO: 25821 - DNA, 1397 bp, Emericella nidulans
ggcggcgatgacacatttggtgaatttccgcaacatataaaggttctccttagccgcaagctcccctccataaccgtggcgacactcgtttaccccaagtatgagactcgagggagcttgcaggactcagtgagtgcgtttcgggaatggtatgtgttgataatccatcgctcagctgatgaaaagctgcgctgacgcactgcaggctgcagaatcaggtaatcgatctagaagtctccaaccgaacaccttcgccgaccgttgatccttccgtgcacgtctttctcgttggtcactcgatgggcggaatcgtcgctgccgacacactgttgctcctggcttctgaacagcccataccggcgaggactccagctcagtcgtcacgatatgaattcgatgagggctcaaaagatacgacagccgcagagagcactaatctggcggactcgggcttattcatgtttcctcatattcagggcgtgttcgcgttcgataccccatatcttggagtcgcaccaggtgtagtgtcttacggcgccgaaggtcattacaagacaatcacgtcaacatataacgcattctccgaggttgctggactatttgggctcggggcaaacaatgcttcaagcaaaggggcggcgccaccttcagacgaagctaaaaagttaccgcctgcgtcagatagtgacgctgcagcgacaccgtcctggcagcgatggggacggtatgcgatgtttgctggcgctgcaggagctgtcgctgcgggaggagcggcagccatgtattcccagcggcagcggttgaccgatagctggggatgggtttcgtcgcatcttgcattcgtgggctgcctagcacgaccagcagagctccatcaacgtattgcgcaactgtcgcaagtgcgcaaagaccgaggaatcagatgcgtgaacttttacacctgcctagggaagggcgccccatccctggtagaaaacaccggcaacgtcaacgagacgggcaagggtcaaacggcacccttcagctccaggattatccgctcgaagcaccgtactttttgcactatcccggatggcgaggaaggcaaagcccaagaaaagccgaaacgcacggggccgggagtcgaatggactaaggctgtaaatgataaggccaccgatgagatcaaggcccatacctgcatgtttctcccgaagcagaatccggctttttacgaactagttaatcatgcatgcacggcgatggtcagatcggtggacaggggatggtacagtaccgcaggaggacaggctatttacagcgaagcaccagcggacaagatgccgcggcccgagcaggaccgagccaacactcaagccgaaagcgggatggatgaggacgttgtaatcattgattga

SEQ ID NO: 25822 - DNA, 3483 bp, Emericella nidulans
gcgggcccaataagtattactacagagagcggctcagtgctccaatttgatgtcggacggatgctgtcatggattgagatcatcttcaacactgtcagtgataaatggcatgcaatcggtcgacgtgcgctgaaaaatttgatcctccacagcaaaggacacacttacctgctggagcggtcggttgagatgtgctatgtgacagagcggcccaagtcccttgagagctactttgaagtagttaccgagattttgattgaacacaccgactatccgttgggcttctggagaattctgggcgctgtcctagtcactctgggcagccctaagcgagaaatcagaatgaaatcggccaagctccttcgaatccttgaggagcgtgagcagaagaactcccggttacaagattttgatattagtatatccgacaagacaaccgcggtctacaagctggcccagttcgaaacatcgaaacgtcttgcccagcagcatgctgacctggcatttacactcttctcagagttttcccagcatttcaagaacttgcggcctgacagtcagcgaaacttggtggcggcaattctcccttgggtacagacaatggaactgcaggttgatcccaacggtggccccacagccaagtcctacatgctccttgccaacctcttcgagattaccatccggtcaagtacgatactcccgaatgaggtccaagctttatggcaggcgcttgccacagggcctcatggaggaaatgtgcagttggtgctggacttcgttatcagcctatgcctcgaacgtaaagaacaaaactttgtggagtatgcgaagcaagtggttgtatttctgtcagggacgcctgcaggttcgaaggtgatcgagttctttttgatgcaagttggtcccaagaacatggtccatgaacgaaaagacattacgccggcaccgctagacgtgaagagtttaccatacgttgcggacctcgcaactgtgctccctgttggtaacaagcaagccgggttgtcccttggtcaggttgctcttattttccttgtcgacctcatggttgctccagtcacccttccacttccggatgtcgtgaagctgttgcatgttgtcgttattctttgggaccactatactcttactgtgcaagagcaggctagagagatgcttgttcatctcattcacgagctcattgccgccaagatcgaagatgatgaacccgcagggagccggcaatctatcgaggactttgtggagtgcattcgcagaagcgaccctaaagtagtttgggagtatgaggacagtcacgataaagaggatggcgaggatgacagccgtgtcccatcttcaatggctagcgttactcacgccgttgttgattttttcagtcttgcttacgagggaatcaccgatctatgggcaaaagaagcattgaactgggcgacttcatgcccagtacggcatctcgcctgccgttctttccaagttttccgctgcatttcgacaagcttggactccagaatgcttgctgacatgctggctcgactctcaaatacaattgcggacgaggaggcagattatagaactttctctatggaaattctcacgacgctcaaaatcatcattagttctcgagcacctgcagacctgctgcgatatccgcagcttttctggacgacatgtgcctgtctgaacactatccacgagacggagtttgttgagagtgttggcatgctagagaagtttttggacagggtcgacatgagtgacccgatcgtagtcggggagcttgtcaagggccagccaccgaagtgggagggcggttttgatggcatccagaacttggtctacaaagggctaaaaagttctcaatcgctcaaccgcacgctggatattttacatcgcttgagcggccttcccaacaatgagctcattggcgacggcaaccggcttttgtttgctatcctggccaatctatcccatttccttcgccagttcgatccaaacatcgatgatccaaaaacactcgcccgtgccacgttattggcgcgcgtggccgagggtgagggatgcccgcgtcttgcagcttctctccttggcttcgccaatgggcagtacaaggcggagaatgatttcttaagtcacatcatcaccgaaatacgatcctattactatccccaacaggattttcaaagcctagtcttcctcatgggcttgctcacgaacgcgacagattggttccgtgttaaggtcatgaaaatactgtgtgcagtgattcccgaagttgacatgcggcgatctgatgtggcaagtcatggccctgatttgatatcgccccttttacgccttctacagaccgatctttgccctcaagctctgcaagttatggaccatatcatgaccgtttcgggcaatcctatggagcgccatcatattcggatgagcatggcttcatcgacttcatcgagggcaatccggaaagaatacgagcgaatccagagtctttacgggatcccagaacctacggggtggtctatcccgatgccggcggcccagtcagctgttacacgacataatgtccacgcggtattctacacatgtgctgaagttgatcgggtagatgcgcaggaacctgtaccgtccgaggttgagttccacgctgacgattacaatgacaattttttcccaatgcgagccgatacgatgcaatcgattgagacgcagacggatggcaacattggggatattgtgcagaaactggatagtctggacgacttcttcgaggacacagaatcatcccatccgacgcttgatgctgtgcctgatatgtcattacgtggtttcgcaggcggttacgtggattccaacgcaagtatctatgaccagcaaaccgccccgatactgcgaaagtcgctcgcgcggacagcctcaacatcctcatttcataatggtctcgttgactctcgccctacaaatatgcgctttgacggtgttggctatcataccgccggcacatcgacacctcatctatccacccaaacgctacgtccagtatctcatacacgttctgtgacctcaccggtcaatcacgtcttttctcaaagctcggctggtccgcagttctctactccacccactggagttcatgagcccacctttttctctgacgatgaaatggaggatggctcattcgactttgatggacgcctaatggtgaacaagcaccctgcgcaccctttgaccagccaatcacgcagcgcaacggacggctcgtcgtcgctcgaatcgatgatccgaagtggcatgagacgactcaccggaagcacagcagctggtcgagataaagagcggcagcgtgaatttgtccgagctcagcaccgagcgatggctcacactgtggattcaccacgtgtgcagaaggtgccgacggaataccttggaggatctccaagtcatccaagttcaccgggccagtaa

SEQ ID NO: 25823 - DNA, 385 bp, Emericella nidulans
gccgaatcagtcgaacgcatcgaaacacccgcacccgtctcaaccagtgcacctaaaggccggtcctccaagaactcgactcctgtactcgcttccgcagaaccagtccagcagcgcacgagaccaacgcggagttcagaccccgcgccgaaacgctctcacaataaaatcggcaacaattcatccattgtgcaaccgccaccagtatcggatccggaagagtcgcttcacgaaggcgatgatgaggacgaggaaggcgagccgcggtactgctactgtaacgaaattagcttcggcgagatggtcgcgtgtgacaacgatgcgtgtccccgcgagtggttccatctgtcatgtgttgggctcacgaagccgcctggacggaatg

SEQ ID NO: 25824 - DNA, 453 bp, Emericella nidulans
tccacacccaaacgatcgcgacacctcccctacgaacttcccctcggcctctcccaaatggatttctactccctccaatcgccacccattacagaatctccgccggcttctgcgacatgccaacgggaacaaacaccatcgatgccgttatacaaccccgacgcagctcttccttcaattgaaaaccccgtcatagagcagagctcagagtcaagcgaaaccactcccactgatgacagtcaatggacaagtgacgaggatgaccgccttgtgcaactcgtactggagaaatttcagctttcccagcgcgactgggacgagtgcgcaaggcgcatgggcaaagaccatgcaagcgtcggccaacgatggcaggtccttgttggagatgggaatgttggtctgcgacggggcggacgcagagttcgcaaggctattcatgaggcttggatgtga

SEQ ID NO: 25825 - DNA, 226 bp, Emericella nidulans
cacatcgacaatatgtctgtctttgagaacatctccaatgtaagcgatcgacacagccagatcctggcggaactacagaccgtgggaaatgcccccagcgatctcaaatcccaccgcgcgtttctgtcagatctgaaacggcggctcgcaaagacaaaccgccaattagacgatatcagacagcgtacacagatcgagcgcgagaggcatgagaagtaccgtgaca

SEQ ID NO: 25826 - DNA, 1738 bp, Emericella nidulans
tactgggaaaccgaaaggagtggtcgttgagcattctgctctctccaccagcgcaatcactcgtggcgtcgttctagggctcggtccggactcccgtgtcctccagtacgccccacataccttcgacgtcagcgttgatgagattcttacgactctgatccatggcggatgtgtctgcgttccttccgaggatgacaggttttcgatcgctcactttatggaatctgcccgtgttacggttgccctgttgactccgacttctgctcgaactctccatcccgacgaagtaccctctcttcgaatcctccaaactggcggagaggttcttaccgaggatgtgaacgacaaatggtcaaatcgtgtgacgctttttaacgtttatggacctactgaggctagcgttgcttgtgttatcagcaaccgcactggcctgaaaggggctggtcatgttcttggacaggcggtcggagggaagctctggatcgttgatcccgacgatattgagcgccatcttccggacaatgaagttggcgaattggttatctcaggagcaatattagcccgtggatattttcgcgatccgagccgcacagaaagctcttttgttagaatgcgaaacggtgaacgggtttaccggaccggtgacctggcgagtatggatagcgctgggaccatcatataccacggccgcaaggatctggaagtcaagatccgcggtcagcgaatcaatatcgcggagattgagatcgctatcttgcaatgcgatttagttcatagtgttgtcgtcgagtaccctcgctctggactgtttgagaagaaactcgtcgctgttctacgcttcgaggactcttcgtccgacgctgaagatggattatttggcggggccaagggattaactgaagacatttattgcctgcttttaagccatgtctcgagtgttcttactccagcgatgatcccatcgaaatggttgtcgcttccctgcgtaccacagatgccatccggaaaggccgatcgcaaacaagttcgtggttggcttgaagatatggacaaaagaacttatactcgcattttccaccccaatggcactgataatctgatctcagatccatcagacagcatggtagcgatttggctcaaagtcctcaaattagagccgcagagtctccgccttgatcaatctttcatccgtaacggcggtgactcaataatggccatggaggcccggcaccaggcgcacgaagctggaatcaacatcgacgttcgggagctcctgggtagccgtgcacttcaagagattggcgaaatggcaaccaaaacttcagccgtagaagaggtctcaaagatagaggatgatagggacgaaccttttcccctgtcgcctgttcagcagatgtacttcgataaggtatctgatcccagtcttggtcttcagcaacgtgtttgcgtggaaattatgacgaagatacagcctgatatgctgcgcgaggcattgaaccacgttattcagaaacaccgaatgttggccgctcgatttacgaagcacatgggacaatggatgcagcaggttccgtttggaaagaatctcaaacacctgtctcgctgtcatatctacagtcaggctgtggggtcccttggcgacttctgcagtgagcccatggcccttgaggatgggacgctacttcacgcgcatttgcagtcgagtggtgagaggcagacactcgtggtctgtgttcac

SEQ ID NO: 25827 - DNA, 784 bp, Emericella nidulans
atgttgctgcctacagtccgaagccggatagcggcgctctcgtcgcgcgttgcctcgcgggccgcctactcgactaccgtccctcgcttcactgagaacgctatgcagccgaacgatccgaccccgcgaccggccaaacccaatgtctctgagactgatgctacgcctgttgactcaatgggagcgtgggatgctgcgctgcaggaatctacagacgccgctgagcgtgttcgaactatgcaggctcctaaccggaagggcacctgggcctcaaaccagaagccgagagcagaggcgatgagtggacctcggtttgagcagacgattatgcatcttcaggttcgtcaatggctcggtgaatgtgttttctcggaggcggagtaaccgagatccgggttttggaaagtcaactgacacatggatatagcccacgcctatggccgctatcgagctcattcacaagcagcccgtccgctgggtgaaggacaagatcgtcagctgcgacggtggcggcggtcccctgggccaccccaggatctttatcaacaccgacaagcccgagattgttccctgcggctactgtggacttcctttcgttcgtcattcgagatctttgcaagatacatttataaggctaaccagctagcaggcccacgagcaccaccgtgaatatcttaagtctcttcccacctctagctaccctcttgaacccaccggtgctgccgaggaggtgaacgaaaaccagcgtgtgactgagggtgccactgggtacgagcagcggtaa

SEQ ID NO: 25828 - DNA, 892 bp, Emericella nidulans
tttaacactccacccgggatcgcgcgaacaagcgaaatctacctctatgcgttcgacttgtcaccctcgagtgaccacctatccattctgagcacgcacacaaacgagccacccgtcctcgtcgccgaaccggcctacatccgcgagacgaaagccctaggctcctactggaacttgcccgacacatcgaacgataaggccgccacaatcgaagaccacctcgattttctcattgagttctacgaaggccaggtcgaggaccgtaggtggtacgggttcctcgattacggcgactacatgcacacgtacgatgaggacagacacatctggcggtacgacgttggcggctacgcgtgggataactccgagctctcgccggacctgttcctctggcagcagttcctgcgcaccggacgcgcggacgtctatcgtctcgctgaggcactgacccggcacaccggcgaagtcgacgtctaccacattggcgactggaagggtcttgggacgcgccacggcgtgcagcactacgccgacagcgccaaacaggtccgcatcacccagccccagtatagaaaatacttcttctacttgtctggtggagacgagcgtgtcggcgagatcctagaggaagcacttgacaccgacaagacatacgaggtcctcgatccgaaccgcaaggtccgcacggacggttggacgcccacgccgggacagtcagccaccatctccctcggtaccgactgggctggactcgctggcggctggctcatcgagtgggagcgtcgcggcccgcgctggcaagaggcacggtacaaactcacgcagacgtcacggggcattgcaaacctgaccaacggctttgtgaccggctcgggactctactcagccacaa

SEQ ID NO: 25829 - DNA, 921 bp, Emericella nidulans
gtgcagattgttgatgcccgaaaccttcttctcttccgctcagaggatctcgaaacctacgtcaaggaaatcgaccccaagaagcgaaacctactactagtcaacaaggctgatatgttgactgacaacaagcgcgaaatgtgggccgactactttgagcgcaaccagattgaattccgtttcttttccgcacagatggctaaagaggctaatgaagcccgcgagaatgaaggcgaggatgaagataccaagtcgctgacagaaggtacggagaatttgaatctacaggagtccaaggagaaggaagccgacggaggcgtcgatcttcccagcggcacaaaagccccttctcccaagcgaaccaacatactagatgtggatgagcttgaggaacttttcctttcaaacgcgccagatgcaacaaaagacgatgaagatgaacaagatggtgattccaaacctagaaagacagtcattggtctagtcggatatcccaacgtcggaaaatctagcacaatcaacgccctgcttggtgcaaaaaaggtctccgtttcgtccactccgggtaaaacgaagcactttcaaaccctctacctctcacccgaaatcatgctctgcgattgtcccggtttagtcttccccaatttcgcctccaccaaagccgagctcgtcgtcaacggcgtcctccccatcgaccagcaacgcgagttcaccggcccagccgcactcgtcgccaagcgcattcccaaacacttcctcgaggacgtgtacggcgttaccatccatactcgcccgatcgaggaaggtggcacgggtgagccaaccgcccacgaccttctccgcgcctacgcccgcgcccgcggcttcgctacaacaggacaaggtcaacccgatgaatcccgcgcagccgttacatattaa

SEQ ID NO: 25830 - DNA, 1103 bp, Emericella nidulans
atggcaaccaaccaagccgcgtggctcaccaaggcaggcaatgacctcgaagtcggtgatgcccccgtccctacggctggcccaggcgagattgtggttaagaacgccgcggtggccatcaacccactcgacacccatatgcaggacgtcggcgtctttgtccagcagtggcccaccatctttggctgcgacgtcgccggtacagtgcatgagacgggtccagacgtcgagcggttcaagaagggggaccgggttattgggtaagttcatggccattgacttgtcgtttggctcgtgactgactctgatattgtagtcacgccatcaatctggtcaccgggcggcctcaggatggtgcctatgctctctacaccgtcgtccccgccaacaaggcggctatcctgccggacgctatctccttcaccgacggagtcgtcgctcccttcgcggtcgaggcggccgtttgcgtcctctccctgaaagagcccggtgtggccatgcccggcgtctccacgccggcattagccctgccgtatccctctcttgacgatcccgtcaagccgttgggcaaagtcctggtcatctggggcggctcttcgtccgttgggtccatgacgacccagattgccaccgccgctggtattcaggttattgccatttctggtgctcacaactttgagttaagcaagcgctgtggcgctaccgaagtctttgatcacaaggatcccgaggtcgttgacaaggttgttgctgccgtgcagaaatccggccaggagtttgtgggaatctttgacgccgtcgctacacctgacacctacaccagcgatctggtcatcctcgagaaacttggaggaggccatctggctgcggttcatcctccgcccgcagaagtcccgagcaacgtcaaggccggcatgatcttcgcggtcaacgatattgcaaccccggtatggaatgactttgtcacccctgctctcgagagcgggaagatccagtgcttgcctccgccaacaatcgtcgggaagggtcttgaggcgatcaacgaagggttgaagaggtgcaaggcgggcgtgagcgcgaccaagctggttgtggagttgtaa

SEQ ID NO: 25831 - DNA, 297 bp, Emericella nidulans
gtgatggaaaacggcgaagtcgcaacgcgccctctccgcaacgccaaagcaaccgacaacctgacgctctctggcgaagagcaagaatgggagccctccttcaccttccacggcttccgctacgtgcaggtgaccggctggcccgaggaaaccgagctcaacgccgacagcgtcacggccatcgtgatcaacagcgacatggaacagaccgggttcttcagctgctcgaaccctcttctgaacaagctccacgagaacatcatctggtcgatgcgtggaaacttcctctccatataa

SEQ ID NO: 25832 - DNA, 297 bp, Emericella nidulans
cgtcgtcaagctcgtgaacgtcgagattatctttaccggagagctttgcaactccgcgatgcttccattgccgaaaaaagagcgcagctgaaggagtcgctagcaaccggaaagcaactcgatccatctatcgcgaatgatcgaaaacttcgagaggatttcaagtttgacgaatcactgccgacagcagacaagaaggataaagacgcagatcttctcgacttggacgacgaatatgctctcacctccggtatcatcgatcctcggccgatcgttacgacttcccggtctccttcg

SEQ ID NO: 25833 - DNA, 396 bp, Emericella nidulans
aggatccgcgataatgctgcctgcgcggatcaagaatacgccaatattctcgacgacaccgaccctggtctctcttggaacccaaccttcgaccccaaagaccgcgccctccccttcctcaccagcctcacctccatgtcccccttcgccaacaagccgcgcgtcgcgattctccgcgaacaaggtgttaacagccaagccgagatggccttcgcctttaacaccgctggcttcgccgccattgacgtccacatgacagacatcatctccggtcgcgtctccctctccagcttcgttggtctcgccgcctgcggtggtttctcctacggagacgtcctcggcgccggccaaggttgggccaaatcagtgctcctccacgataacacccgcgccgag

SEQ ID NO: 25834 - DNA, 1272 bp, Emericella nidulans
agcgggagcggcaagacgcagttcttgcttggcctgttgctggctgtgcagcttccaccacctcagggtgcgggcagaagcgcgatatacatctctacggaagccccgctcgctacaaaccggctttcccagcttatcgagtgtcatccgtatttgtcgactctttcgcgcgagcaggccccttctctgggtaggattctttccataaacgcaatggatctcgagagccaggatcacatactaaattaccaactgcccgtggctatcaagcgatacaatgttgggctagttgtaattgactctatcacctccaactaccgggccgagcatacgtctcacgatctatccggcttgtcgacacgctcgggggagctcgccaaactaggccagatgctgcgcaacttggccgcgagcgaagatgtcgccattgtcgttgccaatcaagtctctgacagatttgagggtgacgctcccttgcctttttcacgggtgaccggcgaccggacgccgatgtcttctcccgccacgcaacaactacgagactactacgtcggatttgaccgtgaggctgccgcgtcgcctttgtctcgagtgcggacatcagaaccggctaacgcggagctgaatcatcacactctcgccgtttcgcagtgcacgccgagcttcccttcttcatcacctctgcccacgcaagatgaccagccgcagttcgatgggtcatacctggtaggcaacccagtacgaaatgagattctcagcttgcaacatcagcagcgtttcttcaccggatggggggactctcctccgccgttggctcacggtacgcagccttgggtccagcaatatactcttaaaactccgacgttaggcctcgtctggtccacgcaaatcgcatgccggattgccctaaagaagtataatcggccggtgatctttgacgcggtattagatcgcaatcccacaattcctgtccagaaactcacttcccaagaacaagacgagccatctgagtctgaggttgcatcagatgcggcttctcttcctgaagagaattcgacccgcccgaacaactctactgctacagccatgaaaaacgtgcctacagcgtcggctccacagatcatacactctaccgagcaatcaatccagcgaaccatgaaactggtctttgctccatgggccggaggatctgcgcctctatcgtctgaattcggagatgaagtggagtttgagatctggaagggaggtatcaaggccgctaagagagagtaa

SEQ ID NO: 25835 - DNA, 1086 bp, Emericella nidulans
ggtgtgaaggttccacaattctcattctctcgacttgctggagccgaccctgtcttgggcgtggagatggcgtccaccggagaggtcgcttcgttcggtcgtgacaagtacgaggcctacctgaaggcactcctgtccactggattcaagcttccgaagcgcaacatcctgctctccattggttcctacaaggaaaagatggagatgctgccttcaatcatcaagttgcgtgatgtcggtttcgagctgtttgcaacctctggtactgcggatttcttgaaggagaacggtgttccggtgaagtacttggagattctgcctggtgaggatgaggatatcaagtccgagtactccctcactcagcatctggcaaacaacctcatcgatctctatatcaacttgccgtctagcaaccggttccgacgacccgccaactacatgagcaagggttaccgcacccgtcgtatggctgtagactaccagacgccgttggtgaccaatgtcaagaacgcgaagattttgatcgaggctattgctcgccactacgcactcaatgtgcagactatcgactatcagaccagccaccggtcgattatcctccctggtctaattaacgttggcgctttcgtccctggccttggaagtgcagactccaaggattttgaggctgtgaccaaggcttctatcgcagctggtttcagcatgatccgggtgatgccagttggcgtcgactcctccatcacggatgctcgcaccctgaaacttgtccagcagaacgccggcaaggcctctttctgcgattacaacttctcggttgtcgcaacttcctccaactctgctgaagttggacagttgactggcgaggttggctctttgttcatcccattcaaccatctttctggaaacatcagcaaggttgccgctgttaccagccactttggcgcatggccttcgagcaagcctatcattacagatgctaagtcgacggatctcgcgtcggtcttgcttctggcaagcctccacagccgcaacatccacgttatgagcgtcacgtctaaggaggatattgggcctgatcgcccttag

SEQ ID NO: 25836 - DNA, 737 bp, Emericella nidulans
atgcatatcgagctcgtgctgtgtaagtttacgaagcactgtactgccatatcaccaggaacagtcggctaacctctctacaggggtggtcatcggtggaaatggctctcatcaggcagacttgagcgagaaaaccatgcagaacttcttcaaggtaccttaaacccagtccgcaatagaagaacgtcactgacccaaccttccagatcttccttgcaaaccagttcacctacttcgccctcagtcccgccatcaaaatctccattgtctgtttctaccgacgcgtcttcgcaatccaaacttttcaatggacctcatttgccataaataccctaatcgccctctggggtgccgccatctttatcgcttgtggcctccaatgccgccctctaaacgcctactgggaccacaccgtcgttggtaattgcttcgacagcaacaaatacattattgtcaaccaagtcttcaacgtcctcatggatttcgtcatcctcgccctccctattcccatgatctggaacctccagcgctcttggcaagacaagcttgcgctgaacggcgttttcgtcgtcggcggcgtcgtttgccttgcgtccatttaccgtatcgtcgtgctcttctggatcaaccctgccgacatcacctataccgtctatgaagcaacgctatggacgcacattgagccatccatcggccttatatgcgcttgcctttctatcatccgcggtttgtttcca

SEQ ID NO: 25837 - DNA, 609 bp, Emericella nidulans
atgctgctacaagatcccccggcgtttgccctgccagccccagctttttggcctggtcttcgaacacaccacgtcggggtcacctcgggacgcaccgcaacggcccatgaggccaatcggaagcgccttcatgcgtatctctctgcgcacccagacaccaacctcgccgacctcgcctacacgacgaccgcacgccggatacacaacgtccaccgtgaggcgtatgtggcctcatctactagcgaccttgtgcggcagctcgagaagccattagcagacaaggtggaatccgcgccgccacccgcagtcgtctttaccttcacaggccaaggcgcacagagcttgggcatggggggtgctctgtatagcacgtcgcccaccttccgtcgcctcttggactctctgcagtcgatctgcgaggtgcaggggctgccgacgaagttcctcaacgccatccgcggtagcggcgccgaaggcgctaccgtcaccgaagtggacatgcaggttgcgactgtcgccctcgagatcgctctcgctcggtactggcggtcgctgggcatccgaccgacggtgctgatcggccacagcctgggagagtatgcagcgctc

SEQ ID NO: 25838 - DNA, 895 bp, Emericella nidulans
caaggacgaaaagtgttgttgaaatgaaggtgaagcaaaggcaagctgctgaggttatgctggtaaatcacgtgacccaataccctgtcgaaatggagctcctcgtcgagttaagtgtcaccacccatctccggttccctccacctcgaaccgctgccgcacgggatcatttgagggccatccggagtgctaacaaaccgcgacaaattatggctaccgacccctcgctccaggacccccttctggcgctgcgccgcgccattgcggctggcagcttgcctaccgcgacgacatcttccgaactctcgacggagaacgcaacagatgacctggccaaggccacacatctttatttccagcatcccttaccgcaatcactcgcgctcaattcgccgacccgattcaactccagctcctccggactctcccgtggatctcccacagtatcttcttcgcgtaccagaagaaggatgttgcgattccggagtatatcgcttcagtacaggagctgaacgaggcgctaaagaagaaggagcgcgccgatggagccccagaagaacaggcgcaaaatctgacgttcgtcgagcgattggaccttatcacgtggttagagggtgcttcggatgatagtgaatatatcaagccgcttgagggcgctgggggcgttccctcatcggcgactcaagcccagacatctgctagtgctggcaccggtgcggctggtgcatctactgggcccagtgctgctcctgctgcgggggctgcaggaggaagggctggaaaggtcattgatcccagacttcaggagatctacaatggggaacggaaaatgggagaccgcaacagtgttctacgcggcattaaacagacggtaagaagaattgctaaatcgatg

SEQ ID NO: 25839 - DNA, 750 bp, Emericella nidulans
atgtcggacctcgcaacggcgccctcaccttcttaccctggagccccagggctcacctacttcacgccggccaccaaccctggcgcagctataaacccagcagccaaggaaacaccaaacctctttcgcccgctcacaatccgctcggtaacgctcaagaaccgcgttatcgtcgcgccaatgtgcatgtactctgcagagtccgacccatcctcaccctcagtcggcgccctgacggacttccacatggcacatctgggccactttgcactgaagggggcagggctggtcttcactgaagcgctcgctgtccagccgaatggacgcatctcgccgaacgatgcgggaatctggcaagaaggtactgagtcagagcaattcaaaggtctgaagcgcgttgcggatttcgtacactcccagggcgcaaagtttggtgtgcagctggcgcactccgggcggaagggaagcacggttgcgccgccgctggctgcgtcaagaggggtgagggctcttaaggctgatgagggggtgtttgggtggccaaaggatgttgttggcccgagtggcggggaggagaacaagtgggagcctgggaatatatcatactgggctcctcgggaactgaccgtggcagagatccaggagatcgtcaaggcgtttgcgaaaagtgcagagattgccgttaaggcgggtgtggacgtgatagaaaaccacgctgcgcatggctatttggtgaatgagttcttagcc

SEQ ID NO: 25840 - DNA, 884 bp, Emericella nidulans
atgccggctgctgcctcgacctcccgcgccaacggtcgctctagtggctctggcaacccaaagttgcttgtcgtcctcaaactgccttccagtctattgaaggacttcgtgcccatcatagacagcaaagacaagagaaggaagagcagcggtaccgctgccagcaacaagaggaacgagtcgaacgccgacttccttaccaagaaggaagaagtttccccttcgcccaccctcatccggggtagagcctccacctgcatcctcggtgggcaacgcctctgacgctgcttctacaccggtgcccggcactgctgccgatgcggatgcgaatcgaaagagccttcctggcctgaaagctggtgctaaaagaagccttaacgcgacctcagacaactctctaaagccaagaggaaaacctggccctaagaagagacctaggctgtatgtgacccactgatatctcttaaaatgaaagcaaggctgacatggctatgattagtgaggatggtacttctgaaaatgtcaggctaagcacccaccgacttggccccaaggccaacactggtgcaattaacgccggccttcgtgcgctcgaccgaagtggaacaccatgccgcagatgggaacgcaaaccattgcagcttaagagcttcaccggagtacaatggcaactcccttcctggcgagctcctcgcacccagacgcaggaacccaacggagagacaaaagagggcgttctcgaaaccggtgacagtgacagcagagccaaccaaagtgcaagcggagcccccagtgaaaaaagcaactcaggcgatggcgattccaccccggctcatcccagcatggtcgatgcatcatcgcctgctatcgctatggccgcgtag

SEQ ID NO: 25841 - DNA, 441 bp, Emericella nidulans
attcaattacggagaaagagggccgcgagaagtgggagacaaaagctgcccaaatccacaaggtaagtgcttaacctgtacaagatattagtcacatgatacttatacttcaatagctcgttgagtcgaacggaatggaggtcttctcgaagtatttccgacgcctgcttacgggcaatgcgccccaaatcttttctgggctgcacatgtccgttgagaatgcaagaaactacccacttttagttcaggagatgcaaaaggtttcgcaggacattgaaccagcccaaaagatagcggagactgtcgatgcgtcagaaggcaatatttttcgtgatttcgatctttctaccttcctggatcatttcaagcttgaccctatcgtcaaggtttccctggccttgacattcaagaccgcgaataagtcggacttgcgcgtgaaag

SEQ ID NO: 25842 - DNA, 513 bp, Emericella nidulans
gcatacctccaaatcccatacctgatctccctttctggcctcgtgaacaactttctcccagattatcccttctctaaaaaagcgaccttccgtctcgtccgcaaactagactcgttctttgcgtcgctaatactaggtgaagacgccgagacgggccagctgctttcagggttcgaaggtaggcgaaatgtcgtttcgatgacggagaaggtgagaatcaagagtattgccgaaacagcgagggtgcttgttgttgagaagggggatagtagtgatccgggtgcaggtggaaatgatgactctgaggatattgacgatgtcgaggacgaggacgaggtagatttggactttggattggaagcggacaggccagagaagtgggagatggagacagcgagagtttatgagaagacaatccagttgttgggtgatgaattgggtacagaggtcgagttttgtgacgaggatatggcgcgtggtgaagaagagaatagcatgtctgcgagtccatga

SEQ ID NO: 25843 - DNA, 1497 bp, Emericella nidulans
gacaaggtggttgtcaagtatgccttccctagtcccagcgagttcaaaaaccggttctacgtcgcaggtggtggcggttactcgctgtctagcgatgctaccggcggacttcagtacggtgccgtgtccggcgctaccgatgctgggtacgacgcatttgactactcgttcgacgaagttgttctctacggcaatgggagcatcaactgggacgctacatacatgttctcataccaggctcttggcgaaatgaccaagcttggaaaagccctgactcgcggtttctacggcaagtcgtccgacgctaaggtgtacacttactacgagggatgctccgacggtggccgtgagggtatgagccaagttcagcggtacggagacgaatatgatggtgctatcaccggtgccccggctttccgtcactcgcagcagcaagtcaaccatcttttcccagcggaggttgagtatacccttgactactacccacccccctgtgagctcgccaagattgtcaacgcgaccatcgaggcttgtgacccgcttgatggacgtactgacggtgtaatctcccgtacggatctctgcatgctgaacttcgacctttcctctgttatcggagagtcgtattactgcgctgagcagaactacacctccctcggcttcggcttcagcaagcgcgccgatggaagcacaaccagctaccagcctgcccagaatggcactgttagtaaggagggtgtcgctgttgcgcaggctatctataacggtttgcacagcaccagcggcgaacgtgcttacctctcctggcagattggttctgagctctctgacgctgataccacctacaactctgacaccggaaagtgggagcttactattcagtcaactggaggcgtcttcgtggccaagatggtggagcttcttcaattggacaacctcgagagcctggaaaacaccacctacgacactctgatccagtggatggagaccggtatggtccggtacttggactccctgcagaccactctccccgaccttaccaccttccagagcagcgggggtaagcttcttcactaccacggcgaatccgacccctcagtccccgctgcgagctcggtccactactggcaggcggtgcgcagtatcatgtactcagacgtttcatacaagaagagccttgaggaaatgcaggactggtaccagttttatcttatccccggtgctgcccactgcggttcaaactccttgcagcccggcccctacccagagaataacatggaaatcatgatcgactgggtcgagaatggtgtcaagccatctcgtctcaatgccacggtcagctccggtacctatgaaggtgagactcagatgctctgccagtggcccaagcgccccctgtggaaggataacagcgacgacttcgagtgtgtgagcgatgcgaagtcgatcgagacttggacctactctttcccagccttcaaggtgcctgtttactaa

SEQ ID NO: 25844 - DNA, 767 bp, Emericella nidulans
atgtttgttcagtgggcaactcgatgcttgccgggctttagtatcctcgctctgctcgttctcctgctgagtacaagcgatgctatgccagggccatggagagacccggcaaaggacaagtctgacagccctgaactcaatctagcgcagaaaatattcatcttgtactcaatcttagtacatctgaatacccttctcttcactggccgtctctcgtgggccttgtcgtacgccttcgccgagacatccaaggtgctcaaacggcgagaccactcgctgagcggtgcttggaaacaaagcggccctcatgatgacccattttcaacggcgttgaacaagaaatctcctcgagtttctgttgcagaggttgcagaagaagtcactcacgccattatcatccccaactataatgaggacatcgacactctgcgagagacgctcaacgtcctcgcccgccatccacgagcacgatcacagtatgaggtaggaactagcccgagcgttcaggcaacgggctgacagattagatatacctggccatggagcaaaaggaggtctgcgctgccgaaaaggccgagaagctggtgttctcgttcgagaagtctttcgctctcatacagccgacctttcatccaacaggacttccgtctgaaatagcagggaagagctccaacgtcgccttcgctgcacgccatattgcacagatccaccaagcagagctcgaggcaggtacctgcgacgtgatcatcactgtcatggatggtaag

SEQ ID NO: 25845 - DNA, 1220 bp, Emericella nidulans
atggcttgtggaatttctgtcgtcctggggcctcgagctgtcgcggggttggatccgcgacggccacagcccaaacaccgaaatgacgcctcttctcgtccatctccttgctatagattgagtaactgacgtctagcgcccgtttggctggcattgctgccggtcttatggcgccaattattcccagtgctgatttcggtctcatcggtctggccgttatgggccagaacctgatcctcaacgctgctgatcacggtttcactgtttgtgcctacaaccgtaccacctccaaggttgaccgtttccttgagaacgaggctaagggtaagtttgcaaatcccggcgcatccggagacttgacagagcttgagcgggaactgattggttataggcaagtctattgttggcgctcactccgtagaggaattctgctccaagctcaagcgccctcgccgtatcatgctccttgtcatggccggaaaccccgttgaccagttcatcgagtctcttctgccccacctcgaggagggtgatattatcatcgacggtggtaactcccacttccccgacagcaaccgccgcaccaagtacctgaaggagaagggcatccgcttcgtcggcagcggtgtctccggtggtgaggagggtgcccgctacggtccctctctcatgcccggtggtaacgaggaggcctggccttacatcaaggatatcttccagagcatcgccgccaagagcgatggcgaggcttgctgcgactgggtcggtgatgagggtgctggtcactacgtcaagatggtccacaatggtattgagtacggtgacatgcagctcatctgcgaggtaaggcgtgaaatttatcttaagaaaccaggctaattgttacaggcttacgacatcctcaagcgtggtgtcggcctctcctccaaggagattgccgatgttttcgccaagtggaacaacggtgttcttgactctttcctgattgaaatcactcgtgacattctctacttcaacgacgacgatggaacccccatggttgagaagatcctcgacaaggctggtcagaagggtacggcaagtggaccgccgtcaacgctctcgacctcggcatgcccgtcaccctgattggcgagtccgtcttcgctcgctgcctctctgctctcaaggacgagcgtatccggccagagcctcctcaacggcccactcccgagttcacg

SEQ ID NO: 25846 - DNA, 747 bp, Emericella nidulans
tcttgacccctgcggaaccacatccgactggcacgatgagcggtttcaaaggcattatgaaggatggatggcacccaaaaggccgggaggggagaaaagagagctggcggaacgatttcaagggcgtcaaccaggtggtgagtgcttcggcttgccgcacacagtacgtttactctaacactttataggcaggatggatgggtaaaggaaaagaccctaaggatgaggatagggaaaatcacgtttcccggccgctctcatcgctcaaagacccatcttccttcggtcctccgcctatgcatattaaataccacggcgctgctgcactcccaaacgaaaccacgccggatcgcagcggatcgggtgcgcccttgagccgggaacagatcaataactcgtatacccgaaaacagcaggaagaggaggaggaacggagaaaggcggaggaagctgcgaaacggcctccagtgccatatcgcgcaaaccgaacaggaatcgatccgagcactcttccaccaccacccgtccggcggactggttcagtcgcagaatcagcgccggcttctgcaggccctaggccggtaccaagtgttccgccccgtgtaccaccccggacaaacaccatcacaccagccttccatacgcctttcccttccgcgtacacccccaatcccgaaggggcagaacagtctagggccgcagatgactacttgaatcaagccgcaacttgcgtctgggcaggcccgg

SEQ ID NO: 25847 - DNA, 985 bp, Emericella nidulans
tgccagtcgcacaatgcacgctatcgagcccttctggggcccccagacctcctacctcaagtacttgcccctctagccaatgccgtcgctatactaactgcgctcagtttctgtgaagaagactacgtaatcactcgctacgtggccgagttcatcaacaccctcagcagtctgatctactgctcatttggcctgttcgggctctatcagctctcccagcgcaagcagggatctttctcccgctgcatcccgtactacggtctcattggcgtgggcgtctgctctgccgggtaccatatgaccttgaagtaccatacgcagatgtgtatgttctccctcgaccatctattattattattactacggacccgtctagcttacacaggttttcttggtccaccggcaaaacagccgacgagctttctatgcacctcttaacaacaccgcttctctaccgtatcctaactttccagaagaccgagtcgtatacccgccgggtaggggtcattctgtcaattctcttcacgatcgtcatggtcacgcatatgatcatggacgagtttctgttgcacgccgtctcgtttggcgccgcagtgctgctaatcactatcaaaacaatcaaaacaatcccgcagcagatccatgactctgatatcagactgaacatcaagatcgtctcgcggtttggtcttatttgcttcatctctggctacgcgctgtggctggttgataacttcttatgtctgtccttgacttctgtgcggagtgtgctcgggatgccgctggcattcctgttcgagttccatggctggtggcacgtcttgacggggattggcggttatatcgccgtcgctgtggttgatctgatcaccgcgggcgaggcaggaagggatcccacgcctgacatggcgtttccggtgccgctagcgacaagggctatcaggggtcttattaacaggaagggcgatgggaataagaaaggaaa

SEQ ID NO: 25848 - DNA, 719 bp, Emericella nidulans
gtgagaaacaggtctactacgacttttcgaaagattttccgacagacaccagcttcatcatccacccagacaacctgttcatggtcgcgcgcatcacaaacgacggcctataccgcgtcacgtataaagatatccccaacctctcgcgtgaagaatatatctctcgccaaccgaaacgctacgaagaaatccttccaagccacccaaaaccccatgagtacaagatcaccaatatctctccgtacaaactgcagcagcgctgcgctccttccttccgcgtgggacgcgtgcttcttgcagctgatgcggcgcatctgtgtaaccctttgtacgcactttccaaccccaataccctcccggtatagcaaaccagctaacaatatgcgaccaacagcggcggcctcggcctgactggcggcatcgcggacatcggcagcctctacgatgccttgatcggaatccacaaaggtctcgcagatgaagaaattcttaccaaatacgccgacattcggaaacagatctggaaggaaatcattgacccgatgtcgagagagaactttgcgcggctgcatcaggacgccgagactgcgagggaaaatgatccgttcttcaggctttgtgtgcaggccgagacagatgcggatctcagtagggagcttgccatggggtatgacaagttaagggttgatatgacgcagttttacaacctagatgcatag

SEQ ID NO: 25849 - DNA, 349 bp, Emericella nidulans
tgtcggtaaattcgtcgtgcataccttaacgcattgggacaaagcacgcggccgagcgctgaagcttaactcgttcacgacgacgccgaatgatatcttagctgaattcgaaaagcagacaggcaataaatggagcgtcgagtatacatccttgaaacaattgaagcagtacgagaaggaagcgtgggagaagggtgagcctgatgcgacgaccctaacgctcaggcggatctggacagagggaggaacgctttatgagcgcagggataatgaggatattggagcggagaacactaccactttggaggaggctgtcaacggggctattaagacgcaactcggacagtaa

SEQ ID NO: 25850 - DNA, 416 bp, Emericella nidulans
ggcgtctcaccgagtaccaggtcatcgggcgtcatctgcccaccgaggccaaccccacgcccaagctgtaccgcatgcgcatctttgcgcccaacgctgtcgtggctaagtcgcggttctggtacttcctgacccagctccgcaaggtcaagaaggccaacggtgagatcgtcagcctcaacgtggtatgtttcaacggcgcctatgaaggttgaacagactgttgacatccgtatcagatccacgagaagcgccccctcaaggtcaagaacttcggtatctggctccgctacgactcccgctccggcacccacaacatgtacaaggagttccgtgagatgagcaggaccgaggccgttgaggatctttaccaggacatggctgctcgccaccgtgcccgtttcggctccatccac

SEQ ID NO: 25851 - DNA, 535 bp, Emericella nidulans
ctcgaagatcgtctttttgagcagatgactctagatgtaatgcagtcgacctttgcggccaaagtccaaggaagcatgctgctggacgaactctctggccccgacgtcgaccttgatttctttatcctcttcggctccatcacgggcgtcgtcggtaacttcaaacaaaccgcgtactcggcggcaacaggatttcaatcctcgctaatccacgctcgtcgcgcccgtggcctcgtcgggagcatcatccatccaggtctcatcagcggcgttggctacataacacggaagggaagccggtgggttcaacatgtccgcaagacgacaggctctctccttctctccgagagagatattgataagctcttcgccgaggcaatccttgctggacggcctgagtgcgactcggatcctgagatagttatcgggttaccgctcatcgatcttgaacagcatccggatatcttctggagctccaatccgctgacctgggattttattgattacagcatcaaatcaacatcacaactaggag

SEQ ID NO: 25852 - DNA, 307 bp, Emericella nidulans
caaaaattaggatctttgactttgcaacaagatgaggagcaagatatcgagctgtttgactggacgaacctcgctgtcacccgggcggatattcttgagcagcgctttaattcattactcgatcgtttccgcacagccgagagtacaatcaagttgctaaacaagcaactggaggagtttataagctcaaaaaaccaacatgagcagcagctattttcgggtattgtgcagttgttgaatgagaagaagctgaaaatccgcaaccaacaacgtctgctggcctctgcaaaggtcgatccagagcgac

SEQ ID NO: 25853 - DNA, 444 bp, Emericella nidulans
atggaggtttctattcttcagcgtcagaagcgtgtccccgccattgtcgactttgtcaagtctggatcccgcttcactgttctagtgcctcgcgagaacgctaagcttaccctggttctttctggtattcgcgctcctcgatctgcacgcaaccctggtgaggcttctgagccattcggtaacgaagcacatgagctggccaacagacgatgcatgcagcgtgatgtggaaattgacgttgagaccattgacaaggttggcggtttcatcggtacgctttacgtgaacaaggaaaatttcaccaaggctcttcttgaggagggtctggcaactgtccacgcttactcggcggacgaatctggtcacgcgacggaatactttgctgccgaacagagggcaaaggaagcacgtaaaggactctggcacgactgggaccctagcaag

SEQ ID NO: 25854 - DNA, 898 bp, Emericella nidulans
cactgccaattccaacactcaagtatggttcaaccgcggtctcatctggacttacgcctttaaccacgaagaagcagcaacatgcttccagaccgccgtcagccacgatccgaactgcgcaatggcatactggggtcttgcatacgcactgggcccgaattataataagccatggcagttctttgataaggtagaactggaacacacagtgcggagaacacaccaagcagctcgcgacgcaaagaggcacgccatcaccgcaaaagacgtagaatcagccctcattgatgcagtacagcttcggtatccagaggaaaagccgggagaggactgtacggcgtggaaccagggatatgccggagccatgcgcgatgtgtacgtgcggttcccagatgatcttgacgttgcagctctctacgcagattcgctcatgaatctgacgccttgggaactatgggatctacggacgggacagccagcgccaagagctcgaacgcttgagattaaagatatccttgacaaggcacttgctagacctggtgggttagagcatcccggtcttttgcatctgtacatccacctcatggaaatgtctggcgcgcctgagaaggcgttgatagtagcagatcatcttcgaggtctggttcccgacgcagggcatctaaaccacatgcccacgcatcttgatatcctatgcggtgagtaccgacgggcgatagcttcgaattcagaggcgattgagtccgacaaacggtttgtgaagagagctggggcagtcaatttttacactttataccgagctcataactaccactttcggatttatgcggcgatgtttgccgaacaagacaggggtgcgttggacacggcgaatgagcttgagagctagattccagag

SEQ ID NO: 25855 - DNA, 348 bp, Emericella nidulans
aaaatggaatatctccgcctctactttttcacctacaattgtgcccttagcttcatcaatgtagaacacttttccagtcacttcttcgacgcctaccccctcaccgacaatctcagctccccccctgagctcatcgtgctcagtctgcaagagattgctcctatgccatacgctttcctcggcggctcgttcttagctccgtacttcgcctcttatacccaagccgttaaccgcgccactgttgagcgcttcaacacccactatgtcaacgttctggccgatcacagcggcatgaccggactcttgatctttgcacggcgcgacattgttgaccagttgtcactcctg

SEQ ID NO: 25856 - DNA, 618 bp, Emericella nidulans
tcatccgactctgttctcgtgccctggccgagcgacccgctgcaatctggcgaggaggccactgtccgtgtgcgttcattcggacgcgctaaccagcccgatgcgccgtggtcggaccctgttactgttgagccggggctgctggacgaagacgattggcagagcgctgtagcgattgtctctgaccgggagacagaggtcaatgctacccatcgaccgatctacttccgcaaggacttcgatgtagatgaggagatcctctccgccagactctatataacggccttgggtgtctacgaggctgagatcaatggccagcccgttggcgaccatgtcctggcgcctggatggcaagcatacagccatcgccacgaatacaatacctacgacgtcacggatctgctgcaaaccggcgacaacacgatcggagtcaccgtgggcgagggctggtacgccggcgcgctgacctggtcgatgacgaggaatatctacggggacactctcggtctcctctcactactctctatagccaccgctgatggcaaaacgatctacgtgcccagcgatgagacctggcagtcttctacaggcccgataattgcgtccgagatccctata

SEQ ID NO: 25857 - DNA, 339 bp, Emericella nidulans
gagagcacgcttgagttcccgactgtcctgctctacccgatggatgcgcagtcggatttcatcaaggggttccccgaggccacttctatcgaagaccatctagagtatattttcccgcttccgtgggataccaagaaggagtacacagtgaagaatgtggattgctttatggatacatatacgggtgggctgatcaaggcgggcaagaagctgccgctcctgcagatcctcagcggcagtaatgttgagattgtggatgagctggtgaagatctatgtggtgccgagctccaagagtaaggagtttattacagcgatgaaagcgaggaagacgggttga

SEQ ID NO: 25858 - DNA, 329 bp, Emericella nidulans
  unsure (1)..(329): unsure at all n locations
aaattcgagccgctattctcgagggcgatatcgatagagccctcaaatacaccaacgcctactatgctaatgtgctgcaacagtatcctcacatacacttcaagctacggtgccgaaagttcctggaaatgatgcggcgatgtaccgagctgtcgtcgtctgcaaaaaaaggcaaaaccaccaatggtttttccgacagtgccgtattcgacgaagagatggagcttgatgagcagatgcaagaccgcgaccgatgggacgctgatggaatggatagggangagacagagactgccactaaaacgaacgagctttttactgaagccgtg

SEQ ID NO: 25859 - DNA, 1072 bp, Emericella nidulans
atgtcgagtcagtacgctgagagtttcaccctgctagggctgggcctcgtcttcatcatcgtccgggtctgtgtacgctggacgcaggttgggccgtcaaatttccagctcgacgactttttgatgctctggctggggtacgttcccttgtcgtcatccccatgcgtctgctcacagtttttgatgctctagatagtcttcaccatcgaagtcacgctcgcgtatctggtcggatccaagtatgacggtctcacgaacagttacatgaccgacgaacagcgcgcggcccttgaccccaactccagggagtactacaaccggatcatggggtcgaagatccaggttgccgggtggtcgctgtacgtgatggtattgtggctgatcaagggcgcgctggcggttttctattcacgattaacgtacgtcgcttgtctccattctctgttttgctggagctgaaagaaaacgttttgtttttgaaaggaaaactggattgatactgagatgctgagatctgctacagaacgggtctaagccacctcccgtctcgtgtgcgctttgcatatgtcctcctcgccgtgacatatctcgctgtggccttgacgctcatattgagctgccagcctatgcggcggttttggcagattaacccggatcctggcagtgcgtcccctgctcgctcttttcttcgatatagcgcagcctttaacatgatcccgccgcagatttatgccaacccacccgctcaatggcctacgtcctcgtcgtcatgattcccaatgtcctgacagacctctacctcatgtccattccacttcctctcctctgggcagtgaagatcggcattcgacgcaaaatcaccctgatgggtctcttcagcggtgccatcttcattggcgttgccgggattatccgcgcggtgatcatcataactgtacgtttccctaggcccagccatctggccttcaatcgtctgcaggaagaaaggaaagggacgagaaaatttcagatatggataccggttgctaatgaaattaacgacaggccggtcccaacggcgcaattgaaggaa

SEQ ID NO: 25860 - DNA, 781 bp, Emericella nidulans
ggaggggaggcgtacctcggctctgcggatatggaagtcaagtttgctggaaagctaagacccgatactctatatgatcaggatgagcttctcaactctgttatcaaggtacgtgtaaccctttcctagctctcaacagcctgactaatggtatcagaacttcgaaagccaaatatttgcgccggggcagccggtactgatggatcatcatggcgtaccgcttcagctaacggtcaagacgatccttcgtgtcagcctgacttcagaaaaggataccagtaaagtgccggagacggaacctacagccaggggcatccttacgaagcatacgttgatcaatttcttcaaagatcctcagagtgagatccagataaagccggcaaaaaaccggcctgcagcaaatgccatcattcaacccgacttcaacactgagaagatgggaattggtggtcttgactcggaatttcacacgatcttccgccgcgccttcgcgtcgcgtatcttcccacctgatattgtgcagaagcttggtatccagcacgtgaagggtattttgctcttcgggccgccaggaactggcaaaacgctgctagcgcgacagatcgggaagatgctgaatgctcgagagccaaagattatcaacggcccggaggtactgaacaagtttgtcggacagtcagaagagaacatccgtaaactttttgccgacgcggaacaagagtataaggagaagggcgacgaaagtggactccacatcatcatcttcgatgaattggatgct

SEQ ID NO: 25861 - DNA, 842 bp, Emericella nidulans
agaattccccgtccgagaacgctgcaggactacgacatgcgcgagtttctagacgacgatgagcgcgtcttctcctcgttcgctgagttagtcggcctcacgcgagggctcgatcttgccctcgcagctcgccagagcatgacaattgccaatgcgcctgccatctgcgcaaacacagacgccaccgtcacagcttggcgatctctgctgcatccgtcgaagaaagatctcgtgcgggcagatgggactgtagacgaacttctgttcaaagcaaacatgataattcaaacgtactctccctgtttcaatagcctgttcctgtgagtgcacgtgctaactagtatcagatacgtcgtcgagctgcaccgccagctctcaaccttatcttacacccccatcgagtctatagcccattgctcgcctcctccacccccagagagcctccgaggctgcaacacaccggaatgccagcttcataccgcaaaggtgctgcgcgcgatcgatgcctttgacgaccttctaacccttcccacaaacatagcaacgcatactcccttcattatctgcatgatctccaaccttgttatcgcgcatcttgccgcttgtcggttccactaccaaggccaggcgctgaagctagcgcgggagcggatccggctcagtatgggtgctctcaaggtcctcggagagtactggtccatgggacaacggacgtatagggaggtcgggatagtcgcgcgggagattctggggttgaaagatgcgtcgaaacgtcaacagcatcaggaaacaccggccaggcctgcaaccgtggattttacgagcacgagggctatcacaat

SEQ ID NO: 25862 - DNA, 482 bp, Emericella nidulans
cccgcagaggtagttggcccggaaagtccaagcgtctatcaaacgatgtataggagtctctttgaccggaagcaatcgccaacgattgagccagcgaagaacatggcaaggaacggcaaacggacacgtaacatgttctacatcgtgcttcggtaggtacccgccgccggtgcccttttgtcgtatgaaggctgacgatggaggattccagacatggtcatctgatgctttatgacgacgcggaccaagtggaggtcagatatgtcatatcgcttgcccatcacgatgtgagcatatatggcggagaaggggagataccggagggcgaattatggctgaaacgcaatgctatcagtctttcacgacgactcgactcgctcggtgatctcgggggaccaactcctccattcttcttcttttctgagaacttgtccgacaaggaagatttctattttgccatgcttcagaaccaatcgaagatg

SEQ ID NO: 25863 - DNA, 462 bp, Emericella nidulans
attgaaggcctcgagaagctcctcaagtacgccaaggtcaagcctcatgtcaaccagatcgaaatccaccccttcctccccaacgaggagctcatccagtactgctggaagaacgacatcctgcccgaggcctactcccctctgggctcgcagaaccaggtccctacgaccggtgagcgtgtcagcgagaacaagaccctcaacgagattgcccagaagggcggcaacaccctcgctcaggtcctcattgcatggggtctgcgccgtggctacgtcgtcctgcccaagagctccaaccccgcgcgcattgagtccaacttcaagaccatcgagctgtccgacgaggactacgaggccgtcaacgctgtcgccaagggccgtcacttccgcttcgtcaacatgaaggacacctttggctacgacgtatggcccgaggagaccgccaagaacatctccgcctaa

SEQ ID NO: 25864 - DNA, 780 bp, Emericella nidulans
agcgtcaaacttgtgctggcgtccttatacacgctcagtgggcaacggctcaaagcacaagaaatcctgcgctcagaaatggtcaccgcatttaacattcttgtcgacgatgacgatggaaatgactgggagggcttttctgccatccgtaactccctcatgcatactgaagacttcgaaaatgcgcgcaaagcatgcctgctgcttccagaacggaagttcgatttgggtgtgctgaaggcgctcttggaaaacgaagacccttcccttgaggcagccagcacgcatttggttgagttctacgagaaggaatgtcaatccgaccaaacagctatggaccgattcaacaaggtcgctgaagaaaccgaaaggcttcgagcggccgcggaacccaacagcaccgaagctgccctgtggactggagtctccagaatcctcgaggggtttcacaagcttgacgaccttcccttcccctgcaaagcgtgctggaaacgcggtgtcggcctcaacttttgcaaatattgcgacagaatcgacctctgcgatgcgtgcttggctgacctgcaagctggaaaagcgagcaagccgtttgtttgcagcaagctgcatgactggatccggttcgagtcgtggactctagaaaactatgtccttgcctggaagagattggttcctgtaactgctgcggatggaagccagcaactgatcagcgcttcgaaatggttggggaatctgtgtgatgattggaagctggataagtcggaatggggcttcgagtaa

SEQ ID NO: 25865 - DNA, 634 bp, Emericella nidulans
atggctatggttggtgcaacccggggttcgtgaatcacgttacgcatcaacggcggtccgcagcgactgctgcggaagttgcgactcctgtgaaggcatccgctgcggaggctgccggtccattggcggagtataatgcgcgggttgagcagggcagactgagagatgatccttatcagaggcagatcatcgagcagctacaagatttgtatgaacggctcaaatcgtataaggcccctgctgttgtacgcccgagtatagagtctctcgacgccgctccgaagaagtcgttttttggctctttgttcggcaaggcaccggcgaagccggagtcatcgattccggaggacctgcccaagggtctgtatatgtatggggatgttgggtgcgggaagacgatgcttatggatttgttctacgagacgctgccgagcaatatcagatccaaatcgcgaatccattttcacaattttatgcaggatgtacataggcggatgcatgtggtgaaaatgaagttcggcaatgatttcgatgcgctgccgttggttgctgcggatattgcggagaaatcgagtgtgctatgtttcgatgagtttcagtgtactgatgttgctgatgccatgattttgcggag

SEQ ID NO: 25866 - DNA, 858 bp, Emericella nidulans
atgaattcggagattcaaaacttgacacacaaaacacttctgcaattcttagagcttttgcccaacctcaaggaatgcttgctacaagagcatctcgaaggagacattagcgtagaagtgatttctaagctgttcaacgggcttccgaatctggctgccgttgacttctgtggtagctcctcatcacacttctcgactgttttccagcaggctttgaactctgaacctggtcttcctttgacccttccaaatctgcgacgagtgtcgttccacgaatgcagcggcatcccgtcttctgcctttgaagttctcctcccacgattggtgaatctgactcaccttgatgttagccacactcaggttagtgaggatgcgctgttttcaattccggaaactgccagaattacccaccttggactttcacgctgcatccgcctaggcggaccgcgggtggtggagtttttgacgacacatccagctgtgcgcgactcgctggtttacctcaacgtcatgactgatgcatcgcggtaccgacttctggaggaagaagatgtgaagaagctgcttccaaaacttccaaccactcttcgctccctcaaccttggaggtgcaagagtcacctcggaacacaccgatgctttgattcctctgactaagcacttggaagagctgggtttgagctctgcggatctgtcggcacaggacctcaaccgcttctttgcaccaccgcccactagtgaaacatctgaggtgacatcctgggtgccttcttcgctttgctatcttgatcttaccaaagtgcctcagctctcagtgggcatagtgttcaataccaactcctgcctactgctcacaaag

SEQ ID NO: 25867 - DNA, 320 bp, Emericella nidulans
acgtccccgaccatatctccctctggggcttgctgttaaagatccgcagtccacttcaattgtacgccaatgtccgtcctgtccggactttccctggaaccaagagtcccctcaccacggctaaaaacggcatcgactgggtgcttgtgcgtgagaactccgagggcgagtactgcggacaaggaggacgcagccatatcggccacccgtgggaggcagctactgaggtcgccgtcttcacccgagtggcgattgagcggattatgcggtttgcctttgagaccgctcgctcgcggccacgcaagaggttacggtggtga

SEQ ID NO: 25868 - DNA, 351 bp, Emericella nidulans
atgacccctagtcccaacgacatttcgaatctcgacatcatcgtcactgcctcaccggaagtcagtgttaacacggcggacggcggccaggctgtgcccatgcctctttatcggagtccgacgacggcaacggccgagagtctgcggaatacgtcgcttcgtgatcgggaccgcgaccgcgagagggacccgcttgttgcgcccgttgatagtctcatgctgaatacgccgtggctgtgggcggactcgagccagttctccgggaatatggacgaggttgagtatcacgattcgatgcccgtggttggggatgtggaggggtccgcgtggtggaatttgggaaatctatag

SEQ ID NO: 25869 - DNA, 645 bp, Emericella nidulans
cgcacgaacttctacgccgagcagggtgggcaagaaaatgacactggacgaatcgttatcgacggacaggctgagctcgaagttgtcgatgtccaacagtatgctggttacgtcctacacacaggttatatgaaatatggctccttcaaggtcgatgacacggtcatctgtgagtacgatgagcttcgacggtggcctatcaggaacaaccataccggaacccacatactaaacttcgcactgaggggggtcttaggggacggcattgagcagaagggctctctggtctctgcggaaaaattgaggtttgatttttcccacaagtcacctgttacggatgtggaattggtaaaaatcgaggatttgtcaacccaatatatccgacgcaattgcttggtgtattccaaggaggtccctctttcaatagcccgaaatattgcgggggtgagagccgtttttggcgagacctaccctgaccccgtccgtgttgtttccgttggtgctgaattagacgaaatattgaagaacgtcgaagatccgcgttgggcggactttagcattgagttctgtggtggaactcatgtgcaaaagacaggagacatcaaggatctggtcatattggaagaaagtggaattgccaaagga

SEQ ID NO: 25870 - DNA, 801 bp, Emericella nidulans
atggcaggaccggtcgccgatcttcacccgctttcccggtctgatggttcagcttcctacaaatgccctttcactgggtcgaatatcctgggatcggtcaatgcgcctattgagctgcccgggcgccgagatgctttgaaaccggaagaggcgaccattgaagtgtttgtgaaaccaggtactgctcctggcggtgttggtgagcgatacgtggagggtattgtcagaagcgcgttgggcagagtcattttgggccgtgaaaaaggatacccaagacggggggttgttatcaccttggctatagtcggtggagagggcgtggccagaggaggatcagtatgtttgttgataaattaataagagccatggctaacttgtggattgtaacagtacctcccgttgctccccgcgctccttcatactgccaccctcgcgctgttatcagcttccgttcccctgtcggtcacactgtcggctacgatccttgccgtcgatcccgccggtaaaattattcgcgagccgtccaccaaggaggcgaaggctgctgcctcccttcatgtcctcgctttcacatccaaagggcacctacttctcaacgaaagtgagggtgcgtttacgtatgatacatgggaggctgtatatgagcgcgctctggttatctgtcttggtagttccgctcttagttccgacggcgatgtggccatggccgagtccacagagagccagcccctagaaggcatactacgcgacaccgttgaagaccatattcattctgaatactcctggaagcttgctgcttga

SEQ ID NO: 25871 - DNA, 396 bp, Emericella nidulans
acgcccttgaacactccgaggcaacactctataagcccccaaaagacgagaagcgctcctgcgtctgccaaagtgcgcagtccaggcagatcgccaacaccacccggagctaagatcgaggacttgcttgcttggagcgactccgagataaccggtcacaatccgaccgatcctgacgatgacggctacggtatcaacggcataggctttaagcctactgcggcaattgcttgggctcggtcgcagaaaagaaagaagcaagttgcagaatggaaaagtcgagaagcaagggaagcgcgcgagaggcgcagagagcgacgggttgccaacaacatggatcagttgcggacagttcagtcaggcggcatacagaagaaggttaagttcgacgtctaa

SEQ ID NO: 25872 - DNA, 653 bp, Emericella nidulans
atggcagacgattcacgggaaccgataaaacctacccaatcgccggataccactgagcaattatccgagcttccgcctaaatcaaagccaaagtatgagcttccgaagtcgcaagtcgggaaattatgggaggccttcggcaacccggaggaccaggtgaacatgctacccacagcgcacgggaaaaaagcaaacgatatttcggttacggaagctatgaaatcgttacctctgaatagcgcaacctcattctacaaagcaccgtgcgcgcgcgattctcttcttcttggaattggtgctggcttcggtgtgggcggggtgaggggtgttttgggaggtaagaatatatctcgtgtttctacaactacaagttgtgtctgacattgatttattcaggtatgcgatctatctggtccgcatgtaattgggctgttggcgtcttcgctattacgtctctcgcagcacatgaattctgccagcgacgtcggatacaagaattggatggaatgaaacaagctgtggaaatgatgaaggagttgaaaattaagaagcaacgagagaaggaagaaaaggctgcggaggccgctcgtctagccgaggaggaacggaaacgcaagagctggaccaatctagcaaactacaagttctggtag

SEQ ID NO: 25873 - DNA, 1297 bp, Emericella nidulans
atgacgacttcgcgctggtggctatatgtccaggcggtcttctggcgttgtctgatgcgcctgggcatgatcttccataacattccgcatccacggcctccgagtccatcgttctcgcgctccttcccgtccggctcgtcgaaagtggttttacaattctactgtccaccgggttactctcagacccgtaaggagggccgtcggctgccggtggtcgtcaactttcacggaggcggatttacgctcggaggtccgtcagacgactccagatgggcgcaggccgtcttatccgaggttggcgctgtcgtcgttagcgtgggctatcgccgggcgcccgagcatccgtttcccgccgcggtcgacgacggagttctagccctgcagtatctggccagtcacgcggtggagttaggcctggatatctctcgtattgccctcagcggattctccgccggaggcaatctggctgtaaccgtgcctctgcgttttcgggatatgctgattcaagcggaacacgagggctggctgagccgcgctgactctactgtccagctggtgtctccgactgcgagtgacttgcatattgttgcgctcttctgctggtacccaatcctcgactttgaggagccccgtgagcatcgtcgtgcaatgagcatcgaacccaacaagacacttccgtctttcttcacaaacctctttgacgaatcctacctcccagatcttgagcagcgaaagtcgccgtatgcgtcgcctgtgcatgccacagacgacgcgctgcgcgattctttgccccacgatatcttcttcttcatctgcgaatgggatatgctgctaaacgaaggccagttgttttgccgtcgactgcaggatatcaacaagcacgtgcgggcaatgatggtcgagaaggcgcggcatgcttgggacaagtcgcccaatcccttccgcaataccacggaagtgaacattctctataaagacgcttgtgctgacatgaaagcaatttttgagaagtaaactcttctcaagtccgtattttcaaatcacgtccatggttatcatttcgtattcttagactctggtgcaggcactatcaacggcatggcgtttaggttagatggctctgatattggaacttcattgtacagtagtacttccagctgcagatcaccgaatatgattatttgctgcggatctcctaaggtcaattcctcgtttaggaacattcgatggatcttcgtattcgacgatgattctgctcgttggatgaatgctaccagccgctcatatcttatggaag

SEQ ID NO: 25874 - DNA, 477 bp, Emericella nidulans
atggctgccctaaaagaggaagactcccttcatctggagaccgtccattccgaaaaggttggagatgtggaaaggagtgaacggcccatccatgtttcggcaactgaggaggcccttatacgcaagaaggtatggcactatgtttctgactcgcaggcagtggcctgacagttgcttacaattcccaagttcgaccgtagagtcctgcccatcgtgtgtattctctatgtgctatcctatttggacagaggtaggaccccaacttctgtcttacacttaaccttccgagagctcaaacagtgcaggaaatatcggcaatgccaaaaccgctggtctcgacaaagacctgggaatcagtgattcgcagtgggcttgggtcttgaacgctttctacatctcttatgtgctcttcgaatggacgaccgtcttctggaaactctttccggcccacatttatgttacttgcttgtgcatctg

SEQ ID NO: 25875 - DNA, 1115 bp, Emericella nidulans
atgcccgtcccatatccttttaagttcaccacccccgaccagccaacctcctcctgcaatggcgaaataacctccctaacgatccaactcgagaatgtccgtggccgaatcccctctgcacaagcatcgcgccttcggacgatgatgttggaagcgcataacgatcccagcaagatcatcgctcacgcctgctcatacgacgggctgtcatcgcgtcttgttgaagaagccggtttccctattgtgtttttggccggctacacagtggccagtagctttggtctaccagatacagggtacattgcaatggaggatcagtgcaagagaatccaagaagtggtgcgcctggtcaaagttcctgtcatggcagacggggataccggttacggaggtcccatgaatgtcaaaagaacagttgagtcattcgcagctgcaggcgctgctggtattatgattgaggaccagacctggcccaagcgttagtgccgtttccagactatgttgaaaagcttcgctaacgcaaatgcaggatgcggacatacaaagggcaagtccgtcgttacccgtggtgaagcctacgcccgtatccaggcagctgtcgacgcccgcaacgaggggcaggacatcttcattcttgcccggaccgatgccctgatacacggctgggacgaagccctaacccgtgccaaggagtttaagcgcatcggtgtcgacgcggtctttgtcgaggccctgccggatagggagtcaatgcggcggtgtgtccaggatgttggcattcctacttttgccaatatcattgaaggtggtaagacagaaaatatctcggccaagaatctcgccgagcttggtttctgcgctgtagcatatccttggacgctggtcgccgctaggcttaagagtatccgcgagacgctggacgccctgaagaagagtatgactgaaggggcaccgccaatgattttgagctatgcagaggtctgtgagggggttggcttcaacaagtactgggtatgtaccgtcttcttgtcctcagacctttagttaaccttgtgtaggaacgtgagacccggtacgagtacaatcaggatggtctagtcaatccgcccaactga

SEQ ID NO: 25876 - DNA, 375 bp, Emericella nidulans
cgccagagctggtctcatcatggcgtcggaagaggagggtatcaactcgcgcaagaggcgcaagcttgaccctccgaaagccaccccgtatatcttcaagccgctcttcgaccaggtgcccgtgacagccgatgatgcggcggaggacgtacatattacttgcgtggagtattggagtgagtcccgtgcttgacaggatcaaaggaaattgacagcttatctactatagatgataatttgtatatcggaacgtccgctgcagagatcctgcatttcgtctgtctcccgcctgacccgtccgactcgaacgaaccgtccttcatcctcgcttcgagattacctattcactactctcagacctcctcggttccaact

SEQ ID NO: 25877 - DNA, 233 bp, Emericella nidulans
ctagtctatacgaccgcggtggcgacatagcgggcggacagtgggggaaggatgtcctcaggctgattgatctgctcggcgagaagaatgtgttcttgagcatctacgagaacgatagcgggccagcaggcgcaggcgcattgctggaccttgaagctcaggtgccttgcaataagtcgatagtcttcgaggacactttggacttggatagcttgccatcggtgaccttccct

SEQ ID NO: 25878 - DNA, 790 bp, Emericella nidulans
atgccgtcggaggcaccaaatcggcgaaccagtgattacttctcagattcagggagcagctctattcggtatgcatatgagtcggctgggcgtattgaagatatagagaagtataagcgtgctgctgagcaggagcgcgcccaacttcgcgctgagctcggtcagagacttcaggaggaacgtacccgtcggacggcatcggaatcccatgtccagattctggaagcacaggttgctcaggtaggttgccagactctgttgaaggggaaaattgtaactgaccgtgctgcagctccggcgtgaaaggacagaacattctgacttagcctccaaaactcgcgagcttgaaagcgccctggaaggcacccggcgcaagctcgctgaagaacgccagatcaaggacaacttcgaggatctcctaaccgccatgcgcgttgaactggaacagcttcgcacagagcgggatttgcttcgcgaaggccagccccttagcgaccccgccgaagtacaacgcctgaaggaagaaatcgaagccttgaagattgagaatgcagccctctctcaacttcaaggcagcagatttgcttccattgcagaagaagaggggcctgtgaaacgaaacagtgccttcggattgtcccgctcaaactcattggcccgcatgcctcggaagagctcatctcgctccggctcactatcacgttcgaattcggtttccgctaaggatcgtgcaacgcctccacaggaatcgctggcggaccgggtcgaaggggcggaacgcacatcgtga

SEQ ID NO: 25879 - DNA, 382 bp, Emericella nidulans
atggttgaagtctttgaagcatggttcctcatgtcatgggggaacggcccgtcaaaagctctatctttacggtttatgtgggctatgcgtaatgctactggtaatggaatttcacggccttgttccaaagtctcaccggacacagtcttcgctcgccaccgggtcaatgatgcttatatgggcactgttctaccagttaacagttggaaccgtggcatactctctcgtcgcagaaatctcgacacgccgtatgcagatcaagaccgtcgttctcggccgtatcctatacaacattgttgccatcatatgcggtgttctcacgccgtacatggtgaacccgacggcttgggactggggcaactttgctggtctaataaaggga

SEQ ID NO: 25880 - DNA, 1048 bp, Emericella nidulans
tacaactggtctcagctggacaatatccgcgcagagaggttacgacgtcgtgaagactggatgcgaggaccgcttgcacctcagcgagatgcagggttagacggaaaaatgtttggtgctctgagtccgcaagcaatgcagccaccggctattccgaaacatctgcggagaaagtatatcaactttgccccgggtgaccgggtatgtattatgaagggaagagataagggaaaaatcaatgtggtaactcgcgtggatccggagaatgagactctgacggtcaaggattgtaatgtggtatgtatctgacgccaacccctactcgagaggtgaagtgaatggaagagtatgatgttgtattaatattacccagcccgacgtctactttcccgagtggctcagcgaacattttggcaacaaaagccccttccagaccgtgcccctccccatctctattgacgacgtccgcctcgtcgtcgccctcgacgacccagccacaggcgtcacccgcgatgtcctagtcgaacacgtctatggtggcggccccctccttgaacgtgagcagggcatcgacactcctcggcacacccgctacattgctggcgaggacatcgagataccctggccgcgtcccgagaagccaaccttcaaagacgaggaatgggacacacttcgcatggaggttgaaacgcccacctgggtgccatctcttcattacgcgcccttccctcctagtgtgcttgatgaactgcgaaataagttctccaagtaccggacgcgccatgatccggagtttgtggagcagaagaagctagaggaccttaagaaggagtatcttcagagcaggtctttgatgacgccgaagggggagcttatggctatgattaagcagaagaagaaggaggagttggaaaagaggagagatgctgatggaaatttaatgatggatgagcagacgttgtcgttcattgagatgtatatgaaggagaattcggtgacgaagaagactaagaagattaaggaggctcagactgttcgattgagctaa

SEQ ID NO: 25881 - DNA, 742 bp, Emericella nidulans
ctggaagaagagcggggtctggctcggcacgccatgcgaatctatgaacgcgccactcgggcagtgtctgacgaagatcggtttgagatgttcgagttctacattactaaatcagcttccaacttcggattaccatctacgcggccaatttatgagcgcgcaattgccgctctgcccgaccatgaggctaaagaaatgtgccttaaattcgctgagatggaaaggagactgggcgagattgaccgtgctcgtgccatctacggacatgcatctcagttctgcgatccccgcaccaatgcgcccttctggcagaaatgggaggcctttgaagtccaacatggaaacgaagatacatttaaggaaatgctgcggatcaagagaagtgttcaagctcaatacaagtatgtatacctaaataattacattgagatatcccacgcaaggctaactaaaccgccatagcaccgacgtcaacttcatcgcctcgcaagccatcgcccgcagccaacaacgggctccggaaggcgaagaagccacagccgcagcggagagagaaatggacaccgaaaccacagatgccatggctgccttggaacgacaagcccgtgcgcctatcggctttgtcgctgctagtaccggccctgaaggcggtaatcgtgctccccctgcaggtcaaggccccgtcgccgccccagctaatcccgacgccatcgacctcgacgacgacatggaagctgactag

SEQ ID NO: 25882 - DNA, 234 bp, Emericella nidulans
atgggtattcactatttgcacttacaggtccttcgaactcgcctccgacaagccccgatggccgacggccgacagaaatacacgggcgtgctgcagagcctccgattaatggtcaaggtggaagggtttgtcgctctgtacggtggtctgaccgcgcatatgatccggacggttccctcggctgcgatcacgctgggaacgtatgagctggtgctcaagctactgagcgcatga

SEQ ID NO: 25883 - DNA, 382 bp, Emericella nidulans
cctcaatcctaccgaccatgaccgatacttccacctgactcactacaccagcttcggcaattactctgccaaatatcgctcgcgcttccggaatgatatcttccatgagcctggctcggagggatggggagatgaaataccgcattactacgtcgtgcaggatatgatgaagcttgaccctgggcaaatcctctggctgcgggagaattgtccgctgaaagagcaggttgaaacattcgtgctttctcttggggactggtttcgtgataacggagaaacttttggagatacgctggcatgggtgattaaggagaggggcgaggatttggaggaatttcgggttgcgattgtggagagggagttaggaattgcgtgtaactag

SEQ ID NO: 25884 - DNA, 2211 bp, Emericella nidulans
aatgcttctgccagcaaaccggggtttagtacgaaaagggatgagaaacccgccccgataaacacagaccgctcccaagaagttgacccgtccccgtactcgtggggtagccgccactcaggcgaaggtcttctagcagctgcggattcgccacaagaccatcctagtaccgcagaattgagcatggtacctcctccactaggaccgcgccgcaaatcgtcgccgatgtttgacgccgtaccggccagtactacctcacatcgctctctggagaaaccgagaacggcaaccgaaaagggtttgcggaggagcatcatatctccatctaaacgggacacggttgccattgacgatgaagatgcgaagctagttatggcgtctctcaattatagtaaaagaatgtcgcaagctcatactttggatgattcggcagatatgggagcggaagacgatattgctctgtttggctccgacaaaacaacaaaggatgtatctgcgcagcgaggatactttccacctgccggccccactggcgacagtgtagatgcttccattgcagcccatgcacggttggctgcggagtatgaaaataagcccgccccagcgccgtcttccaacaaagtcatgactccgtcccaattcgaacactatcggctgcaacaagaattgaaaagagcaaatgatggtgggtctgacactgatgattctgcagaaagcgactttgacgaagaggatgaggcggagaaaaatcgggaaactgagaggcagcgacggaaacaagaggctcatctgtctgtttaccgtcagcaaatgatgaaggtcactggacagcagtccccatctccatctcttcgcccggaagatcgcggcacgagcagtacgccgaatctagcgaatctctctttgcatcctggtaacccatccgggagcgggaaaagcagcgaaggggacgatgatgaggagattccgctcggcatattggcagcccatgggttcccaaaccgaaatcgcccaccgagccgtcttatgtcatccaactccatgcaaaacctccgcgcatcataccatcaaccacacctagggtctgcaggctcagattttggcggcggaaatcgaagcagcttgcccgtctttgccagaaatcttccacgggacccctattttggtgcaagcttggttgctcccgcaaacagagaatctctggcttttggaggagggggtggctcggtgtatggtggcccatcagccgctacaggatcatctcctgccctaccaccggggggattggttggcgttatcgctactgaagaacgggccagagctatgaggcgagaaagtccgaacactcaagcgatgtatgaccactcacaaggaattccgggtccaccaggaaacatgggaggtgttcctaggcctcatacgatgctcggcatgaactcgacccacgggcctagtttccaaccatcagtctccgcgacggatcaagctcagatacagctatctcagcagatgagcagcatgatgcagatgcagatgcagtggatgcagcaaatgattcagctccagggtgggcaggtccccccccaacaactcgcatcgcctggaaatctgccaatgccgtctttcccgggcaacacgaattcaaggccgtcatcaatgccctccgtcggtggagcgtttaataatgtgtctccaagctacgggggagggaaccaaaggacactaagtatgctcgaccccaatgtctcgtccaggttgaatagcccggctgggttatatgcacatggcggaaatcgaccagaaactccaggtgggcctggctatgctccttcactcgccccatcggagcgcagcaatgttgggctagcgccgcgctacaggcctgtgtctacgctgccagtcgaggctgaatcaggcagcttcctcccccagtcaaagccacggaatgacgagaaccgtagagccacttatctgggtccctctacgaatacgaacccgtcgaacacgacaatacgccctctatcctcctacggcaagactcttaccgttccatccagacttagcagccatagcccggctcaacctgatgaggatgacgatgatgaggggtgggcagaaatgatgaagaaacgagaaaagaaacgaaccaactggaaagtcaagaaagagtcatcaaactttggtgaggatctattgaatgcggtacattaa

SEQ ID NO: 25885 - DNA, 974 bp, Emericella nidulans
atgcatatgggcgcaacgtatgtttcaaaagctacctctttcatgaagtcacaaaagttcctgggtatttccggattcttctcccgccttaaggataagggtactctcgcaaaagaagcctggacaaccatctcgactgtcatcgacgcacaattgaccatggaggagatggctaaactcgaagaaaagggcggcgagaattggacggatgagatgagggccgagtattccgtaaaggtaacgggcaagcttctcgcggccgcctggcgtggtagcaaactcgagattcaaagcgtccttcgcgacgtctgtgataaggtgttgggcgacaagaagatcaagttggagaagcgcatcgagcgggctcatgccatgataattgccggcaatatctattctaaggtatgagccatctctttcctaggctggtattcttcatactgattctcttcaggccgagcgtgaccccgacgacgagggagattacatggccttcgagcagctcatggctgatgcaacggcaaagaaagcgaaggacgagaagaagaaaaagaagaagcacggtcactctgagctggaagcctccagcccgaaggccgcgtcgtagttgctcgtcatctcggaacctaccctctccccttttcgcccagtctctccccgcttaattattccccgtgtgccttggataaatatgccggatgtatctttcgtcgtagcgaattgttattctctcccgagagcgctctcttggtacgaacactcgaggtatgttaatggtaccgacacctgtgactggtatatagacggaaagtatatattttcgctattgccagcccggtgtgccgtgcacttattccacacagcgcatagcgttccacccttggctcgaagtttgcgtgaagcgtggactcgaatataagttttactttttgactatttctctcaaattccgcgatgcccataaccgggcctag

SEQ ID NO: 25886 - DNA, 561 bp, Emericella nidulans
ttatatgagctcggcaagatccagtatggtaatcgttacacaatttactcacccaaagacggccagccttgcatggatcacgaccgaaccgagggcgaaggcattggaccccaggagtacacggctatgaagctgaaggttaaggagtgggcacctaagattgcagaactcgtcaaaggcaagattgaggatgacgccgatgtttacttcattcccgctaccctgcgtccggagaccatgtacggtcaaaactgctgcttcctcggcccgaagatcgaatacggaattttcagggtcaaggagaagcagtactatatctgcaccaagcggggtgcttggaacatggctttccagggcaccttctttgacagcgagcacttccccaagactcaggacgaactgcccaccgttctgactgctccgggatcggcattcgtcggtacactcgtcgacgcacctctgtcattccacaaggatggtgtgcgcatccttcctatggagggtgtttctgctaccaagggtactggatgtcgtcacttgtgtgccctcagactcccctga

SEQ ID NO: 25887 - DNA, 821 bp, Emericella nidulans
ataccgccgactcatccgaccacgtcggtgcagcgaatgcgatcgccaggggactggtgcaaggccactcgctggaccgcccggggtactggctgcacaccggtgggacaggaatcctgacatacttcgactcggacgtccataaggtccacggcgagcacaacgacaaggtcttcaacgactacgaaggagtttccgaactgaccaatcttcccgccgctgcgttccaccgcaatgtcgacgagatcgttctcaggacgggcgttgagcatgccgaccgcgtcaagacggtcatcgtctgcccaccgaccatctacgggcgtggacgaggccccgtcgcgcttcgtggccggcaagcgtatgagctcacctcgttcgttttgaaggagaagtatgtcccaattatcgggaaaggattggcgaggtggaacaatgtgcacatatacgacctgagccggttattcgatctgcttgtgcgggcggctctggatcccgccaggaaagacgataaagagatttggggcgagaagggatacttcctctgtgagaatggagagcatgtctggggcgaactgtcgaagctggtcggcgagcaggcgcacaagttggggtacctcaaagacgctccagtggtcaaagaaatgtcggtggacgaggcgatcagttcgcctgctggctttgaggcggccagttgggggtggaactcgagggggcaggcgcagaggggacgggaagtgctgggatggtcgccagaggagaagagcattgaggaggagatccccgatattcttgctgcggaggcttcgaggctcggtctgtag

SEQ ID NO: 25888 - DNA, 2271 bp, Emericella nidulans
atggctccttcctggcgcattgtggcggtcagcgcccttgctctctcccttcctggagggaacatctttgtctctgcccagacaggatcgaggcaaccggccgcccctggttaccgcggcatgaacaccatctgcccttctgcctgctttaagactggccctgacccccttgactggtctgtctaccccagtgttgaccggacatctgcgtgcaagcaggttgttctctacagcttctctttgtatgacaaagtcgacgacaaggacagcaatcatcgcatttatgcctgcactgcttatggccatgactgggaagacaacactaaggccgaagcggctgctgctcgccctgctaagagtgtcaatgtcacctacgaaatcggatggacaaccagtgagcccggcacagaggccgactacagcttgttgatggagcagatgcgcgagtacgtggtcaatggccacgctcctacaaacagaacattcatgctgtattcgcggttcggtcagtccgttgctggtctgtacatcggccaggggctgcgagcttccgacgttgcgaatactgccatcaaaactttggactctaacaccgccgattttgatgggaaacgcgatgtcctggcaatccagctctgtggacctggctatgactctgaccatatcctggggttcatggctctcaaacatgggaccatgggcgacatccagcagacattcatgtcctggtctgatgccaagtgtcttgactttgccaactctacgagcttcaccaccacggcgccttttacgctgccccaactgtcctcgatcaaaggcaaccatactgtctcccaaaggaacgccactgtgacaacagggcaccactctaggcaatccctggcccacttggcacttcacgctcgggcatttgaatgccggactgaggtggtgggcgatggagacagctgcgccgccctggccgagcgctgcggcatctccggcgccgacttcacgaaatacaacccggacaagggactctgctctagtctcacgcctggtaagcatgtctgttgttcgtctggcgacctccccgacttccgccccaggcccaacgacgacggctcttgcgccaccaccgtagtgaatgacggccagagctgcgctacagtcgtggcggccaacagtctgacaaatgacgacattgaagagtttaacaaagatacctggggctggaatggatgcaaaaatatattggccggtagtgtgatttgtataagcaagggcacaccacccatgcccgctcccatggagaatgccatctgcggacctcaagtacccggcactgaggcacctgatgacatgagcaaactcgccgacttgaacccttgcccgctcaacgcctgctgtgacgtctggggtcagtgcggtattacccccgagttctgtaccgacacgaacaccggcgctccgggcacggccaagcccaacaccaacggctgtatttccaactgcggcaccgacatcgtcaagggctcccccccatctgaattccgcagtatcgcctactacgagggatacctcttcacacgggagtgcctgtatcaggatgccctgcaaatagacacctctaagtacacccacctgcacttcggatttgcatccatcacggagaactacgaagtctctatcggtgacgaattgatatcctacgagttcaacaacttcaagtacctcaccggcccaaagaaggttctctcctttggcggttgggatttctcaaccaacccaaggacatacaacatcttcagacagggtacacaaccagcgaaccgtctcaagctagcaacaaatatcgccaagttcgtcaaggatcacggtctggacggcgttgacattgattgggagtatcccggtgtaagttactccctcttctccaagagtagccttttcaagatgtattctgacatataacaggctccggatatccctggcattcccgccggcagtgaagatgagggagataactacttgaagttcctggttgttctcaagaacttgttgaaagacaaatctgtctcaatcgctgctcccgcgtcatactggtatcttaggggtttccctatcaattcgatcagcaaagttgttgactacattgttttcatgacctatgaccttcatgggcagtgggatgccgccaaccccaactctcaggacggctgcccgagtggaaactgtctgcgcagtcaggtcaatcttacggagaccatgacttctttggccatggtcagt

SEQ ID NO: 25889 - DNA, 1154 bp, Emericella nidulans
atggtcatgctcagcaagcttcccctttgcgcctccatattggctatactgcctgccttgacatctgccaatgcgaccttacctttcgactacaacgccctcagcctaagaaccgttggcgcccgcaacacgctggtacgtgtagtctccaacaattctcgggaaaatcaataaaaaataaagaaaactgaaatagaataactctgacacaacccaggactggcgcatctggctcgaacacaacaagcaacccatctccttctggcacgacgtcccgctctacccacacccaccaagcaggcaaatcatcaacttcgtcgttgagatccctcgtaatacagacgggaagatcgagatccgccggtcggagccgctcaatccaatttttcacgacgaacgcgatggctccccgcgctacgtagagagcgtctggccgcacaagtcctacccgttcttgtacgggtcgatcccgcagacctgggagagccctaacttcaagcatgactttaccaaagagccgggagataatgaccccgtcgatctgtttgatatcggccaggatcagggctttacggggcaggtgaagcaggttaagattctgggcgcgctggcgctgaatgatggcggcgagacggactggaaggttctagggattgatgtgagggacccgattgcaggactggtggatggtgaggggattccttttttatatacctccactaccaagaacaacgaaactgatgctgacatgtttccgagcagacttcaaagatgtcgaaaagtaccgccccggcctgatcgcttcgtaccgcaactggttcaccacctacaaggtcgcgcgcggcgactctcttatccctatcgtcaacaacacctacgtcaacgcgacctttgcggcatccgtcgtgcagcaaagccacggctactggctagacctggtcagcgggaccgtcgactcgaacgagatcaattacaaccagacctcccgcccagatattgcggtcagcttcgtgtcgaggtccaatgctaccgcgcattttgatctaccagcggtgtcagatgagcgtccggctgaggcaaagccggagcgcttcgagcagtggttttatctggataaggagggtaggcttattgaggagaatgttgttgggtag

SEQ ID NO: 25890 - DNA, 2937 bp, Emericella nidulans
atgctagaggaagacgaagactcggatgaggaagaatttgatttgcacgactacttctaccttggtcaatatctacggacctacgtcgtatctgtcgggaacaagtcggccgacgccagttcgaagagcaagaagcgtattgagctttcgatcgatccacggtccgcgaacacaggccttcagaaaactgatttggttgtcaacgctgccgtccaagcatccgttgtcagtgtagaagaccacggattggtcatggatctaggcattgaaggcaccgatgtcagaggtttcatgtcgtccaaagaaatcgatcctaggacggactattctacgattaaggaaggttctgtctttctgtgcatggtcacaggccaaaacgccaatggcaacgtgatcaagttatctgccaacctccagtcttccggatcgatcaagaagtcgcatttccttagtgtagcacctactatcaattccttcgttcccggtgttgcagcagagatcctcctgacggatgtatcatcaactggaatgatcggaaagattatgggcatgctagacaccactgtcgacttagtgcactctggtggcgccacaggcaagactgatctgacgaagaagtatcataatggtgctaagatcaagggccgtatttcgtgcacattccctggctcagaaccctacaagattggtttctcgatgcttgatcatgttcagaaattctcggctgaaggtcatgggccgaattcctccgatgatgcgcctgccatctcggccgtgatacccgaggccacaatagtgaatgtcgatccaggtcttggtgtttacgtcaaaatcgggtcaaccaagcatatgggcttcgtccatgtttcgagacttgcggatgggcaagtggaaacaatctcttctgaccatggaccttttaaagtcggcacgacccacgaggcaagagttgtcggctatagcgccatcgataacctctactcattgtctttcgagagaaaagtcattaaccagcctttccttcgcctagaggatgtcacccttggtgcagtggtcaaggtaaccatcaccaaagttctggttggagaatcaggcgttactggcctgattgtttccttgaccgatggcattacaggattcattccctcggtgcactttgcggatacacggttgcaatttcctgaaaagaaattccgcgaagggttatcgatcaccgcgagagtcttgtcggttaatcttgagaagcgcgaagtccgcttgactctaaagaagagtttattgaatactgaagctgccgtctggaaagactacagagacatccttcctggagctcaatccccaggaactattatcaatattttgccaaatggtgctgtggttcagttctacggcaacgttcgtggctggctttccgtatcagaaatgagtgaagcttacatcaaggatccttctcaacacttcaaacttggtcaagttgttaatgttcatgctttgaacgttgatgcatctcagggcaaactctcagtgtcctgcagagatcagtcattgcttgccgatagttacagaacggcctttaagactattcagcctgggcagtccgtaacaggtacagtcttcgagaagtctgacgactacgttcttctgaggttagaggatctcggcggtcttgtggctcggctgggtgtaggtcaggtagccgatggatcagcttctaaacgctcctcaactctttccaaaatccgagtgggccagaaactcaacgagctcgtagtcctcgacgtccaccgtgctcatcgcctcattcacgtcaccaatcgagcaagtctcaagaaggctaccaaagaagggaatatgccgagcacattcgaagatctccgagagggcgccgaagtgactggttttatcaggaacattacgcctactggactgtttgtgcaattccttggaggacttattggtcttgttcccagacgacttgtcggctcggaggattcgaataaatctgagttcggaaaagctaacttccaggtggtctctgcgactgtgcactccctcgacaccgatttccggcgcttcatcctgagcatggatcctgcggaagcgacacatgctggccctaagaaggagtctacgaagaaatctgcaaaggaaactgcagccgccggtgatgaatcccttgccaatccagtcgacgagaccctgaaggccaagtcagatatcactgtcggtcgagttctgaagtgcaagattaattcagttaagggtacccaaatcaatgtaaaacttgccgacaacgtccagggccgtattgatgtctccgaagtgtttgacagttgggaagatatcagtgacaagaaacagccattaaagcactttcgtcccggccaggtcataaccgcaaaggtgttgggtctgcacgatgctcgcagttacacatatcttcctatcagtcaccgcacgggcaagttcaacgtgtatgagctttccatgaagcctaagttcgtcaaagcagacaacgctacgccgttaaccattgaccaggtgcaagctggttcatcatcattcggttttgtcaacaatgttagcaatgatttcttctgggtcagtctgtcccctaatgttcgaggacggttgcgcttcatcgacgcatcggacgatatatctcttctcgcagatatagaaaagcaatatccaatcggttgtgcattgaagttccgcgtcactggggtcgacgctgagaagggccacattgatctctcagccagagaacggtctgaaagcctcacatttgatgatctgtctgttggcatggttctacctaccagagtgacgcgcgttacggacaagcaggtcatcatgcaactcaacaatacactagtcggtgctgttgacctgattaacatggcagacgacttctcaaggctgatccctttagtg

SEQ ID NO: 25891 - DNA, 972 bp, Emericella nidulans
atgtcttctgataattccggtctaaaaacttctctaccctcgattcatgcgtcatccgctcgacagtcaaacacaagcccacccaagtcaagacccagcagttctcgacgttcgccgctgaaacctaagcagaagccctcaaaaccagagacagatcctcgccatctggcaatagctctacatcatgcccaccgcattcaagctcaaaaaaatgcacaagacctcattctcgatcgcatcctcgaacttcttaccattccgtcatctccatcggccgatccagccgcgccctccgctgaggacacgcataaattcaaatcttctctgattatctttcagcctacggattatgataatctgatacaggagaggaacatcgaaggcctctgcggttatgggctctgtccgaaggagcaccgcaaagagaagtcaaggggcgcgtttcggataacctggggcgctagggggagcggacctggaggtcgcgggcgagatatgaacattgttccaaaggaaaagtatgagatgtggtgttcagatgaatgtgccgagagagcgatgtatattcgcgttcagcttgcagaagaacctgtatgggagagacgggcagacgacctgcgaggaaaagagctccttttacttgaagagggcagatcagcgaaagggaagaacgcgatgtgggattcagggagcgtcaaagaggtccttggtcgattggacaaccttcacatggacacaacgccggaacccaatgcagtagcagaagacatctcgaagctatcagtcagggacgatactcggtcgctcgagctcgctatggaacgaggcgacctgaatcctgccctccaaaacggcagggtggatatccacattcaggagaaggcgaacgtaacacaggccactgcgccggaaatgcggcctggagacgaaaggggaggctccattgaaggttatatgccgcatgaatcttga

SEQ ID NO: 25892 - DNA, 3607 bp, Emericella nidulans
ggggtcgttgccggagcgagatggatgttgcagccctgcggaaccgcatccagtccacgctagatgccaatgctgatatcagacggcaggcggaacttgatctgaaatatgttagtcctgggctacgggcatgcagatggtggttttgctaaccaaacctcttccattccgcaggccgagacgcaaccgggtttcataaatgctctgttggatattctgcagggggagcaggtcaacgccgtccaactgtcgggtacgttttgtcgactcctcatctccttgctgatgttgaatcggagcccatcggccctgtgaaattatccgccagacccgtgccttgaaccgcctttactgactggaagggatcgatagcgggtgtttacctgaagaaccgtatcaaccgagggtggtcaactattgaggatagtccgttgcgcgcacctattgcagaggaggagaaaccaggtttccgcgagcggctgattcccgccttggtttccaccccccccaacgtccgcgctcagctcgttcctctacttcagaagattcttcaacatgacttccccgaacaatggcctgggttcctggacatcacaatgcagctgctcggcactaacgatgccggttcggtctatgcgggtctgcagtgcctgttagccatctgccgtgtgtaccgatttaaagcgggggataaacgggaggagtttgacaagattattgagcactcattccctcagttgctcagcataggatcgaggctcgtggatgaggagagtgtagaggcggccgtagatgctccgcatcgtggtgaaatcatacaagcatgctatttacgtgggtgatgcaggaagccaagaagcatatgggtggttagaactgacgggtgaatagttcgagctctcacctcatcttcaatcgcaccaggcgacagtcgactggtgcactttgttcctacggatcattgccaaagaacctccggcaaattctatgatggaatccaaggaggagagagaacttgcccattggtggaagtgcaagaaatgggcatatgccaatctgaaccgtctattcatcaggtgcgtaggcctttcgcatcagtggtgcttctcacctaacatggatgtttagatacggaaaccccacgaccattcccaagtccagtaccccggactactctcagtttgccaagtcgttcattacaacattcgccccggaaattcttaaggggtacctacaggagattgtcaaatacgtttccaagggtcaatggctgagcaacccagcactttcctacactttgatctttttcgaagagtgcgtcaagccgaagtcaatgtgggatcacctaaagccgcacatggagaacctcattgctcacttcgtcttcccgattctgtgccagagtgacgaggacatcgagttgttcgagacggacccgtctgaatatctccaccgaaagttgaactactacgaggaggtctcggcgcccgatgttgctgctacaaacttcctgattactctcaccaagaaccggaagaagcagactttctctatccttacattcgtcaacggtattgttagtaagtatgaggctgctccggatgaccagaaattgccaagggagaaggagggcgccctgcgcatgattggatctctggcttctgtcattctggggaagaagagccccatcgcggaccaggttgaatactttttcgtacgccatgttttccctgagttccgcagtccccatggtttccttcgtgcgcgtgcctgtgacacgttggagaaatttgagcagctcgatttccaggaccccaacaatctgatgatcatttaccggaatatcctcgaatccatgactgattcagaactgcctgttcgtgtcgaggccgcccttgctcttcagcctctcattcgtcacgacgtgatccgcacctctatgcagcagaatatcccgcagatcatgcagcaacttctcaagcttgccaatgaggttgatgttgatgctttggctaatgttatggaagatttcgtcgaggttttctctgcggagctgactcctttcgccgttgctctgagtgagcagttgcgtgacacatacatgcgtatcgttggtgagctcctggagagaaacgcagccaagggcgaggaggacacgtacggcgatttcctggacgacaagagtatcaccgctcttggtgttttgcagacaattggcacattgattcttactctagagagcacgcccgacgtgcttttgcacctcgaaacagtccttatgcctgtcattagcatcacccttgagaacaagctttacgacctctacaatgaagtatttgagatcatcgacagctgcacattcgcctcgaagtctatttctccgaccatgtggcaggcttttgagctcatccacaagaccttcaaggcgggagctgagctgtacctggaggacatgctgcccgcgctcgacaactacgtggcgtacggttctcagacgcttgttcaaaatcctgcctacctcgcagccatcgtgggtatggtcgaagatattttcaatgatgagaaagtgggcggcgtagacaggatctgtggttgcaagcttgccgagactgtcatgctaaacctgcgcggctatgttgaccaatacatccctgtctttatcgagcttgcgatgcgtgtcatcgatgctggagaagcgcgtaccaaatcttaccgtctccatctgatggagatggtcatcaacgcccatatattacaacccagatctcagtctccaagtcctagaggccaaggggtggaccaacaagttcttcagcgcctggttctctagcattgacagcttcagacgtgttcacgacaagacactgtccattgtcgccatcacctcgctgctcactttgaaccctgccgacgtgccaactagcgttcaacaaggttggccaaggttgcttcagggagttaccagactgttccacacattgcccgccgctattcagagtatgtattttcatccagcccaagcgacttagactaacgttacacagatcgacaagaggcgacaaaggagtcggacttccaatacgaagaggaagacgaggatgatgaaggtaacgactgggagggcgaagtggaatggactgagggtgatgatgaggctggtcccgagggcgatattcccgacgagagtgctgcttacctggacttcctgaacaaagaggtgagtgatggcagcatgtgcttttcagcttgtggctaaatcatcaccaggcggcaaaattcggctctttcgctggggacgacgatgacgacgagcttgatgaggagagtttacttgagactcctctcgacaaggttgaaccatatgggctgttcaagcaggtgttcatgagtacgtgttactttattcctctaataggatttagctaacttgcaaccagacctccaacaacaacaacctcagctctacgaaaatctgacgaatattctaaacgacgaagagaagaagatcatcgagtctgtgttccatgaagccgacgcaaaggctctggccgcggccaatgaagaagctgccaaagcggctgccctccaagctaacgggaatcaatag

SEQ ID NO: 25893 - DNA, 243 bp, Emericella nidulans
aaaatgtctgctcagttctccggccgccaatctccaccccccgagagtcaaacaggcgcacaagagaactcccccccgggttccggccgcacagaccccaagttcgcccctccgccagagtacgcacccaagtcaagctctgagggcgagggtcaaagccagacggcgggcttgagcagtaacccgaagcatatcctggaggatattgaggcagcaaagtataagaaggggacaggaaattga

SEQ ID NO: 25894 - DNA, 1784 bp, Emericella nidulans
cctttgggattctccgggtccaaaggcaccagtcaccacggcttacgaagccggcttcctgctccctcgtcacattgtatcgcctcgacgccttagagacactcttaacaacatcccgcctcctgctactgcttccacgagtctcctccccgatcggcgcgttattttcgtccaccttgacgcccactgagctttttccctcccccattgagctgccgcataggacttctctggcggttcttcctcttaagaagaaagggtctaggaggcttggtccagtcaactacggttgcgaaacttttcgccctccctagcacgcagtcgcgtataaatctcccaacctttccctctctttacttgtccagtcgtattccgtgctacgtcgccgcgcatggttatggcaccgactgcttgtgtacctgctgaagtgtgcatgcctaaactttatgacaaacccgacttttatgtcaataatatccaccagttcagcaatcatgccccggatgatctgtcgcaatctcggttggctgccaggacctggtcttgaatgtgctgaagaagcgagctgctgaggtcgacaccgaccgatgcgctcctggagaagaagatgctttctatgtggcagacatgggtgaggtttatcgccagcacttgcgctggaaaatgaacctaagccgtgtgcgccctttttatggtatgtcttccatgctttcttataacaggacttgatgctaacagaactagcggtcaagtgcaaccccgatcccgaggtcctccgcctcatggccaagcttggaaacggtttcgactgtgcttccaaggcggagatcgacatggctctttcgactgcgttgatcctagccgcatcatttatgcgcagccctgcaagacaagtcgtacctgcgtcacgccgccaaggttggcgtcaagcagatgaccttcgatacgccgatgagctgtataagatcaaagcctgctatctgaagcagagctctacctgcgcattctaaccgacgacttaaacagcttgggcaattcataatgaagttcggcgcctctttgatgtggctcgtcagcttcttgagctggcccaccaacttgagctcaagatcgttggcgtgagcttccacgttggctctggtgcagaggaccccaaggctttcctcaaggccgttcaggatgctcgcctggtctttgatcaagccgccgagatcggccacgagctgcacactctcgatgttggtggcgggttcaccggggagactttcgagaaatttgccgccgtccttgacagcgctctcgaaacgtactttccgccgaacatccgcataattgcagagccgggccgctactacgttggtggagcgttcaccctagcggcgaacatcattgcgcgccgcggtgtgcaggaccccgagaaccccagcaaggacgcttacatgatttatctcaacgatggtgtttatggaaacttttcgaacatcatctttgatcaccaacacccagaagcacgcattctttcctgcgcgtccgagattaatggtcgccctgtctccgaagaatgtgacctattccatttggggaccccacttgcgatggtcatgatcgtcatcagccagcgcagcgtgcttcctggtttgttggacgttggcgactggctttactttgaggaaatgggtgcctatacccgatgcagcgcaacacgtttcaacggcttctccgataaccatgaggtgatctacatctctagcgaggcggacgcctctgctctccttgaatattag

SEQ ID NO: 25895 - DNA, 1158 bp, Emericella nidulans
aaagtcgaaaaagtgacggaaacggaaaacagaatgccttcaattccaataacaatcctgaccggcttcctcggttccggcaaaacaacattattattgaaccttcttccacaactcccgaaatcatacaaactcgccttgctgaaaaatgaatttggcgacgtagccattgactcccaactcgcctccacttccgccatctcaggcgtccgcgaactcctcaatggctgtatttgctgcaacctggtagggcaactctctgacgctctctccgaactcgaatcaactgtggatccagaccggatcatcatcgagacaagcgggagcgcattccccgctacgttggcgatggaagtgaatcgactttctcgagaatcaccacacaatgaagacggaagcagcaagtatacactggatggagttgtgtctgtcatcgacgtggagaattgggcgggctacgaggacacgagctacactgcgaagatacaggctaggtatacggatcttatcgtgtttaataagtgggaacatgtgtcagagcgacggtttgatgaggtccttgatcgggttggtgatctggaggttcaaaccccgtgggtaaaaagtgacaaggggagggtggagaaggatgtgctgcttgggattgatggggcgctgtttgcaaagcaggttatcgagaacggacatgaacatggacatgagcatgcagatgggcatggacacgagcatgggcatcagtccgaggtagaagttttgtctgttacgctacggcagaccgaaggaacaggagcatcgacaattgacgtacccgcgttggaaaagctcctctcctcagctcccaaggaagaggtttaccggattaaggggatcctgcgctgttcgacgcagacgccgctggcgagttcgtcggatgacttggatgtgcggccatcgccttcaaactctagcgactcagcgtactacattctcaactgggcctttgggcgatggacgtgcacgagctcggaagttgtggcggatgctgctgatccggctacagttgcgcggattacatttatcctggcaaggtatgaatcggcgaagtggaagaagaagttggatggtggggcgttggtgcaaagcgatggggcggagttgaatgttgagcgccttgtatag

SEQ ID NO: 25896 - DNA, 1672 bp, Emericella nidulans
tggaatgagaagggcggagttcttctcatttctatcgatatcttccggaattgggtcctcaaccaggcgacagctaagaaaagcccgccactgtcagattctaagcatcaagacctcaagcattggcttttagagggccccagcatcatcatcgctgacgaagctcataaaatgaagaatccagactccgcgacgtctcaggcggcaatgcaatttcgttccaaaagccggattgcgttgactggatctcctctggcgaacaatcttggcgactactatactatggtcaactggatttcttatgattacctcggaagtttccttgaattcaaggcaaactatatcgaacctataaaggaaggcctttatgccgacagtacctatggagagaagcggaaatctttaatgaagctccaggttctcaagcagatcttggagccaaagatcaaccgtgcggacatcacagcccttgagggagatcttccgccgaaagtcgagtttgttctgactgtacctctcaccaaaatacagaaagaggcatatgatatgtacgcagcgtttattctacaaggacgaatggatgaggtcacacagacacagttatggtcgtggctatctattctgggattatgctgcaatcacccagcatgtttccaggataaactagtcagtcaggcccagggttcctcaaaaaaaacgaatgataccagaaagacgagcgacgttgaccaggcaatatctccagatcggttaggcgatggattcattgaaaatgctggaatccgaaacctggaggagcttgtagccgaacagctccgtatttttgctaacgtccatgatctgaaggctgtggagctttcagttcgcgcggtaataacgaagaggatcattgatgaatctatcagggctggtgataaagttcttgtcttttcacaaagtctacacacacttgactacttagaacgtttattgaaggtcaccaatcgacagtactcacgactagatggtcagacgccggctgctaccaggcaagcagctacaaaaaagttcaatcagggcgaaaagcaggtataccttatttcgactagagcaggaggactcggcctgaatattacgggcgcgaatcgcgttatcatctttgacttctccttcagtccaatctgggaagagcaggcaattggacgtgcgtaccgcctagggcagcaaaagcctgtgtttgtctacagattcatagccggcgggacttttcaagagatcatccacgaaaaggcgacttacaagacgcagctcgctgttcgcgttgtggataagagaaaccctattcgatctgcgcacaagaaacccggcgattatatcttccctgcgagacctgtcgctcaacaggatgtttcagagcatatcggcaaagacaaagctgttctggacaagatccttcgggaggacgagaagaaaggcgcagaaaataagttaatccgcgatatcaagcttacgcagacattccttgttgaggatgatgacaagcttactgaagaagaaaagaggactgtgcaggaggcgttcgacgacgaaaccctccgccgaactgacccagctgcgtatgccaaaagagtggctgaaagacaactcaagcagatgcaagaagagccttatcgagctcaacccgcttctctaa

SEQ ID NO: 25897 - DNA, 608 bp, Emericella nidulans
atggcgaaggacaccctggacgtccgcccgccgcggacctcttctcgctcccccagtcgctctccccggccaaagaaccggaagaaagctacggcagtggcttcgagctaccaatcagatggcgttacagataacaatatattcgatctcccaatgtccgactacaaggttatggttctggtgactatagtagccgccgtggtgcggctgtttaggatctaccagccgactagcgttgtctttgatgaagtgcagtacgtattgatcaattccagtatacgtaccccgtcaggcatttctaattggcgatgaacagtttcggtggtttcgcaacgaagtacattaagggtcgtttcttcatggacgttcacccccctctcgccaaactccttattaccctcgctggatggcttgctggattcaagggcgacttcgactttaaggagattggaaaggactatcttgagcctggagtgccgtatgtggcaatgcgcatgcttcccgcaatcttaggagtcctcacggtgcccattatgttcttgactctgaaggctaccggatgtcgtactaacactgctgtgctgggagccggtgccatcctctttggt

SEQ ID NO: 25898 - DNA, 1094 bp, Emericella nidulans
atggctcatctggaggagaagctggaccgtcccgatggatccgcacttacttggattctcgaccatattctccggtatccagggacctacgagatccccctccggacaatgtatgcactgaactgcaacaatacgagacaatcagtgcctggcactcagcttcccgagacggcgtttgcacgtcgaccgtcgtcccccaaatcctctgccgccgaggaccttcgtgcacaactgactcaccaaatctcccgattaccctcccagccatgctcattgccgccgagctttgttacatcctttctgcgccgctgcttctccccacagctcgaagatgtcgatttccctcaagctctgactggtctggactacctcagagaccttgaaactcgacgaaagaaggaagtcgctgcagcgttacagagactgggcctccacccagaaaattctcggcaggatccggaatatctcaagaaatatccttgtgtcgtgacttggctcgaatccattaaagccaagggttccaaggtggaaaagctctacgcggagatttatattggcttgcgccgatgggtaaatacgtaccaaaggcttaaattttgcttactgctaacatttatgtacagactctgctgaatgagatgcttatggaacccctgaacaaggcgaattgcatggctatgctcaacaccctctttcctcccgtcaccgaagctaccgtcacccccactccatatcttactccgcacatcctcaaagcgcatcgtgacggcttcttccggtacatctcccatattgaaacaaacggcagacatatcctcgacaaggtcattgcgcagggtgcaccagagggcgagagcactggctggccccttgtcagaaatgccctagacgagtaccttaggaggactaacgaaatgatcgatgaatgctccatgattaatggtccggccagcttggatgagggattaggttctacgtcgtcgcgaggacacaaaggccgaaaggctgattccggcattagttgtgcctcgatactgggggaaagtgccacccctttcatatccatcagcatcaacaatgattataggtattag

SEQ ID NO: 25899 - DNA, 642 bp, Emericella nidulans
tacatagcagaaatcctggattccgtatgcaagcgatggggtctggataaagggaattacttgcttaaagtgatgggctccaacacaatcgctccgctggaccgcaccgttgaggcactgggcaacatcactgacttagacctggtccgccgacgcttcggcccgcaggtattgacaggatcgccagtgagctcttctccgaatgctcccctcctggtcgacagtcccgctgtgccgaccaagaaaggaaagaaaagcggacagcggatgctacatcctcttactcaacaacaggatcttatcggaggatactaccggcggtattttgtgcttcgcaagcagtcgatggggttcactacttcgctgcatcgcgtcctgacgtttgacaacgactacatgcacatcatgcctgcagatacgggtaaaaatgggtccgacaccaagacccggtcaatcagcttcaacgacgttgtggggtgtaaagtaagccgacggcatccgaagaatttccgcgtcgtggtgctgcgtgggaacgatgcgacggagcagaagcggtatgattttgaggcgcgcaattcgtttgaagcggaggagatcgtgggcgagatcaagaagaacatggcgcagtatcgcacaacatga

SEQ ID NO: 25900 - DNA, 715 bp, Emericella nidulans
actccggcgctcagcccctcgttaacgacgatgaatccctcgccttggccgtcaacggtgaaatttacaaccaccgcatcgtgaggaagaccttggacgtggaatacaactataagacacactcggactgcgaagtcatcatccctctggtatgtgcgattagagcagcgcggaagaggtttgtggtaaaggatactgactcgtgtagtacatgaaatatggtctcgatgctcccaaacatcttgatggcatgttcgcctgggttctttatgacaagaaggaggatagggttattgcggcacgtgaccctattggtatctgcagtttctacatcggctggtcctctcagactcctggagccgtatactttgcctccgagttgaagagtttgcaccccgtctgcgacaaggtcgaggcttttcctcctggccatgttttcgactccaagagcggtgaattttcccgctacttccaaccctcatggtgggacccgaccaacgttcccagtacgcccgttgattacaaggcgattcgtgagtctctcccgaggtctgtgcgcaagcgcctaatggcagaagttccgtatggtgttctgttgtctggtggtcttgattctagcttggttgcttcgattgcccagcggccaactctgcgcatgcagaaggctagatccggtgtcaagagcgaggccaacggtgaactggtcggtatcgac

SEQ ID NO: 25901 - DNA, 435 bp, Emericella nidulans
tcagtggaattcaacgtcggtatcatgccgcctggtttccccacaatcaagcctttagtcaagagcattatcggtggcacctgcagcctgaccgggtacggatcgcgttcgcggaaacgcaccggagtgacagggaccggcaacgcttattacggcccgaacagccacgttctcggcagcatgcttcaaagtcgaatggatcccgaggagcagaaataccacgtccagatccatgcaaaccacccgtcaatatccgagtctgatggcgggagcgaagagaacctcgcgagcacggcgacgaggcggaaaagccccatcaatatcaatacgcggatcgtgcagacaacagaagtgattgtacatacggaggatgggacggatgaccatggggcgtcgtctattgggccaagaaggacgatcgaggatcgaatatag

SEQ ID NO: 25902 - DNA, 273 bp, Emericella nidulans
atggacaaaaaggtggcctctgacgcttcggcgactcacgaggaggtgccatacgtggtcccggctacgaaagctttgcaagctgactcagcacgccgtggatcgaccgccgtcaacatcatccagaaccctctccaggtgagtccggggcgctgaatgtagaccgggcctgatactgatggtacactgtagaatgtttcccgagagcaggctgtctacgacgcccgcgtgttcgcccagacccacgggatggacgagcacgccgacgttttt

SEQ ID NO: 25903 - DNA, 1567 bp, Emericella nidulans
acatacggtcgcatcctcgctgcagcctgcgcgctcgcaaccaccgcaagcgcagttactcctattgaggtcaagggaaaggactttgtcaacagcaagaccggtgatcggttccagattctcggtgttgagtaaggatttacctacctaagatctcctcaaggatattcgatctcgttacttggttgagaaagcggtggtgctgatcgtcctttgccatccaacagctaccagcccggtggtaccaacgccgttgacggcaaatccgatcctctgtctgatcgcgaagcgtgtctgcgtgatgctgcccttatgcagcaactgggtgtgaacaccatccgtatttacaacttgtcgccgaaactcaaccacgatgagtgtgtttctattttcaatgccgccggtatttacatgattctcgatgtcaactcgcctctgtaccctggctacatcgaccgtacggctccctggacaacctacaccaaggactattacactcaagtctttggtattatcgaggcgttcaaggactaccccaacacccttgcgttctttgctggtaacgaggttatcaatgaggacagtgttgagcaggtccctcagtatatccgcgtatgtggcacgacctttttttcccgtctagaaataccaaagctaactcggcactaggctgtccaacgtgacatgaaagaatacatctcgaagcaccttgaccgcgaaatccctgtcggttactctgctgccgatgtccgtcccatccttgaggacaccctgaactatttcatgtgcgaggacgaggactaccccaactcctcctctgacttctttggtctgaactcttactcgtggtgcggagatgcgagctacaagagcgccggctacgacgttctcacagagatgatgtctgaagccaccatccctgtcttcttctccgagtacggctgcaatgaagttcaaccccgtaagttcaccgaggttcaggccatctatggcgaagagatgacccagactttctccggtggtcttgtctacgagtacacccaggaggagaacgactacggtctcgtcaagattaacaacaacgacaccgtcaccctcctcgtcgactttgacaacctgcagactcagtacgctaagctcgacatggaccgcatttccgcctccaacgccagccagaccagcgtcaagcccatcaagtgcagcgccgacctcatcaagaacggtaccttcagctccaactttaccctccctgcaaaggccccctggtgtccaggacttgatcaactatggctactccaaggtcgacgccggtaagctcgttgatgtcgagtctgaggaggtttccacgaccatctacgaccacaacggcaaggaaattaccggcctcaagctgactgttcttgccgacggtgagtctaaccagcccggctccagctctattggctccagctccaattctggcagcgactcggactccggcgatgatgacaatgccgccggcattgtcgctattcctgtcggcctagctactattgccgctaccctttttggtttggtcatgctatag

SEQ ID NO: 25904 - DNA, 1091 bp, Emericella nidulans
ctagccaccgccgaaaaggtggcacagttatttctgaatgagaccgttctaggattcgatatggaatggcaagctgcagctactacgtacagtagcattcaagagaacatttcgaccatacagctagcgagccgcaatagaattgcaattttccacatagcccggtttatgcctaacctgaatcttgacgacctcgtgcccgcaaaactgaaaagcattgtggaaaacccgggaatcaccaaaactggagttaatattagagcagactgtacccgcctacggaaatatctaggaatcaacgctcgtggtacctttgagcttagccacttgtataaacttatcaagtactgccacaccacccctcaattgatcaataaacatcgcgtccgcctcgctgaccaggtgcaagaacacttggggcttccactggcaaaaggaatcagcgtacggtgcagtaactggcaaaagcccatcacggctccacaggctcattgtaagaaatcctaggacccccatgacgaaatttctcccctcaagtgcaacatctaatctacctctcagatgccgccgccgacgcctacgccagctatcaattattcgtgatcatggatgcaaaacggagagctctggaccctgttccaccattaccggcacacgacgagctcaatctttcaatacgaacaaaggaagagtctgtaccgtccgaggaccccgacccggttgacgagattgcaggcaatgtaggccatgtaacagagacaaggaaactgcaaagaacgaagacttaccccaaaaatcctgtctcggctgaaacatccaagagcgcgctaaccacccaccctgacgactccgctttcgagatcgtcaagagggctgagacgtcgagatatcgtacccagcctgccgagccgagcgatacgtctgattttgaaactatggaatccgtcaaaagggctagcaggcgagtgcaagatgttgagaccgtggataagtctaagcctaaaccaaagcctgtgaagaggagggttgggagaccgaggaagccctctttgagtcttgcgtatgctgataacctgcatgttaagacgtga

SEQ ID NO: 25905 - DNA, 826 bp, Emericella nidulans
atgtcccttacgcttaaactctcttccctcgtcatccgcacgctgtcaaagccgatagccgtacgttattgtgacccttgcctacccgcgagatctcctgcgaggacatactgaccccgctcagaaccaaataaaagcacaggctcgcgagcatgagcgatttcggcgaatttgcatctctatggcacagggcctgcatcggctcgacatgcggctccgtctcggcacaattcgcgacaacgctgcggcaacccgacgagccgctgctgaagcagaactccgaaagcataaacccacatcgcctactgtgaagactgaagctgagacgagggccgaagaagaggcaattgccagggcgaagctgccgcatcggaggccgaaaagccggcacccaaaccacatatacggccactgtccgaatcaaaagccattgaatcaggcgcaactttcatcagcgaaacgtttctgttccttgtagcaggcagtttgatcctctttgagtcgtggagatcacggagaaaggagaataaccgaagggatgacgttgcagcccggctcaacgagctcgaagagactgtaggaatttaccgggaagcatttattgctcttgaaaagaacggcgatctacctccagcctctcgacggatccttctgaaaatgatagaggatgtggaacctgaggaagtgcctgaaccagagccgcagggatggttcacgacaatcacctcatacttttcgttcggccagagtccagagaagcagcctgagaaggaaacggatgcaactcagcccgcgagcgtcgctgaaactcccaaagtcccttcca

SEQ ID NO: 25906 - DNA, 501 bp, Emericella nidulans
agcgatgagatcttataccacgcaaaaatacaccccgaacaatacagcaacacattgacagacgatcaagtaaaagaactccactcatctattcattatgtctgttccacctccacggaggtattggcagactctgacaaattccctgaacattggcttttcaagcatcgatggagcaaggggaaaaagaataaacaatccagcctgccgaacggggagaaaatcacattcctcaccgtcggtggcagaaccagtgccgtggtccctagtgtacagaagaagactggccctgtggcgggcgatgtaaagcaagaggacgaaagcagtgatgagcgccagaccaagcgaaagcggacaacaactaagaaagacacgtccaaaacagacaagatagactcgagaaaggaaagcaaacagtccgtcaaactggaagacgagtacgcactcgaagacaaggacacacgccaaacaaaccggcgctcaacgcggctcaggaagtga

SEQ ID NO: 25907 - DNA, 861 bp, Emericella nidulans
gagcccgaggaatcttgaacgccggctatctggagtatcgaccagttctcgttcaacttctccgtacgccgcacgaaaaggaagtcgtcgaaccgtggtcgtacgcctgctgtcacgcctttatcgactattccttccgtttactttgaggatgatttccgtcttgaaaatccgcgcaccttcgatgtagtgtcagagagatcagaggttgtcacacctcctaaggcgccgagcaaagacaacaaaatggatatagttgagcctgcgccaactgggagaaaggcgctagcgacgaatgcaatactacaggagaaattgtcatggtacatggatactgtagagatacacctaatatcctcaatctcgaccgcgtccaaatccttcttcacggcccttggttcgctacgggaattgcatgctgaggctgctgattctgtccggcgaatccaagtcctgcggaaagaccttcaaaagatcgaccgagaaatggcattgggaggattgaagatagttaacctacgtcgccgaagggagaatgtccgcatgcttgctgatgcagttgcccagcttcgagacgtggtcgagtccgtcacccgatgtgaggagctggccgaaggcggaaatatcgaagaagcagccgatggcctcgaaaaggtcgagaaactgatggccgaagactatactcctgatcaggcagagggcgaacaacggaaaactcttgatttacgaagactcaaagcattagagggtgcatcaagcgagcttgaccgtttgagatatcagattggcaccggctatgagaattcgttttggaacgactcctggcgatctgaggcgcatgttaaagggctccttggctga

SEQ ID NO: 25908 - DNA, 2217 bp, Emericella nidulans
cgtccaaatgccctcatggatccccttgaccccatcctagatggcttgaactccgcacagagaaccgcggtcacctcatccgcgccgattttacaagtccttgctcctccaggttcgggaaagaccaaaacgttgacctcgcgcgtcgcgtacctcctcgctcatgacggatatcgcccgcaagatgttatctgttgcacattcaccatcaaggccagtcgggaaatgcgagagcggctggccaaattggtaggtgatcacgtacagtcaaggctcatcttaggaacgtttcattcgatctgtcgacgatacttggtgaggtacgggcatttgatagggctgcagaaggggtttggaattgcagattcaggggattcgctagcgattattcgggttagctgatgtctctggtggggtgttggcgatgttatgctaaaaaacctgcagagaatcgtaaagcggctgcagcttggaattcaacccaacactgcgagagctcgtatatcgcatcagaaggcgcacggcgtatctcccgatgatgtagcggcaaagcagaacaagattagcaagcttctagagcatcgcgagttcgtccaagtataccgggagtacgagagtgagctcgcaacatcgaatttgctcgattacgatgacctattgctacgatgcgcggaattgctgcgaaaacacccaaagtgtgtatccaacgtacaggtggtcttggtggatgaatttcaggacacaaatcagatccagtacgacctcatgaaccttcttgcgtcttggaacaggcgcattacggtcgttggtgatccagatcaaagcatctacggatttcgttccgcggagatcgagaacctcaaacggatgcagcggctatacagaaatacagaggttgtacttttggaggataactaccgttcatcgggctcgatcctcaagtctgcgcaagacgtgatcgagcaagatttatctaggccagcaaaaaagttgcagccaacgcacacctttggcacgctgcctgtactgcgcaagctgccctctgccgaagacgaagctcagtggctggtacttgagatcaaaaggtgcatagttctaacgggaaagttattgaagtattccgatttcgccattctactcagatctgcgtcgctgtcacggcagatcgagtccgccatggggaaacatggcgttccctatcgaatggttggtgggcaaagattctttgatcgagtcgaggtcaagcttctcctagactatttacgagttataagtcatcccgaaaactcggaagcacttctacgtatcatcaacgttccttcgaggaaaattggagaggagaccgttaagatgctcttaaacggggccgagaaagctggcaaaccgctgtgggactacatcaaagatgtagcgcaaggtcgcaggtcgactgagaaagccatgtcgaagcctactaaccaagggctctccagtctagttggcctcattgaatactctagggagaagctccgccagtgcgtcgacagatcggcacctcgaaggctgctggagatcgtgatgaaaagactctcttttcgcgaattcattacggcgacttatgggtcaaatgatgaaaacagatgggcaaacgtggaggaactaatgagccaggcagacgatgcaactgcggccgatgaaagtgaacaggatgagaatcttcctgaaattgctggcctaactcagcaagagtcgcatcctggcgaagaagccttgtccagattcctagccaatgtggctttatcaaccgaggtccagccgaaagaagagactgaaggggaagaccaggcgcaagagaaagttaccatctcgacaatccatgcagcaaaaggcctagagtggcccgtggtgtttattcccgcagcttacgagggtattatcccgcactcacgagcagaagactccgacgaagagagacggctgctttatgtggctatgactagagcgcaggccttgctatacctgagttatccgcttcggcaggcccgagaaaacgcagagactaatgtgacgtcgtttcttccgcaagaactaatcacttcgcgcctgcgcccggttggaccgaaactagacgagaaggttgtttatgggattgcagatatactgcgtcgagaacgaccgtctgcagaaaccatgttggaaggacttgattctctccattctgtctacgacgaccaatga

SEQ ID NO: 25909 - DNA, 4408 bp, Emericella nidulans
acaatctgaggccgatatcgttgttggattgcagtttgcggtacaggcgaactttatcatacctggcagcactgatgatgaattcaggtatgtgcttcctggcttcttttccagctattctaatgaacgcagatttgccaatgaccgactcgcgcaagccgcatcctcgttgaccgagggacgtaatattgaaaaaatgcatttcatcatatctcaagcaatgagaaaatattaccacgacgggcgtagccgttatgcaatggcacgacatgtggcccaggcttcccgaatcatcaaatctcgtgtcgttgagagactcgattatcggaagattctatgggacgcagcacagatcgccgcgcaatcgggggcgcgcccaaccgcactctggtactaccgccactgtcttgacctcctgcaagataaccactgggatgacaatggcatcgatgtctactacgatgagacattacgtctttataccgctacagcggagatggcttggtctcaaggatttaattcggaagctctcgacttgctatacaagatatttcaccatgctaaaacggctgtttgtaaatcaagggcttggattatcaaagcaaaattattcgctcagctgggcgaccatcctcggtccatgaattcgttgcttacatgtttggaagagcttggcgtgcatctccgggaaccgacaagctacgaaaattgcgacgcggcttacaaagtgcttaagggccacattgaacgagcggatttgagcgagatggctcataagtctgtcagcaaggatatcaacacggtcacaatcggaacggtgatggcggaagcgatgtcagttaccttctgggatgatgggctcacattctatcggatggcaattgaaatgatgaaccatcatctttttcgagggggtttcatccaaatctgtatcggttgctcccaccttgccatgattgccttcagcagattccgggatcttgatttcgctgtaaaactcagcgaattagctcttactctacttgaccggtgcccggagctttggacgcgcagtcgcggatctattgtctataacttctacgttggccatctgcggggacctctggcgtccacgcttccagccctcgaagcctcagttgagacgtcgctcgtcttgggtgatccgtacataactctgatcaccatttcagcaatggcaatgacgaggctatttcttggtcacgacctggtactggttgaggtattctgcaacgacagccctatggaaattaatgactgggaggttgacactcggggcggagccacacttgttgctgttaggtaggaagattttgtcctcaaacttgtttcgaaaggattacttgactaactacatcttacaggcaagttgcgcgggctctacaagggaagactgaatatagggtggccgacacagtgctgaatgatgatagccatataaccaccgaatacatcgactttctggagaagaatgccagcaaccccgaccgtccacgtgacatctattatgccctctcaatgatcccgttgtatctctacgggcatcatgagaaggccattaagctggccacggaaatggacgaaagtatttccagactttggtcctctcgggtttcctacgttgtctatttctacgccgccctttctcacttgacgatgcacaatgacaacccaacgacagcatatcttgacggcaagttggatgttgtattgaagtacaaggccgaaatcgactttgcacggcgcgcatgcgatgcgaactacggaatgtgggcgctgattctagaggcgttggtctatgaggtccaagatgaccacacatctgcgcttcaatcattcgaggcggcaatcgatcattgccaggtccatcaatatccaatggaagaagctctcgctctagagcttatggtacgtaccgaaccccctcaataacccattcgtcagcttctcttgctaatgtccatgcaggggaattcctagtccgccggggcgcgaagcgggcagctcgctctgtgatgcagaatgctattactgcttgggctgcgataagtgccgttggcaaggcatcccagctgaccgagaagcacgaatggctattgagaacagctacttcttgccgaagtgtagatgttggctgccaaacagtcgactcactgcttggaatcgaccaggacgttgggcaagagcatgttggggtaaaccaagctttgcaagaagaggatcggaaacatcgctggctggagcagagtggcgctactgctacaacagcaggtgagcggtcacttgatatatctggcgtcggacttggtaagccgtgaatcttatgctcaatataacagtgctaacatctgtagacatcatcgacttgtcaagtatattggaatctagccaagtgatgtcttctgagcttcaaattgataagcttatgacgaagatgattgaaattgttctcgagtcgtgcaacggttctgactttgcagtaattgcaacgaactttgacaaccactttaccattactgctgctggagatcttgagagaggacagaggtcattcgttgatggcctgcccttctccgaaatggatgacaaaatggctcaacaaataactcattatgtcatgcgtaccagggaggaggtcctcgtccataatgtttttgaggacgagcgcttcagcaacgttagtgaagcctatcatacacgaaaccccatgagtcgatctgtgattgcgttgcccataatgcaaggagagcacctccacggtgtcatccaggttgaggggaaaccaaactcattcactcaacggaatcttgtcgtgctccacctgctgtgcaatcaaatcgggatctcgttgtccaacgcgctgcttttccgcgaaatccgcaaagtcggcgccacaaatgcttcaatggtggaatcccagaaacgagcccttacccaggctcgggacgcggagcagaaggcaaaggtagcagaggcagaagctaaacacaatgtgaagctgaaagaagatgccgccaaggcaaagtccatcttccttgctaatatctcccatgatctgagaactccgatgaatggcgttattggcctgtctgagttgctcaagggaacaaaattggatcgggagcaggatgaatacgttgaatcgatccgtgtctgtgccgatacacttctgaccctcatcaacgacatccttgacttctcgaaactcgaagcaggtaagatgaaaatctctaccgtccctctgaacatcaaagagacaatctcagaagttgtccgagcgcctcgctacacccaccgagaccgaggactcgaaacaattgaagatctagacgaggttccaccggaccttgtcgtcctcggcgaccccgtccgactccaccaaatcttcatgaaccttctcagcaacagctacaaattcacgcccaagggatccgtcaccgtctcagccaaagttacccgcgaaggcaaaggccgcgttcgcctcgaatgctctgtctctgatacgggcattgggatcccggacgagcaaaagccacgtctcttccgacctttctcccaagcagacagctccaccgctcgctcctacggaggcagtggcctcggtctaagcatttgcaaagctatcatcgaagacgtcctcggcggcgccatctggctcgactccgtcccgggtgctggcacaaccgtaaccttccacctctccttcaacaaagtcaagtctgagagtggcgacaaaaatgccccttggtccaaatccgctataacagacaagactgctcctcgccccgtcgcccgcgacctctccatgatccctcgcgaccagattcgcgtgtgcatcgctgaagacaacccgatcaaccaaaagattgccgttcgcttcgtcacctcgctcggtctccaatgcgaagcatacagcgacggccagcaagccgtcgacgcgctacgtgctcgttcaaaggaaggaaatcctttccacgtcgtgttgatggatgtccagatgcccacattagacggatacaacgcgacacgtgagatccggaaggatcccgacccgaacgttaacgaggtcctcgtcatcgcgatgacggcgagcgctattgagggagaccgtgagaaatgcctcgaggccggcatgaacaattacctacccaaaccggtgcgctcgaacatcttgagtgatatgctggataattatctcgcgcccgtgccaactttcacgaggacgagaatgtctccggctgctcggggaagggggagtatcagtaccgattctgcgtctgtggcgtcgaatagtattagtattgcctcgtctggtgctacttctgtttccggctctgatggagctggccatgctcttcctgaacaaaagtcccagtcgcactctacatga

SEQ ID NO: 25910 - DNA, 1212 bp, Emericella nidulans
atgtccgtaccggatcgtggatgggtgattctcgccgtctcgtggcccctctttagcatctgcctcgtcctcgtcggcctgcgagtctgggtgcgcacacggatcatcaagtcctggggctgggatgacccattcatccttctcgccttcctctgcgcaacaatgaactcgatctttgtgaccgtgagcgcgcactacggcaccggtcaccacgcgagtgatctatcggattaccagcgaatcgagtcgaccaagttcaacgtgctatcgcagggatttcatgtcatgtcgacgaactggggaaaagtatcagttgcgattttcgtgctgcgcatcatccacaaggttaagcatcatcgaccgatgatgtatggtggtatcgtgctcctctcggtagtgaatactgtgtgtgtctacaccatctatgggcaatgcactccgacgagaaggctgtggaattcgagggtcgaggaacactgttgggctccggctgtacagaggaactatgcgtttttccaagggtgtatgtgccaaaagcactgttgttgaaagatacattgctaacagaaccagcattctctgccttctctgacttggtccttgccgtctacccactaacaaccatctacggcctacaaatggcactcaaggtcaagatcggcctgggatgtgttttatcgctgggagtaatgtatagtcatctcctccggtacttgatctgcttttctaacagctcgaccaattatatacagtgcgatgatcgccgcgatcgtgaaaactatcaacctggcatccctcgccgcgcgagcagactacccttgggacaccgtcgacttgacgatctggatcgcggtcgagcagtacctcattatcctagcagcatgcatccccaccctgactcccctcttcaatatcgccgtgcgccaacgcacgagcaagaaatcgacctcaaacgtcaactataaggctggccatcactcgggcaggtcccacccgtacgatggactagcaagcggcggcattgggaagtgcgagccagatgggtacccacttgcgtggactagggtcgagcgagcccgcgcgggcagccacagtgacagcgaagaccccattatggcgacgacggagtcgggccggggtattctgatgacgacagagttccatgtccaaactgggtcagagaacggagacgagcacgtggagcgaagatga

SEQ ID NO: 25911 - DNA, 1488 bp, Emericella nidulans
aaagaaaacacttggagggcaccctgcatctagaacctcactctgccattcaactcgtcgagtcgcgtcacaactcaataagacatctactcgctcttggatgacaagttttcttgtcaacacgccaccatgctggcccttcgagaccaggagaacctcgttcacacccaccaaaccgttgcagcgtcgaagccattgaaccagggcgccagacaactacagccgaagactccggggaaccgagccccgaagacaccctttaaagtgccactgaaggatgagaacgacccgctagcgctcggaaggaagactgtgaagacgattgggaagcaaaatgagaacgccagaccctctgtcaaggatgcttttgtcactcctatgggtacgcacaaactttatattggagatgtttcttatggacatgggatgggatcggctgactagtggtgtaggagacacccgtcatcgtgctcccttggggatgaagacgaccaatgccaaagcgagaggcttgcaaaccccggcagctcctatagggaatataaagccagaaaggacgaccaagaaaggctctactcagcgcgtcaagaaattctccccgtttgtggagcagccacagccagaagtgaaagtgcagcccctgcaggatgacgtgcctgatatcgagtacatgccgcccaagccaaaaggtgagataacatctagccggcatcgattagcaggaaaatctaacatagcatagacctgccggactaccctgaagagattacgtacgacacttcattcccgcaatttcgccctgaaaacttggcgcttggtttagagagcgtttacggcgacgagattgggagtgacggcctcacgaaacgacagcgcaaatttcagaaagatttcgccgcttatgataagatggttgacgaaatgatccttaagcaaatcgaaagcattgactttgcgggactcagcgatgatgagcagtcgaagcaacctccggttgtagagcttccacaacgccgcatccaagcgcggaatcccagggctgcttcagtaaaatcgaactattcgagtggcgtttcgacggtccgtgctcgggacgcagccaaagctctttccggcaacgagcggactattccacgaactcgagtagcccccatcatgaaaccgagagccaggatcgcttcgtcactatttccctcgaagaaacctcgggctcctgccaacccctcgtcaatgcgacacactgcagccgctacggactctcgaacaactgtgggctacaccaagggtcgagaggtgtcgtctcgactgcacggcacggctaagacctctacgaagcagcctacaaagaaacctgctctgtctttggagacctatactcagccatacggatctccttccctggaatctgaaggcgaccaattggccgaagagctgtttcccacgtacgaagaagatgaggagacccaaaactttcagctaactttgtga

SEQ ID NO: 25912 - DNA, 444 bp, Emericella nidulans
gccgtccggaaaaccaggcgttcatccaacgtctctgactttggcgatgtccgtacagccagtggaggtgacggtctgaacgtttcgttctccgctttaaccgacagacgattgtccgtctcgtctaatgtatccgcgagcgctatgtcgtccatcagcgagcttcgacatggatctccgagcgcccccgctatcccccttggtctcgctggaccgaagccacgtgccaagcatgctaccataagcccagagagtgaggcttgggtagaggacgttcttggccaggcccgccggagcacttcgctcaggccgttcaaatataccctgccgtctccagagaacaaagtcgacggacgcacaccaatgctacccaagtctaggagtatcagcgatatcggcaaagctggctccagcaaacgagtcgtactgcgtggcctgcgatag

SEQ ID NO: 25913 - DNA, 1518 bp, Emericella nidulans
tcgtcgcgtcaaatcccgcagtccgagctttccttttcgtcggggaggcgcggaagagtgcgttcccatttcgtcaataacggcaggctatcccgcagcgacgagccctgggctcctggtggaattgttgcgttctcccatgaccttggaactgtcagtggcgaacaatccgtgaacttcgctgttggctatgtgagggaatcggctgtaaactatctaggaaagccttacacaggatactatagggctcattaccccaacacctacaaggcgttgtcgcatttcttcgatgattacccagctgcggttgttgaatcgaagattgtcgattctgaaatggatgctcaagcggccgttgcagggggaagtaaatacgctgatattgtctcactttcggcccgccaggcctggggaggaattgaccttaccatccccaacgactcactcaacgaaactgaagttctggccttcgttaaagagctctctagcaatggcaacctgaacacggtcgacgtcatcatgcctgcatttcccatttattacattatggatccggactatatccgtcatctgctagagccgatgatgcggtacctcgcggctggtcgttggcggctgccatatactatccacgatatggcacgacactatcccaatgccattggacacgatgaccaaaaagcagagccgatgcccattgaagagtgcggcaatctgatggtcctcgttttggcctatacgagggcaacaggagatagagcctgggctaatcagtacatcgacatcctgacgaagtatgcagattacctggttgagaacagcatcgacattgagttgcagctatcctctaacgacgctgccggaccgcttgccaatgagacgaacctggccatcaaggcagcagttgggctcaaggcattcggcgagataagcggactgagcgagtatgcgcgtgttggtgaagagcgtgccaacctcttcttcaaccaaggactagggacagacggaacaaggtctcatttcgtgttgcaatatcccgataagcctacctcatggaagaccccgtacaacctatacccagacgtgctgttcaacctcaaaacatttcccagagaagcataccagatgggaaatacgtttttcagagaggtccggtcagagtatggggttccgctggacaaccgacaggactgggccaagtctgactggaacatgtggttagcgggcacctttgacgatgaaaccactcgtcgggagttcattgacgatctgtgggcgttcgtatctaatggtaaacacaactggccattctccgatcgctatgttgccacatcagccaagggtcgagaacctggccttcctgttctgtgccgcgcgcgaccgaccgttggtggccactttgccttgatggccttacagggaccaaagtttctccaaattgctgtcaacagcaagctcgaagagacattgcgagcgacttctgacgggttccccgaggaagtgagagaggatctttag

SEQ ID NO: 25914 - DNA, 1295 bp, Emericella nidulans
atggtgagtttattcgggctgttctacctgctcgacatagttctaacagagcttcaggcatccttcgccaaccccacacagatctttgcggacgatgttattgaggagaaaggagagaatgcacgtctctcggccttcgtcggcgccatcgccgtcggagatctcgttaagagcacattaggtcccaagggcatggacaagattttacaatcagcgttagtggcggatgtgcggatcgcggggttagcagactgactgtgtgcaggtccaccggagaaatactcgttacaaacgacggtgccacgatcctcaaagccattgcccttgataacgccgctgcaaaagtactagtcaacatttccaaggtccaggatgacgaagttggtgatgggacaacctccgtgacggtgttggccgccgagctgctgcgggaagccgaaaagcttgtcaaccgcaagattcacccacagactatcatcgaaggataccgtattgccagccgtgctgccctcgatgctctcgacaaggttgctgttgaccgcagtgacgacatggagaagttccgcaaagacctccactcgattgcccgcactaccctcagctctaaggtcctggcccaggaccgcgaccagttcgctgctcttgcctgcgatgccgttcttcgacttcggggctcaaccgacttgagccacatccagatcatcaaaaaagccggcggaaagctcagtgactcttacctcgacgagggtttcattcttgataagaagattggtgtcaaccaaccgaagcgcctggaaaatgctaagattcttgttgcaaacacagcgatggacacagataaggtgaagatcttcggagcgcgcgtgaaggtcgagtcaacagggaagttggcggaattggagaaggcagagcgtgagaagatgaaggccaaggttgagcggatcaaggcacacgggatcaactgctttgtcaaccgacaactcatttacaactggcccgaacagctgttcaccgaggctggtatcatgtcaatcgagcacgccgactttgacggcattgagcgactggcgctggttaccggtggagagatcgccttgactttcgaccaccccgaccaggtcaagctggggtcttgtgacctgatcgaggaggtcattattggcgaagataccctcatcaaattctccggcgtagctgctggccaagcttgcacaatcgttctccgtggcgccacagagcaacttcttgaccaagccgagcgttcgcttcacgatgctttggcagtactgtcttag

SEQ ID NO: 25915 - DNA, 840 bp, Emericella nidulans
ccagtattctcgcacaagatgttcaacttcggacctaccgccgcttccagctcatttccagcttgcggattgacctgctccgtcctcgcacaagccgacgattcctgcacacctcccaccgctcaggtgaccaatcaagagacttacgtctcctgcttctgccagtcagacctcctgaagaatttccagacgaccgccgatgggacatgtgatgacacctgcacgagtaccgaagatcgtcagctcctgcagcagtggtatgtcgatttctgcaacagcggaggcggtacggaaagcaattccggatcgacggaagactcgacgagtaacagcaactcggagaacaatagcggtagcggaaataatagtaataatggcacttcaaacgcaaattctacggcggacagctccggctcctccgcggcttctggcagagcgggtccagaatcatggtcagtgccgtcgaagaatgttaatcgtatcgtatgataactaacacttcccaggtgggatggccattaccagtgggtgatcatggttattgtccttgctgtcggattcaccgtcatagccattgtcggggtctggctcaaacggcgccacgacaaaaagcatccgaacctttaccacgctactcaaagcgcaagcgacagccggatattccagaaccgcaacccggaggctctcgtgccgcgcgctcgctctgtcaacacagtctccttcgccagcagctcgcgcacaaacgttggcccgctgaatcggcaaggtccctcgccatcgcctttgcaaaattcgcaaggcgtagatagcggcgtggagatcagggaggcaccgcgatag

SEQ ID NO: 25916 - DNA, 991 bp, Emericella nidulans
ctacgccggtggaaagtccgaaatcgtcatgggtaatgtcatcaagaaagccgggtggaagagaaatgacctcgtcatcagcaccaaggtttggccccggattgccgacgaccctgccggtttgcctgcatctgtcccgttctaatatggaatgcaaatagatctacttcggccgcgcgcacggcgacaaccctgtcaataacattggcctctcccgcaagcacgtcatcgaaggcaccaaggcgtccctttcgcgcctccagctcgactacgtcgacatcatctacgcgcaccggcccgaccggctgacgcccatggaggaagttgtgcgggcgttcaatttcgtcatcgagaaaggatgggctttttactggggcacgtcggagtggagtgccgacgagatcagcgaggctgtggggatcgcaaagcgattaggactcattgcgccgattgtcgaacagccgctctataacatgctggatcgcgaaaaggtggagggggagtttgcgagactgtatgagcgtgttgggctgggactcactgtcttctcgccattgaagggcggcagactcagcggaaagtataacgaagcgttggagcggccgccgccggggagtaggtttgccgagagcaaggacgtttactctgtgggcattcgcgagaggtggcagcaggaagagggtgttatcaagcagctcaagaatgtcaaggtgcgtgtccctttcactggcagatgaacgcaggatagtgctgacaggatctgcaggccctagccgacaagctcggcgtgaagcaatcccatctggctctggcgtggtgcataaagaacgagaacgtcagctcgatcatcactggcgcctcaaggccagagcagatcgttgacaatgtcgagagtcttaaggtgctcccgctgctgaagcccgaaatcatggctgagattgacaaggcgcttgggaacaagcccgccgttgcgcccgctcgcgttggatga

SEQ ID NO: 25917 - DNA, 722 bp, Emericella nidulans
accctcaatggctcgttatcgtttcttaacaattgggattatttcaccagtactccggaggaagactttgatcaattaaccagaactggtccttactcgggcatgctaggtgcatttacaaccggaacgcgcctcttaacgcggtaccatcatctcctatcttcccagtccaacttcacgttctgggcaagcgattgccagcgcgtcattcaaacagcccagtatttcgcgctcgggctacttggcttgaactggggggacattgggagagccaagctcgaaatcattccagagacattcgaccgacgagcggatacactgacgcccggtgacacgtgcctgagataccttgaggacactgagaatggccacgataaaggaatgaacatgctcgctcttttccagcagtcgtatgctccagctatagcggaacgactgctattcgagcaggggaattcggccctaagagctctgacgaatatggacattttcagcatgcaggagatgtgtggcttcgaaaccctcgtacgaggctcgagtccatggtgtgatgtattcagccgcgaagactgggagaacttcgaatacgcccgcgatctcgtgcactactatagagctggcccgggaaacccgtacgctggtgcaatgggatggctgtggctgaatgctacagcaggccttctacaggaagggccaaaagctggaccactgttttttagctt

SEQ ID NO: 25918 - DNA, 269 bp, Emericella nidulans
atgtcagacgacgatgatttcatgcacgactccgctgatgaagagtaagtaccaacacctttagagctctgcccaaagagtccgggctcacatttgcggacgttaggtatgactttgaatatgaagatgcagacgacgacgagacaggagatatcggaatcgaaaataaatactacaatgcaaaacagatcaaggtcgacaatccagaggaagcgattgacgaattcctaggggtacctgctctggaacaggacaagggggattggtaa

SEQ ID NO: 25919 - DNA, 872 bp, Emericella nidulans
cgcttctacgggttcgtcttggcgtacaaagccctgatatcgctcgccaaaatctcggtctgtctcttccttctacggatcttccgttccagcaccttccgctgggttggatacatcatgattggaatcaactccgcgatcgccatcacctggatgcttcttgacagcttccattgtatacccgtccatctcgcctggactcaatgggagggcgtcgagcagggcaagtgcatcaactttattgccgcgacctacgcgaatggaattgtcaacatcatcgtcgacgttgtcatggtcgcgatgcccatctatgaggtctcgaaactgaatctgtcccagcgaaagaagatcggcgtggcggtcatgttcgcttcgggattagtgtaagtagaatgccttcacttcgagggcctagaatgctaattgaccacgtagtctcacgatcatcggcattgtccgtgtcattgtcttttcgcaaaacagctcgaacgacaatcccacatgtcagcacctcccccagcttcagtagaagcatatggctaataaggaacttagatgaaatggaggctctgaatcgctggtctgtcatcgagtgtcagatcgccatcatctgcgcttgtcttccggctaccagagctatgctcgccagcttctctccgggcatcgtcggcgagtcgaccggggaggcctccgccgggctgcagaaccagtacaatggacccagccggtccaaccactcaatgaaagtcccgctacaaaaggtcaacatctcaaaaacggtgtcttactctgttgactacgttggtaaatcaccgcgaaggtcttccaatggctttctccagctcgatgatcgcgggtctgagagagactag

SEQ ID NO: 25920 - DNA, 1170 bp, Emericella nidulans
gcgacttgggtcactaactacacctcctataaaccgtacagcttcaattacaatggggatacagttgacttagaaaatgccaaattctgcaacatcaccgtgcaatatacccatcccggctacaatgataccatcaccgtcgaggcctggcttcccgcctctgtccccgcccaatccttcaccaaatttacttccaccctttgctatcctctcttgatgcgcgtctggcacaacgtggacccgctagtctgcgaactggactttctgaccaatgaggccattcgctactatgacccccggaacggggtggtggatgggcttatctctaatatgggtggcagtaactacgacccttataccaccgtgaagaagactttcatctgtgactccttgaaccgcacaattgcgctcagtcaaggcgccgcgctcatcaccaatgccgcctggtcgggcgcgcgccacagacggccgccagctctggcatgggtacaacccggggtctgacattggtagtatatttggtgctcaaccaggatacaatagctcattggccaccgccgtgaaagatgagtggttcaatctgtttgttgcgagaaatatcagcttcaacacggccggcttgagccacgaggagtacgaggagtttttcaacctcatcactcccgaatatggcagctactggaacgcaaacaatacagacttgcacgctttcaagaacgctggaggcaagcttcgcacatatgatggcatggtactttcatttcctttcttctactgccatgttgccggaattatcgaaagtcttacgaatggaactcacacatcgcgctttcgcccagcaggccgatccaagtatcctcaccaagggtacagtacatgtccaataaatcccgggtgctcttcccagacaaccatgacttctggcgcttttttgagtcctcgggtctggggcactgtgccggcggcctcggcggccagcccaccaccgtcctcaaggctctccagcgctgggtcgaaaatggtattgcccagaaaccttgcccgtatccttgccagattgaatacattggtggcaatatcaccttggctgagagcttccgttgcacccaagcaatatggacgacacgaccactgaggctgttgtggctggtctttgcaccatcgacttaa

SEQ ID NO: 25921 - DNA, 1213 bp, Emericella nidulans
atgctggcaaaggcccgttggttgctccccctgctgggtgccagcgccgtgcagtgcgcgcatctgaacctccatgcacagagcctgctcgacgagtccatgacactgcaagatgctatctacgatccggcggcttcgtacctgcgctacatttacttcccgtttgctgctggcccgcatgaaacgcggtcgtcagtctggtactcggttggactgttgcagcggaatcagggcagcgacgccgaggaagcgttcaagatactcaggaatgtcattggcgatcaggagaagaatgaaatagtgcagtggtacggcgactacacgaaataccccgagcagccaaccgtcggcactgcggcttatcctccggtggtcagtctccgtctcaggaatcgatagttcggggctcagggctaaaggaaggaaacagatctataactcgtgggaccccaattggcgaggattcattggcaccgcgctgatcatcatctacgaagagttccagcaccttctgcctccagacctcagcgacctgatcctcgaaagcgtgtacaacagcactaaaggcgacagctaccgcgtcggcggcgtgaacgaggacaatctgtatccggcctattcgaacgcctggctgatgaggactgtgaccagctcatggacaggtcgtcatttgaacgatgccaatatgaccgctgccggtgatgcggacgcgtctgatttcctcgacctctttgaccgtaaccacaccctgtccgagtttaacggtccaacatatgcaggcgtctcgctttacgccctcactattgcagcaaagtacatgggatcgacgaacgcgacaattggccgtaacgcggcacgtctcatccagcagatatgggagtacgagtcaatcttctggaacccttatatgaggaactttgctggcccgtgggatcggtcatacggctacgatatgaacaattacgtcgccatcatgtccctctgggtatgggcgctggttggtaaggagagcgcctggaacacgactttcccaatctggacgcttgcccatgccgatgatttcgaggtcgcaccggttattgctgtcctctccgaattccataaggccttgattccagacacggcaatctcgaggctaaccgcgttctccggtgaacgtacctaccatggccatgtttatgcccctccagccgaccatgagccgcggaacgtc

SEQ ID NO: 25922 - DNA, 303 bp, Emericella nidulans
atgcgtaccgcgcgcgagcaaccagcatggcgccagccgactgctcaccctgaagcgcaatcgctcccttcgctgaaggtctacaattccctcaccaagtcgaagacgccatttattccgatcgaccctcatgggaagaaagtgacctggtatgcatgcggaccaacagtatacgacgatgcgcatcttggacatgctaggaactatgtcagcacggacatcatccggcgtattatgcgcgattacttcaagttcaacgtgcatttcgttatgaacataaccgatgtcgatgataaggtataa

SEQ ID NO: 25923 - DNA, 943 bp, Emericella nidulans
gcgctcacctcgacgaccacggttgtgcctcccgaggttaatgagccaactttgtacacgggaatgcttgcgcaggctaaattccacatactcacaaacagtgtctaccaacgtcttatatccgggccgaaccccacaccagaggagacccttagccttcagaaaccgatggaggaatggtataatagtctacccgattatatcaaaaatccggctcccggttcaatgtcagacaatttcgctctagtccgcagtcgactattgtggcgggattggaacttgagaatcctcatttaccgcccgatccttctaagatgggcttcgaaacgatggacgccgaatacgcccaccgagccagaagacccttacgaggctgagtgccggatgctctgcttccgcaatgccaaactgactatatcctccatcaccgatttcgtgaacaattatccgtgcaccagggttggtgcatggtatatgctgtgcgttcccctattttaccaccaattaattctctagatgtgacctcaactaacactcgctccctcgctacagttacttcctcttccaagcaggtttaatcccaatcatcctcctgatgacagatccaactagcgcagaagccccaagctggattcaggagatcgaagcaactaaagccctactcatgtacccttcattgagcaacaacaaccttgccggtcgttgtctcgacgtaatatatcgactttgcgcccctgtatatccgtcaaacgccaccagctctgcgagtgcaccatcacagcagcctcagccgatctacatgccctttgcggaccaactttacaacgatcccaccttcggcagcctcttccctgatgttaatcaagacctgaacgtcagtgcagggatggacttctctgaatgggtgaattttgctccgacgccacataacgacttcacctga

SEQ ID NO: 25924 - DNA, 239 bp, Emericella nidulans
tgcctatgataccggcggcgctgatcggtgcgctggctgtcgctcggctgggtgcaatccacgcggctgtcttcggtggattcgcggccaaatcgctggcgcagcgcattgaggcggcacggccgcgggcaattctgacagcctcgtgcgggatcgaaggggcgaagggccccattgcgtatcgaccgttggtggagggagccatcgaagccagcagcttcaaaccggagaaggtactt

SEQ ID NO: 25925 - DNA, 495 bp, Emericella nidulans
atgacacgcgccgagcacctcgtcaaacaagccaacgccgccggtctcaagccgaaagcagaccttttcatcacccctggtagcgaacagatccgcgccaccctcgaccgtgaccaaaccctctccaccttctcatctgctggcggcaccgtcctcgccaacgcctgcggtccctgcattggccaatggaagcgcacagacgatgtccccaagggcaccgataatgccatcttcacctcctacaaccgcaacttccccggccgcaatgacggcaaccgccgcacaatgaacttcctcgcttctcccgagctcgtcactgcccttacctacgccggctccaccaccttcaaccctgtcactgactccatcaccactccttccggttcagaattccgctttgaaccccctaccggccaagacttgcccagcaaaggcttcgaggccggaaaccccgccttccagccctccgcccctgtgcctgattccagcgtcgag

SEQ ID NO: 25926 - DNA, 1124 bp, Emericella nidulans
atggctcagggaagcctactgacctccttcctgggcgccctacaggcctgcgtgtctgtcctcttaaccctagcctacggcgtcgcagctcgcaaattcgggctcatccagcgctcctccatcaacgatgtctccagtctaggcgtcaaagtcctcttgccagccctaattcttgtgcatctaggcgagcagttgaagctggacaatgcgctgaactatgtccctgtccttggtatcacccccgtatccattcttgaatatccaattgaccatcattagtctggtcaatcacctacacaaccatttcgattcttctcgcgcggctggcgtcgaagctcctcagacttcctgactgggtgacaccagcctcagcgttcaacaacacgacgtcattgccattgctcctgttgcagtcgcttgagggtgttgggagcctgaaggtgatcgtgaaggacggcgagtcgatctctgatgctgttgctagagcgcagagctattttttgctttgcggcgtcatcagcaagaccatcggctatatagtcgggccaacaatgcttaccagcgagcaagacgagagggacgaagctgataatggtcgtgccgaggatgcgcgttattccgacccttatgctgacacagcagacgaggaaagccccctactcaacagccatggacgagtccaaaaacgccaggatacctccaccgtttctggcaagatcaggcgctggacaaagaaagcagtcttcgtcttcccgaaatatgtcgggcagaaaattttcaagcccgatacgcccatggctgatattgcgatcatatgcacgcttatcggcagcgtccttggtcttgttccgcaactgcacaaagcgttctttaatagctacgaggatggaggcgtcttcaatgcatggctgacctcgagtatcaagaacattgggaaactgttcacgacgttgcagattttcatcgttggctgcgagctaggggtcagttttgagaagatgaagaaagacgctaatggtgatggcgacggtgatgggagcggtggtcagagcagtaaccctgggtggaaggagattctgaccatctttttgatacggcttgttatttggccagcgtgagtactc

SEQ ID NO: 25927 - DNA, 1385 bp, Emericella nidulans
gtggtaatggttcaaatgtgatggttgaaactttgaaacgaaagcgcgccgctccggagcagtcagaacaaaaaagcaatccactatctggaagcttaggcaagggcgattcgctgcaacctattctggtcaagagtgagactctatcatctagccctctaatgactcaatctcctcagccaggaccgtctggaacccaagatctggacgatattggtggcactatcgttacccccacgaagaagatccggttctacagtgatcaagattactatatcacttcagagaactccccaactacctcgagattagcgtcggggcgacatgcaccgctccgcaatcgtacagctagggcgaatagtattgcgtcgaatgtacttcagcccgtcgacggcaatttgcggaacctaagcgctggccagatggcaaataagaagcggacagaaaacttaggttcctcaacgaggatatcttcgtttgcggaagatggtgacgaaactcggccgctaccgtggaggagatttatgaggtcaccccaaagtgatacaaaggcgcgagcgtcgtctagagtactccggctatcgaacatcctcgaaggagcaccgccaacaagcccaacattgcagaccaagtcgactacgaacgcttctgcaaccactccaggccgcccgtcacataaaagcgtgagaggcaacctcaagacgactagtagcgaagcaaatgctatgtccaccacaacactagcaacttcggactccccaagacgtcatccgaagacaaggcgcgcagagaataattcgggtaaattacagcctcagtcgggatgttcgagccaaaatgaaacgatccccaacgaaaagccttgcagagcccggccgcctcaccaacttggtcttgaagatttcagaataaacccagactacaacaatggtctaaattatgcctatgacgaggttgtccggaaaagagacgagcgcaaacacgccagtggctgcacgcgtcccggttgttgcggggagaagttctccgccatggcgcgtttcggcatccctcttgatatacctggaaaagcaacaagtgaccgtgaaattctggaagaataccttggggaggacatgagtaaaatagacacactcaactctaagatccgtgatagccttttagtcgaagcaaagaccagggtctttgccaaccgattcggaaagcataggcatcaacatcacaggtcgggaacgccccctgggttctggcgtacagagatgcctggtacacaggaactggaagaggaccgcgaggaggcgggcagactggaaagggagaaagtgcaggagcgctatagagaagctatgcgcccaggtggactgtggaagttcgcagatgagtga

SEQ ID NO: 25928 - DNA, 371 bp, Emericella nidulans
aggaaaacgccatccaaaatgagcaaaacattcacccccgctgaagtcgccaagcacaacaaacccgaccagggtttgtacatcatcgtcgacaactcggtctacgacgttacaaattttgtagacgagcacccaggcggcgcaaagatcttgaagcgtgttgccgggaaagacgcctcgaagcagttctggaaggtgggctcacttttcagtctttctcttgtgaacctcgcgtgagcgaggttcgtgtgtagcatagtgaacactgggctaactagttcttcttgatatagtaccacaacgatggtgtgctgaagaaatatgcgcccaagttgaagattggggaggtcaaggagggtgcgaagctgtga

SEQ ID NO: 25929 - DNA, 864 bp, Emericella nidulans
gcggcgttcattgtccacttcctgatctgcgcctccgccctaaacaccttctacaccttccagcgcaaacggcattatcgcatgtttgaagcctcgatcgacaaagcccccgctacgccgtctgctcaccgtgttcgagttgattctacacccgtgacggcctcgccgcttcgataccttgccaatgcgctttccgggtctgccgagtcgcgggctcaccctgatgccgagcgtgatgtttgggagattgcggtttgggatcccctgccgatttgcctccgtctcttctgtctcttcagtcctgggcatgtccttatctattggctctttctccctacacagctctcggaccctcgccctagtgtcacgatcgttctggctcttgtggtgacgactcttctgtcgattcagatgtcattcctttcgtcgttcttccagaggcaagccaaggattctcagatagttcacaaggaagtgttgagggagtacgacacaaaattcgtgcatcccagaacccagccattgatgagagaggtcggaacccaattctccggtcctaactcggcctttgagaagtacaacaaggtcgagacgtacacaccagccgtcgtcattaacagaggattcaagacgagccctaacccgaattacttaaggcatatcgatcctgatgggaatacctctcggaatagctccttcgcttctacgccatcgagaccacctcacctagtgcaaactccaaatcatttgcgggacgcttctccagccatcaaagctccgctagcttctattcgccagccccaattccgaccgaccccatctcgcacaggtgatggtggtagtctcggagtatactcacacgcc

SEQ ID NO: 25930 - DNA, 866 bp, Emericella nidulans
tcatcggctcacacccttttgaacatggcccccgcccagatacgcgacctcgactacgctgagcgacatggatacactccggtgttgttaaagaaattaattcacgacgctggtcgtggtgctcctctcgctaaggtccagttccgccacccttacaagttcaagcacatcaccgagaccttgatcgccaacgagggcatgtacaccggccaattcatctacgctggaaagaacgccgctctgaccatcggaaacatccttcccctcgcctccgtccccgaaggtaccgtcatctccaacgtcgaggagaaggctggtgaccgtggggctcttggtcgtacctctggaaactatgttaccgtcatcggccacaaccccgatgagggcaagactcgtgtcaagctcccctccggcgctaagaaggtcatcaagaacactgctcgtggcatgatcggtatcgttgctggtggtggtcgtaccgacaagcctctcctgagtatgttattcggatttgtgcccattagctgacgcaggctggggcaattgttggagaacaaccgctaatgatctgtgaacagaggcttctcgtgccaagcacaagtttgctgtcaagcgcaacagctggcccaagactcgtggtgttgccatgaaccccgttgatcacgtaaggctctttttcccagtcttaagctggaatctggattatatctgacatgaattctttacagcctcacggtggtggtaaccaccagcacatcggtaaggcctcgaccatctcccgctacgccgcccacggtcaaaaagcgggtctcattgccgcccggagaactggtctgctccgtggtacccagaagaccaaggattaa

SEQ ID NO: 25931 - DNA, 1680 bp, Emericella nidulans
aatttgcacgaaatggctgcattacttggagccgcttacgattctagcgatgacgatactccgtctgttccagcggcgtccgccccaaaagtcgtcgccgcccctgaggtgaacacagaggtttggtccctacaatcctgccagcacaagagtacactcagcctaacagacctacaggatcaatcgcacatgcgaatgatgctcgctaatacttcctcgaaagcgttgacttacaacgcgacatacgatgacctctcgcgcccctcccaagggccctccaaccccttcaaatccgcaggtgcaggaaacggcctcaagcgcaaaaatgtccccacaggctacgctgaggccgccgccatcagcgagtccacattcactgcgcagcatcgcacgtatcaaagcttgggttatacgcgtaatcctacagccccagagcagtttgttggtaatcttgatcatgctgctcagtttggcggtcgtgatgtcgtgcagatgaagccttcgaaggaagcatcagcggcgttacgagccaagcgacagaaaaagggcgattcgagcattgtcgagggtccgggcgcatatctcggcccttgggcgaagtaccaagatgacgatcaggtttatgacgaagaactcggtagcgacgaggaactcgtggaggtggacgaagacgaagaagaacaggagcaagttggatcggcgcccatgccggccatgagcaaggaagcaacagattaccaagacgacacatcaaaggtcgaaacgaccgaattccacggctcagagcaatacgactacctgggccgaacgtacatgcacgtccctcaggatctggatatcgatcttaagaaacccgtaggcagcatcaagaactacgtccccaagaaactcgtccacacatggaagtcgcacaccaaggccatcacctcgctccgcttcttccctcaagccggccacctcctcctctcctctgctgctgacggcaaggccaagatctgggatgtgtatcactcgcgtgaactgctccgcactttctccggccactcaaaggccatcactgacaccgatttccatatcacgggcaaaaccttcctaacagcctcctacgaccggcaaatgaaactctgggataccgaaacaggccagtgcatctcgcgcttttcaaccggcaaaacccctcatgtcatccgattcaaccccaatcccgaaaactcccacgagttcctcgctggtatgtctgacaagaagatcgtccagttcgatacccgcaccggcgagcaggtccaggaatatgaccaccaccttgcggccatcaacacactcaccttcgtcgaccaaaaccgccgcttcatctccacatccgacgataagtcccttcgcgcctgggaatacggtatccccgtgccaatcaagttcattgcagagccgtacatgttcgctctcacgcgcgcagcggcccatcccaacggcaaatacgtcgcttttcaatcgggcgataaccagattgtcgtttacggcgcgacccgacaagttccgacagaatcgcaagaagagtttccgcggccacaataatgcgggttatgctattgatctgacgatctctcctgacggccagtttatcgcgtccggtgatagtgccgggtacgtgtgcttttgggattggaaaacgggcaagatgta

SEQ ID NO: 25932 - DNA, 726 bp, Emericella nidulans
atgatctcccttatttggacgatattcattctccatatcgccatttttctcgtgaacacgatcggtgcggcgacaattgacaacttggtatggcaaattccttctctacccctctgagaccgcagctaacgctttccttagctatggctcctctaccttaagctcccgacgtcgctgtaccaaaccgcccaggaacaaaccaagctgaagcgcgaagtcgtccagctcaagcgggacatgaacaatacaagctcgcaagatgaatttgcaaagtgggcgaagctgcggcgccgacatgataaggcgttgagtgaatatgaggctttgagtatgcttccactctcatttagttctctattctgtgtgtgggtaaggagggactaattattctttcattcgtttatagaccagaagctctcctcgcagaaaggttcctttgactggttagtcaaaatcgcccgctggctcagcacgaccggtctcaagatcttcatccaattccgatactcgaaaacgcctgtctttgaactccccggcggctggcttccttaccctgtggagtgggtgctagccttccctcgcgctccgcaaggttcggtgagcgtccaggtttggaacagtgtatgcgcgacggcggttacagttattgctgagattattacgggcctggccttacaagtcaagggcagcgcacaggccgtcccggctacggctaagaaggcataa

SEQ ID NO: 25933 - DNA, 1023 bp, Emericella nidulans
atgctccaaaaagatggccagcagttgccatctgcgaagcccgcctctgccctcgagctggcaatattttccagtgactcaccacctcttcagcacagcaatgcggaaggatcgccaactctaccagaatgggtgcgtctagagtctagaattcgccgcaaaacagatctgcgcctctgctctatcgccggaatcctctgcagtctcaatctgctggactcgggcatcctcgcctccgcctcagtaacgacattgctatccgacctcgacttgcagggccagcgctactctgtttcaattttcatcttcaccgtcgccagcatcgtctttcagctcccctgcactgttgccgtgcgctatgtcggcccgcggctctggttcgcgactatcacgttctgcttcggtctcatcaccctatgcacagcattcgtgcaaacctggcgccagatgatcgccgtccgcattctgctcggaatcttcatgtctggcatataccctggtttgacatacctcgttagcacttggtacacgaggcaagagcagcagttgcgttttgcattcctgcagtcgggtgaagttgcagccctggcgacaggttacatcgtcaattacggcttgaatcagctgcacggtaaagctgggctcgaaggctggcgttggatgtacctcgttcagggacttatcacctgcgttattgggattgcgacatactggtggatggttgatttccccgaaaatgcgcgaaagagcttccactttcttacagagacggaggcgaaggttgcagtgcagcgcatccaggctgaccgcggggatgtcgttctcgaccccttcgaatggcgaaaggtccttgtcaacttcacggacccaaaactatacggctttgcgtgcatgtacttttgtctgaatatcgtctccacgtcactcaattatttcctcccccaaatcatcgagtcgggattaggtttctcgagcaatgagtccatcctcctttccactccggtacctaccctgacttcctaa

SEQ ID NO: 25934 - DNA, 385 bp, Emericella nidulans
catggctcaaggacgtagaaggcctgggaggaggcccagcagagcttcccgggcgggatgaagcgttaccagcgggcggcacggcgccggtagaggcagatcgcgcagggcctaaaccaggtgttggtggaaggccaagagaagatggagccgggctgccagacggcggcggcgcaacagacggtggccgactaccgagacctgctgttccagacggtggcatgctgctcccactggcggctctgctaggagggcccatggctttcggtgggggtggagtagcacgagccggggtagcgctgttggggtctttcttgttgacccatttcttcagctctttatcgtagtagaaagaactttcctcaccaagcttcgcgcgaattgg

SEQ ID NO: 25935 - DNA, 480 bp, Emericella nidulans
aataacttcgtcaactcccgccgggtccagcccgccttccacgtaaccctgatttatatagccctcaagacagctcatccagatgtctgggtggacctggtcaaccgatacgttgggcagatgaagaaaaacccaccgaaagaccacgcactcactcctcccttagggtctgcgcgcgtccgccttgagcgccttatctgggatgataagattatgacgtttgttgcgcggatcatgcctggtgagccagaaaacagtggtgacaatgctgagccccagccagactggatctgcgttaatccacttccccatgtcacggtaggcacggtttcgccagccgtcaagccaaaggagagtaatgatctgttgcagaggtggctgcaggagggatcgcagggtacgggcatctgggagatggagatcccgggggtgaaagtcgttaacgggactgtaaatgttactatgagtcggggcaaataa

SEQ ID NO: 25936 - DNA, 417 bp, Emericella nidulans
aattccatattaaccagctgcaaatctcgctcgattccactagcgctggcgtcgcgaacgcacgcccccgatcttgcgcgcgatatgctgaagcagctgcacataatacccaactttagcgacaacccgtctgcgaataaagcacggacggttcgagctctagactactttgattacatccagatcttcccggccacgaagacgcagcacttttcgcggatccaccaggcgagtgggattgcgtatgaggatatgttgttctttgatgatgaggcgcgtaatcgcaatgttgagacggagttgggtgtgacttttttgcttgttagggatgggatgacgagggacgaggtcgataagggggtttgggcgtggaggaggaggaatgggattaagcagaaccagaaccaggagggttag

SEQ ID NO: 25937 - DNA, 259 bp, Emericella nidulans
  unsure (1)..(259): unsure at all n locations
tggttattccgcacacgagcacacagttctctacagcaatgtccacctatcctcaccctctacggcgctcccacaagacatcgtgattgaggcccttgtctcgctcctcattgtctcaacaggcttaattttcggcgcagaaaaactgaagcctgtaagctggagtgagtgggcgaaggaggtcgagaagaagggcgacacggagaatccgcatgcgaggctggaggagagatacagctcttgngatgtgagggcgagt

SEQ ID NO: 25938 - DNA, 525 bp, Emericella nidulans
cgagtaccatccaagcttgcgtccccctccccggaacacgacaaagccctaccaggtggtccagccggaacgccgtcctttaccatcaagggtaaccacatctcgtgggagaagtggacaatgcgcgtaggatttaactaccgggagggtctgacgctccacgacatccgctatgatggacgcagcttattctaccgtctctctctgtccgagatgtttgtaccctacggagacccgcgctcgccttatcctcgcaaggctgcatttgacctaggaagtgacggggctggcatcaatgccaacaaccttcgcctaggatgtgactgcctaggcctgattaaatactttgatggttggcacaacacttcttctggggagccactgaagctccctaatgtcgtctgctgccacgagcaggacgacggcattctttggaaacacaccaacttccgcacacagaacgccgtcgtgacgcgtgcacgcgatcctggtgttgcagacaatcatcaccgtcagcaactatga

SEQ ID NO: 25939 - DNA, 486 bp, Emericella nidulans
atgatttggcaatggtatgaggaacgacaagatggagtcgccctagaaaagggctccgacggtgagatgcttgaacaggttcacagcggcggaagggagctgtcatggacagatatacagcgcgcgccgctcgaggctggagaacagcgactatatcaacaataccttgccaccaagcggcaatttcaagatacagcacaagcgaggggccaagaaaaccttgatactgccgccgacgctctggacgatcgttctagcacttcatccgaggaatcagattctgaacagcagggacgagtcttgaacttttcgacatctctggctcattcaaaccgcaataaactcggactatctgacgaagacctcggtgttaacgtcctccttcggcgaaagaatgtctatgactacgacgtccgtggcaagaagggtcgggagcgaatgtttccatacgtagcgccgaggaaaaagggcgacgaatatggagag

SEQ ID NO: 25940 - DNA, 585 bp, Emericella nidulans
ccgtccgagggtgacgctattctaaaaatagcagacctagggctggccagcattcgcagcaggaattctagatctaatgttgaccccagaagcatcaagttttcaccaacatatgcaccccccgacgtcgagcgcggatgccatatctcccggaaatttgatatctggagtcttggctgcctgttcttggaatttgtcacctacctggtgctcggaggcaacgctatcaatgaattttccgaagagagacaagagatcactacagagtttcctgagcttgctgccgatttcttctactccaagaataagaacttggtgaaacgatgtgttttttcatgggttgatcgactgaagaaaaactcacgctgctctcatatgttgcccgacattctagatctggtcatggctgagatgattatcatcgagcccggaaatcgaagctcgtcccttgatatttgcaagaaactccgagaactcatgagtcaagttgaagaagacgaaggatatcttcttaagccgccacccaaccctggtactaccagtgcacaaactgcagcagaccagcccaatcgcaatgctttaccc

SEQ ID NO: 25941 - DNA, 459 bp, Emericella nidulans
cagtaccgcacaatgtcctccttaatgcaccgacgcccaggagggggcctgttctccctcatgcgagcgctagacgatttcgactcctccctggccaaccggtccttcgacaatcagttcacagcctacgcaccacgcttcgatttacgtgaaacaaaggacagctaccatctggacggcgagcttcctggagtggaaaagaaagaccttgaaatcgagttccctgatcgaaacactctgaacatcaagggccacagtgagtcttcgtcttctaaagaaggtaacgagggcacttggtggtatgtcgagcgttcgacgggagatttccgacgctcgttcaactttcctactccggttgattgcgaccatgttgatgcaagtctgaagaatggcgttctctccattaagattccgaagtctgagggggctcctactggaaagcgcatcgatatcaagtag

SEQ ID NO: 25942 - DNA, 726 bp, Emericella nidulans
caggacaaggcaagaagaagcatcaacatcatgggcgagaaacacatcccagagcatctctatcacgttctctttaccacatcccatatccacaacaacccattcaatgttgttgaaaaagtgcgagtcccaggaacatacatctctctttcggcggccaaggcagccgcgcatagctgcctttttgatgccggttacgaacaggaatggtttgagacctacgagagcagagcaagtcagacggataaagaaactagcgtctcaagacttgcaagcgaagcgggtctgatggtttatgcgaaggctcccgatggaacaatcttccgagtccggatcagaaacacgcccaatgatgctggattgacgagtgacctcccagatggccgagtctctgtgccactgtactacgttatccaggccagcgtggagtacagcggtgatgaagggagtctgatgcgagatatcgatgttcagcatacctccacctcatacgaaaaggcaagggagcttgcgagtaaggtgttgctctctcctgcggatggaatcacaaaggaaagctttgcggagtatagcgaggcggggcccaacgagacagactgtgggtatggggaaaatgtcattgtacacgctgcatcagactatgggaccaattatctcgtgtctgtcgtcaaaacccaggagctgaaagctgtgagtatagctgaggccgcaatgcggattcgttaa

SEQ ID NO: 25943 - DNA, 363 bp, Emericella nidulans
atgtcctccgaccaaaagacaccccgcttctcccctgccaaaacaaccgtcgtcttcctcctaggcggacccggctcaggcaaaggaacccaatccgccaacctcgtccgcgactatggtttcgtccatctctcggcaggcgacctcctccgcgctgagcaaattcggcctgaatccgaatacggcgctctgatcaagaattacatcacggagggcaagatcgtacccatggaaatcaccgtcgcactgctctcgaacgcgatggctgcggactcgacgcgaacaaggacaagtatgcgagcgcgaaaccacgcttccttattgatggatttccgcgaaactcgaccaggcggtattctttga

SEQ ID NO: 25944 - DNA, 429 bp, Emericella nidulans
ctcaattcaccgaacgccgcacaactcacggttagactctacgaaacagcagacaaaatggccacgcaagacccaaccccacttcctcccacaacaatcctctcttcaaaacccatctctcaagccgtcgcccacgacttcctagccgcctacctggaccgcgcaaccactgacccagcgcttcaaccgaacgccgggattagcgagcacggccccgtctcacgcacaactgccgccgcgcccaatattatacttcacaatctgaagcgtgtgcaggcggggctagccggggaagttctggggagggatttggcgattgcagagatgaaggagggtgcgcagctcgcgcaggcacagagtgggaacgataatgcggacggaaagtgggaagataaggcacagtttgagcaggagcaggatggaaatcag

SEQ ID NO: 25945 - DNA, 399 bp, Emericella nidulans
atggaaaacggattcaaccttcacaccttctccggagagactcttgcggagaaccctacggacaagttcaagcagttcctctggcgtcctcgccctcctactcttctcagcaaagaagagcaaaagcaagtacggaagaacctccgcgagtactcgaaggaattcgaggaggaagacaagtatgctgtcgacattgccaacaccgccgttgtcgagaagcgcaagcgtgtccttaacgagtgggttgcttggctcaagcgcgagaaggagctactcacccaggggcatgaagccttccgcctaacccgaaaaaacctgccctacccaaggctggccaggattgctcccaccaacacagaggacatgggccagaccggtggccaattagatgcggcataa

SEQ ID NO: 25946 - DNA, 759 bp, Emericella nidulans
atccttcttaccatccccatgacagacgacgtaatgaatagcagtgcggctcgtattatgaacgacatccggggcgcgaagaagagagctttgggcgtgctcaccaagcctgaccgtgtccaggctggggattcttacacgcagtggattgaaatactcgaaggggtgaaattccgccttgagcatgattactatgttgttagaaacaaccctgacccatcagtcgagcattcgatcgccaggcaggaggaagacgatttcttcacgtcccccccttgggtgagtgagcttgcggcgtatggtgacagatttggaacccgaaatctacagacagcgttgtccaaactcctattccaacaaatccagggatgccttccgctgatcatcgaggagatcaacaagagagcctaccgtatcgatgaggagctctccaggctccctgctccgccgtctgccaatgttccctttatactgtgcaaaaagcttcacaccttcgaagagagaatccacagccagattgacggtgggtccagggaatacccattacagaagatttggaacaacattgcagaggattttaagcgtgctttggccaaaacgcgcccaactgtgaagctgctggcggatttggacaagcagaaaatcgccagcacccgcgatgaagacgattctgaatggagggttgtgcaatactccgtgaaacgcaagttgccgggagactcgcttggcaactggtcttctggcgcgagaacgggatga

SEQ ID NO: 25947 - DNA, 349 bp, Emericella nidulans
agtcgcgatcaaaccccagccgcaagagttccctccttccacgccgcccagtcaacatgccgccctcccatccttgaccccgactccaggcggagggttgttccccaacttcggcacaccgaaccagcaattcaattttgcagactttgtcaacgtgactcccagtcctgcccaacccgcctggggtggccgaacacctggcgggctcgcccggaccccgctggcatctaaagacgttcggaggcgatccaacctggataacctcctgccaccaggactcgacagccctaaaatccgcgagaaaaggccgagcgctgttctgcagctaggcggcgagctacggccatag

SEQ ID NO: 25948 - DNA, 225 bp, Emericella nidulans
atctatatagaccagtcgttggttaaccggggcccatacggccatgattacgaccaccgtgctcgtggtgtgatcaacattatgcgcccgccatacacctctctatcagttctgctcaaggaggagaagacacagatccgtgaatggcaggaccgcgaagccagggagctgcgcaagcgcaaggcaaacctctgggtgcagttgcccgaccgcccgatcacttaa

SEQ ID NO: 25949 - DNA, 431 bp, Emericella nidulans
ggccaacaccgaacgatgctagcgggctatccagcggattcgcggcgcaaccgtaccctacctggcgatctccgggctgggagagaggcagccttgctgtcttctcggacgacggatgccgtttcacaaatgattcgtttggtgggaaggacttcacggatccttttagagtgggggaaaccgtgggtcttgggatgacttttgagctggagaccccagtctcacagcctactcaaaaactgagcgtcaacattttttttactcggaatggccagcacgcgggcggatgggatctgcatgaggaggttgacgaagaagccggtagcgttgagggcctggggggtgaagtcgatttatacggggccattgggttattcgggggagttgattttgagatatgttatcatccagggggttggctctaccgtccg

SEQ ID NO: 25950 - DNA, 1098 bp, Emericella nidulans
cttcgtttgccttcttcgaggcgctctgggaggtacgcttaactacgaatactgtaccccaagaagtattaatcatgcaattgtttaggctggcgtcacccattgcttcgttaaccttggctccgatcacccatccatcctcgaggccatggtgaagggccagaaggagaagccaaatgaatttccgaagattgtcacctgtcctaacgaggtacttccactcacatcgcggccatcttcctcccctgcagcaattgatgaccttactaacacaacagcgaatagatggtggccctctccatggcggatggctatgcacggttaacgggaaagccgcaatgcgtcatcgtgcatgtcgacgttggtactcagggcctcggtgctgcaatccacaatgcctcgtgcgggcgcgcacccgttctgatcttcgctggcctctccccgttcacgattgaaggcgagatgcggggctcccgaacagaatacatccactggatccaggatgtgcctgaccaaaaacagatcgtatcgcagtattgccgctacagcgcggatatccgctctggaaaaaatatcaagcagatggtgcatcgtgctttaaagttcgcgacaagtgacccacagggtccggtgtatcttgttggtgcacgagaggtcatggaggaggaaatcgagccatatgctgttagtccgtacgggtggagaggtgttgcgccgccggcgctccctgctgagggggtggagcttattgcgcaggaacttgcatctgcgaaggagccgttggtcattgttggatactcggggcgtactgcgcggggagtggagcagcttgtcaagcttgcagacacatacaaaggcattcgggtgctagatacgggtggtagtgatatgtgttttcctgctgaccatccagcatccctggggatgcggttcgggatccacgaagccatcaagacagcggactttatcctcgtcgcagactgtgacgtcccctggatcccgactcagtgcagtccctcagactcggcaaagatcatccacgtcgacgtcgacccgctcaagcagcagatgcccgtcttctatatcccggccatggca

SEQ ID NO: 25951 - DNA, 583 bp, Emericella nidulans
acccgtgaattggcggttcagatccaggctgaaatcagcaagttcggaaagtcgtctcgcatcaggaacacttgtgtgtacggtggtgtccccaagggtcctcagattcgcgatctttcccgcggtgttgaggtctgcattgccactcccggtcgactcattgatatgctcgaagctggccgcaccaaccttcgccgagttacttacctcgttcttgacgaggccgaccgcatgttggatatgggttttgagccccaaattcgcaagatcatttctcagattcgccctgaccgccagacatgcatgtggtcagctacctggcccaaggaggtccgtcagctcgccagcgatttcctcaacaactacattcaagtcaacattggttcgatggacttatccgccaaccaccggatcactcagattgtagaagttatctcagaatttgagaagcgtgatcgcatgatcaagcatcttgagaagatcatggagaaccgcggcaacaagtgtctcgttttcactggtactaagcgcattgccgacgagattacacgtttcctccgtcaggacggatggccagcacttt

SEQ ID NO: 25952 - DNA, 893 bp, Emericella nidulans
gctatctgggcgccggtaaaacgacgctgctcaactacatcctcagtgagaagcatggcaagaagatcgctgtgataatgaacggtatatgccatatgcaacagctgtctatacaggcttcctgctaacatgaaattagaattcggtgactgtaagtatccaagcgcttaagccgactggcaaactcaaactcatattggcagcaacggacatcgaaaaacccatgacagtcaaccaagacggacaagaggtaaccgaatggctcgaagtcggaaacggctgcatctgctgttcagtgaagtaagtttccatatttgtccctagacgaatacgcagtggtgtttacatcaggttgcagagactccggggtaatggccatcgagtctctcatggaacgccgcggtacattcgactacattctgctcgaaaccacaggtctggcagaccccggaaatattgctccgatcttctgggtagacgacaacctcggcagctccatctacctcgacggaattgtcactctcgtcgacgctaagaacatcctccacctgcttgacgaacctacgccggaggaaacagtggccgtggagaacagcaaagacggttctgatcacgaccacgatcacgctcactctggaccagtcctgtccatggcacatatgcagatctcccacgcggacgtgatcatccttaataagacggaccttgtcacagcggaagagctagagcatgtccgggacagagtaacagccataaacagcgccgccaagatccatgtcacagatcatagccgcacgcctcagatcgagggtgtagtcctggatctacatgcgtacgatcatctcgatagtctggatttcagccagaagggccacagtcatattgatccggta

SEQ ID NO: 25953 - DNA, 221 bp, Emericella nidulans
tgtatctctccgcagccggtctgctgttcgccatcggacaaatattcaactatgtcatcagcactcacctctgccaggccacagacggaaagatcaacggcgccctgttcgagacgctcttcaccctggtctcagttgtcatggtctggatcttctggagtagcatcacagaagacgactggccgacgccaatgtcacagccaatgccgggatacaactag

SEQ ID NO: 25954 - DNA, 867 bp, Emericella nidulans
tgccgcattgcaccagatacgcttaagctgggtggcacaggtcgctatctagcgcaagcaaaccgcgccttcgacccgcacctgctggagatgttcttcccatggcgccatggcatggccactgtgactgccccgcggcctatgatccttgatgatatcgggacgactctatccaaatggagcattacacacgccagtttcgttcccagtctcgtcgaccagagcgacatcacgccccagcaatgccccaacctgcggttcatgacagtgggcggggagaaaatcacacagaaagtcctcgacacctgggcctcagcaccgaacgtggctatcgtgaacgcctatggtcccacggaggtaacgattggctgtacatttgcgcatatcaacccgtccacaaacctacgcaatatcggcccccctcttacagcttgcacagcgcatgttctgatccctgggaccatgaagtacgcacttcggggccagactggcgaattatgtttcagtggtgatcttgtggcgagaggatatctgaatcgccctgatgccactgccgcaaattttatcactggccccaacggtgccaagatgtaccgtaccggtgatatcggccggcttatgtctgatgattcggttgagtaccttggacgtggagatgaccaaaccaagatccgtgggcagagactagaactcggcgaggtttccgaagtactaagagcttcttcgccagttgccgttgatattgtgacgacggtagcgaaacatcctgacctcggcaaggtacagctgattaccttcgtgtcgagagcaaagaagcgcactgtcaatgaggaggtgcagtttctattctctgatttcggtacctag

SEQ ID NO: 25955 - DNA, 354 bp, Emericella nidulans
cctgccgtagctattgttctgtcttggcccgccaataatgtctctggtcagacaaagcgagccattgccaacgccatgcaaatttccatcggtaatcttggagctgttatcggaacacagctataccggacggaaaccagtccccgatacttcctcgggcacggattttctttggggtacctcgtcgcgaatatcatcgtggtatatattctgtggcaggtcctcaatcgggagaacgccaagaaggctgagatcagggaacgcgacggcctcctgccattgatgggtgatattggtgacggtgagggtgacttccagggagacaaggatcctagatgggttttccagacttga

SEQ ID NO: 25956 - DNA, 689 bp, Emericella nidulans
tgggtcgtcaagaggaggctgcccaggctcttgttgagctacgcggtctcggtctcgaaaaccctcgagtacaccttgagctgcaggagatgaaaattgcgatccaggaggagcaagccatgaacgcagaaggaatgtcgggtatcttgcgagaagccttgaccatcccctccaatttgcgccgtgtgcagcagagccttgtgacctatggcctagctcagctctctggtgccaactctgtcacctcctactttgtccctatcctaacatttattggcatcggcggagactctggaaggaacattttcctcaactgcatgtattccttttccaagttttgctttgcgatcatcgcgtccttgtttttcgtcgatgccctgggccgtcggaagtcgctgtttgttggtgcctctttgcagatggtgtctgatttgtaccttggggtctacatcaagtatagccaagagggtgctgagattgctcattcagcatcgaccggggccattgcgtttatctttatccatggatttggatatgttgtgggtatggctattgcccagataccgcgtccgtattatcatactgactaaatactaggcctctacatcctcccctacgtcttcggtggcgaactctggccgaatcgcattcgatcgtttggctctgctctcggccaatgttttcactgg

SEQ ID NO: 25957 - DNA, 567 bp, Emericella nidulans
atgtcggcggaaggtgaatgtaatcacccctttttcttaactgtcaatcgctttcaaactgatatgtttgacttccacagggtcctgcgacgccaacgacgccgttcaaatcaccattgttcatcccgaccagcaaaaacccaagacgctttctagctttcatcctcaatttacatacccaattttcggcgaggaggagcgcatcttcggctacaagggattaattatccggttgcggttcgcggcgcataatcttcgtcctcatgtccacgtttcctacgatgagaaattcacggctgtggacgatgctgaacctgttgatatcatcggcgcattgaaagagtttcttcctgaaggtagacgcctttgaaatttgaagacgagatcgcggcgtttgtagattcgctaacacgtacaaacctagaggccttttcttcactacccgagttcgaaagtgctgttcaagaggaggacgcgaaagaattcgtgccaccgggcaagctgtcccatagctattctattcgcgggccgaactacgagatctggcagcgttcctgccgatcctaa

SEQ ID NO: 25958 - DNA, 735 bp, Emericella nidulans
atggagccaatcaccattcccaccgaccgcgacggtgtcgcctacctttacggtcacccactgcgcaactcgctctctcctcctcttcatcaaacagtctacaacgcgcttggcctgaactggactcagatccctctgtctacagccactggtacatcgttcacgagatcaccggaaatatccaccttcctctcctccgtccgctccaatcccaaatttgtcgggtcgtcagttacaatgccctggaaggtcgcgatcatgccacacctcgatgacttgaccgaggacgcgcggcaagccggcgcttgcaacacaatatacttgcgcaaggaagacgatgggaagacacagtatgttggcacaaatactgattgtattgggatccgggaagctctgctacaggggtcaccgaacggtgcggaacatttcaaaggaaagcctgcgcttatcgttggtggtgggggcactgcgcgaacagcgatctacggtctgagaaagtggctgggcgttagcaagatctacatcgtcacccggaatgcgaagaaggtggaggcgattcttacgaaggataagcagcgaaaccagtcgccgcaggttgcgttggtccccgtctcagatcggtctgagacgacgacgctagaggcacccgttgctgttgttagcgggatccccaattacccgccgcagacagaagaggagatcctaagcttgggtctccctataggagtcgtgtga

SEQ ID NO: 25959 - DNA, 850 bp, Emericella nidulans
cattccattattaggcaaatggagtctgctgatgggatagggttgctcgagcggctcgatgatgatgtcgatgacctcgaggaggctattgcgccgatcttgcaaagcaccgttgtcgaaacttccaagaagctgcctgttctggataaagccaaatttcatgttatgactgcttatgcgttggagtccttggtattctgtatgtatttcgctctaccacgagattgagtgctcactatgatatagcgtacctacgcctgcacggcgtcaaagcgaccgagcatcccgtctacagagaattgaaaagagtgaagcagtatttcgacaagataaaggcattagaaaccgaacccgagcagaggacaatggttcttgataagcaggcggctggacgttttatcaaacatggccttgtatgagactcgaaaacaacgttccgttttaggcgattacttacttgacctaggccggaaatgagaaacttgacttgcaacgagaggagcaactagcgaaagaaaaggcacgcgcacaactcaaggcatcactgctggctaagaaagcaggcgacacaaccgaagagccgcccaaggatgtttcaagtgaatccgaaatagatactgatcccacatccgacatcgcgagcgacgccaagggcgccgacttactacaggaagtgcaatcttctgaggcacctggagctagctccaagaaaacaaagaagaacaaagcgaagtccagtgcaaaagatgagagacgtaagaagcgtcgcggcaaggaagaattcaaggatcacaacaaacagagaaggaagaagaaagatgatactcgaaaggcaaggaaggcaacctga

SEQ ID NO: 25960 - DNA, 561 bp, Emericella nidulans
atgaagctcgaccagttcctcgccatggaggtgggcagcgaccaggacggactcatcgacctgcgcggacttgagtacatctctgactatgatgaccatctcatgtgtccaatatgccactgccctttcatccggccagtgcgcctgggatgcgaccatgtgttctgccagacgtgcttgaactttgctatcagaacttttgctcccggccgagacgacttcacctgtcccacatgccgcactcctacacgggatgtctatctcaacgttccccgactcttgaacaacatgtgcgatgatcttccggtgcggtgtccgttttcgcctgaaggatgcaaggaggttgttccgaggggccatatccagtcccatgcagacaagtactgcagatataagttgatggactgcccgagtccttcctgcgatgagaaaactcgcaagaaggaccttagtccggagaataaatgtatgcatgaactccacaaatgtctgcgctgcgacgcggatatcatggagcaggattatgaggtacagaatatatcccggtcagatctgcatata

SEQ ID NO: 25961 - DNA, 582 bp, Emericella nidulans
  unsure (1)..(582): unsure at all n locations
aagtcagatgatganagcgcatgggaaggctttgagagcgagtacgagaagccggaatggctgaacaagaagcgcccagaaaggaagacgaaagcgcagagaaacaagatcaagcgacgaaggaagctgaaaggcaagcgaagtgggaggcacagcagaagaagaaggaggagcaacttgctcaatataaggctattgcagagcgcgtcaagcaacaggagctggaacgtcaggaaaacgacagtgacgctgatgactcttctgaagaaggcgatgacactaagcttcgccgcaagcctctggggaaattaaagtatgtttcgtcccttgagttcttcggctccatttgctgactacaatagggcccctgaaaaaccaacagaggtagtactaccggacgagctgcaagattcgttgcgccggttgaagcctgaaggaaacctcctcgacgaccgattccggacgttgatcgtccagggtaaactcgaggcgcgcaaacccgtaacgcaaccacgaaaggccaagaaagaggtgacagagaaatggaaatacaaagacttcaaggtgccgggtttaccataa

SEQ ID NO: 25962 - DNA, 366 bp, Emericella nidulans
gcgagattgatcagtacggccttccaagagatcacccccacgtcgcgctcgttcacctacacatcctccggtggtctgctgcacgagacgatcttcacacaaccggcgctggtggttatggacgtggcgcggttccacgacatgcgcgctcgcggtctaatcaacgaggacagctgctatgccggacactcgcttggcgagtatgccgcgctcgctgctatgggcgaggtcttcacagtagagggagtcactgccgcagtcttctaccgtggactgaccatgcagaaatccatcgaactggaccgatctggccgggactattccatggtagctgcgaacccgagccgagtatccaagagtacgtcc

SEQ ID NO: 25963 - DNA, 1377 bp, Emericella nidulans
aggatggccaaaaagtcaaaccaaaagcctgcctcgaagacctcttccgcggcggctctcgcagtcgcggactctacaaacacaggaaataagtcatcgatactgagggcggccttcgccccttctggctttcaattggccttgttcgcatccgtgatccagggtcttgaaggtcaaaatcttcgcattcacgatacaaacaccggccggttacaatgcgagcatgttttgggcccgaaggaactagtaacgtcgttggactggggtcattactatggccgacgagatcagtcaaagaggaagagaaagcgcccttccgacgttaatgggacagccgaactcgaccaaggcgatgtagtggttgccttcggtaccaacgcgtctgatatccgcatgttctcgcctgccgaagataagattgtcggaactcttgccggtgggcatacaggaggagtaaaggacttcaagtttacagcagataggcctcaggaaggttggagtatcggtggggacaacaagctggtacagtgggatcttgtcaccggccaaaggacaaggtaagggttgcctgatatgacgagctgctattaagctaactgaaataaaagagtgatcagcctttctactacctctgcattcactactctgtcccgcccgctcgcctctaacccgcctgtcatctgtgcatctcaaacaccccacattgtgaatctcgaagatgaatctcctatcaagtttcctgcgatgcgaaactcaataaagacaatcatcacatcctcgacaagctccatctctgatgggctgttcctagcatcggataatgatcggtatataaacgtcttcgacccgaaaagcggacagcttacgatgaaccttgtggctgaaaaagaagtaacttcactatcgatatataagacgcagggtacggaagccaaactagcgctggagaaacaagttcttgcggctgttactcaagatggtactattgaactctttgcgcggccattcgtccgacctcagggccttgaaggatcaaaaggttccagtctgaaggcgcgatctatgcaaatgacgaggcgagcggaggcctcgctcagaataattaaggcctctgagtcggacgatttagttcctgtcgttgccgtgtcgttccagggtcctgacctgctcgttgcatgggcacagggaggtatcattccattattcgagcgagtaaggtggcttaacgaggaaaccgacgagctggcttttacgggcgtgaagactatttcgaagaccaaatctagctccatccttcaatcagcgacgactaacggaatgaagaatgcaaacgaaagccacgtcaatgagaagaagatatgtcgtcgagcagggtga

SEQ ID NO: 25964 - DNA, 719 bp, Emericella nidulans
atgggacaagagcgaccaacgggccgcagtcttgcaagacgcctcctactggcggcactcgaccgtgaagagcagggctatcctcctgcacaccagtccctctatccgactattggaagcataaattatgatcccaccgtcgagaccccagagcccaccgatgcaagggcgcgacgctttacgatcaacaggacagatgctagcgtcctcatcccgccaagtgacaagctcctcgtcttccgcgctctcactgggatcgacagtacgccggcactaaatctgtcacaccatactcctcgaacagcgcctaatattggcatctacacgcgggtcgtgagggccgaaactaaagccgccaaacgataccgcttccacgctgccttgatcaacacctgtctgggcatccagatcgtggtcgctgctgcactgacagctctcggtgcggcgcgcggccctcacaatgctgtaactgctttcggcgccatcaacactatcgtcgccggtattctcacctacctgaaaggctcaggccttccagaccgcttgaaacactatcagaacgaatggcgcaacattcgggaatacattgaacagcgagaacgtgaattatgtctagaaggatgtggcctggacgttgaagaagagatccggattatcgagcaaatgtacgaaggtgtcaaacgcgagatcgaggcgacaaagagcgggggcgacaacag

SEQ ID NO: 25965 - DNA, 707 bp, Emericella nidulans
aacactatggcgaagttccgtccccagtggtgtctgcccatccgacgagggaaagttccgcaccggaaatcgctgcggacctagtcgatgaacaaaagaaagggttttttgcctacttccggaccaaggagttttacgtaactttgctacttgggtaaatgcgcaaattgaaataccatcttacgcactgctgacgatccattctgattagacagtttttggcgatcgcgaacactggcaccaacacgttcaacacgcttcttgcgaacaagaacaccaatatcccggctttccaaacattcttcaattattccctgctgaacatcatcttcacctcgtacaccatatacaagtatggtatcaaaggctggtttgagatgctatggaagcgcgggtggaaatgtgagtcctcatttcgtcccgccgaagacatatctttagtcgatcgatctttaataaatattgtcatagatatcattctttcattctgcgatgtcgagggcaactacttcatggtcttggcctacgagtacaccactatgatgagcgcgcagttgatcaatttctgggccatagtcgtcgtagtcgttgtatctttcctgttccttcgcgttcgttaccacatttctcaggtgctcggcatattgatttgcatcggtggtatgggtatcttgattgcgtctgatcatatccaaggcacgaacggg

SEQ ID NO: 25966 - DNA, 563 bp, Emericella nidulans
agtgtctcgtcaatgaactggccgaccagcgccgcaagctaccgcagaaacgcaagctcgagagtctcgagcaggcaaatgatatcttgacccgtctactgaaggccattcgcaacagcgagaataaaaaaatcgtccagcttatgaacctgatccgcagtaacccgacactgccggaactgcaggagtacctcaccgagaactttacacggtcggagattgagaagtcgcctgagctgagcaaggtccagcagcatctagagcgtgaagctaatgtggttgagcagggtgaagctgtgcccaggccgccccgacgggtgctggacgttcgacgtcttgctgataaccccgtttatcgcgttccagcaaagccgtggaccacagtcaccgacgatgatgacctcgtttcgcacctgatttctctgtattttacgtggaccaacccgtttctatgttggattgataaggatgtgtttattggtgagatgcaaaagggcgacctccgcagccggtactgcacgccattcctggtgaatgcgatcctatctgaggctagtgtatgt

SEQ ID NO: 25967 - DNA, 411 bp, Emericella nidulans
atgtatgtctctgaagacgagctcactaacaccgcggtaactgattggttatactataggaatcgaacactctcgggcagaagaaggagctctgtcaacactggccgtcatcggttcagtattggcaccttccgaggcctccaacatcctcagctaagcaagaagatgaatcgggtgatcaaaagcgagaattcagcgatcgccgctcacgagtccgctgcgaggcagcgcatgtcgattgcggcgcagatatccgaatggggagagaccaccgaggacgaagccatttcggatatctcagataagctgggcgtgctgatggcagaaatgggcgaacaggaggatgtttatgcgcagcatctagaggattatcgttccgtccttaagcatattcgcgatacagagagctct

SEQ ID NO: 25968 - DNA, 554 bp, Emericella nidulans
gaagagaatgctgagctgcggcggctgatgccatttgctatcgttggctcggatgactttgtggaaatcgacggccgcaaggtgcgggccagacagtacctttggggtgttgttgaggtagagaacccccggcactcagacttcttggcgatccggagtgcccttctccacagccatctggcggatctgaaggagatcactcatgatttcctatatgagaactaccgtaccgagaagcttagcaagagcgttgacggcgctgccacgtacgtatatgcacttcttcactttctgatcctgcaattctaatgaacctcagcactggaaccgattcatcgatcaaccccgaagacctggctactcaatccgtccgcctgaaggaagaacagctccgtcgcgaagaagagaagcttcgggagattgagctcaaggtgcagcgtgagattgctgagaagcgccaggagttgttggctcgtgagagtcaactgagggagattgaggcccgcatggcccgcgaagcaagccagggagaagccgccgaggccgagcagtaa

SEQ ID NO: 25969 - DNA, 1022 bp, Emericella nidulans
gcttatcaccatctggcctgacccagttgattatgaatacaatcataacaattctgacgagaaggtctcggataggaaactcccagaatggctggaccaggccggtaatcagggcgatgacattgccggcattgtcgaggctgtcggtgacaatgtgaccgagttcaagcccggagaccgtgtcatggccttccacgagatgaccaagccaggcggcagttatgccgagtatgctctcgcctggcagcatactaccgcgcaccttccgaagcatatctcattcgagggtgagcccgtaatccccctgatagtttgtcgaaacttgctgatcaatccggtgacattcagaggcggccaccatcccgctggcggctttgacctccgtatctgctctgtaccaccacctccagctccccaccccttggagtccggccgcatcatctatcccgctggtaatctacggtggcgcgtcagcaattggcgcctttgccatccagcttgcccgcaagagtaatatccacccgatcatcgccattgccggccgcagcgcgccattcgttgagggcctgattgatcgatccaagggagacaccatcatcgactaccgccagggcgatgaggccgttatctccggtatcaaggacgcattgaatggcgccgagctcttccacacatatgactgtgtcagcgaggggtccagctttgttaatctgggtaaggtggttgcgcctggcgggaagattgtcaccgtccttccgttccaggattaccctggcgttccggagcacgtccaggtgatcaagaactcggttggttgtgtccatcaggatcagaaggatctgggctacgtctacttccggtaccttgctaagggccttcaggacggttggttcaagcctcatccgcatcaggttgtgcccggtggtctcggagggttggagacggcgctgtgcaatctgagagatggcaaagctagtgctaccaagtatgttgttcgcattggggagactttccgcctttga

SEQ ID NO: 25970 - DNA, 1152 bp, Emericella nidulans
atggctacctccaggcctacctcaacctcgacctggtccaggcttgcactcgccttgtccgcctcattcatccccctcccagcttacgctcagctttacgataaagtaatccagaccgagtacggccctgtcaagggcttcaaatacttcaacaagtcgaccctggagaaaaattgggggagttccgctgacggcagcaacgttgcagcctttctctccatcccctttgccgccgacactgcgtacgagaaccgctggaaaccgcctcaaccgcgcgagccctggaatgagaccctcgtcgcggatacctggggccctggctgcccgacctcttacgcaacggactacagcgaggactgtctcactgtgaacatctggacgggcgcgaattcctcgtctgacagactgcccgtcatgatctacaatcagggcagtgacgagccgagcaacagcgctgtttactatggcggtggcgtggcgcggaaaggcgttgtcgctgtgacattcaaccgccgtgacgatgtctttgggtacctggcgcaccccgaattgaatgccgagtcggagaaagaaaatggccacagctcgtcaggcaactacggaatcctcgacttcctcgagctgctgaagtgggtgcagcgcaacatcgagaacttcggcggcgactctacgagcgtcacgatagtcggacagtccttcggctccgcgcaggtctaccacgccgtcaacagcgggctcttcaagggtctcttccatggagctattgccgagagtggcgtgcgatacccctacgacacccttcttgccgggctcgcagattcgtacgtcaccatgccgaaagctatacagaatggtctcaactacacagcctcgcacaatgccagctcaatcgcggacctgcgcaagctctccaccgaggagatcatggtcggctcgggtgaccgtgtcacagatgccgatatctggtgggtgactgcgctctcctgcatgtacccgctcaaatacaagcccgtgctagacggctacgtcctccctgagaagtacatcgatagcctgcgcaatgggccggctaatgacgtcccctttatcaccaacaacaacaaagacgagagcggtgctgcgacgtcgacagactacacggctagggagtac

SEQ ID NO: 25971 - DNA, 429 bp, Emericella nidulans
atgtcgcagttcatcacgcaggcgaatgtcggtgtctgcctgtcgcccctgaatatcgtcggcggggactttgggctcagtgagcagggcggactggcctggttcctggccggatactccctgacagtcggcacgtttattcttgtctttggtcgatgcggggatctcttcgggtaccaccggatgtatatcatcggattcctttggttggctctctggtcgcttgtcgcgggcattagcgtgtactcgaactatatcctgtttattatatcgcgtgttctgcagggcctaggccccgcgatgctcctgcccaatgggctggctattctcggcgcgacatatgcgccgggaaagaagaaggatatgctgtttgcgctgttaggaacggcggctccaaccggtgcaattattggcggtgtatttgccgcg

SEQ ID NO: 25972 - DNA, 351 bp, Emericella nidulans
ctcggccgcgtcgtcgaatttgaaacccacttcgaccgccaccgccctgaagaacccgctcctaccgtttcgaaatggaagaacaaggttgtacccggtggcagcgcgatccacgatcttggctctcacctgctcgatcaggcgctgtatctgctcggcaagccggagcgggtgacggggttcgtgggctcgcagcgcgaggtcaatacctccggctttcaggactcgttcacagttctgctgcactataagagcgggtcgctggtgacggcgaaggcgggcgttgtgagtccggaggaagagcagttgaggttctgggttaggggagatcagggcagtttcaagaaggtt

SEQ ID NO: 25973 - DNA, 1778 bp, Emericella nidulans
acgtgcccgcaatatggcggtcgaagacgatgcccagaaccccctgcatacgggcatttatgagaaggagaaacagcataataaggaagagcggacaaatccatccgaacaggccgacaatacccacgccgaacatgcttcgcgatcatccagagacagtgactcctacggcaaaaccaggccggatggaaaacgagagctgacggaggacgaagcgtacgatgcgcttgggttctgcttcccgtggtataaaaagtggacaatcctcaccgtcatctttgttgtgcaaatgtctatgaacttcaacagcagcacttactcgaatgctgtttccggcctgacagaggagttcaatatcagcgcgcaagcagcgcgagtcggccaaatgattttcttggtcgcctacgcttttggctgtgaattgtgggcaccatggagtgaggagtttggccgatggcctatcatgcagctcagcttgacgtttatgaacatctggcagattccttcggccctggccccaaacttcggaactatggttgtcagtcgtttcctgggtggtatctccttagctggaggctctgtgacgcttggggtgagttatcatgatcctcgctgacgggacgttgaaaagactgtcagaccttcatgatgaatagcaaaagtagcagagagaaatatggctgactttccgcatccagatgacggctgatatgtgggaggccgacgatcaaggctttgcggtggcatatgtggtactttcctcagtgggtggtacaacaatcgggcccttcttcggtggtatgatggagcagtggctgcactggcgctggaacttctggatccagctcatcattggcggcgttacccagctattgcatctcttcctcgttcaggaaacgcgcgcaactatcctccttgaccgcgaggccaaacgccgtcgcaagtccggggaagaccccaacgtctacggccccaatgagctgaagtccccaagactagacttcaaagagtttcttgctgtctggcgccgaccctttgaaatgttcctccgcgaaccgatcgtgctctgcctttctttgctttctggtttctctgacgcgctaatcttcacctccatcgagtcgttcgctcttgtcttcaagcagtgggggtttgaccctctgaggatcggactctgctttgcaacgattatcataggataccttgtggcctacgcgatcttcatcccggacatctggcgtcagcgcaagatccgcaaggagcacggtaatgccgcccgcctaccagagcgtcgccttctactccttctcttcatcgctccgctagaagccatcggattgtttggattcgcgtggaccaccatggggccagagtataatcactggattgcccctctaatcttcatgttcctgatcgcaatcgccaactatggcatttatatggcgaccatcgactacatggttgccgcctatggcccgtactccgcctccgcgactggaggcaacggtttcgctcgtgatttcctcgccggcttatctgccatgtacgcaacgcccatgtacgagaacatcggtggccgattgcacttgcagtgggcgagtacgatcctcgctatcttggctatccttgtcactatccctatctacgtcttttactggaaaggaccgcagattcgggagaatagcaagtttgctcagacgctggcggccgaccgcgcccgtcacgagggtagaagggccagctatatgagtgccagagaaaagccctacgcggcatga

SEQ ID NO: 25974 - DNA, 1296 bp, Emericella nidulans
atgtctcttcaaacaatcgggatcgccactgtcgcggtggtctattttctcatccgctacttcaaccgcacagacatcccaaagatcaagggtctccctgaagttccaggcgtaccgatctttggcaacctcatccagctcggtgaccagcacgcgaccgtagcgcagaaatgggcgaagaaatttggacctgttttccaggttcgcatggggaataaagtgagttcagtgtctgcatttgtaacagacgacaatattgcgagaataattctgacctaacacagcgcgttgtcttcgcaaacaccttcgactctgtccgtcagctatggatcaaagatcagtccgcgctcatctcccggccgacctttcacaccttccacagtgtagtttccagctctcagggattcaccatcggaacgtcgccgtgggacgagtcgtgcaagcgtcgtcggaaggctgcagctacagccttgaaccgcccggctacccagtcgtatatgcctattatcgatcttgagtcgatgtcgagtatccgggaattgctcagggatagcgcgaatggaacaatggatatcaacccgacagcgtacttccagcggttcgcgttgaacacgagcttaacattgaactatggaatccgaatcgagggcaatgtgaacgatgagcttttgcgcgaaattgtcgatgtcgagcgcggggtgtcgaacttccggagtaccagcaaccagtggcaggactatatcccgctcctgagaatcttcccgaagatgaaccgcgaggctgaggagttccgggtgcggagagacaagtatcttacctatcttttggatgttctcaaggatcgcattgcaaagggaaccgacaagccctgtattactggaaacatcctcaaagaccctgaggctaagctcaatgatggtatgccgtccggtcctgtccgcgcttgaaggaaaataaagattaacagagtctagccgagattaaatcgatctgcttgaccatggtctccgccggcctcgatactgttccgggcaacttgatcatgggcatcgcgtacctcgcctccgaagacggccaaaggatccagaagcgcgcccacgacgagatcatgaaagtctacccggacggcgatgcatgggagaaatgcctgctcgaagagaaagtcccctacgtcacagctttggtcaaagaaacgctccgcttctggactgtcattcccatctgtctgcctagagaaaacaccaaggatattgtctggaacggagccgttatcctaagggaactgccttttgcatg

SEQ ID NO: 25975 - DNA, 465 bp, Emericella nidulans
agtcgcgacctgctggctttctttatcttctggatcctccagtttggggtcatgtttctgcacccaactgttttgcggcatttattcgttatcaaggccgtctacacgactgtcgctttactcggcgtcttgggatgggctgtgcacatgaacggcggcagtctaggagattttgcattcgacactcaggtgactcttcatggctcagcactcgtctggcctatgattcaggcgattaacagcgtcatgggcgcgctctgtccgattctggtcaaccagcccgatgttgcaagatacgcgacgagaccctcgcaggcgacttggtcccagtcgctggggatcctgatcagtaaagtgctagttatgttcgtgagctgtgcaaccacgagcgcgacgacacatttcttgggccagagtttctggaatgtctgggatttgtacaatgagatcctggaccagtactaa

SEQ ID NO: 25976 - DNA, 489 bp, Emericella nidulans
atgctgcgcccttcacttgtggctcggcgcttgggaattcgtagcttgctattgcttgcatttcagatatcgaaggcccggccagaaactagcttggtagagctacttcggcggacaaaaatgggcatcgctgaggtggaaatggccagatatcagcaattcgccagtgaatatcaaagcgaccatctccagatgcaagcacagggggcgaaagagctcctcgggatcattgataccaggatctcggaattatattggcagtacgaaatgcgaagtgagtatacagatatgggttacccacatgtctacctttctgttctcaaggaagatcatacaagacaatgcgcgtgggccaaaggccgcaaatatcgccaacttgcatattcaatcatgaacctctcccgtcctatcgatgagaggcattgctttatagcagaattcgtccggcgcggtcggcgaatttctgaagataaattgagactactagat

SEQ ID NO: 25977 - DNA, 1125 bp, Emericella nidulans
atgtgtccaatgctcctcaactccttccaagacggtccgacaatgatcctatcccctccccaggaccacgcctttcgtcaattccctcaccagccgaagctggaagcttcatctggagtcagttctcgagcgtccttcgcggatgccctgaactcaggcgcgaacccttttggcacttcggtctctccaagcctcacaatcagtaacaagccatctcgcaagaggtcgcgtgatgatgtcaatgctgaggagactcccagcgagcccgcttcaattgttccagtcgcgcctccagcgcctgaggaggagcctatttacggagaaggcatgaccctgctcaaccctcgcactgggctggcgctctccgccgaaagccaaaccgggacctggtacgaagaggagtatgaaaaggccattgccgctgccaaatcttccgcgtcgcaaaccaatctgccctctcaagcgagccgcaagtcgcagcgtctcgatccctcagctcctagcctcgatgacattgcctcctctagattacaacggcaacttcaagaaaatgatagcgatgacaaccgccggatcctcaacgcttcattatctcgatcgagcccattctcgtctgaagaaccattggttgacgacgctacgcgtcttcttggaatcagttggcagcgcgttagagccgatgacaatgacatggccgctgccgtgcgcggttggaagaagtacatcgaccgccaattctcgcaatacctctctgaggccgaaatcctcatgaaaaatcgtgctctcaacgcctaccttgtttctgcgcggccagtaactcctttcgcggggccggctcagttgcccgcatattatctgttcaatgacgacctgactcacgctcggcttgttgcttcatcctgggaggcttgcctccgcaatctccaatcctcgccagtggtgtttgagggcaaacagattctcaatgcctcggacaagccacagacccagcagtgccagaatgtactggggacgactcccgccgaaacagggctccctcttctgcaaacgttgactgctcagccggctagtgtcggactgaacaatagcgtggaactggggacggggatggacattgacccataa

SEQ ID NO: 25978 - DNA, 249 bp, Emericella nidulans
atgccaatgttcgcgccgactgtcaactcctacaagcgcttagtggagaacttctgggccccggtaaccgtgtcttggggcttagagcaccgggccgcatctattcgtcttattacgccgccaaccgcgagcccgaaggccactcggctggaggtacgtgtgcctggagccgatgcgaacccgcatttcgtgctggcagccatagtcgaaatgggatggttgggtgtggaaaaaaaaccccagattccc

SEQ ID NO: 25979 - DNA, 1467 bp, Emericella nidulans
agcatcataaattcggtccctttcacttttctgatcggtccaaatcatacaaaactcaccatccagtcgggccttgcccgccatgtctccaagcctctagatcacctcatcaatagtggcaagacgcgggaatccaagcatcagatcgccatcttggaagacgaagatgttgagacctttgtcgcattctgcgagtatgcgtacaccggcaactatgccgtgccaccgcctggatctcgagaaaacgaaatagagccagtctctatcaatcatgcgctcaacggcgcctacccggacactggtagcacctcgccggcagcgagctgggagaagtcgcctccaaagccaaaagtcccaagcgaggcatgcccgggtaatcctgatgacagcaatgatagagatggagttggtgacggtgacgtggagccgcgcagagatcccagccagcagtcaagttccaaagacaggcacgtgtaccactcgacaaaatctgagtatacagcccagaacccagtcgctacacctcacgactctgataattcgcctgccccgtgggcggaagatcccccaactcgaggtagaagacgccgcaggggaaagaaagatcagcaaggggtcactcaagacgcgacctccaagctcaccccgccttgcacgccccccggcgccgcacaagtcgagcctgatatgccggctgcagaacctagtgaagagttcccggtcttgcccggtgctgaacaatccacctcacagtcgccggagcgtccgggccgaactcttagcaacggcgcgaatggaagtggatttggaggcatcaggaatcagagggaggagagtttgaccaaaagccgagtgcggccagtcatagatacgtctttcgccaatcagcagttctctcctcgccacgagaaaggaacaacaaacctgtgggaggagttcactggcatcgatgacagcggttttcgtccgtccttcagaacaagatccccaaacccacctgctgggattacattgccctatctgatattccacgctaagttgtacgtctttgccacacgctacctgatcccgggtctcgcccatctgtgtctgcaaaaactccattacgaccttctaaatctggcgtttccagacccagaccccgagaatcagtatgaggagcagctcgttctgaccactaccaaggctcggatgatcgtcgatctcctcaactacacctatacgaaaaccacccgtttagagccgataacgccctcgtcggcaacccagcttcgggataacgagctgcggagactcgttgtgcattatgctgcttgcaaagtgcgagaccttgcagtgtattgtcccccagtggagcccattgcaggtgctgcgttctatccagaacaaccatctgctcgtggctttcgggctcttctggatactcttccggagcttgcttcggatttgatataccgcatgatatag

SEQ ID NO: 25980 - DNA, 570 bp, Emericella nidulans
aaaagacatgctctggctgtttcgtctgcctcgaaggaacccctcgatgtccagctgcatgtcacggcagtttctgtctcgcttcctttcaatggggagacccaatttggcgacggtgaattaaccgctagacaagtcgaggaagccgaggcaatgttcgaggaccgtgaagtcggttccctaccagttgtacgagtgcccacgatggctcctcctgccgcctggcgagctgcaccggcaccatctcaagcccggctgcgtgccaaggttctgaaaacaatgcaaatccagagcgttgagcctttctggattggttaccgtgataaaaatgcttcagcggtcaatcagatcttaatccgactccctggtgccgtggaggcaaaatcagtagctgccccgcggaaagcaggctcctatcccagtcctcggccgcgcggacagtcttcttacaaatctcgcaagaatacgaaaccacgcgatggagccagtggctcgaacttcaagagagctgcatctcagcaaacaaatgggaacagtcagtcacagcgacagctgcgttcagctcaataa

SEQ ID NO: 25981 - DNA, 508 bp, Emericella nidulans
gactgtcatcgcctattacatctaccgcagcatcttccctggcgacaatagcaaggacatcacatgggaggagtttaggagcaaatttttggataagggacttgtggagagattgaccgttaccaacagaactagggttcgtgtcgaactgaaccgtgatgcggtggctcgaacgtaccctgattcacctgcagcttcaccaaacttctactactatttcactgtcggatccgttgagagtttcgagcgaaaactcgaccaagcccaatttgagctcggcattccaacttccgagcgtatccccgtttcctatgttgatgaagtcccatggatggctaccgtgctgtcctttggccctacactcctcttcatgggtggtttattctatctttcgagacgtgccggcagagcttcaccaggtagaaacggcatatttggaattggcaaaaaccgtgctaggcgcttcaaccatgaaacggatgtcaagatcacgttgtgttatgttgct

SEQ ID NO: 25982 - DNA, 835 bp, Emericella nidulans
tggcaaaactgccctcgttaccggcggaacccgcggcattggcgctgcaatggccattgcgcttgcagaggccggggccgatattatcctcattcaggtgcgtccacccatttcacctccccatatccactacacgacaacgatccactagctaacatgcgacgcgcagagagacaccagtaacaccacgacaagagaccagattacgcgcttaggccgcaaagccacaatccacgccgccgaactttccgaccggtctgccgtaaaggccattatcccaacgctcgtatcgcaagggcacaacccaacaatcctgctaaactgtgcagggattcaacggcggcatccatccgagagattccccgacgaggactgggacgaggttctcaacgtcaatttaacgagcgtcttcacgctctgtcgcgagttcggcgcttacatcctctctctgccagagtcttctttcacgccgaataagaagaagggctcgattatcaatgttgcttccttgttgtcttaccagggtggcattacggtccccgcgtacgcggcgagcaagggtggtgttgcgcagctgacgaaggctctgagtaacgagtgggtgagcaagggcattaatgtgaacgcgattgcgccggggtatattgatacggatatgaatgtggcgttgatcaatgatgcgaatcggaatgcggggattatggcgcgcattccggcgggacgatggggacggcccgaggactttaaggggccggtggtgtttttggcgagcgaggccagtagctatgttagtggagagcttgttacggtcgatggaggttggatggggaggtag

SEQ ID NO: 25983 - DNA, 1122 bp, Emericella nidulans
ttcagccaattcaacagcctaatggcatcctctctctcagacgcgcctctttccttctgggagaaggccgacctcttcgcaggcaatctgtccgtgcttgggaccgttctgtatagcgtcatcacaggcgtgttccgaggtaaaagcggagcgaagacctttaaccaccatatcgctcacgccgcagttcgcaaggccatcacgcggttgtctgtgcggcagcttcagtgggtttacctggttcttatgctggctcttcttgcgcagagtttgagtagctacacgggtattgcaagcagcttctaactcaatgtttactatagatcccaaaatgcaactaccatccaagcgtatgaaacatacatgaagcagaagaatctcaccctagagattgtgacactcaatcacggcgcccacggcctctgggttgggaataagaatgccagaaacgttgttgtttattaccacggtttgtagacccaacagcacaacaacctgacagaactaacagcgagccaaaaaggtggcggcttcgtcctccctgccgtcccgggacacttcattttccttggtgagatcctcacggagctcaacaaaaacggccacgacgtcgccatcttcttcctctcatttaccctctccccacccggcgcgtacccaacgcaactgcgccaatccgtcgaagccctccggtacatcctcgccgagggcaaaggcggacgagatccattgaatgtcctcatcggtggggactctgcgggagggaacctagctctctctgtgcttttgcacctcacgcatccccacccagatattgacccattgccactgaaagatggcgccgagcttgccggggtctttggctttgcgccctgggtatcgtttgatctaagtgggaggtctatggccacaaatcaatacaaggatatcatttcgtcgcagggcctgaaggtctggtcgagggagtatctagggaagaggcaggagggtgatgcgtggagtgagccagcgaaggcgcccactgagtggtgggttggtgcaaaggcgaagagggtgttgatccttgctggtggcgacgagattttgttgtcagcagtcgaagagtttgtgaataggtttaaa

SEQ ID NO: 25984 - DNA, 498 bp, Emericella nidulans
atgtgccggtggaacagtggcatgttctacaagcacccagcgcttaaagattatcgctactactggcgcgtggagcccaaagtccagttcttttgtgatgtcgattatgatgtcttccgcttcatggaggaccgcaacaagacttacggtttcacgattaatttgttcgatgctcccgagagtatcccatccctgtggccgacgacacaggagttcctcgccgcgaatccatcttacctctccgataacaacatgatggactggttgactgacgaccagctccgaccggaccacacccgcgatgcgaacggatactcgacctgccatttctggtccaactttgagattggtgatatggagttcttccgcggtgacaaatactctgcgtactttgatttccttgatcacgctggtggtttcttctacgagagatggggtgatgctcctgttcattcgatcggtttgggattgttcgaggacaagaacaaggttcattgg

SEQ ID NO: 25985 - DNA, 718 bp, Emericella nidulans
ccgtgacgcctcatttgcagacggcattcttgaagccaccaacgggcgtggcgtcgacgttgtgctaaactcactcgctggtccactgcttcaggccagtctgaacattctggctcccttcggtcactttgtcgaagttggtaagcgtgatatcgagcagaacagccaccttgagatgcgcccattctctcgccatatcacattttcctcgtttgatctgctggcgctttcccagcatgacaagcgatctatccactcatcccttattgagatccgacgactcttggaagagggcgctatctctcctgtttatcctgtttccacctatcccttgggcgatataggaaaggtgttccggctgctccaggtcggcaagcacagcggcaaagttgtcctttccatcagccctgacgaacaggtccgcgtcgttccgcaggcacgaactgctaaactccgctccgacgcatcctatctacttgtcggcggagctggcggcatagggcgttccatggcccactggcttgctgctcatggtgccaaaaatatcattgttctttctcggagcgctggtaccagccctgcagttgcagaactcgtggctgaactacagccgctaggttgtcacgtcaaacccatatcttgcgacgcctctgttaaggcagacctagcagcggccctcagtagctctccgccgaactccctccgattcgaggcgtga

SEQ ID NO: 25986 - DNA, 2152 bp, Emericella nidulans
ccgcgtttcttgaaaccgttgccgtcgcggatatctgcggaggatctggaatttttgcgctttcggggagcgctggcgatccccgagagcgggctacggattgagctactacgttgctatattaaatgggttcatagcttcctaccagtgttgaacctgcaggagtttctacgatgcgttgcgttgaatgatccagaagggaacataagcctcttacttttccaggctgttatgtttgtggcaacagcttttgtggacttaaagcatttgcaggcagcagggtatacaactagaaaaagcgcacgcaatgcattctatacacgactaagggtacgttgtcttcggtactctactctgactacgctgacagattcagcttctttactcacttgactgcgaagaagatcgactagtcatcgtacagaccctacttctcatgacttactggtccgaccacatgaacaacccgcaaagagacatatgggattggattggtatctgcagcaccaatgcacactcgatagggttaaaccgagacccgtcatcctcagacttagacatacgcaccaagcggttgaggacgcggttgtggtggtgtctattttcgcgcgatcgactcatcgccatggggatgcgccgtccgacacaagtcaacgaaggatctagcaatcttcccatgctgaggctcgatgactttgactttgagccgttccatcccgcagtaattgagcagtttcagtgccggcagctcgaggacgtctctcaccagaaacgacttgctaccatgttcatcgagaaagccaaactctgccagtgtattggccgagtgttgtttgctcagtataccccatcgcaatgtcaattcggcttgacgaacagaacaaccatcaaccttgttccgagacatgcttctgaatccgagctggctcggtgcagccagagactagagtcatggctgtctgcactaccgcgagacgcgcagttcgtaccagcgtcgaagacgatttttaacgacggtgaggatgtattgctccttcacggcgcgatgatacggatgctctaccacgctacagtaagcgctctccaccgtccatgggcctacggatccacgaaagaccagacaaaatcccggcttgaattggcggctgcagcacgaacaaaaatgcaagacgccgcgatcggtatcacgcagattatccaaggcctcaaccagctagatctgacccgctacctccctcagtccggcgtaacagttatcctccctgccgccgtagctcacctagctaattcaatgtcaaacgaccctactctccgcgaaaacagcatctccaactttcagcggtgcatccgggtcctgcagggcttgaaggagatatatcccgccgccgacatggaggtagccaacattgaagccgccgtcaaagcgcagtccaacacaagcgccctgttacgaatcatgcagttcaacggatcactcccatctcggcctggatctccacacagaaccagtttggtttcaaatccagcccgtataccgtcgcctttggacgaaccaaaccactggacgccacctgccgacgaacaagacactgcacatcccatccttcatcaactgggtcacgcttcgccagataataaggataaacggtcctctccgttaaagccaaaccacgaacactcagcccaatctaacccaccgcgtcaagaccaaccaacacccccgaccgacatccctgatcccgtcaccatctccccaactacaccacagcagaaccagaaccagccaccagtcaacccgccaaaatcctccatatttaccgacctccttgacttcgacctcgatacctatacttcaacctttacacctagcaaccccaatcccgccgccggcccagatctagacctcgactggacgagcgagctcctccgctgggcagacgcaaatccagagtactattccgcccctaacacgaataatgaccagagagatatcttttcgttccccgttggaccggggccgggacataacccaactgatctcggccttgggaatgacggtgggagccgtggacatggcaatttgagtagcgagatcacgggggatttagatcgggatttggggtttacgggggatggggaagagttattttag

SEQ ID NO: 25987 - DNA, 549 bp, Emericella nidulans
tctctagatgttcttgctgccttttcgcaggaagcagctcgaccgtcaccaaccctattcaacttgagagatctggtccttcttggacttcaatcgcccaaccgacagactgttctagccacattgcggctgctcaccgtaattctacaacgatattcctcgttctcgattttcttgattcggactaatcctacacagcccgccaaacaacggacggtcggggcattgaacgcggaagtagggcacctactgacaatggccacttctatcatggaagagccaacgttagaccagtcattcgataattatctcaaggacgcgtcgtggattcttgagtcccggctggccactcccccaccggacaattgttcggaaactcttccatgtgaaattcgccaagaagatccaattgttcgcgagctgctgggctgtctagagacatttttcactaacaccgtgatcgtgaatctggctttgacggaagttttgatgagcattgcgtcctcgcacctgatggcgcttgacgggtggttacttgtcgatccctga

SEQ ID NO: 25988 - DNA, 435 bp, Emericella nidulans
atgaatcaagaacagaacgcggctctgcataggctttcattatgtctcccccaaatccaccaaattcactccatatgccggaccccgtctatcaccttcggtgtgatccaccgtggccatgtgattatgaagaaaagcattggctaccgagatagcgggttaactctcccagcgaacgaggagtccatgtacatgctcggctcctgctccaaaatgttcacgtccgccgcggtagcaatactcgtcgacgaagggaagctttgctggagtgatcggatccaacagcatctcccagacttcaaccccgagggcgatccacgaattgggcaggaggcggatatcatcgactgcctgcgacataccacagggcttgcctcccctaccgcgctcaccgtaggccctaggggaactattgtgagcgacgaggaggacttg

SEQ ID NO: 25989 - DNA, 3048 bp, Emericella nidulans
atggctatttcctccaccgcggacctggcgccttccaggaaagctcgtggctccgaaagcaatgaccgagccttgaagctctttattgaattactttcgtaagtcagtcggtgaacctaccctggtatcagaatttaactctttagatatcagttggcatctccagtgcgatggtgggctaccatactcccccacccttatattctactgatccaagcagggtcgaaacgcagcagcagctctttcggggcgagccgtgcattcaacgattcgtcgagatagggccccggacaattctctcgacaatggcgaaaaggtctgccagtatccagaaagatcagcgttcttcagcgagttgttacagccccgagttcctttcttaccatgataatcagcccgagatcttgtaccaatatcaaaacgaccaagctatttatccgctttctcagcccacacagccccaattcgaacccacttcaccttctcatctcacgaaacggtcgccatctccctctaaggctttgcctatgagcgccattcccagtgcagaactcactctgcaggcagggcatgtcattctcgccatgacggcccaaaaacttcgtcgacgatttgatcaagtcccagttgagaagaccatccgtgatctatccggaggtatgcactataattgcccaatctgtacttatttctaactgccaaggaaaatccaccctccaaaacgaactgaccggcgaccttgtggctgaattcggtcgtgttcccgaaggtgtcgaagaccaacctctatcatctttggcagagtcatttcagcccgagttcagtggtattcccggcaaggcgatgtctacacttatctcgaggtttatatccggcaagatgccagcagggtttaaccagagtgctattcaagagtacttgaacagccgctgggacttacaaaatcccacgccactatacctctttgctttgcgccgaccatggagcctgcgaggcgtctcgcaaatgccgatgaagcgcgagcttaccttgacgacttggtagagaagcatgccgcctttcaagggatatctctggtgccgtcgaatcaggttgctgacggccatgagtctcttgctccggtcgttatgaacgtagccgatgtggatgagatgaataagcgcaccaagctctacagggcgcagtttgactcgttggcaagctatctcggcgtcgattatttcgcttcagagaaggcaatgtcagagtcggaatcccgcattgctgaactagaagagacgataaggttattgaataccgagttggatgaacaattcattaaaggaatcaagccttcgttcaatattaaacaagtccgcaaatacgactcttggtggaactggtctcgcgaagagcttatacggctcttgaatgagatatgccaggattcttcgagtgcttgccccccagatatggaaaatcgcctgcagaatctgctaaacaaatgggatgcaaactgttcagaaatcgttcgagctcacttgattgggctacaatcacgttctagtgcccctatgaataagcttcaactgatcttggaggaaatttttaccttgggcaaccaaacactttccatcgaccccttgttcgtccacaacctcccgcctatgggacctcaaaccataatcacagatgcgggttgtcttgaatatcatgagcttccacggcaaatcagccattatcccgaagctatggcatatggacctccatggccccaagggcatacttcggctccgtttattcacatcaagacccgagaagacggacaagactggatgtatgattctaaagctactagtatctaccacgctatgttggatgtcggagttacgaccggccttacctttacccataaagcagtcttggtcactggggctgggcctagctcaattgctgcgagcgtgattcaagggctgttgagcggcggtgctcgcattatcgtcacaacgagtagatctatatcgcagagcgcagatttctaccagcagatgtaccgccaatatggcgccaaggggtcttctttaagcctcttccccttcaaccaagcaagcaagcaagactgcgaacagctggtgcagcatatctatggccctgattcccctacggacggtgacctggactatattttaccgtttgccgctattccccaagtcggagaacctgacgcttttggaggtcggcaagagcttgcactaagggccatgcttgtgaacattttgcgtcttatcggcttcgtgcgtcaagaaaaggaacggctgcgtattgagaacaggccaacaatgattgttctgccaatgtcctgtaacgagggtaccttcggtggagacgggctgtactccgaagccaaaatcggtttaaaggctttatttaaccggttttactcggagaactggtcgaaatacttaacgatatgcggagcagtgattgggtggacaagaggcacagctataatgcaaacatcaaacgctgtggctgaagaggtagagaaactgggagtcatcactttcacgcaggcagaaatggccttcaatattcttgcgttgatgacgcctgccttgactgcccttgccgaagatacaccaatatatgccgacttgaccggaggtctaggatcgatgtggaatatcaaacaggaaatctcagccgctcgaaaaaggatatcagagaggcagatcctacaaatcgcaattgcggaggaggatgcgcgtgagcaggctatgatatgttcagcaagcaccgatgtcgaatcaggtttacccacaactagacacgccaggttaggcctacagtttccgccacttccggatgtgaacgaagggtaccctaatattgagggaatgatcgatcttacccgcatcccagttattgtaggctactccgaactaggtccatggggcaatgctcgcacgcggtgggagattgagcatcggggagatttcagcctggaaggctatattgagatggcctggattatgggcctcatcaagcacgtcgatggacacgcgaaag

SEQ ID NO: 25990 - DNA, 516 bp, Emericella nidulans
cttgctaaagctagaaaacgcgccggagaaacaggcttatcagatgaagagcgtgtctttctagcccgcgaggtcatgcgcgtgacgttcgagcacctcgcgtcacggactatcatcgcactggaatcgctgtgccagtgggttccgctcgtcccaaataatcctaatgacaagcggcaaaagccgctcccgagcagtgtccccgtatcaacactcgtcgtttccggcggtgttgcggcgaataagttcctaatgcatgtgctgaggacgtggttggatggacggggctttgggcatgtaggtgttgtggcgccgcctattagtctatgtacagataatgcggcgatggtgggctgggcggggattgagatgtttgaggcagggtggaggagtgcgttcgaggcgagggcattgaggaagtgggggcttgaggagggtgatgagagtgacgggggtgaagatgggggtcaagggatactgggtgttggagggtggcagagggaggggaaggaatga

SEQ ID NO: 25991 - DNA, 572 bp, Emericella nidulans
atggtggatgcggtgttgaagctggagggcttgcgtgggctggtcctggaaacgtttggcgctgggaacgcgccccacggccaggacaatgccatgaccaaggtgcttgctgacgcgatcgcgcgagggatcgtcatcgtcaatgtcactcaatgtgagtaacccatagcgtcagaagaaaccgatcaacgttactaaattgtccaggtctgaccggtagtgtcagccccgtgtatgctcccggcatgagtctctccaaggccggtgtcgtcgcgggattagacatgaccacagaagctgccctaaccaagctggcttacctgctggcgctccccggggcggaccccaagctcgtggcgagcaagatgtccttctctctgcgcggtgagctgacccgagtcggtgcagccagtctttccccatccggatggagcttttgccgagccgcgtcaagctgttcactatattgggatactcccatcggcagggggacccttgttctggttgaatagcttttggaaagcgagcattactggctgttgaacaatgttacttttttgaacaattcaatg

SEQ ID NO: 25992 - DNA, 435 bp, Emericella nidulans
gaaacgcctgtccacacttgtcagtgggataactgcaccaagtccgctccctctggacccagcgcaaataccgccatggtgtccggccatgtttcatcccaccttccagaagaccgacccgccgatgcggaagcgcccagctcaaaacgtccggtactccaggaacgtattgtgcggaagtggttttacttggacacccctgtcactgaacgaggagagcccgtcggcgttgcatacaaggctgcacttgtccttcgcaaccttgctcgcaatctacccaacggcattgcgccgggtttcaacggtctctcttggaagaaggcctacttcttgagccaccggccgaaaatcatcgaaatatgggaccgaaataggtcgctgcgcaaggaattgaccgaattgatcatgatattagagagagaggaatactactga

SEQ ID NO: 25993 - DNA, 684 bp, Emericella nidulans
gctcaacaccgcgcgatgaacaattttctcaacgaagcagtcaagaattccatgccccaggccaacccaaagcggattccgctctcctacgcccataaaaaagagcgagattccttctacgaagtctcccctgccgagctgccccctgtcatccgccaaaacctcaaccctcgccataaacccaaggtgcgcgtcacggtcgaccaacgcacaggcgaggttcttgcgaaaatcgtgaaatgccgagtggcggacctcgatattcacagccctttgaccgccgttgactggcgcgtcagtgttaacctggaaatgaactatgatggtgacatttcccaccttacgcctgctgatactgggcgtgggcgtgcgagcgatcggaacaaggaccgcatgagttataggcatctcgcatatcaggtggatctgacacaagttgctaggtctgaggtatgttccacactctctcctgtctatattcatatcttagccctaattatctatcttatacagccgtccgcaaaaggagaattcgagcacgagctagaagttgaagtttcggccgctgaaatccgccgtcaaggccagctcgctatagctggtgaccccaacaatcagtaccaggacctagttaagggtcttgtagataatgttcgcatcctggcgcgggcagtgccggcatga

SEQ ID NO: 25994 - DNA, 2656 bp, Emericella nidulans
gcacagttactcaaggagcgctacgaaagaaaccgtgccgctgctacagatgccgtcatagtccctaagcggctgctgctccccagtgttgatgatcccagtatatggggtgtccggtgcaaggcgggcaaggagcgtgaggttgtcttctccatccagaaacgcatcgaggacagaccgcccggttctcgaaatcccatcaagatcatctcggccttcgagcgtgggggcgcgatgagtggctacatctatgtcgaagcgcggagacaggccgatgtcatggatgctttacaagacatgtcaaacgtttatccaaggacgaagatgattctggttccggttaaggaaatgccggacctactgcgagtgcagaagtccgaggagctcaaccctggcggttgggtccgggatcaagcgcggcaagtacatgaatgatcttgctcagattgaggaggttgagacgaacggcctggctgtcactgttcgtttggtccctcgtctggactacggtatgaatgaggattctggtgctcctatcatggaccctaagaggaaacggccgggagcgaatcccgctgttgcacgtcctccacagcggctgttcagcgaggccgaggccaagaagaagcacagcaagtatctcactgcgacggccggcttgggtgccaagtcatggaactaccttggcgagacttatattgacggtttcctgatcaaggacatgaaagtccagcatttgatcacgaagaacgtcaaccctcgactggaggaggtcaccatgtttgctcgtgactccgagaatggtacttcaaatcttgatcttgcttcccttgcggaaacactcaagaattccactgcggaagaatcatatctccctggggacccagtggaggtgttcaagggcgaacagcagggtcttgtcggtcgcactagttccacccgtggagatattgtgactatattggttacagaaggtgagctggctggccaaacgattgaagctcctgtgaagactcttcgcaagcgcttcagggagggagaccacgtcaaagttatcggcggtagtaggtaccaagacgagttgggtatggttgtccaagtgagagacgacacagtcactcttcttagcgacatgagcatgcaagagattactgtattcagtaaagaccttcgcctgtccgccgagacgggcgttgatgggaaactcggcatgttcgatgttcatgatctcgtccaattagagtgagttcctatctcccttttatgtccgttttcactaatgtcataaaagtgccgctactgttgcttgcattgtcaaagtcgatcgtgaatcattacgagtcttggaccagaacggttctattcgcactattctcccctcccaagtcacgaacaaaatcacaccacgacgagacgcggtggctaccgacagaaatggtgctgaaattcggcatggagatactgttagagaagtatacggcgagcaacgcagtggtgtaatcctgcacatccaccgctccttcctgttcatccacaacaaagcccaggctgaaaacgcaggtattgtcgttgtgcgtactaccaatgttgtgacagtatccgcaaaaggaggcagacctacaggaccagatctctccaagatgaacccagctctgatgaggaatggtgctccgggtggtatgatggcacctcctccctcgaagactttcggacgggatcgacttctcggcaagacagtcttggttaaaaaggggcctttcaagggacttcttggtatcgtcaaggatacgaccgatgttcaggctcgagtggaacttcattcgaagaacaagcttgttactataccgaaagagctccttgttgtcaaagatcctgttaccggccagactatcgatattggtcgtggtaggggtggtccccgggtccctcaaaactcagccgctccgtcatctggctggcagggcggtcgtaccccaatggccgctgccgattcttcgaggacacccgcctggggtgcggcaatgtcgtcaagaagtaagtttctcaagctcttgctttactctcaaggttttctaacataagtcctgcagcgcctgcttggagcggtgctggtcttggttctcgcacaccagcctggaaagccgacggcagccggacagcctatggcggcgcaggatcacgcacacccgcctggaacgcaggtgctcgaaccccctacggcggaggcttcggttccggctccggcaacagcgacttcgacgctttcgccgccgggtcccgaacgcccgcctggggcgcagcatccggcagccgcaccccagcctggtcagctagtgctaataccaccagcaggaacgacaacaaggcctacgacgccccgacacctggggcaacatactcggcacccacgcctggcgcatatggcggcgctcctacacctggtctttcagcacccacgcctggagcctgggctgatagcgcgccaacacctggggcgtacaatgcgcctacgcccgccgactttggcgaaggaagtcgtccgtatgatgcgccaacaccagcaatgggcggcgcggctgctacaccgggtgctggggcatatggtgatacggatgatggtgctcccaggtatgaggaaggaacgcccagtccttga

SEQ ID NO: 25995 - DNA, 453 bp, Emericella nidulans
atcacgcaaacggatgtggttattcctaccgtgacacttgtaaggcataaagatgttctctactcgtggcttgcagaacataagccactgttcctctgtggtcctcccggttctggtaaaaccatgacactgtttgccgcgcttcgtaaattacccaatatggaggttgtcggtctcaacttctccagtgccacaacccctgacctcctcatcaagaccttcgaacagtactgcgagtacaagaagacactaagcggcgtggttatgtctcctaatcagattggtcgttggctggttatcttctgcgatgaaatcaacctgccggctcctgacaaatatggaacgcagcgagcgatttcctttttgcgccagcttgttgaacaaaatggtttctggaggacatcagataagacatgggtctcattggaccgtattcagttcgtcggtgcttga

SEQ ID NO: 25996 - DNA, 662 bp, Emericella nidulans
ttataaccctcaatttcagtctcgaattgaaaaacgaacttttttgtcgtcatttatcccttctccgccccaagcttctaacaatggggacggaaatggcaacaacaaagcccgcatcctgacagcctcccgcacacttccctacccgccatcccccttattcaacgtaatatcctccgttgaatcctacgccgagttcctccccttcctcaccgcgtccactgttacggcccgtgaccccgagacacggtatccgacgcaggcgtatctcacagtcggatatgggcctcttagcgagacgtttacgtcgaaggttgactgtaatcgggagagttgggttgttgaggcgcggacgggaaaggtttgttcaggagcagcgggactccagtaataagcagtcttctgggttaggcgcgttaccggagctcgctgggtttcctggtgcggatgaggggatcttcgagtatctgagcacgaggtgggagttggttccggagactgcttctgaggggggagacgcgaggaccacggttaatctggagatccggtttgagtttaagagtcagttgtatgcgagtatgatgagtgcagtggaagggcagatggcggggattatgatcgaggcattcgaaaagaggattagagaagtgcatgggaggtga

SEQ ID NO: 25997 - DNA, 285 bp, Emericella nidulans
atcgacccttccatgaaagcgaccactggtctgattctagtccctacacgagagctcgcggaacaagtccagaaggttatcactacattcgctgcgttctgcggcaaggatgttcgatcggtcaatcttacacagaaggtctcggatgcggttcagaaagcgatgcttgcggactatcctgacattgtcgtatcaacgcctgctcgtgtcatcgccaacctgggtacctcggctctatccatgaagaaccttacgcacctcgttatcgatgaggccgacttggtg

SEQ ID NO: 25998 - DNA, 524 bp, Emericella nidulans
gtcttgccagacaatccgtacgctagaaccaaggcggctcgtgccccaaagggcatcataaagggacaagatgccggcaaatcctacgaacaagctcgcaaggagtgtgagcgggctgtcaatcgtattgcaaaagaatgcaggcgcctcaatcagaaatactcggacccgcatttcgatattgaaatggacttgaaaggtggaacccggaattgcctggatggccttgacaagcagaatgatgagatgcgcccgatgggggtgaaaagagttactgtaagccatcacattcgaaatagatcccattccataaactgactttatcgtccgactgcaggagatatttgagaagcctcagttttatgttaacggaccgacagcctcagatgtgcgccagggccgtgatggggattgctggttcatggctgcgctttgcacaatgggaaacaaggcgggactgatagagaagatttgtgtccaccgggacgaagaagtgggggtttacggatttgtcttttacagag

SEQ ID NO: 25999 - DNA, 201 bp, Emericella nidulans
atgcttgacgcatgccccgtcatcctgaatgtcggtcagatcacgaatatgggacaggttgtcgtcgcccacgccgggcttatcccaggcgtcgatctcgacaggcaggatccctacagcgttatgaatatgaagactgtcgatttgccaacacacgtgccaagctcatcactagagaagggcgtgaagtggacgaaggta

SEQ ID NO: 26000 - DNA, 297 bp, Emericella nidulans
tcctgcagactcactctctttgttgtgttctttcccaaaaatccgttggctcccctttcagtaccgcggaaagaaggacctacttatcggaccgcactggttgtggcctttatatgcatagtccatgcagtggctatgttgattgttacctttgcggttggcttcgaaaagccctcggcgcttcaatcttggtcgaatttctgcggaattactgccgctatcctcgcctctatacaatatttccctcagatatacaccaccctcagactccgctgtgtaggcagcctgagcataccc

SEQ ID NO: 26001 - DNA, 426 bp, Emericella nidulans
gagactccaccgtcttctttcgatgagttggatgattttttgacttccaaaaatgtcaaaatatctgccagcgccggagcacctcgattacaaccacttgtttatacctccgcaaccgaacagcgggttgggctttttaccaaacttctgaaggacttccctgattatgctgaacttatcgccgaatctgggcggtcgaaactatcaaagaaacatgatatattgggccggccaatacatgtgttcgtcgatatgtcgaatgtgagtcttgacacgtagtttattcccaatattgttattcactaacttatggcgaagattatggtgggatttcatgacacaatgaaactatcgcggaacatacctgttcaaaccaggatccgccgtctgccgctctcatttcaaaacttctcgttaatattagaa

SEQ ID NO: 26002 - DNA, 516 bp, Emericella nidulans
atgaatgctcaacctcggtcggccctggccctagcagctcgctatgccgtccccttcgggctgctcttgatccctatctggatgacccaagtcaactccgtcgtccccgagccatacctcgatgaagcattccatatcccccaagcgcaagcatactggtcgcatcaatggacacagtgggatcccaagatcactactccgcctggactctatctcttctcgtacgccgtctgtgcccttatccttctccttcgcggttcccccgaacatctagatcccccggcactccgggcgaccaacgcggcggccgcagctgtcttgctccccttgagactgcagaccgcactcgacactgtgcggaagcaacggaatacccgtccttctggcgcctggttaagccatacggtgctgaacatctgtctatttccgccgctgtttttcttctcgggattgtactacactgatgtcctagcgctgctggtggttattgaggcgtataattgggatttgagtcgc

SEQ ID NO: 26003 - DNA, 276 bp, Emericella nidulans
tcagcggtgccattgaccattcccgaatcataccagcctggaaccgaggatacgctaatcttccctgccgagtacaactctatccgcgcgtttaatagagtccatggaaataattcgcagctggaaaaagctcacgaggtcttcaaggcagtacaacgactgaaaacacagatcggtgttgggctggatcctgggggctgtgagctagctacccctttgcgcaatcagagggtgagcaatgacgaagatgtctatgaagtacgaccagcgtcttga

SEQ ID NO: 26004 - DNA, 219 bp, Emericella nidulans
tggggtaactgccagtcagagcttcacaaccttgagctgctcaaaaagcatatcttcaagatccatgtttcctatcagattacctgtggatggaaaggctgcacatttacggggacactgccggccgcggagctgatgaatcacgtcaagacagagcatcttgattctcttgcgtggaagctaggcgacgggccggctgtgcttacaagtggtgagaaa

SEQ ID NO: 26005 - DNA, 513 bp, Emericella nidulans
atcgcccagcgaacccatgctccagggccccagcggttccagattgtcggcttcacatagtatgggatagcttcatagatattaacatagtagcgcccgtactcgttcggctcgtcggtgaaaatgtcaattcgctggaaattgagtctgggtagagctatatagcgtaggtagaacttgcggatggcgaccaacgaggagaataccttcttgtacgcagcagaaggcgattggtacctgtatcattaacacatgcattgatccgaaagggaaatctgggcatacatcatcgcctctcgcaacctatcatccatcatgcatgtcgcaaactttactcccattggtttcaagaatcgcggcaacgcataaacaagcacgtccatcgttttatctgcaacttcttgatttgatgaactcggcttcatgtattcctcctcatacttgagactccatgcgcgcagttcctccagaaaatggaaaccgtcccggaacgcgtgcggtcctgacggtaga

SEQ ID NO: 26006 - DNA, 494 bp, Emericella nidulans
tttccttcgacccaaaacgtgactcgtatactccgcgaatatcatatccgtttcgcggcctcgtcatcaggcaagagccgcggattcctacccacgaagaatgcctacaacttcaaccctgagcttcatgacgccctcggcgttgccgtcgacacgcaggaccccgcgaccaaacggaaacggcggccggatagcggagaggatgctttcttcgtgagcacagtaggccggcggcgtgatccatccaaggataacaccattgccttcgcagtggccgacggcgtcggcgggtgggcggagtcgcgagtcgacccagcagacttttcgcatgccctatgtgattacatggctcagacagcgctggattgggacgggcccgctgagcaactccgcgcaaaataccttctccaagctggctacaccgggttgtcgcagacgagaccatccccgcaggcggcagccccgcgtctgtaggtataggcctcgacgacggc

SEQ ID NO: 26007 - DNA, 210 bp, Emericella nidulans
gtttccgcttaggtgtacatctcgggtcaagcactggtcattctcggcggtccgcacaacctcctacaaacaatttatgtcgacgatacgcaagcgctacaggctgttgctatagatggagcttcgggaagaatagctgtttgtgggggcccgtctgctttcgtctacgagccttacggtacctacggcgaaacgctgaaggtgtgtggt

SEQ ID NO: 26008 - DNA, 274 bp, Emericella nidulans
gcagtgatgttggataacggtctgagccgccggaaggtagatttagacttctatcttcaccgtgtgttccgtaagaaatcgttccggtaagcttggattctatcactaaatccaacgtgacttgaattgatcgactgctaggcctctacagcgagatgtaatcgctgccgcagttgagggtcacgatgtttttctccaggcttcaacttccttcgggaagagcttatgctatcagttacctgccatgaccacccacggaggttggtgttatctc

SEQ ID NO: 26009 - DNA, 708 bp, Emericella nidulans
gtgacaccatcttcaggagacaaatctcgtgctagaaggcgacatggacccgctgtctcatctgcgtggccaaacatcacaacctcgtctactgggaagatgcgcggaaggcctccaaacaggggaacagtatccggaccattctcatcctttcccgtcaatcctaatcgctcagatccttctcattcccacagtaccgggatgaggccctcaccctccattgtcctgcagcaagactctactgagtcccagtacaaccaatctccaacgcccttgaataccaatggcaagccaaataaactccaactacaagttccacagcattcaggtgcccctgttcggctcgcgactccacctacattactcgtaaacggggtgagcaacgaaccggccgtcgcaaataacggagcagcggcctctcaaggggaaggatctagtgccacagtcgtcacaaacacagcatcgagtataaatcgaagtggcgttcccagtaccatcataagacctgacgacgtgacacggacactctcggcggaactactacgagcaagggtcactgggcgacagactcccttaagtcccgaagaggggcaggcactagcgtctgtagtagtgaccaacttgacagctttatattccaagttgccttttggggctgctcctctagcatcagctctacacctcggactggggccttacttcggatac

SEQ ID NO: 26010 - DNA, 369 bp, Emericella nidulans
cgaaagacacatcgcaagtctcgacttggatgtggcaattgcaagaggcgacgggtcaaggtaggtcattctcttaaaagctgtaccacgcctcgcggatatatctccgcgcaaacacagcggtattatttgctgatggaggaacagtgcgatgaaaagaagcctatgtgcacaaactgcgtacagcattctattgactgcgactttcgactctcagcttccggatctccatcagagggaacaacactatcgcatacacaacggttcaaattcagagaatcaaagtaccaatctcagatctctccatcacaagagcaactcaggcccaattaccgttcatctggagtccaatgcgactcagtcccaacg

SEQ ID NO: 26011 - DNA, 210 bp, Emericella nidulans
atcctcaatttctgttctagaaaggttgttggggaacctgaatacagtgctacaaaaccactcagcccagattcacctcagtcaaggggtagtgtcatcaatgatgtcaagcctaatatcttggccaatattgttcaaatcgcgtccgctgttggatctttatggcacagcttgaatggacagcagagactggaaatcacaaacttctta

SEQ ID NO: 26012 - DNA, 360 bp, Emericella nidulans
gggacataccaactacaggacgacctgcatctagctacccctcccccgcatccctctgaagcgccgatcataaacccgaatccactcgctaccgtccctaatcctccgacgtccggcgtcaagttatcattgattagccttggacttcgaaataagaccgctttcccgtcgaaagtgcaagtcactgcacgaccattcggagatggaaatagtgctttggcggctgcccctgtcaaggacccctccaagaagcgaaaacccaagaacaacatcatcaagagcagttcatcgtttgtatctcgggttattatccatgaggcaacgacgaagcgcttaaatgaccgagatccagaaggactg

SEQ ID NO: 26013 - DNA, 303 bp, Emericella nidulans
cgtgctaatgcgacctttgtgactctggcgcgaaattcagatgtttgggagattgcgcaggccattcgccaggtggaggatcgtttcaaccgcaacttccactatgactggatcttcctaaacgaccaaccattcgatgacaactttaaacgtatcacgacatcactggtgtccggcactacgcgttatggcgagattccgaaggagcattggtcctatccagactggatcgaccaggacagggcaagggaggttcgggaagagatgaaggagaagaagattatttatggtcactcggaaagt

SEQ ID NO: 26014 - DNA, 228 bp, Emericella nidulans
ttcccaagcccgccaagccacaaagcagacatgaccgccttgcgcgggagccgaacatgttccgaagaaggtgcttcgacaatgttgcctaatgcaaggaattggtccttcgggactgcggcgaagtagtcgatgttgcagagcatataaaggacaccgacagacccaattgcgacgggggcggcaatcttcaatgtacgctcggggttcttggtttcgctcagggcc

SEQ ID NO: 26015 - DNA, 535 bp, Emericella nidulans
atcaaaacccaactctactccgtgcccccatgggccgcggcctttggctgcaccatgttggtcgccacgctctccgacttctttcggcatcgctacgccttcaccatgatcgggatgttgattggaatagccgggtacggagtcctcctttcaatccgggacacagcacaccatgcagctcaatatggcgcgctattcatgatcacttgcggctgctttagtgcttcgccggtgttcctttgttggtttgggatgaatctgggcggacataccagacggagtgtggggacggcattccagatagggtttgggaacagtatgtcttcacagctgctgttgattttattttctctctttcttctttttatcttttgccttggactaaagaagggttctggggatgcctgatgctgacaagtgcgcagttggcggtattatcgcgacatactccttcttggagaaagatgcacccctttaccgaaacggatatattatcggtctgtcatttgcctgtttatctgctaccatgtcgacg

SEQ ID NO: 26016 - DNA, 336 bp, Emericella nidulans
ccttccggcggactgatctcaaagggccatccacttggagcaacaggactagcgcagtgtgctgagctaacctggcagctccgcggatgggccaataaccggcttgttgagaatacttcagtggcactgcagcataatttgggtttggggggtgcagttgtggttacagtctacaagcgggctgatgggggcacgaacaggaggctttctgacgaggaggttgcttctgcttcaggggttgggcataatcctgcgacggaggcgcgtgttattaggcccgccgatgcagagagggtgagaagtcgggtgaagtccgactatccattggaggatacg

SEQ ID NO: 26017 - DNA, 683 bp, Emericella nidulans
caggcaaatccaaaactagctactacgaaagatgatgatgaccgtcttccaattcactgggcggtggcctacaaccaccttcccatggtcgagctcctcgtttcaacaaaggacttcgatccggatgtcgaggtacgtactcgttggaacgtatcttttgcattgtaagaccttaccagactaattggaaggccaggacggatcatgctggactcctctaatgatcgccgctagtcttagaaatgccgaaggtgaccccatcatcgagctactcctgcgcaaaggagcggatgtcaatgccaagagcatcactgggcaggtaagtccctgaagatacatagtcattcttttttgaggcatcaaattgatcaatccagaatgcactggactttgcaacatctaaagcaaacatcaccacagtccggaccttactggaaaacaaatgcagtgcccgagtcaaggacaaaaggggccagttagcgcttcatcgtgcggctgcgataggctctacgccaatcatccagctactgctgaaagaaggtcgaagcccggttaatgctactgataatgatggccttacggcattgcaccatgctatttcagaaggtcatggtgatgcggcgcttacgttgttgaaagctggtgctgaggcggataagaaggatgcgagtgggacgttagcg

SEQ ID NO: 26018 - DNA, 403 bp, Emericella nidulans
tggatcgctttcttgatgctgtcatggggagcagtgacaatgggactcggtggggcacacaactatgcacaagtaacaggccttcgctttctgcttggaggtacatacacaaactctacccaccagaactgcgaaattatacgccttgaactaacgcaaaccagtcctggaagccggtctctttcccggactcgtttacttcctcactttctggtatcgcacatcagaacgaagcatgcgcgtagctttgattcttgcatccgcgacgctagcaggggcttttggcggcgccatagcttacggagttggacatatgaaccaggcccaaggtctttcagcgtggcgctggctctttatcattgaaggcgccccgtctttagcgtccgctttcctgatgtagttc

SEQ ID NO: 26019 - DNA, 801 bp, Emericella nidulans
acagtgtctgcactccagaggtactcgacataccctcctatcttcttcgctgcgctacatttcacaaacacctcgctcattcccatagcgactcggtctgttcccgaaagcgataactaccttcttctcacaaggccgatctatcaatctccctcgcttgaaaatttcatcttgactattcctatcctaacacatattgcatccgggattgctctccgcaatattcgctcttcacgtcgtgcgcgtctctatggcgccgagacacgagaccaaagatatgcgctcagtttctggccccgaatgagcttacaagcacgcttagggtatgtgtttgccccgctgcttgctactcatgtccttgtcaatcgtgtcgtgccggtgatggttgatggaggaagctcaagcatcagtttgggctttgtcgcccacggaatagcacggagccgtgttttttgggtcacatactaccatatttttgtctttgtcggggtttaccatattctcgggggtttggcgtcgttgatgggctggaggatcaccactgctcggaaaactcgaggtagcagaaagggcgtattagaaggtgatcttggacacacggaaagcgatcagcatatcaggagacgaaagaaaatgtggtggaattttaacaagatcgctacactgggagcctgcatctggcttgctggcgcactgtggattgttggaaacggtggagagggtttgggatgggaggcgaaacgctggaatgagatatatagccaggtgcctatcattggaaactggctgtaggcgaacctg

SEQ ID NO: 26020 - DNA, 414 bp, Emericella nidulans
gataacgagcccgtcgagccgatcgatcttacggaggtggacgggaactcctctttagccaaggtacttgcaaaacaacgggaagacgctgtcgctgcgcagcagtcaaatgatggaggaaatgcacggtcgagattgactgcctatacttgccctgtatgcatggaaacacccaaggacgccaccgctaccatatgtggtatgtattctatcatggacagatgctgaatggatcggctaatataaaccaagggcatttattctgtcacaaatgcatcatggaatggttagcaaccacggaagagcagcgagcagaccgtgccgggaaagctccacggggtctctgtcctcaatgtcgacaacctctctccggagtagatgcaatcgggtcaaaaaggaacctagtaccattgc

SEQ ID NO: 26021 - DNA, 381 bp, Emericella nidulans
gcatgtatattcgaaggcgacctccccctctatatattccaaatatccttcgtttacttcactctcattaaaaacacaatcagcacctaccaacaatgcttcccctccgtcatgacaagcgcctgcataaaatgggctaagcaccacctcgacgctttcaacgccctcctaacgcgccaactaagcagcgtccaacgcggtgcaactgtatggcaaaattgcatcaatatcgtccacgaacaggctggcatcctggctgaagttggcgtcgattttacagacttggttgcgaaggagctggaactgactgaggaagagaaagctgcgagaccagagatgacaaggtcagaatcactaattatgggcttggcggatgcggct

SEQ ID NO: 26022 - DNA, 337 bp, Emericella nidulans
ataaaggagaaccggcgtatccttgaccagacacagaaacagtacgacaccttgcaagcaagatactcgtctcaatctaagtccaaggagccttcggctctcagagaggatgcatttcaacttcatgaggcccgcaaagcttaccttaaggcgtcaatggatttttctgtgcaggcgccacagattcggaatgcactggaccggcttctgattccggtctctttcgatcaatggagggagcctgaagacacttcacaagtaccatgcgggagtttttgcgatggggagccaggaaattgacccgacttaaggctgggtgcatgaaatggaaggagcg

SEQ ID NO: 26023 - DNA, 261 bp, Emericella nidulans
aatagtcccgtggggttaaaagaggctgccctcgactcgcccaccttccgtgccaccactcttcacttctctgatcagatcgaatacaccgaacgatggctcgatggttacgcgaaggccgcatcccgtctcgccacggagctcgcggcattggaggggatagttggcgcatttctctcctactctacgaatcctctaatggtctcggaggctattctggatcatgactatacgctgtcgtcaatgcggagatgtggtgag

SEQ ID NO: 26024 - DNA, 528 bp, Emericella nidulans
gtgcgacgaatccttccacaatctgatgctgctccggcccttatcctagcaacatcgatcataaaaaaggatggtgcggtgaaagctgtaccggaagggcctgcaactcaacctgttgagtttcgcaatccgttcgaacaagcgccatttgatctaaagacacacctagctgaaacaaatgcttgtcaatcgccctctgaggaggtgcgtccaaagtcacctggagaatctgcagggccattagatatcagggtgttacgcaatggctcatttacgggcccgaaaagaagggcagcatcgacccctttacctgaacaatcaaatgtggaaggagctatctgggtctcaccacgggcacccgaaaggcgtaacattaccgacccaaatgttttcaggcgaccgtcaaccaatcccgcaaacggtgggctttcatctttgtacacgtcagggattatggggccgcagctcgcggattctctcgtcgtaccgcaaagaataccgggatatcggacagagcgcctcggccag

SEQ ID NO: 26025 - DNA, 240 bp, Emericella nidulans
cgctactcttcaaccacgcaggcagcagagtcaacgcggaccaccaaacgacgcgaattccacgactacttcgttacgcatcttccttcatcctcgtgtcatccagacccaaggggccccttaacatcgttccataaacttcctcggtcggcgtccgtgccccatactggagagtccacacactcgccaacatctttccaagccctaactagtcgagagacaacggtagttcggattccg

SEQ ID NO: 26026 - DNA, 543 bp, Emericella nidulans
aagctgctacgcgaaaatgaaagtcccgataaggctgtccggttctcgaatctctattcgcgtctgttgacgcagcctgtgctgtcgcagaaatggggaatactatacttactctatcgactatcgaggacggagaacgctgagagcttcacatacgacgatgaaaggccacgcagtccgctgatggaccagtccaaattacaaagaatgcttgtaaaggagcaaagaatggggggcagggtggcggcgagttcggaggatgatggcccagccgttagctcatcagcatctcagatggctgcgcgggtcgaacggaaggcttcactgcggcgaacagaggacaaggaaagggaaaggaatcgagatgcggagcatggatctgcgccggagcggctgcgcatgagtcgtcaaaacgaaccctttgacggacatggagaggaaaagaatgaagagcaggaaaggatgacacaatgtggtgaatcaggacttttgcgtgacttgcctttcaacctacagggtctgtcctcatctgatatgcagttc

SEQ ID NO: 26027 - DNA, 455 bp, Emericella nidulans
gagggtgatattcttctattcgtgccagaacagtagtataatgaggatgcagcgctcaaaatctctctcgagggtgatgttattattaaacaggcccatgctggcccattaaaggtctacaactctctatggtagtctccctccgcatatgcaacaaagtattttcgaacatagcccttcctcccccccgcccaggaggtcgcccgggaaggaaggtcatcgtgtctaccaacattgcggagacttcgcttaccattgacggtattgtctatgttgtggatccgggcttctcaaagcagaaaatttacaatcactgtattcgtgccgaatcccttctagtttctccgatctcgaaagcctcggcgcaacaaagagctggtcgtactgtacgtactcgccccggaaaatgttttagtctttacaccgaaagtgctttcaagaaagaccatatcgat

SEQ ID NO: 26028 - DNA, 420 bp, Emericella nidulans
ttctggcagctcgatccgcgtctgtatctgtttacgttgagcccgcagtcgtttgcgcattcggttgggggcacggcgttcggcaggattgcttctccgacacgggagagcttgtacctgggggagccgaatggtcgaccgagatctgcaggaccgggctcgggtcgctacatgcctaatgaagggccatttgcgtcgcatagccatcttccgacattcttccctccgccgccgtgccagttcactttcacgaatggcgtgcggcacccgatcagacagaagccaccgcaccagggtgaggttttctatgtccgttacattccgagcttagggcagtatctttcctttcgagtcccatatctgcgctctcctagggatcacacagaacagttgagttcggaccagacaccccctcggacc

SEQ ID NO: 26029 - DNA, 787 bp, Emericella nidulans
cacaggtatacaaagctcaaggactcaggaaccttggctgctcttttctccagcgttaacttcaattccacgcgacctttcctggacgacgatcttcaggaggcaacagaagcgctcaacatttccacagcagagatagaaaagcaaactgatgttttgacaacccagtatgagattttgagtcgacggcataaatgcaacagcaatcgagtattccaacaaaacagggaggtggaaagggtacgacggaagcatgaggcagaaaggcagaatacagctgctacggtaactgtctccggatcctgatgatcatatgccactgctaagaagtgcacagattagcgaattggcacacgaattagaagtcggtctcaagaatgaagcagagaaatcaaccacggacgggaaaaaaatactggccgctttgacggcgcggctgaaaagcaacgacagattactatcagacctggaggctcttgcatcaggagtaaagtcttctgacggtgaggtatctatcatgaaacgaacaacagaactgagcagtatcctctctcgatatattgcggaagagatatactgcagacttgatcgcttgtacctggagaaagtcctcaacgatagcaattcggccccaggcgccacgactgataaggatttggagacagcggccagtctggagcaggagatagattctctctatcccgaaattgatatcttggccgaaatatcaaccaagcaacaatatgttgagcctatactacggcaactccaagaatatcatggccag

SEQ ID NO: 26030 - DNA, 1125 bp, Emericella nidulans
cctccagacacacgcttctttgtacgcctctcaccaaactatcttgcaaagaatatagacacctttgccatttgctccagcctctgctctaggctaggggaaaacagcaagctactaaagggtgtccagtctataaagacaggatttgtgcttaccctatcatccccagacacccttggagccttagaagcacaaaggaagactatatcatccttttttgcccactgtcagatagagcgaagttcctgttagattgcctattaagttataaatataccaaaaaaagttggccaacttaccaagagccaatatactatgatccctgtaaaccctgagatactatctacagaggttactaaggctactagcctgacccttatttctattgcagaaactacttctagtgctgccaaacctaataatatctcatcaagctggtttattaacttccctgaaaacagcagagccaagctccctgtataactacctctatttggcaagattaccaatactcaacccctaaccaggaagaccaagactatacaatgtacacactgctggatgtggcataactccaggtcctgtgcctgcaacccccgctgccgcctctgcgcgtctacacagcatactaaggaaggttataccaactcatgcactggcctagctcctcacttctgccccccaaggtgcttgcactgccatggaccccacccagcagactataaactgtgccttctcaggcccagcaaacccagccagcgctgtacaaagacccagcaagctgaaatacgcaagatctgcttattaacactcaccaaggctcgtacagagagccagtgctgtatacaagccccatcagcctccaacacctcccaggaacaggctagttcggccgatatccaacacctgccttctcccctccgtccaaccactcccccccagcaaggcccagcagactccccacctgttacaactagggcagtacactttgccactccacaaccacaaaaccgttttgacatactaataagcgaaatcctatgagttccaagaaccagcaaacagggcccctctcaatactccagctgaacataggccgcgcggccgcagctcataaaattacct

SEQ ID NO: 26031 - DNA, 600 bp, Emericella nidulans
agggcaggtgaccactggtcatcacgtcagaatttcctttaagtatcagctacccctcaccacatctctcagaggaatctttacctccattcaactacgcccttcctattatacagtacaatcaagggattcgtcatatcacccgaaccgatcgcttatatcatgtcttgcatagtaagaatattcctgacagctcgcatctgtacagtgctgacattgctgtagaaagacgaagacacatcgaagatcttcccaaccctcaaacactcgccatcgctgaaaggcttcacccatcttgctagcgacggagtgtaccgcagttttagctcgagtggcgaggtggtagattacaagcaattaagcccaacagaaattacaaagatgctggagttcttcgaaaaacatacgcacaactcagagagttttcaggagtctaggaagaaatttgagggcgtggatggcagaaacgtgaccgacttggagcaactgcttcacccaggacgagaaattcgtccactgagatttagagagtgaagaccatacaattttgccgacttctatctgcttgtctgtccttgtttctacgtggtggttcgggcc

SEQ ID NO: 26032 - DNA, 333 bp, Emericella nidulans
aacttctaccaaaggttcatccctaacttctcagggattatacacccactaaacaacttgacaaagaaagggacacccttcttgtagactaaggagtgccaggatagctttgatctgcttaaggaaaagtttattactggacctgtcctagcaacctttaacccttcctactgtatagtagtagagactgactcctcaggttataatacaggaggagttctctcttaatataataaaaaaggggaattgcacctatgtgcctacttctctaaaaggaattccccagctgaatgcaactacaagatctatcccaaggagctacttgcaattgta

SEQ ID NO: 26033 - DNA, 201 bp, Emericella nidulans
ttttggtctgcgactgaaaagctgcggatggtcgaccatattcggtcaatgttttcagagaattttatggtggttatcgagactgcctcatccatagtgcgcagtgctggtgcctcagacaatacacttcggaattggaaaatatatactcggcgttatgccaccaacggtcgtccgctaggggctatgcttctgcaagag

SEQ ID NO: 26034 - DNA, 363 bp, Emericella nidulans
caacagatatttgaacataatcaaattaccgctgagcaccttactatgacaaataaaataattagtcaaatcagggctgcccaagctcccctacagcaccaaccaactaaataacatgttaagctactcagtcaggatggcatactaaaagtgtgtaatgcaaattgatcaattgcagctaataaggaggctgttgcagaggagaaggggttacaaagacagtggaagaaggtgcatgataagaaaccaccaccagcatctatacaggagaataaggtatcaaatgaattgttaaaggcagcagaggagaatagtgaggtttttttcttagatagccaggcaatacgttgagaatagcttcaa

SEQ ID NO: 26035 - DNA, 804 bp, Emericella nidulans
gcaatgactgaccccacgtcgctctccggagcgcacgccattcttttggcgattcatctctgtgccacaggcaaccccgctgtcctcccgcatttacaagctcgattccctgccaccttgacaaccgagcggctgttgcgcattatcttgacattcttacctgagagcacagagcccagatactacgtacctgtggtgcagactctagtgaatggactagtatctcgctcggacaatgatgatatcgatatatcgccggtcaaagatctcccagaagctgccgcaaggaaacgtgtacggaagatacgcctgttacccttgagatatcccggggacgaggatactcgagaatcagcagacttgttggtaatcttcctggttcaccgagcacatcgcatcgactccgagacctctcttcaaccgctcatcctcgatctcctgctgccgttttaccagcgctctccaattctacggacgtggcttgtctcgtgtctcctgccgcttctccgattgaattacgaatactatcctaatcgagacaaatcatgctccctagaaacgctaagctccctggacgatcagaccgccacaaatatccttctttcgatggctggaacacggaagaacgacacggacttgatcaggaacctacgtggactagctggaccttggatgtacggcagcaaccggccaatgagacgacgtttcagtcagacagtgcgtcgcaattcgattcctgcctcccagtcacatataaacgaagatgtcagaacgtctgggtgggagtacgtgaacgaatggtta

SEQ ID NO: 26036 - DNA, 421 bp, Emericella nidulans
  unsure (1)..(421): unsure at all n locations
gagctcacgaaagagattgagtataacctcancaataaggagtttgtgaaaaagatgcgcctggataaacccaatgcgaagggcttccgccgaggagacttgatgcagacgagttgcggaagtccctgttatgctgccccagagctcgtggtgagcgactcactctacaccggacgaagggtggacgtttggagttgtggtgttattcttgtaagtggtctcaatcgattatgtcggtctcactttttgtctttgacttactgaacgatataagtatgctatgctggcaggctatcttcctttcgatgatgatccagcgaatccagacggtgataatatcgacttgctctacaaatacatcgtctcaacccctctcacgttccccgaatatgttacaccccacgcccgtgacctcctgagg

SEQ ID NO: 26037 - DNA, 315 bp, Emericella nidulans
ccttcataccagttcgtaggttagctagtcagccctccatgtgttgacttcttgtccatccttatctagtcggggaattacgaccatcctcccgcttctcgccgtgtcgtccgaggaagcagatccggcgatagatcttatcgaccaaacacgaaccgcctgcagcacctacgcaacctattgaatactgaacgcaacagaaatacctccgcgcgagcactagagacactcgaccaagagctggaggagttccgttccgaacgggcgagagatcgatcttcctttgagcgcacccgagcagtcgtgcatcagcag

SEQ ID NO: 26038 - DNA, 1106 bp, Emericella nidulans
gaaaggtttgggttgcccctggcgtttctagaacggcgcaagctgttggatattctgtatacatctctaccggatacttcgcgtgtgcttcttgaaaaacgcgtcgtttctgtagagcaggagtatgatggtaggaacagcatgactgtccggacgcatgatggatccaaataccatggtgaccttgtcgtcggggcggatggagtgcatagtcgagtacgtcgtgagatgtggcgtcttgctgaacttgagcagccgggtcttgtcacagcacgagagaagaatagtctgtcctctaagccccttgatctcaagagtgtaactgctaagttggtggtaggtttgaaagtcgactacgcctgcattttcggtatatcagactcatttccaaatctcctcccaggagagcaagtagcgagtctgcacaacggaagatcattcctcacatttcccggaaaagacggccgagtgttttggttcttcctccgaaagctcaacaagcaatacccctatatttctgcaccgcgatggtcatcgacagacatagagaaaattgctgagctgtttgcagccgatcatatctggaatggggttcaattcggcgatctctggaagcggagacaggtggttggtatgacgaacctcgaagaaggtgtcttttccacatggcactgcggccgtgttgtctgtattggtgatagcatgcataaggtacctacatcactccacataatggttatggttcagctaacagggttgggaagatggcacccaacacaggacaaggagccaactgcgcaatcgaagacgccgcagcacttgccaatgccatcagcatggccatcaaacacgactaccactcatctcaagcagaagttcactttcttctccaatccgtcagtaaaacccggctggctcggatacaggaaatttacaagtccgcccgcctagtcgtccgtctgcaagcgcgagagagtttcctcctgcgacttgttggccggtattacctcccgtattccggggacttaccggccgattcagcgtcgaagctgatagtaggaggggaacagttgagatttttggccccatcgctacggtcggggccc

SEQ ID NO: 26039 - DNA, 294 bp, Emericella nidulans
gccaaggtcaacttcaacgtaataatcgtcggtggctcgatcgcaggcctcacgctcgcccactgcctcgccaagctcccgaacgtggacttcgtcattttggaaaagagagcggaaattgctccccaggagggtgcctcgatcggtatcttgccacacggcggacgcatcttagaccaattgggcctttttgaagagattcagagacatgttgagccgctgactacagcgcatgtttcgtaccctgatgggtttcgccataccaatcggtcgcccacagtgcttcttgagcgg

SEQ ID NO: 26040 - DNA, 299 bp, Emericella nidulans
gattaccttttccgttcctcctatcaccatgcggacaaaaattctgattgtgaatagtgtgataaaaaccaacaggttgaacgacagccgcgtgaaaagagggcaccgtgtattcattacggcctgattgcgtctgggaatcgggtgatgaaggactcggaaacgcgggaccgactagcacaacagcatgggatactttgatttgagatggaggccgcaggcttatgaatgagcttccaacacttgtgatccgaggaatatgtgactattgtgattctcataagcagaaaaagtgtcaa

SEQ ID NO: 26041 - DNA, 216 bp, Emericella nidulans
acagcactcgttctcttcctgttcttctattgcagtatctcaacagcgtggagcttgccatactttgcatatcgcaagcgtatcccggagccgttactcaacaagcctcgctcacgccacgcgcgaacgatagaggacctcgacggactcaaggagtggttgagcaaccagcagccgcttagaggagcagtgatggcacccccatcagaggataat

SEQ ID NO: 26042 - DNA, 639 bp, Emericella nidulans
tcagcaaccacgtcaacaaacggatcgcagccgcgttactatcgttctttggatactggagtgcatccggacccagacggggagttagagccgcacatatccattgccaatccactgattgcccaagaatccgtggaaatgacccgactcgaggcgctgcataccctagacgcatgtcgccatgtaattgcgactctagagctaacgagattacgcaaatcccgcattggactctacaattggatggcattttgggatcgattataccaccgctcatttgctgcggtgctgtcgtctcgggtcatggacgctttatacaacgtcgatagtttgtttcgcgctattgcctctcatctccatgaactcacacagaagacagagctcgccataaccagagcttcgtcggagaaggagatcatccatgtccttcagagaatggaggaggaggttgatatacaacgaagacgaaggcgacgcaaagcccgccacattcttgagaaaatgcgcgccgagattgaagcaatcccggtcaaagtcagtgacgacctttttgacgacatgaaacgtggtgtgtttgccctagatgtctactgcgactatcacccaggggacgatagagcagaacgggctgagcaaatg

SEQ ID NO: 26043 - DNA, 366 bp, Emericella nidulans
acatatattctgtccccgtcttttctccacgtcaacttatctcctccaagtgtttccgcctcctctccctccctccaaggactctgagccacaacatgagcagaaacaaaccgttccaggttacgtttcgcccgatcttgtcccttgtctccctcatacgcgttcatttccccgaacttctcgtaatcatcgggattctcccagggcttgtgcggaagatcttggatagcactattacgaggtgccagaaccgtcacattttgtgtttggtcctttagccgcctttcgacggtttcaaactggcgggtgagtgatgcgtagatgttgataccgcgggtcttgggcaggacgtcagatatagtgggc

SEQ ID NO: 26044 - DNA, 384 bp, Emericella nidulans
ttcgcccatttatagcaaatgactcgtcgtcggacctggttttttattccgtttgtggttgggggcttctgtgagtgttaacgatcccagctgcgaacatgacggattgttgcaaattctaacacagagtacagttgtgtggattgagtatataggtcgtatcctgtccagtttagaaagcccgaattggtcgatgggcccgtacttccaacaaacctttttgctcttattggcccagcactattcgcagcctcaatctacatgatgctgggacgcattgtgatattagtagatgccgaacacctttgcatcattagaagaaagtggcttacaaagtcctttgggtgtggtgatgtgttgtctttcacagttcaggctgctggt

SEQ ID NO: 26045 - DNA, 450 bp, Emericella nidulans
ggattattggttaatgttgtgatgtccataataggtattttgcgggatgaccaaatgctccactctgatcgattgaaattatggaatgatttcaatatttgctggttggcaatatgccagaggcagaaagacatgacgcaggatttgctccagacaggccgccaagcaccccgaactagtcttctcgacgtcgagatgttggattccatgggcaagcagttaatacatttttgtgatcaactggagcagcatggcctggtagattaccaaatgggtatctgggaggaggaaattttgtctggtaggttgttctgcagccagtgaggtattgggatgaaaattaacctgaaaaccggagtagcccttagccaatgcttggacctcatcgaaagccgaccagacctcagtcaccttacccgtactcgtcctgccgcagcctcgcacacgtga

SEQ ID NO: 26046 - DNA, 259 bp, Emericella nidulans
cgcacttgcgggcgagtcgtttgcggtgatgtcttgacgggatgttctgttgaagttccgctaagcgtaacaccatgtacgtgctgccagcattcaagcaatattatgctaacttcatttagtgtcgaaagcctatttagaaaaatcagtcaacgttggttccctgaacatcgacatcaggctctgcaaagagtgcaagtcaacgctatttgacagaagtgatttcgaggctgacgttgcgcgaaaacctgaaaacgtt

SEQ ID NO: 26047 - DNA, 300 bp, Emericella nidulans
cagcaaggtggcgctggcgaacaactggatatatctgaagtatcagcagcagagcgctacgacactgtagaaatgactgccgctgaatttgctgcactacacccgcaggaacgaagttggtatcgagccatcagatgtcctggtttcgaattgcctgagcaagatgtgccagtgaatccgtatttcctcggcttgtggctgggtgatgaaagccgcaatcaatcggcaatctattcgaatcatgaagaagcactccgtgagttcctcgtcagtcatgctgctgaattggacatgcatctt

SEQ ID NO: 26048 - DNA, 384 bp, Emericella nidulans
agcgggcgaccgagccctcctcccgcgccgaagcatacatcagcggcttcaaagccaagggcaccgaaaatcaacaagagagttgtcaaagaagatgttttcagtgccgtaaaccatcaccgaagcatgggaccaccaagtttccaccatgagcattacgacgtaaacactggattggacgaagacgagtcgatcgagcaggcaaccctagagtcttcatctatgatagccgatgaagacatgatctcaatgtcccaaaatggtccatactcgtcaagaaaacgcaagcgcggaatcaacgaagtagctgccatgtcgcttagcgagcaggaacacattctctatggagatcaacttctagactatttcatgactgtcggagag

SEQ ID NO: 26049 - DNA, 531 bp, Emericella nidulans
acgattcgattcttccctcatcaagacccgagtcaaagctcgcgcccgtccttaccctttatccctatctcgcgaactcttccatccgatacctgcaacattcgcgtcggtcgatattctgagcgagatggtctcccacagcccaatcccagcgagccatcggatgcgcctgttggattcaagtcaaaagtcgtgagccggaaacattgtgaattcatataccaaaatggccagtggcatatcaaggatgtcggaagttcatccgggacctttttaaaccatatgaggctaagccagcccggcatgccgtctcggttgtacaccatcaaggatggggacattgtgcagctcggaatcgacttccgcggaggagaagaaatgatatttcgctgtgttcgcatcagggttgagtgcaaccggtcctggcagcagcagccgaacgaattcaagtatgtccgcgtcttaagctcttgtgagctataactaactattgatgtagcaaaaacacggaaagtcttattagaaaccctg

SEQ ID NO: 26050 - DNA, 240 bp, Emericella nidulans
gtaaatcagaacactggccaggtatacatagaaactgtttcggccccggcagttgcgcattcgaacggcccagcatgggttcatgagtcgccatatctaccaagagggtttgaggaagggagcgttttcgaggcatctccgctgaggcatatcgccatgagaaaacttctcttagaccagaggaacctgatgccgtcgctgttcacgaacgtgccatggagtattgctagcgatatatgg

SEQ ID NO: 26051 - DNA, 393 bp, Emericella nidulans
cctggcgatgatctagcgctggacccagagcaaccgttttagtttttccaagagtggtatgacgaggaggaccggaatcctgttacagtaaaacggaggacggtctaccttatcggaccgccgaatgtcgacagatcggcagaagaggtgaatagttgggcagctccaacactcggtccggaaactgggactgaagctggatatggggctgaagggaaaaaggaagcggtgttgaaacccccggcagtagatgatattttaccctacatctctgcattcttctccggtttaccagtaaaaaagctcaggccgccaccgtcgaaatggaagttcacgccttggaccgaagaattgccgaaaaggtcaaagaaagtgtcctatatcgccctcact

SEQ ID NO: 26052 - DNA, 410 bp, Emericella nidulans
ccgtctctccagtccgattcttggttcacaaaaaccctgaagagtttgaaggctgccggtgcccgtagcgtcgtgccggaaggagttccagatgtcagtactctgggacgctgggttctaatgggttctaagcttgctagcaggtcgtctccgtccgatacaacgaggaccctttcctctctgccttccaccctctacaatctggcaaagtagtgtccgctgttaccagctcgtctagactcctcacctcgatgccccacctgtaccgtctcgcgaactcgcccgtcgtcattcaggttgcattggaaccctaccctttcccagactactccgccatcagtgccatccggcaatgcggtttcacattcttgcactctgagacattgcaggaggcccaggatattgcggtt

SEQ ID NO: 26053 - DNA, 213 bp, Emericella nidulans
cttgaacatgctgcacttgacgtggcgtcttcatgcttcgcgaaaacactgggcattgattcgaacactcgggcactacagttttcaagctacacgtttgatgttagcatccttgagacgataatcactttgatgacaggaggctgtgtctgcacgcctagtgatgacgagcgcatgaatgacctcgcaggcgcgataaagaggatggaagca

SEQ ID NO: 26054 - DNA, 270 bp, Emericella nidulans
gaatgcatagagtcagcaaaatcggcgcgtgttttagtagtcggcgctactcgccatccaaacgacgttgatgatgctttgcggactcctcaccgatttgcaactgagattgagctacaaattccaacagcacacgatcgatccgaaataattgctgctatatgtgggggtccctctccctttttgagcaaagccttggtcgagcttatagcggagaagacgcatggctatgttggagcggatatattcgctttgctgcagcttgtatgc

SEQ ID NO: 26055 - DNA, 1116 bp, Emericella nidulans
atggtatcttgtccgatttgttcgaaatcggtctcatcgctaaagatcaatgaccacattgactcggactgccagcaattcatcgaagagcccacatccagctccagcgatccttcaccgtcccaaaaagcgcccgtccctgctttctttcaaccgtcgtccacgaaaaaagcctccactcagcgcgatactcactccgttgcttcccccctccgtaaccccagtggcaagagaccggtaacgcagaatggcggattggacgatactgccgctcgcctacaagcagacgaagcttcagaacccgttccgaagaaacccaaggtcaatgcattccagagagccgcgccgctagccgagcggatgcggccccgaacactcgacgaagtatgtggtcaggaacttgtcggcccaaccggtgtactgcggggtcttattgaggaggatcgagtgccaagtatgattctatggggagggccgggaactggaaagacaacgattgcacgagttattgcgtccatggtgggaagtagattcgtggagattaatagtaccagcaccggggttgcggaatgcaagaagatattcgccgatgcaaagagcgagctcggattgacggggcggaagaccataattttctgcgatgagatccaccgtttctcaaagtcccaacaagatgtgtttctgggccctgtcgagagcggacaggttacgctgattggggcgacgacggagaacccctcattcaaagtgcaaaacgcgctgctctccagatgcagaacttttactctatcaaagctcaccgacgaggacattagatccattctaaaccgtgccttaaagactgaagggccgaactactcgccatctgccctagtggacgacgagttgctcgattacttagctaaatttgcctatagagacgcccgcacgtatctcaaccttttagaatgggcgatgaaccttacgagacagtcacaggtcagcacatacgcgataaaacgagttctgactaatacgcttgtctaccaccgtgcaggctaccagcactacgacaccattaccgtctttcacaaatccatccggggcagcgacccggatgcagcgctgtactatctt

SEQ ID NO: 26056 - DNA, 411 bp, Emericella nidulans
cagcatcacttccaggcgtcccccgagttcttctcgaccctcctctctgcacaaccgctctccgggcagcggataccgtcgcccaggcccgggctctcgttgaggcgaatgcatctagcatggcagtcgaatgagaaaagcaatgcactggtgctctgtcaagagcccccgatcagagtcacctcgatacggcattggacgtcattggtcgatgacgatgtcgctagccatttgctctccttttatttcacgtgggaaaatcccacatggcagcttatcgaccaagagctattcatgcatgatctagaacaccggcgcacgagattctgctcctccttactcgtgcatacactcctctttttcggttgtgtaagcttgtcgatggctgaagccgctcggaggctaatatta

SEQ ID NO: 26057 - DNA, 279 bp, Emericella nidulans
gcctttggccggacagacgcggaaatgaacgggggacgcatgtctagcagttttcagcccaggactcgcgagacttcggaagcagagcacaccccagtcctaactggtcttgaatcagccaatcgtgctattggcagcaatgtacctgcaaaccggagcccctcaccattaagtaagacggctacagttgcttcgggaatatcgaacatatcattgtctgcaaaagggaataaccacagccgggagggtataagccagatgggagttgagcttcagtga

SEQ ID NO: 26058 - DNA, 207 bp, Emericella nidulans
gaagtagactcgtcaaatccttttctcgacgatgagcaagaaatagaatgccaacaaagcccaccctttaccttggtgcggaagagaaagcagaattttaactcggttaagtcattccagtcaaaaacgtcgcttatcagttcacgtagagcattgaattctgcatccacgcctcggtctgtcagctacaaacggaatgtgaccttc

SEQ ID NO: 26059 - DNA, 348 bp, Emericella nidulans
atcactccgctgcagggtttagaagacttcggctacgcctcgagggtgcccacggcagaggaaatcgaagtggcattgagaggcgtcgctgaggcaaacggctgggagaaatgtgagcgatgcactgcccgctttcaggtctatccaggccgacgcgaggaccgcaccctcaccagcggaggcacctgggcctaccacccagggcaagcctactaccctccacggaagacgaccgaccatatcacggttgctatgagagagggacacttgacctgctgcgaccagaagctcggctaatcctcaggctgcaccaacagacgccacgcctgggttcaagagtctcagaag

SEQ ID NO: 26060 - DNA, 1820 bp, Emericella nidulans
tagtcgcgtctgaggatgtccggtactggatttcgctcgtctacctcccgcgttagtagtgacctaacaccgtctcccgaacaactgtcccgctcaaataccttcgagagccccttgcattcgaattcgcaaaatggtttgccatccactcgacacagctcattaccatattcgtactcggcttctgcccaccctctagacgaatctggtcgatcgcctcagtcgaatttcgcctcaagctcgcactcaacggttggactgcctcgcagtcgactaagtcgtaccaaccccgaagatgaaccaatttctgagcgacgcgcttctttacacgattcacgctccttccgccactccgggctctcaacaatccgaagtagtcgacaagcttcggcttctgaagtcaccgagaagccacgttatgaatcccgacaagatgggacggaatccaccctttcgactactgcgccctctaccgtctgggatgagctggaagatctcaaatcgcgcatcaagaaactagaactgactggaaaactccctccgtcatctcaggaagccatgctctcctctggagaccgaccgcgcacggtgacaacgacggtaacaacgatgtcctcctcgccgcgtcaccgaaggactagcgtatcaggtgaatctgatactattacagctccaaacccggctcatccgcttatacagtcggctctggccaaggtaaggagtgtgggaactaaggacgtgttcacggcattggagcccgccgccaggaatcaatggccctttccaatttttggagcagccaaagcaccgtccggaaatgtctccatagtcaatggatacggttcacggaaacgccattttcgacggaaagctgatagcgtctgtcgtagtctcacagaactatgtctcgctctgtcagacgaacatcatactaagcagcagtcgtcgggcgatactacattccgaatctctcagtcgaatactaccgacgaaggaacagtaactcctactacgctatcataccgtaagagtataacccaaagaccacgaaaggaaaatgcacccactgacacatgcatgtggcccgtcgtaccgcaagtcggctggaagcgcggcgcgcaagcttagcgaaccaaggcgaccattacccttcacctgagaacgcaggccaaagcaccaaattggcacactcaccgagtgctcccgtcacacccgccactgccagtcggctaagtcggttgtccgtttcgatgcggacaaagaggttgcaggaagacgagccctctgattatcgcagcccgcacacgcgctcagtttctagaagtatgaccgacattggagctgcctcctcaacgcaaaaggcctcaccccgacaacagagttcttttgggtaccaggcgccacggccgatttctgattctcagcagtcctctcagccgcgtaccccaaccagttcacaatccggcatacccctccgccgaagcttaatgaccccatcccactatacaccggcgattccccgcgcgaacatacaagctgggtctcgtcgctatggcttaccatcagcggctggaagtcccgtggatgatgtaccactatcaccacgccaagacgctcaccagtcgagaatatccgctccctcaagcaagctagcctccagctacacgcccataacacagaatcgacttcgcgcaaacagcttaggcggccgaagactaggcgtcaggcgcccaatgtcaacagtagacacgaagcagtccaaatccttcaacgacagcattgactgactgtcatgttctaacaacatttattcaattctt

SEQ ID NO: 26061 - DNA, 225 bp, Emericella nidulans
atttgttgcaattgtttacaaaggtaaccacccactctcacatgaacctacctatatgcaaggtaacggaaagctgaccgatgaaacgagcaccttatggaccgtcctacagtgtttattgaaatcattcaacgacacaacttttctggattcggagctggaaattttaagtcattgtttgaggctattgagagggagcaggcgctgcgaggcaatcttgtgtaa

SEQ ID NO: 26062 - DNA, 312 bp, Emericella nidulans
gataatgtagatatacaaataatttatttaaatatcttaatgcaatataataaaaaaaattcagagtatttaaaaaaaggtatattaaatgatataaaatataaaagagtatctggggttagattagaagcagcaggaagattaactaaacgttatacagcttctagatcacaatataaatttaaatataaaggtcatttagtaaatacatattcatctattcaaggttatccatcatctctaataagaggaaatgataaacctatattacaatatacaaaattaaattctaaatcacgtattggatctttt

SEQ ID NO: 26063 - DNA, 250 bp, Emericella nidulans
acaggagaggcacgatatgcgtacgtcaggcgacatgtacgtaccgtcagtggtgccagtttccgaagcagcagtgacggagtattgaatgaagacgaagccgatcggaccccatactctgctggatcagttgtgatgcaacaggaacgtcctacatctcagcgccaaccaggtggcatgttacaccagccctgtacaaatcgatcgtcaccaacacgatccactgtctccatcaagcggagagagctcg

SEQ ID NO: 26064 - DNA, 390 bp, Emericella nidulans
tagacaccaaaattatcttccgaaaatgaagcaaatggcacgagtccaaatgcatcaagtatagagtggcacaggattcgtttccgtgccaatgtcttcactatcaacgaatggccaatcatgttcccgcaaccacgagatcacttctcagtaggagcggagcagtcgtttagtacagttgcaggcattggctggtcgccacccgggcttgccaagtacaggcgtagcgtactggctgttttgacgtccaacatggttctaacgatctatgcgcctactaacaatccagcaaagtggacgcgaattgcaattgtcaacaaatccttggagattttctttcatgaaagcattgagaatggtactccaaacttacgcacccagagtttccgt

SEQ ID NO: 26065 - DNA, 222 bp, Emericella nidulans
gtgcggtgcaatttgacgtttctggcaatccaagagcctggaatctcaaagctctgctccagatgtgagagtgagtatcttgacgaggaccttgttggcctcgcagggcaagccagcattcaaaggtcctgcaagacgttgtcagacgctttcgacacctgtgtttattgcaacggaaagttccgttcttgatagttcggcattgcatactctgagaagtct

SEQ ID NO: 26066 - DNA, 385 bp, Emericella nidulans
aatcaaatttcgcgctgttggactctctcggctaatcggtttcttcaacgccagcgcatgcaaaccgatccccccgcaggagtctcagcatccccggtggccgataatgtgatgacctggtattttctcctgataattattgtatcgagaggcttctaatcaggtcgctaggaacgccgttattattggtcccgccgataccccgtttgaggatggcacattcaggttggtcatgcatttcgaggaacaatacccaaacaacgctcccggcgtcaagttcatcagccagatgttccatcccaacgtctacggcacaggagagctctgtctcgatatccttcaaaaccgctggagtcccacttatgatgtcgcagcgatcctcacc

SEQ ID NO: 26067 - DNA, 300 bp, Emericella nidulans
actgttggagacttaccgaaaacatggccagtggcacactgtgcttcctgcgctgagtaccacgcaatccctgcgtcacagacctcacatttttcaaagatgttcccgccaggagcatttaatgtctccggtggtttcgcctctattgcgctaccaggttccgagcacctcgcaatctcatctgacagatgtacgccggtacttgccgagagtttctttaagacctcgcgagcgctcgcaatcaactcagcacgttgtgactgcacaattgcacagcaagctgctgcatagaggaccttt

SEQ ID NO: 26068 - DNA, 711 bp, Emericella nidulans
accgttgatatacgttcctatcatcagctccctgcccataacgcttctaccagttcaaacccttatgccgcccagccgagtaattaccagtccaacgtcggagtgccgtcattaacagttggcgcgccagggatttagtccactgctggtactcttccacctcctcccgttgctagcttccaacaaccgtctacctctccggcggagaaccaagaacctcctgcacccgccacgcaaaaaaatggccgagtcgacagacagccactccgctcagatgatgatgcgccgtggggtccagaggtccagaagaagtacgatgcgttcctgcatgacgaaagagtatacgtgactgaggggctatgggatcgctttccatatggatcgcgattgtttgtcggttagtgtacttccagtatggcagtaagcccttctaacatgttcgttttttatacgcaatctacccactgagagagtgaccaaacgagaccttttccacatttttcatagctatgggaaactggctcaaatatcgatcaaacaacgtacggcttcatacagtttctggaagcctcatcctgtaagcgggctctagaaggcgaacagggagccattgtgagaggacgcaaagttcgtaagtattccactggccttgtatctgattatggccttagcctaactcatcgttcagaccttgaaatttccaaaccgcag

SEQ ID NO: 26069 - DNA, 414 bp, Emericella nidulans
ttcatgcaccccttttccatcctcactctcggcatcttcgtagcgggctacatcaccgcgaggtgggatctcgtcacacggctatacgaattggccatatttgcttgggatcacggcgtggtggtgcgttcctttaagctatctttcaagcgtcgcgctactcttgaaagggctccgttcgctaacggcgggctcagactaggacagcaaagggatttgtcttcctctcctttttctttttcttgcttgtcgtaccgataaaccatctggcgcaaaaggagagtattcaggtaggctggcaatctgatagttaaagagtttgggcgatactaatgaccgttgctccagcaccctcgacctgtccatctcggtgtttccgctcgcgaacaactacgccgtcgcggctcgttttaa

SEQ ID NO: 26070 - DNA, 213 bp, Emericella nidulans
gtctttttcttcttgagcagatcaaattctcgctgtaactcttcagggacaggaagcccttgggccctgcactggtcaattttcgagcgcaccttcttaaacgcagtatctgcagccttgtgctctacgtagattttctgcagatccgtttcaccagatttttccccggacgtctgctttaacctagcattcaccagttcgtcgagagtaaca

SEQ ID NO: 26071 - DNA, 822 bp, Emericella nidulans
gaacaacttcgcagcgacgactttttctctggtctggatattaatagtggtgacctcttcagcgctaggagaccctcaataaatccaaatatcaaatacaagacagagcctcttggaagcccggcgcggcgttctgcgacgaccctgacatttacgaacgccgctgtatcgccaaaaactcgtatacctcgcctttctggacacgaccgaactcgctcaacccatctggaaacggtctctgagagcggtgctcccttatcaaagttccgcacatctccacgccgaccaggccatgtctctcactcctccgtgtctagtcttccaatagctgggtcatcacaggggtcatcaattcagtttacaccaacccgacgttcagtgggtagccgggtctcaaaagaagccctagcaggggagcatgctcctgggaagcaacttttaaaaacgaaacgatcaatgccatcaatgcgcaacgcaccgcatacgacaagtagcacttcattcgcatgcccccctgggcaaagtggcttgaactggcttaataccggcacctgggctgccactgaccgcgctggactggatgggaagttatcaactcgtaaagcccagacgcctttcttacctgccggagcctcagaaagacagtctcaccacgtcagcgtgaaaagctaccgatattcacgccggagctctgacggtgccagcgatgctatcagctcccaaggtaccgttactcgattgccgcgaaccagccgtcaagatggctcaggcgtaacttcagaaacattaagcacaacccccaaaaggaccctcacccgacca

SEQ ID NO: 26072 - DNA, 399 bp, Emericella nidulans
gtctaccaaggccaggaacaacatatgaaaggaccatacgccccctacaaccgcgaaccactctggaaaacgtcttacaatacaaacggctctctctacaagacaacatcaacactcaacaaacttcgcaaccacgcaattcgcctcgacaagcactacgtatccagccacagcgaagagctctacctggatggttccacatatgtcacgcgcaagggctcagaaggctctcagattgtctctgttttctcgaatcaagggtctcaaggcggaccgtataatcttagaatacctagggcgtataagcctgggactgaggtcatcgaggtactaagttgcaagagagtgactgcggataacgaagggcagcttgttgccaaaatggacaagggggaaccg

SEQ ID NO: 26073 - DNA, 750 bp, Emericella nidulans
acgaagggtcgacaacatcgcgacagacgacgcgcttatcctggaatgcttggaggaggcaggtgcagttttccatgtccggacgaatcagcctcaatctctcatggtaatgctctttacggcctaaattgcagcaattactgactggacaagcacctctgctgcagtaacaatctcaccggtaccactttgaatccttacaaccgcactcttagtccgggtggttcctcgggcggcgagggagcgtctatgggattcaagtgcgctccgttaggcatcggaacagacattggtggctcaataagatgcccagcggcgttttgtaacgcgtatggctttcgtccgacaatccatcgaaacccacttaaagggtcgaaagtgcctgtgccgggccaagaatctatcctaggcgtaatcggcccacttgcctgtcagtgcgtcgaagactagagctgtttcaaagggcactccttgatcaagagccttgggatgaggagacctcattggtgccgttgccttggaagcatgtttcttcaacggaaaatattacagtgggcatcatgtgggatgatgggtacgttcatcccatgttttgatcataatttgcaatctgatggagctagatgtgttcgtcctcatcccccagtgactcgggccctgtcgcacgctcgagagcggctccgagccttgggtatcaacgtggttgactgggagccctacaaccatgaccatggttggaaaatcattgta

SEQ ID NO: 26074 - DNA, 335 bp, Emericella nidulans
gccaagattttccttcgcttcgtcagcttcggttgtagtctcatcgtcctcaccatcatagcgaccactctgaccatttttcacgcgaccaaaaatctgcctccaaggagcggtaccactccttgggccgttgcacaaacccatggcctcagtatctgcttctcgcaaccgcaagtttatcgttgctctcctgtctggtagttttctggacttggaaaaagcgcggatataaacgtgcggagaaggttgcagtctactactctatattttctgttggcttcttcggattcaccctcattttatgggttgtggtctcagccatttaccagaattcc

SEQ ID NO: 26075 - DNA, 405 bp, Emericella nidulans
gtttttgcattcccagccgactatgtacactgtgctccgtacagtgtaggtatccactccgtgctgtgggtttctgcgttgcctattagactgaagtctagagtggactattattgcattatttctacttatctagcgatagtcttggtattcttttctagctattcttccctccacaccggactcggcgcccacgatgaccccgtcacatcgtccaccatgtttgaagaactgacgtctattttacccagagcgtcggcccttcggaggcgtcgatattccgtcaggtcattttactggtctcttgcgatattcaccgtccttgcggccttcagttggggcttgggacgatggagcagtcccttggtcgctcatggcttcgcaaacccctcgcttatgaaacgg

SEQ ID NO: 26076 - DNA, 345 bp, Emericella nidulans
cagtgccgcttggtccgcaacgcgaaagatcaatgcgcctttgtccgcttgaactgtctcgatgaggaagacggtttcttctcgtaccttcaattatactactgcgccctcgcacatgcgaagccgctagcttttatcattatcgtactctggctgtcactgctcttcagtacgattggtattgcggcaagcgacttcctgtgtatcgacctaagcaccttggccagtctactgggcctgagcgagagtctgacaggtgttacgttccttgcctttggaaacggcagtcaagatgttttttctacatttgctgccatgcggtccaatagtggcagcttggctatt

SEQ ID NO: 26077 - DNA, 315 bp, Emericella nidulans
ctcctctcaagatcaacaacaagaccctcctgctgcacaaaccaagcgttctttgtcttccactcgtcgcctggtctatgcaaccggaaggtgaaatccctcagcagctgcgggatgatcttgtgcatctcaatgagcgagatattcttacccacacaagtccttgacccagcaccaaaggcaaagaagctctgctccatctccttcaatttcgcaggcgggctctccagccaccgttcgggcataaatgccccggggctcggaaacaccttctcgtcgtggtgcagagcccaagcgttgatgccaacggtcgtc

SEQ ID NO: 26078 - DNA, 354 bp, Emericella nidulans
ccggcaggaatatacctcccgcagaccgtgactccaccctctggcacatgtcgttccaggatcaaccccacggtcggatgaagcctcatggcctctttgatcgcggcccccaggtaaggcaagtgcgtcatcgactctttgtacgagatagggctgctcaagcgtcccgcgctatcagcggcctcgatctcccccacagccttttccatcttgtcgggattcttcagaaggaaatacataatcgcccgcagcgcaatagccgttgtatccgagcccgcaaagacgttggtcgacagatgcacaatcacatcgcgggtgctcatcttctctggatcagcgacatggatcgccatc

SEQ ID NO: 26079 - DNA, 441 bp, Emericella nidulans
tccttcgaatctcttcgaaagcgagcttctggatcatatggcggcggcaactcggacatgacgcgacttgcaccggagcccttttctcgagctgcaagcttaagacgacctgaatccagaaccagcaccaatgctgaacgccccacaagctccgtatctgtcacgacacgcattgtacgtgagcccattgctgacaagaacggcttgaataccgctacggagcccggcgcactcaatctagaggctagcccgcttacggtggagaatggtacctcggatgactcttcatctcaaatccaaactctggagtcagctgcaaacaaagacgaactgcgcagcatgtctgcctctccagccgactcgcctaaaccccttgcggctggtgcgctacctcgctctgagagtagattgtccgtgtcgtctaaaaatgacgaatatttt

SEQ ID NO: 26080 - DNA, 531 bp, Emericella nidulans
taggcttacgcgggcattttccacatgttgcccttagggttgcgagtacaggagaagttggaacgccttattgatcggcacatgcagtcattaggtggatacctactgcttagccctgctgttgcggagcctaactattcacaggcgcctcaaaggtttcattgtcttcgatctcgtcgcaggagctctgggagaaatctgggcgacttaaggacaattcagaagtaatatgcgccgtaactgtttgtcactgttactaacatgggctaatagtacttcggcttcctcgataggaaagaggctcggtttttacttgcgccaacacacgaagaagaaatcactactctagtgggaagcagcgcccactcgtacaaactcttgccgattcggctgtatcagatctgtgagttgaggtaggagctctgtagcgccatggctaatcgagtagcgaggaaatatagagatgaaccccgaccgcgacaaggcctcctccgtggtcgagaattcatcatgaaggatctctacaccttt

SEQ ID NO: 26081 - DNA, 426 bp, Emericella nidulans
cagtcggtccgaacatacgcaaccagtgcctccgcaccgtctcaagttcccgtagttccatattcgtctttgactgtgggagtgcctcgcgagatataccccaatgaacgccgtgttgctcttacgccgcagaatgttgccttgctgctcaagaagggctttgtgcgtgtcttggtcgaacgtggagctggggatggtgctcagctgctggaccaagcgtatgagaaagctggagcgacactggtcgatcaagccaccgtctggtctgagagcaacattgtcttgaaagtccgcgggcctcaactaaacggccccttaacgaagtcgaggcattgaagccagggagcaccatcatcttgtttctgtatcccgccagacaggcagcttgtggacagcttgcggttgggggcgacagtttcgtatgca

SEQ ID NO: 26082 - DNA, 582 bp, Emericella nidulans
gcacgcgatttctacaaagacggcgtggatttcgcattacttgcccttcagtcggccgatttcgctgagttgtcggtgcaacatatacaattattcagcagcatcctgactaacatagaccagtctgaagccgaaccaccaattggattttacagaccccgacgctgtcaggtaaatcacgataatgagcgatatcctattgcgccgattgacgtccagctctcagacaattgactgtcagtctgctcaaacgggattttgatctggatgtcaacatcccagagactcgattatgccctccagtatgtgaagtttgacctgctgctaggatccgactgattgacctataaataggttccgaacaggttaaattatgtcctatggttgcaagatctgcttgacacgacgggcgctggatgccgagatgcctatgagcctgaaagaagtgtgacaggtcttgacatgtgcgttcctacaccctttgtcagaaagtttctaagtcccaccagtggcacaggatgctgcagtatataccctatattaggcgtacgaacgagaccgaattggacttttatcgcaact

SEQ ID NO: 26083 - DNA, 326 bp, Emericella nidulans
gttgattggaggatatgcacttttgcctgtatcacgttcttcgcgctccaactggatcgtggcaatgtagtccaagccacgtctgatacaatgcttgcggatctcggaatgaacaccaatgattacaatactggccagacaattttctattgcgccttcctttttgcggacgtaccgtcacagctgatctccaagaagttgggtccggaccgatggattccatacaaatgttctcttggagtttgatagctgcttgccaggctttcctaccgaaccggggtggatattacgcttgccgagcgctattagggttgttcgagggtggt

SEQ ID NO: 26084 - DNA, 333 bp, Emericella nidulans
ccaaggtctcctgtatgtcactatcttggaagcgcgatggggcttctacggacgatcgccctcgtgatcctggggttttcagcttttatttttactgttcttttcgggagacttcctgtatttcggtatgtgggagtctttgctgagctgtcacggcattctgacgtacccaggaaaacgccgatcggcctactccataggattatctggttacatatcccgcatggaatatcatacattgatgctcgtttgtttaatggacggatcctgagatcctggggccaagctggcaactatatcctctacgaaaatcatcccctcgtgcttgtcagt

SEQ ID NO: 26085 - DNA, 256 bp, Emericella nidulans
actagtcccgataagcttgaggaatgcaagtgggagctcgaggctgatacagagaggtttatcaagacgatagaggtttgtttatagcctttacctatagtgggccttgccattgatctgcctttaggaaatcatttatccttatgcatggggtgagtacaacgttttgatccttccacccagcttcccgtatggcggcatggagaacccggtctttactttcgcaacgcctagcataatctcaaaggtgcgctct

SEQ ID NO: 26086 - DNA, 408 bp, Emericella nidulans
ttgcagccgaaagcagcctcaaggaagaactcacagccaaatactagcttggacagtcaagagcccaagaccacatcttctgctctaacctctgaagatggagaagcctcccagcttgtggaaggaatgccgatagcccataacccatccctagctctttcacaagacggcagcttactctcagctatcactagagacaaaatagacgctcccacgctcgcgatccctggtgggcaggagttgaaacacatttttgtcgacaaagattgcatgagggatcctgtcgtggacgtattctacctggacacttggcttgctgtggccgaaaagaatacaaagattttccggaatgtctttcgctgcatgcctgacagcgaagtccgatcctggaaagagtacaaagagtat

SEQ ID NO: 26087 - DNA, 213 bp, Emericella nidulans
tgtatgtatatctcctccaaatcttcgtcatgggctgacaacaggcagatgtcgaccgcatccaacccagatatccccaaagctcaacacggagacgagcccgacgatgtcctcttcaattccctattcggagtgcgactggtggagctcaacaggccaaagaagcttaactcgttgaacggctcgatggtcaggaagattcttccacgcctc

SEQ ID NO: 26088 - DNA, 546 bp, Emericella nidulans
ctatcaccgacagcgaatttgctgcggaagtctcgtcagtttgcacttccgcaggctcttactccgggggaggctcctacctcgaggccctacgctgaatccgacaccgcaacccggcctcatcctatccgagcatctatcgtcacaccggcatcgtcattagcgagaggagattggggtctcaagagaccgctacccgccaagtcgacatcacagaagtcttcaaggccagttgtcaggatcaatgaactagacaccttcgaacatgtcaccgacttcgagtccgcgtccgatcacaccgtgactctggagaaattccaagaattacatatgccaatctccctccctgcgaaggtacacttttcgtcgaacatggtcacaagacatcacagtgtttttgatcaggatgtcgacaacacggaggcgagcgaaaacattgatcaacccgacattaaacaaatcagacacactggaccctggctttcagggcttacggatgcggagttcgctgcttacttaaagaaggtacagaaacagaaacctcaa

SEQ ID NO: 26089 - DNA, 408 bp, Emericella nidulans
cacgtctatctgatttgcgaacctcccggggagccttattacttggcgcggataatggagtttctcccaaacaaaaactcgccatctggaccgattgaggcgctccgggtgaattggtattacagaccacgtgacatccaacgtaacgcagcggatacgaggctggtattcgcctcgatgcactccgacacatgcccgctttcatcgttgcgtggaaagtgccagatcagacatgcttctgaaattgaagatttcgatggctacaggaagacgcgggattgtttctggtacgataaaatgtttgaccggtacatacaccggtactacgaagtcatcccgacaagcaaagtcatcaatgtccctgcaaacgtcaaacgggtccttgatgagcgatggcgatatgttctc

SEQ ID NO: 26090 - DNA, 243 bp, Emericella nidulans
tttcttgccaaaccagacgatactctttcgtcatcgaattcttcacgaaaacgcaagcagcctgcaagtctcaccacgaacgccaccaatgaaaatgcggccaagaaagtcttcacggccgcaccaggcgttgccccaggtcaaagtgactccaacatggtcacttttgacgaccgaggcgcctacttgaaagatgggaaattgacggccgacgatggcacgacttttgcagtgaacggtcag

SEQ ID NO: 26091 - DNA, 360 bp, Emericella nidulans
gcgaatcaggcacggacacttcgcaacgaaacagccgcgccagatgcaacgcaggttggttggtttaattcggcaatcacatcacaagccagacgcttcgggagacggaatccggatacgaatgttcttgtctttgatgcgcatcgcgttttgagtcatgtcctcgatttcccagaccagtacgggatagtcaacacgacggatttctgccctggatatgaccaaccggatattgagacagaatatcaagcatatgggtgtccaacatccctggggacgtatttctggttcaattcgggacatatcacgagtcggctccatgaaattctggcagcacaattgagcaagacgctggagagg

SEQ ID NO: 26092 - DNA, 510 bp, Emericella nidulans
ttcggtccaaagggtggcatgcaattaccgcgaccaagtacacagcatggttatcggcgaccgtccgcccactcggaggacaatctctctccggtcccttccgtcgcagacgagggggctatcgcggaaactgtattgcacgaactggcagaagaagacgacattccgcaatcgagagagtccgcacgacgcagtgagcgtggttatccgaacggacccattcaaatctacgactctggcgtttttctgtacctggaacctacggcagatgaagcctcgcggttcgatgtcgtcgtcaacgtggctaaggaagttatgaatccgttcagcaagacggccgataactcccaaactgtgatgagcactttgcgcaatgggactgtcgattccaaacaacagtcctgttcaagtccctatcaggcctattcatgcgtgtcaattcagtgagccctggaatatcagccagggctcaggtcggattccatgtccctctgtcatccatgttcaaac

SEQ ID NO: 26093 - DNA, 258 bp, Emericella nidulans
acttgtgcagccggaatcggaacagctataattttcgtaacatccacctcctttcagactgaatgtgcgccggcgcagtccgcgacgatcgttgcgttagccggtttgctgagaaacattgcagctgcgattgcggccgtaattgtagatggagtcgtgaagaaaatgggatatggttggtgtttcacaggattgggagcattggatgggatctgtatcggtgggatcgtttatattatctggaaggggtggaagcgt

SEQ ID NO: 26094 - DNA, 222 bp, Emericella nidulans
tgcacgaaatcattcaagtgttccaatgcaaggtactctgctgcatcaggtacaactcctgctaccttatctgggtttgatgatttgcagggaaaggcagggagacagaactcgatttttttgttgtctttgataaacaagtagacccggtcaatgaagtactctcggccagtaaggtcccagcggtcgtcatggctcgtattcttgagagttgtttcaaag

SEQ ID NO: 26095 - DNA, 471 bp, Emericella nidulans
aagcagctaggaaaactgccccgccaatcgctgctagacctcgtcttccaatggcttgacgaccgtaacgtcgataatttccctccgttcttggaagcagacgaggccaaaaacccagacgatgaaggactacggccgtacccggctgagcgcaccctcaacgacgtccgcaacgcctaccaagagcttcaatttcggaaaggcggaaaacgggaagtcattgaccgcatactggatggagactggagacacggaattacgctgcgacagattgcaatgatcgatcttcgatacctggatgaccacccggcaagtttgcgatggacggcgctggagcttacgcgcatcggcatctcaagcacagaagctgaagagagcaatctagccgacatctcagcgtgcattccgcgagttcatgcctcaaatttcctcaataagcttcaagaacagatttcaccgctagtcaaagcg

SEQ ID NO: 26096 - DNA, 268 bp, Emericella nidulans
gtcgtgatcaccagtgtccttcgtctctctggtctacgcaaggtagccaagagtactgatacttcttgtacgcctctccccatcttccctattcctatcctgtccgcaactggttgttaacgaaagcgaaacagggagcaacgttggcgtcggctactggacagcagctgaatgcaacgtagcgatcatatgtgcttgcctgcccttcctccgccccctcgtcagccgcttattccccaaattcctttcgacgaacagctacaacaaa

SEQ ID NO: 26097 - DNA, 273 bp, Emericella nidulans
agacacacaatcgcaaccatgtctgctagtaccagtttcgaaacccccagtacggcattcagtgaccttcgtacttctatatccagccaccggctcagtcagattgaaaaggtaagggcaaacggcgttggtgaggtagtcgctttgcctcagctagttgtatgcggagaccagtctgcaggaaagagctctgttctggaagggattagtggaatcccgtttcctagagaagatagactttgcaccaggttcccgacagagatcatccttcgc

SEQ ID NO: 26098 - DNA, 236 bp, Emericella nidulans
agtcctcgagaagcagcattcgaaattgtccgcctgatcaattcccggaaccaaaatgtctcgttactagcattggcggtaagacagagctccgtgactatcgcagaatggcgcattgctgacgagatcgattccggtagcttctggacatctgtgtcaaaaactgcggatacccgttccatcttcagatcagcacgaaggaatttctaaatgagttggtccgtcgcttccccgat

SEQ ID NO: 26099 - DNA, 219 bp, Emericella nidulans
ctggatggccggttcatcgcattcaaagataacatatgcactcgcgacttccctacgacatgcgcctcgaaaagccgcgatacattcaccagtccgttcaatgcaacggtagtccagcaactggaagatgcgggggccattgtcgccggaaagacgaatttggacgagttcggtatggggtctcattccatctattcgtcattcggacatgtcctgaat

SEQ ID NO: 26100 - DNA, 309 bp, Emericella nidulans
actactagtctggtttatgactgcttcggcaccatcaaagactggcttcggaatctgacctttgaccagcagcagcgcgaaggccttccttcaatatgtagcccagatattgacctcgatgctccgtgggcttgtgtcatctggcacaacatgactgtgctggcaccttgggctttatgggaaaaaacgaaggacgtaatggttctggaacaacagtatcagtccatgtgcacatggattgccgcgattccagaaaatatgaaacgtcaccgtcacctgtgcgatccagttgtgctacagtttgcggtt

SEQ ID NO: 26101 - DNA, 517 bp, Emericella nidulans
ttccgtcagctcttcacgcgcaacgttctgttgacgctcctcgttcagttcctcctggccttccacacgagcgccttcaacttaatgaccttcaccttcctcccaagcccgcgcgccccaaatttcagccacatggatttcttccgttttggtggcggcctcggtcttacttcctcacgggttggtcttgcaacagcaatcattggcatcatcggtctcccgctccagatctttatttacccgcgcattcagtcgaggctgggtacactgacctttttctgcacattcctcccattctcaccactttcatatgcgctcatgcccttccttgtcttggtcccaagctacccctacctcagtttggccggcattcacgcttgttgtggctctacaagtagtgtcaaggacttttgcgcttcccgcggctgttatcctagtcaataacagtgtgacggacgcgtctatcctgggaaccgttaatggagtcgcaacgagtatatctagtgcagcaaggacg

SEQ ID NO: 26102 - DNA, 210 bp, Emericella nidulans
attttttttttgtgcggtctgtcatcatgagctccctgggcttgcggagcttggctcccgcctcgaaggttggttttctttcgacttcacctcaattcgtgatccgaggtcatgaatgatggctaataagactgtgaacgatagatctcccgtgctttgagagatcagagacgtttgttctcctcatcccgccctgcaggtacgcattga

SEQ ID NO: 26103 - DNA, 771 bp, Emericella nidulans
ttgcgttcgctagactgtgcgggatgggattcctcgagtccgcagcctcgtttgagcgaggaggaattcacaattttctcgctctcggcaaagacgaatagccattcagcggaagagcactcccaatgggtaaatgatctgatcgagggtatagaccaagcgtggattgggctgctgctgtccaccgtcacaatatcagaaagctcaatctggtttattcccaccgcctggaatcacggggctacctggaccggttgttcgtcagggctacgacgcatcagaaaccgtttgacaggtgcccggcttttcatcgactgcatgaagtgtctttgcgacaacgaactcgggatgacgaggacaagggcacaatgtctccgtcgcaaatcatgccgttcttgcggatgcatgtctaactacacttgccgtggactcgcttattgaacaccgaccggagccggcagacgaactaaacgacaaagaagaaataaatgaacctccgttggagagatctcaaagtcaatcattcaccgaaataactctcacctccagcaatgccctcgaaggcctcgagtcaattctctcctcttgcgcctccctgaagtcctttaaataccagcacacagatgccctcctagcagagggcttccgaccatccgcattcaatacatctctctcacggcacaaatcgacgctcgaaacaatgtggcttgataactcggcacgcatctcccatttacgattagcggagtcaatgaaagtcatgaggaatgg

SEQ ID NO: 26104 - DNA, 240 bp, Emericella nidulans
tcagagtctaaagagcaggacatgccgggtttcggtgaatcttgaccctgagtactaaaccgggaaacagggcgtgctgtattccgggacaacaccggaatccggattgtgatggcaactgcgtacattggggttttcttctctttgattttcttgcgcttcgtcacatcgggaaagggataaccggtctcaggaagagattcttggattaaagacgtaccaagatcacgtccttcagac

SEQ ID NO: 26105 - DNA, 201 bp, Emericella nidulans
cagttgattgagaggatgagagcgaatccatgcatggacactgttcggccactattctcaatctccagctgtcttcaagcaaccggaattctatctgaactcccgctggaagtcatgtcatgtttccaggcagagctcacaaatacgctgcgcaacctggaggaccatatgggcaatctgctgtgcctagcaacttttgct

SEQ ID NO: 26106 - DNA, 501 bp, Emericella nidulans
ttgttggagaatgaccgtcgaagccagggcgtgcgaattgtgagaccggcgggtttccgtcggatgccttttgggggtatacttataggggacggcggggcggatagacgatgttgagagtttgtttctacaatcgaagcagtcgagatcgacgggcgtgaggaattcaatggtgggggcatcctcagcgacaggtttttcaggtttctgtctcgtctccccggggaatcgggtcgtttttgggttgttgaagattcagacgtcatcttggacaaattgctttgagctgtggacaacccctgattctccaagttgcgcgatgcggtcatgaatttagagtaagaaagaggcatcgatgttggggattctggtgatgagttgggagaggtatctgtagtgataggcgaatcaaaggttgatactgtagtagtcggggaggaatcggcagaccccgatgttacagatgaaacgctttcacggtgctggaaaggtagagggcgt

SEQ ID NO: 26107 - DNA, 279 bp, Emericella nidulans
gaaacgtcaatcaaatacgttgatgcggacaacaatgaaatcgtatcacaacctcttgaagaagcgacaattttcgtggcctgggagcaggtcgatagccagagatggttgctagcggatgactacgggagattattcttcttgatgcttgttctacggaattctgaagtagaacgatgggaattacacagtctcggaaacacatctcgagcctctgttctggtgtatctcggtggtggagtggaattcgtgggatcgcatcaaggcgattcgcaggtt

SEQ ID NO: 26108 - DNA, 498 bp, Emericella nidulans
ctcatctcttccgaatttaacgggagggtttggctctccaagggacaatcatcaggctcgtctgtttccccctcagcgtccttcatcttagacgggtttcctcgcaccgcctcccaggccgcgagcttggactccctggtccccatcaactttgtcgtccacttagtcactccaccctctattattctctcccggatagcgtcgcgctgggtccacgagccgtctggaagggtgtacaataccgatttcaatgctccaaaggtccccggaaaggacgacgtaacaggagaaccattgactcagagggaagacgattcaatagagacatggaaacaacgactacataaattcgaagaaacaagcaaagctctacttcaacactatcaacaaaagggctgtctttggcgcgtggaaggcaactccagtgacgagatcactccgaagcttctagcggagtttgagcggaaattctgctaggctgattatggcttgggtcat

SEQ ID NO: 26109 - DNA, 1328 bp, Emericella nidulans
cgaaaggaccttagagatgacatggtccttgtgcccggttgggattgttacttcagtttacccaaagtaaaaaaaggtttagtgtatcgaatctatacgtagctcgaagctaatcattgaccaggctattcgggtgtcgcgatatacactcgtaatgcaacatgtgcacctattcgcgctgaagagggattgacagggaccctttgcccgccaaattctttagtgtcatttagagacctacccgaagaccaacaaatcggcggctatccaacgatagagcagctgtcgaagctaaagctagatgcggagacgcttgactctgaaggaagatgcgttatactcgagttccctgcctttgttcttataggcctatattgtcccgccaatagggacgaaagccgagacgcttttcgtcaaaacttcttggacttgatggatgcccgcgtccggaatctagtcgccttgggcaaaagggtgtttgtcactggagatataaatatctcaagaggcgagatagatgcagcgcacgcggcggaaaacataaagaaaggggtaactacggaggatgacttcgtctctgctcctgctcgccgcctgttcaaccagttattaattgacggtaaagtcgtgggtgaccgagatgaaggaagagaacaacctgtcctttttgatatatgcaggtcatttcatccgaaacgtaaagggatgtatacttgctgggagcaaagaataaatgctcgtcccggtaactacggttcgaggatagactacgtcctttgcagcctggacatgaaggattggtttttcgactctaacatccaggaagggctcatggtatgtcctaggaaaacctgaagactgactccgctaattggcttattcaggggtcagaccactgcccagtatacgccgtctttaaggacctcataccactgaatgacggccaatcccacatactcgatatcatgaatcctccaggggtgttcaagaatggcgagcgtcaacagaattacacggcaaagttcctactaccgctatcagggcgattgataccggaattcgacaggcggagaagcattaaagatatgtttatgcgcaaaccgagccaaccatcgccgaaaacgtcttctccgcagaatttaacagcatgtctttctaacgaagaaagcagcatgactgcgaggacagcgacaaatacaccaaaaccttcagatgctgatgcgcccgcctctgtatccaatgatactctacagaaggggaccgtccgaaaacgacccgtcgggactgaagttcctccggttaaacgatcgaagtcagcgagtacccaa

SEQ ID NO: 26110 - DNA, 224 bp, Emericella nidulans
gcttttctgacctgcactgagccgtcaggcatcccaaagtaagccgcaacgggcttctggcctccaatgccgccgagcgcctggcctgaggcccggtcactccagagaagataccaacatctaaaacgccgggaatttgcttaatcgccagtgacaaagcgtcgacctcccaaatgccatcctttccgctaccgtcctttccagctgcaacgtccgcttttgtt

SEQ ID NO: 26111 - DNA, 549 bp, Emericella nidulans
tgggttgcctgaaccaaaaaaaccatgaaaaatgttctccctgtaaaggacgtaggtctgcccactagtggccgctatatggctgcagcacccagtaatgtgttcaaggccaacccaagaggtgcactgccaatcccttccatgataaagaatcacggccttgacgccgtgattggtataaataatgtcggaaacgcgtttacaccatggggctccgcggacccattaagccttgcttgtttaggcgttggtatataccaagccggaacggtgagtgacgcagaattgctatatgaatgcgtctccacgcgggcccgagacgctatcggattgtcctcatcctcgctgtcccgcattaactctagccctcgatcgactttcgacgtgcgcctgaaatgcggagatcctgcggaccttctgctgttatatgatgtagatgacactgggcttctggaatccggcacaacgcgggcccggaagactgttgcggaagttgtctgggatcctccagcaaggacgagcagggcggttgtgatgaagggccgtgtg

SEQ ID NO: 26112 - DNA, 375 bp, Emericella nidulans
gactctaacctaggcgctcgggaaggctcaatccggcgtgttctgctggtccgagatcgcaggactaacgagagctggcgatatgggtttgccgagtttgctacaatccaggtacatgctaccccaaataagtggatgcccaactaactggatcaggatgctcaagcggctatttcgcggcttcattcgtttgagaaattcaccatctcatcccgcccagtaatggtcagctacattcacgcaggcgtttttgtgccggtcatgaacccgtctgaaagtaccgagaaatttaccttcagccctctaaacaatccagctatgaaactcatgtactgggatgaggacgcatacgttatggagctcacagtgtcaacc

SEQ ID NO: 26113 - DNA, 329 bp, Emericella nidulans
ttgaggccggaaatgccggatctccgaagaacacatgaaagagatgaaggagctaagagataccttcgatccacatggtggacgagccgcgggttacgagagatgctagatagcgaggtagctgagtatgggggcgagatgctgtatatcaacaaggattcgcgtaatccattctggcagatggagtacagtcgggacgagggtttgcgcaagtatgggatgattattccccaccgtaccatttggatggggatgggccactttacaatggcgaggatgccagcagttacaaccgcaatcaagactccatgccattgaggacgttgaga

SEQ ID NO: 26114 - DNA, 210 bp, Emericella nidulans
ttatgtagcttcttccattcgctcgaccgattattcgagtccggctggcttccggacaatcaggatatgttacaggcgcgtttgcgaacaaccggtatcacagaaacactatttgaactaggccagatgaatttccggatgatggacgttggaggacagcggtcggagcgaaagaaatggattcattgcttcgagggtgtccagtgctta

SEQ ID NO: 26115 - DNA, 544 bp, Emericella nidulans
ccacagcttgcgggtgaaaaccccatggacaggaatggtgttgtacaggattggcacatgacaaaaaagctgtgaaagtactctttcgagtcagaactgactggtgcgaaacctagcaatccactacataatggtttgaacgatctggtagagggcaagctgccaacgaagatggaaggtgttgaaaccaacgagaagcctcttgcggacagccctctgctaatgtttgaaatgcaactggaatcccacgaaggctcgtgaaaagaccattgaaatcgcgatggagaaatggggaaccccagccttttaccttgcgaggaacggtgttctggcgtcgtaagattgattcctccactataatatgcgcggcattgatcgaaggttctgaactgcccacaccaggtttgctgccggcaaggcttctgctcttgttgtagatattggggcctataacatttccgtcacccctgttcctgatggcatggttcttaaatgaagagttcaaatttcacctttaggtgaagattacatctcgtcgcggatt

SEQ ID NO: 26116 - DNA, 273 bp, Emericella nidulans
cgatcgtcgtttgatatcgccatgtctgacggaccgagggagagcgcacgtagagactatgcgggctcgtcgctgcttccagatgcgcggcggatggcaactgaattatttgcccgcattcaggttaacccgcagtcgtacgaagcgcacgtcaatttcatccgcctgttacatgacgggtttgtaaatcacgtttacccgccgaataacccggatatccatggagaccctcgcgagtacgatctactcaaggatatgaggactgcgagagag

SEQ ID NO: 26117 - DNA, 410 bp, Emericella nidulans
gaggcaatctgggccgccagcccctccaccacgaggggtcaacccacccagctttcttccgatgctaaaggcgaacgtctcgcttacgcggtatattatagcacccctgccgagctctcttaggccatgcttaaacacctgtctgacccgagagatgtctttacgaacagtcaaataaatccatcttcctccgctccatagatgaccccgctgtcgctcgtcagtacaccgagcataaggtgcagacaacagtcgcccgcttcgcaccatcaggattctatgttgctagcggagatgctagcggtgttgttagagtgtgggattgcgttggcgaaggcatcacgaagggcgaatacagcattgtgaatggccgaataaacgatcttgcttgggacggtgattcacagcgg

SEQ ID NO: 26118 - DNA, 513 bp, Emericella nidulans
gacgggaaagcgtcgctgctcgaagtattggcaccaccactcgcagtgagaatcgtcagcacgtttcgctcctatgtcgcgaatttcctggcattgtttatataccttcaccgcgtggcgttcgccatatatccacgcacggatagggtatatgcagccgtagaccagattattaggctggcgaaggaggagagttcttcccttacctccagttctacaaatagcaactccaatagccatgaacctccctcagaatccggcacagaaccaatccccataagcttcctctggccgctcttcatcgcggcccttgaaggttcattcgagcagcgcagttggattgcgaacgagatccagcgtatggcatcattagcccccccagctcatccaaatgcaggcaaggcccttctacttcttaaagagatgatgagacgccaggatgcgtcgagaacttgggcggactcgaagtgtgtgcggagggagctttttacggatttctttgttatgatataa

SEQ ID NO: 26119 - DNA, 558 bp, Emericella nidulans
tcccacccctactatcccatcgatgcgcgaatcatcgactacacgcccaatgaaacttctgtgcttggcttaatatgtactgcaggcgtaagctgcgcagtactattaggagcagtattactgctgagtatatgggtgcggcccaatctgaggaaggcggaccggtttgccattttatggtttgccctctgtacgagtataccgaacccctgttgtcgatgtcgccctaaccgttgaaaccacgcagcgggcactcttcactgcctatttgaaggctactttatgatcaatcatggtcgtatgggatcagctcaggacttctttggtcaattgtggaaggagtacgcgctctccgattcgcgctacttgacgtctgacaccttagtgctatgcatggagacaatcacagttgtaagtcagttcataccggcttccgtaaaatatcttgctgatattatctgaaagcttctttggggaccattatgctttggggttgcttattcgatcctttttaatcactcgatgcgtcacccgctgcagataattcgtttgcatggc

SEQ ID NO: 26120 - DNA, 494 bp, Emericella nidulans
  unsure (1)..(494): unsure at all n locations
atcctaacggggaaaccatgtaatttgcaccgtgactttatgaagcagtcacagtctccagaccctgattcgccagaggtacggcgggcgtggcttgggtgctattttacatctatggtgtaggtatttaaccgcatgtaggtaccgcgccagtgacagctgactctgctaggacgtcgagcgccctacgacggccgaacattgttcgatggctcccgtatacggatgaatgtgtagaaatcctcgagaattcgccagatgctctgcctacggacaaganaatggtccattgggctaaattgggcaggattcttgaagagatcagttcgcggttcttctccgacgacctgggcagtttatcatttactgatccgaagtctttattcaccatgaaagcgttcgagaagcaactggatcaatggggaagagaggcgtccggtaaattcgaatcgcgtaagctcagctcgctgaaccacactccaccggtgctaaca

SEQ ID NO: 26121 - DNA, 498 bp, Emericella nidulans
agggctagcgaagagatcaagtttccaaaagtgcctgttcggatcagagcaggctcgtcacccatcagggcaactgatcggcaggaaagacctcaggttatggtcacacatccttcgcatacatcgatgaatagccattatcgcacgggctctcttgggaccgccccaagcgtcagtgaacgcccacggcgggacacgacaaccactacaaccagtagtgacatgtcttcggatcatgagattgatatgtccgcgccgggatacaggaggcgccagattcacttctccggtcatgaccaagtgatagatctaggaaaagccagcagtgacggactcgagcagctggacgaacaggaggaagactcggacgcggggtcagtcgaaagtgctctctcatcagaatttgatgcgacagctggctctgcgtcacttctaggagctgttggtataactggaggtctaaactcgtcgtcaccgattgcgttgatgcacaagctg

SEQ ID NO: 26122 - DNA, 231 bp, Emericella nidulans
gctcagaggtatgcttcttgactccctctgctctgtggagctaataaggttctccgtagtgagaaagtatcggatgatacacccattccaccacctgactgggaagctcttatctcggtgatcgcggaagagattcttgcggagaggtcaccggctagactgttacaagtccgtgccaggttatatgatctgttaacccactgtataccggctacgacgatcctcaaggtc

SEQ ID NO: 26123 - DNA, 618 bp, Emericella nidulans
ctggttcaagtaataacctgaagactttaaagggaatttgttcccgattacccgccatggaccaatttgttcacagattttttgctcccgcttgaccataaacctttcggcccaataatctttccttttcagccaagtccaaagcaagtataccccggaggccaagtcccatcccgccatgccactccttcatcccgctttccagaagcctccgtcacaaactccccgaaaagaccgctagaagactttgacgatgatatgtcacggccacgcaagttcgtccggggcgagtcaccactcaggacaacgacgcagagacggcaattgtaccaacaaaaacgaacccaaacagcacttcaggtcccaagctcgggatctcagtatcgatctcaaggctcgcccgcgcccttgcctcgcgacatcgtatatctactaagcgtcatcccgccggcctcaacgtataccgctggtcggttctcggcggagaagatgatcgaccttgtccggcggttagatctgccagcttccatatcgcaaatacctcttcctcagtctgcccgtggccttggaacaggacaaacaaccattgggggacaacaattttccggtaaggcaaat

SEQ ID NO: 26124 - DNA, 213 bp, Emericella nidulans
cctaaaatagacagacgggacatctcgcacctacagtcatagaagggaccagccgtcaagccagtctccgtcgtcgcaagacatggagcctttcgaacatttcatcacatgtgccgaagaagataagtcagtctcggatttcagttcttcatcgagtcatagctcatcatcatggtccatttccgaaggcttgaggagccctccaaccctcat

SEQ ID NO: 26125 - DNA, 403 bp, Emericella nidulans
cacacgtgcgcttacatccatatatatttctctatggaatgggtcttatgagaaactatgtctcattcacaggggaacagtattgagccctttagtgaacaagaacataggggagataccgacattgataagaagcccaaaaacagaaggccagcaagtgagagctccgcattatccgtacgattctacgatactgattgaggatacagacactgccttccggcaacaacgtctaaaagcctggcagtaagtccgcaaattcaaatgcttatgctggggttagtagttgacgggctgcaggccgattttgacacccaagagtgttttacctctctttttcatcgtcggagtcatttttgcccctatcggtgggttattgctatgggctagttcaactgtacaa

SEQ ID NO: 26126 - DNA, 552 bp, Emericella nidulans
ggaccgtatgatgaaggatatctcgcgcccgagagtatagacatgctctacaacgcagaatggactatttcgcacaacgctgcaaggggtgggattcgtctgcttggtcctaagcccacctgggctcggccggatggaggagagggcggtgcacacccttctaacctaatcgagtgtggatacgccattggatcaatcaactggacaggtgacgacccggtgattttcccgcaagatgcaccagatcttggtggctttgttagcagtcatacaattgtcaaagcagacctgtggaaactaggacaggtcaaagctggagacaaattgaaattcagagctacgtcattgaaagatactctactggcgcgcaatgagctggagagatttatatctgacattgtgcaatgctgtcagaagggggaagacttcggtagtataactcctctagcctcttctttgcctccagccatgtcctcgtcaacacgggtctctggcatcgtgcatcaaattccagagaaagggaaccagccgcttgtttcctaccgacaggta

SEQ ID NO: 26127 - DNA, 249 bp, Emericella nidulans
gttgttcggaagcgaactttcagggcgcagtacgaacagttctataagaagaaacattttcgtccgccgcggaagtggttggctgtgctgaacatgattttggcgttgggctgtcggtactgtaggctgactagcaaggttgtggcaggtgagagggatacggacgacacggtgtttctgaatcgtgctagaatactgtgtctgagcgggaatgtgctgttcgatcatgacgatccccaccagatccaa

SEQ ID NO: 26128 - DNA, 570 bp, Emericella nidulans
gagacaccttcgtcaactcattcggcgccgacactgggctcccggcgcgacagtgcagcggggaataatgcgtctttgcggctcgcattcgattaccaacgacacaacttgcttcatggtctcgatttcgggggtgacgaaagaatgggtttcggcttcttacttgaaccttcgcaacaagtacccaagatggaaggctttcggcgtccttcagaggttactagatctcaatcgagcatttcgtcggcttacagtactcctcttccaccagttggcaccgtgacagaccagccactgccagcctacatgactccagtccggaatatcgcgccaacctgtactttagatgcgattctgctcgatttcctccacaaccggcaaagggaggccgcaaaaggggttccgaagcagaaactcgttgggccagcctatccgagcgtctcctccttgctcaacccagagaagagtgtctactctcatcctctctcgaaagtattcacggatatcctccgtacatttccagatatctcctcactccccgaacaagttgctgtactttattccatgttc

SEQ ID NO: 26129 - DNA, 488 bp, Emericella nidulans
attaaaggtcttttagtaattgttcctgctttattatcagttgcttttgtaacagtagcagaaagaaaaactatggcaagtaggcaaagaagattaggtcctaatgctgtaggttattatgatttattacaagcatttgcggatgctttaaaattattattaaaggaatatatagcgccaactcaagctaatatagtattattctttcttggtcctataataactttaattttctctttattaggttatcttgttattacatttggttcaggtttatatatatctgattataatttaggtatattatatatgttagctgttctttagctacatatggtatattattagctggttgatcagctaattctaaatatgcatttttaggttcattaagaagtacagctcaattaattagtcatgaattaatttttaagttctgtaattttattagtaatattattaacaggaccagtgaaatgtcaaccttg

SEQ ID NO: 26130 - DNA, 477 bp, Emericella nidulans
cttctttacggcacgaccaaggttcccccatatatggaaacggtggatagtaggactttcgaaaaggaaattgggggcccaagatgggctcaagggctaaagcttgggaaactctgcgagtggcaagatttgttcctcattgcaccagtcgatgcgggaacattaggctccatgctgtcaggcctcaccaacactctgacactggcgttgttgcggggctggaagtctgcaaagcccgttcttctcatccctggaatgaccgtctcagagtgggagcatccgttaactgagaggcaactgctggaagttcgtcggttttggccttggattgacattgtatcgccagttctatggaaatataacgcacctggggagctggttcagctgccttgggcgggtttgacagagctacattaaatgattgaaaaaactcttatgttctcgttagcaaaggaaacggcaatcgactccccagcc

SEQ ID NO: 26131 - DNA, 621 bp, Emericella nidulans
  unsure (1)..(621): unsure at all n locations
cgggcacaagggaattttctttgggtccggttggttgtaaaagaaatcctcagttgccatacagaggaagggatcgagacggccttgcaaagcatgcccaaagatatgaatcaattgtacgaacgcatggagtgggtggttttatcagcaccccgtgctgaagacaaggagatcgctcagatgatccttcgatgggttgtttgctcccgttttcccatgactaccgaagttttgaaccaggccttgaacaagaaattcatcgatctgcggaaaacgatctcccaagtctgtggacagtttgtcatggtcgacccctctggtcaagtcaggcttatacatgaaactgctcgggaatacttgacaagaactacggcgagtcccattgcaatacgactaccaaaaagccattactcgctcttcgagcaaacattatcggcattgcttgcccctgacatccgccagaaggtcatcagagcgcaagagtccatttcagtatcggagccctttctgttgtatgcagccacgtcgtggatgtatcatcgcagcagtcagccgaaataagcgaccaaaccatnaccatctatctcaattctttagaacgacctctgtgctcgatggatc

SEQ ID NO: 26132 - DNA, 481 bp, Emericella nidulans
gaccaacctgcctctgctttgcgggagtgggttggcagcgagcaggcgcggcacgctatatggcacgcgggccaagtcgtccgggcaataagaatgcttcctttgcaaacgttgcgagatcttatggcgattgccctataccatgctagtttgacgctgtgggcctacggcatagtatatttgcgcgtgatctgtccagatagacaattagcggtcgctccggctctgggcataaatatatggcttgacggtctagaaactgaggatgtaccccgctatattcccaagcagcccctagtaccggtcctccagagccccggggaagcaaaagagcccgttggcattgaggacccgactgcagtattgagatgatgattgaatttatcaggcccatcattaccacaaagtctttacgcagacgccccggttggtggcgaacctgatccatcttctacggaggctacgggatgtcagcaagtaa

SEQ ID NO: 26133 - DNA, 303 bp, Emericella nidulans
gaagagccgtatagccaacaacaggcctcgcttataccgtcccctcaatatcccgaggcccttggaacgaatccgtcatctaggacgccgtcggctctgtcgacggcgagtcagatctcgacttcgcgtgagtggccgccttacggctcagctcgctctccttcaaaatgcgagtcttcggattcggagtatccggtcaaagtcgagccctggggctacgaaagtcattcgcaagtgcctgcaccgatgtccgtccaacacccgcacgtcggttatcaccctcagaatactacgcatctaccg

SEQ ID NO: 26134 - DNA, 292 bp, Emericella nidulans
gttgtatacaaccaggaggttgacaagcattttgcccatctcacagtggggcaaaccctagagttcgccgccgcagcaaggactccagagcatcgacttcggggcgccagtcggcagcaatctgcgaaatatgttacccaggtagccatggcgatattcggtctctcgcatacatataacaccaagggtaatttgtccgtgcaagcgtatgccttcattttctgatagtcggacagttggcgatgactacatacgaggtgtctcaggcggcgaaaggaaacgagtcaggttg

SEQ ID NO: 26135 - DNA, 324 bp, Emericella nidulans
ttcaaccacaagttggacatctgtaaaacatacaatcatgcgccacaaggcctgcccccgctcaagttcacctagtttgttctcatccatcaggaaattagtccgcgaaacctcattctggacagaactggccttgtatggctcgtggactgggcagatgcgggctcttatccccctgctttcgaacggcagctctatggtctcaatcgcaatttgtcgactttgatgacatggtgctattattgctcccgcgataccctttctaagaaccgtaattagatcttattggatatggtctctcgatagccgcactggcttaaattg

SEQ ID NO: 26136 - DNA, 297 bp, Emericella nidulans
ttcggcaggtcacaggattcgaaagggctctgtgctagtagggtatacagcccggaattctcaccggctgaatgcccgtttggcgataaatgtcggttcgaacacgacttgcgaacatacttgaaggagcataagcgggaggatcttaacacattcaatggagtctgtcctgtatggagcgctcgagggaaatgtgatgcgggctggaagtgtcgattcgttggctctcattctattgaacgagtaactgaagacgggagaaaggagttggtattggttgaggacgaggagcgcaga

SEQ ID NO: 26137 - DNA, 387 bp, Emericella nidulans
atggatggaaagcccctcaaggagtggagtggccccgtgtctctagccgcaactatctcaattctaacgaccgcctattcatcagcattgatgcatagcgtcagttcctttatcagacagctgaagtggcttcatttcaaggataagccacggagactttctcacctcgagacattcgacgaggcgagtcgcggggtctggggggccctcttgctcctcacgaatgtcaaatggaatctagccactctcggagccatcatcacaatcttgcgactgacgttctcggcgttctcacagcaagctgtgcaaattgcgcagagggcatcgacgacaccttccgatatcaatagtgtcgcctttggatacgcgcacaattattctcgggat

SEQ ID NO: 26138 - DNA, 275 bp, Emericella nidulans
ctccacgacgcagaaacttcgctgatgcatgaacacgcgcaaatcctgcactttgggcgccgaccaaccaaacgctaccgctaccatgagcccggtcatattccgctcgaactgatcgcacgcacgcacacgtttcagcaccgcctgaagtctggaagtcgaccttcacgtactcgtattcatgccagaaagcactgggcagtagtccgcgagtgtcggcggcagcgtcattattgctaattcagtattacgtcgcgcgtataatggcgtcgaca

SEQ ID NO: 26139 - DNA, 234 bp, Emericella nidulans
attgcccggttggtctacgataggtcgcatctctcgattgccattgtcaagcatccactggaagtcgttgggtgagtgttgcccgtggagctctggtgcgggcaggatagctcctctaaccctcagactgaggtataacctaccgggcgtgcatcagccgcaggtttgcggagatagtcttttgcgccatttcttctgatcagcaggttaagggatatggtgcgcatctgatgt

SEQ ID NO: 26140 - DNA, 212 bp, Emericella nidulans
ggcgttggcagcctcgtagagttgccgcaacttatcgtttgtggcaatcaatctagtgggaaaagctctgtgcttgaagccatctcgcgtgtcggtttcccgcaaaaagcaatgtatgcacacggttcgctactgaggtgatcttgcggcggaatccagtgtcgaggatcaagatctctatcgagcctggtccctcacgcattaacgaagaa

SEQ ID NO: 26141 - DNA, 369 bp, Emericella nidulans
gcagtcttccttgcatactcgtatgccaccaggccggacgagagcgaattcctgaaaaaacttccaaagcagtcaaagccgatcgaagacctatccgccgaatacgtacaaaagaaagcgagcttaaaaagccctggcttatacatatggggtaataataaatatcgtgttgtagatccagagtcaaaagagtctgtcataaagactccacggaggctgtcctactttgacagcaacgtactcagggatctcaagctcggagagacgtctggagctgcaattatcgagaatggtgatttggtgcaatggggcaaaggctactcagaaaccgagttcaaacctaccaagacccttactggaaagaatttg

SEQ ID NO: 26142 - DNA, 672 bp, Emericella nidulans
ctcctagtgctcgacgagattcgcctaccgggccaggagccattgaccgatatcctcggcggctcaggagcttatggttgtttctcgcccagtataaattcgattttaaagactaacaaggtcctatacgttcgctcggtgctcgattgtttcttcctactccactgagtcgctcccttggctggatgatgaatatagggaatgactttcccgagctaagacagcgctatctcgaaagctggggtgctacaatgatagtaaaggaggaatgtagcaagccatcaacgagagggttgctcgagtacaaggataccacatttggacgtgcaaaatcccggtgtccagtcattcatctatgcaagaatcaaggctaactcatcctcagccaaagacttcatgtacacaacatcaattctccaggttgacgtcagtagcttgaagagtacaccactctcaaggtcgaaagcctatcacttcctcgaatctccggcaaatatcaggagccgagcctcggaaatcttagctcttagacagggtttcggcataccgaacccgctcatcatctgggaacccgcccccctctcctgcaaagcagagaacttgcagccatgcatagaggccacaggtactgtcaatgtattctcaccgaatcacctagagttggcccgcctt

SEQ ID NO: 26143 - DNA, 363 bp, Emericella nidulans
atgcgacctccacgtctagtcttcctcgcgttttgtctcatcttcttccctatctttctcaccttctactccgtcctcacctcttctccccgtgtttcaacgcctaactcgcttgccggacaagcgacaggattacattcgcttttctcttttaatctaccttcgtcactctttcctccaactgccatcatcagcctgaccgatgaaaactcgacattcttcctagccagacctgcagcgtttggccccctacttccggagaaagggctgagtggtcggctatgggttggcagtgggtttggggagaggtcgacgcctctggaagagaactaggctgttcggatatcctggctggagggatgg

SEQ ID NO: 26144 - DNA, 578 bp, Emericella nidulans
tctaccagcttccatgtcggcctacccaccgcgcggctttcctcccacgcactaatcagcttaaacaactacacctcatcttcgaaaggtcctgatggcgggaaagaaggtagtgctatgggcgagaccgaggacctcgctcggagggcttatactcggctcggtgctcgaggagagaaccaagcgattgttttcctgtaagtttccccggcgttgtctctgattcaagcagcatttactgaatatatccagaggcgagagtggcgccggtaaaacgactcttcggtctcaccttctctcatcattcctctccttttcgtccactccgctgtcatcaaaactgtcctatgccgctttcattttcgacaccctcaccacaaccaagtcattgacgacacctaccgcgtcaaaagctggattgttccctggaactgcaatatgatgcgtcctcctccgttaacccgactctaataggtggaaagatcatcgaccacagacttgagcgtagtcggattgcttcggttcccacgggcgaacgtagcttccatgttctatattatctgcttgcaggaacaagc

SEQ ID NO: 26145 - DNA, 348 bp, Emericella nidulans
ctcagcatgtctattcctccctcgtcagtaacgacctcacgcccctctaacctgaccgtccccgcgacccagaacacggcgcccgtggtcaaattccgatgcctcttcacccacgacatgcgacgcaaagcgaaacgctggcaggatggtttccttcgatatcatactttcaataagcgggtcatggtctacgataccacgggctatttcattggagatcttcattggcgggcaccagaagggatccaagacggcgatgaattggagctggacaagggcgtgttgattcaggtctgcgaaccgctcgaaaagacagagacagatctctcctcgctgtacaagaacaaa

SEQ ID NO: 26146 - DNA, 228 bp, Emericella nidulans
  unsure (1)..(228): unsure at all n locations
gggccggttggggggactagactgaaagcgctgtccggtgcgctgaccgcaagctggcggaatgtcgcaggtcagcaagatttggcccatccactcgaagttgaaggtcacgagagcctcctcaaagcgtacacgcacngtgtgaagcgtcaccttaaggatctcgagaaccttcccaactggctaaaagatctccctaaacgtgttatcaccagcatcctggctgac

SEQ ID NO: 26147 - DNA, 318 bp, Emericella nidulans
catctaccaaggtgcagccagatgcagaaacttctacggatagtctacgtacggattgctaacgcccgagtggtatgacattgctcaatagtggttgacgccgttcccgtcctccccggtctacttgacaatgccgtctctcgccaacttcgtgatttttacactgctacataccgggataagttctttgaagactctgttccagcatggtttacttcctacatctggatggagatattgtatcatgttccgctgagtatctgggccctcggcgccctattgagaggtacatcgacccacactaagccctacggagta

SEQ ID NO: 26148 - DNA, 468 bp, Emericella nidulans
acaccaaaaactgacgtaacaaaacgtctctctgatcgggctcttctcccacgaacccagacagtccgatgcattgaggctcgcgcgcgctccttccaaggctggaaaccgaacttgtacatcgagcgaatgtgggctcagcggtataacgtgtcgggccactacacgcatcactatgactgggcggggacggcgagaggtcgtgggggcgataggatcagtacatttatggtgtatctgaaggcggagtgcaaaggaggagggacgaatttccccctgttaagaaagccgaaagatagtaaatggtgtgagttcattgaatgtggtgaggctgacgaaggaagaaagggagtgacatttaagccgatcaaagggaacgcggtgttctgggagaatctcagagctgatggaagtgggtggccttagacgtggcatgcggcgttcccggctcaggagggagagagggtt

SEQ ID NO: 26149 - DNA, 258 bp, Emericella nidulans
ctggtacccggcctggattcattcgaagacgctacaccgtcccaactctctcctcgccatccgcacgagctcaagcagccgtcatcccagccaagcttccagaatcagctcaagcaattagacgatttcggagattttgagctaccacagggcgggaataataatgatgtgctcttcgacgccaccctcgagaggtgttcggataacggcagcgatgattggggtgattttgagtccgcagaagttactgttgggcaa

SEQ ID NO: 26150 - DNA, 810 bp, Emericella nidulans
cgcagtaacgtacagtacaccaaaccaagactgcccgtggaagacgaacccttcgaagactggggagatttctctgatggacctacggaggctagtcaaaactccaacttggaggtccctgagtcccaagtctccggcaagaggaaaaacttggcgcagccatcaaaagccactgcaagcctaagagcgcagactagcaaacagtcgtcatcgacggtacaagttcgcccaacgaatattccacctccgtcgattttattagagctatttcctcagctttttgagcgcctgcgccaagagggcaccaaagcgaagagaaatctgcaacagaaggatactctaaattcaatagctgagtctatcacttgcactctaaagactgttgcgaggattgttgcaggccggactctacgatggaaaagggattcaatactgagtcagagtatgcgaatcggccccgcgcgttcgggcaaagcaggggggatgaaattaagcagtgtcaataggaatgaagacatcaaggagcaacaagaggccgtggatatcattaacatgtggcgggatcgtgcttccttattcaactccgtcgttcaggcagcagggaggcgaccagtgcaggttatccccaacaacactcgtgtcataatcgctacagccagtcagggagccttaaaggccccacacgcgtgtgccctttgtggactaaaaagggacgaaaggataccgaaggtggacgagaacgtggaggatagctttggcgagtggtggacagaacattggggtcatactgaatgcagacaattctgggag

SEQ ID NO: 26151 - DNA, 519 bp, Emericella nidulans
caaagcgcaatgttgtcgtggattcatccgcaaagggcttacctggctgtagggcatgtcgtgaatgaagtctatcttgagacgctcaaagttgtttctcaacaacgatatccttggtcagtgtttgctttgtctcaggagaccgactactccgtaccgttgactctagcgaccaccttgagtctacatatctatgatgggcggctctcaaaaacggaggaggaagaggcgatcaatctacgttgcgagcagccaacgatctctttggttccagagtctctgatttatactccaccagactcaccactcctacagattcagccgaacggaaggccaccgcatcgaattcgaagccctgatccctctgaaacgagcgacaactatgcaccactgttccagccgggtcccctctcagtcctgcatcccccgggcccgcatgtgaatacaatatttcttgcaggccgctttccgagtatactccagtatgaccgccgctatttcccaaagttgcaaagcacg

SEQ ID NO: 26152 - DNA, 502 bp, Emericella nidulans
tggtgggatcttcgctcccgccacccggtcgtcgagtatcccgtcgagggcaacatcggcagctgcgaactgaacaccctcgcaacccgccccaacgataccggtatcctttctgttgctgcaggaaagagcgtctaccttttcgatggacatactcctggaagactcctcaagaagattgacttcgggtacgaggttgccagcgcggcggtgaacaatgatacggcccgtttagttactggcagcgcggacgacacctgggcacgtgtatacgacttgcacacagatgatgagctcggtatgccgtcctctatgcgtgtttctctcgcattatttgattctataattatactaactcgcaatagaagtccaaaagggccatcacggccctatctggtcagtgagcttctcgcccgacggtaaattatacggtactggaagtgaagacggaacgatcaagctctggaaggcatgcagagagccgtatggtctttggcgctga

SEQ ID NO: 26153 - DNA, 349 bp, Emericella nidulans
ccgccgcttgtcacgacaaagtcgtagtttttgctcatgcggcgaacggcctcgatgatctcttcttcttcgtcagcgatgacttcaatgcgcttgagctggattccgagcgagaagcagtatctggcgaagaaggcagagtttgtgtcgacagtctgtccgattagcttctgccctgctctgtattccaagagtattgttttgtggcccaattaccttcccaccgagtacttcatcgccaatgattagacacgctgccgtgtgtatcgttttgttgttcgggaaggatgatgtcatttttggcaagtgcgcactagacggtgagaaaggagaagaggaagcaaaagat

SEQ ID NO: 26154 - DNA, 318 bp, Emericella nidulans
taccttaggggatttactgacccagttgaacaaaattttgacctgcatgacctgaaaatcgtggaagaggccatacatgattcctttgagaacaaaaatgaagagtgtttccctgaaaccagaaccgagttacttcgtcaagttggaaactgggcggaatcatctcacggaaaatgcatatactggctaacaggtgaagctggtactggaaaatcaacaatttctcggacagtagcaaggcaactcaaagaaagaaagttattcgctgccagcttttatttcagacggaatgaagagggcagaaataacatgaaatcg

SEQ ID NO: 26155 - DNA, 370 bp, Emericella nidulans
gacagcaccatcaagctctgggattccgccacaggcgagctgttgcagacccttgaaggccattctgaccgtattcaatcggtggtattctcaccagatggcaagctactagcctccggctcctacgaacaaaccggccaggttttgggatcccgccacgggcgagctgctgcagatcttcgaaggccattctaaatgggttgagtcggtggccttctcaccagatggcaagctactagcatccagctcttatggcgaaactataaagctttgggaccctgtcacaggtgagctgctgcagacccttaatgaccctgatgaatcagctgggtcagttgccttctcgccggacggaaatcgactagcatcc

SEQ ID NO: 26156 - DNA, 795 bp, Emericella nidulans
acggacttgggaagattttcactctcgagacagacgaccgagtgctcaatgaggaaaagcttgaactcatccggcaattgaggagagatctgaggatgccaaacaagcaccacagaaagttttagtgcttggatgacaaggtttgtatccagtggaccgccctttgtgagatcgcggctaatatcccgttggatgaactctgcaatcaggctcatcttgtgcagaatttcttcttctgtgggcaacttttcgtatgcccttaatgcaccaaagaactgcatatacgcatctatccttgagctggtcgactctccagccaattgctgggtgagggactctaagagcattgcgaaagactctggggtatacgtgatagcagcagccgaatgaacagggccgggcgagttcgtcgttttgagtattgatctaaccggcttgagatcgttcgaaggaaggagagctttcgacttcgggttcgtgaaggaaggaggttttatgaattttggccatggcgaaaagttcacgcgcttcgactggcggctggaaggtgctccagttgaggtcgagtcgttctgcaggacaggagattcattaggcgtttgtacgggcactggcgagtcctccgtccgatctttctcagacagcatacgagacgcagtccttggtggagtcggcggacgagctgacaaaggacccagaacgtcaaccatagttcaagacaagaagcagtggtagaaggaggagagaaaacggaacattgcgagacggccaagctccaggagcgaactcaggcct

SEQ ID NO: 26157 - DNA, 209 bp, Emericella nidulans
tcaacagagaaattgcagcaggtcacaaagcttctgaactctcttgaaaaagacctgaaagataactcgttgaactctgcacgtaagcaacctaaaagccgcatactagatagctctgacttgttctagaaagaactcagatcctcttacagctgaggcaatatggcacgagtcccgacaatgcaggaccgatttactcaaaaaaggtg

SEQ ID NO: 26158 - DNA, 237 bp, Emericella nidulans
tcggataatcgcgtcaatgaaccaaaaaggattgtgccagaagaactgccacccttggattgcaaatgggttaggtcaaggattccggatgtgttgagggtgttcgaggctatcttgaagtcgtcaatttggggcccggagatggagaagtccaatattgctgcagcgtgggttagtctatcccatgccctggcgtttgcagccagtaaagagattacaccctctcctgagtctatg

SEQ ID NO: 26159 - DNA, 1667 bp, Emericella nidulans
caaccatcatgccaccaaaagcacataaaacaaagcaagatttaattgagtaagagggcaggatataatgcgcgattcaagacattaaaaatagaaaatttcaaaaaattgcgcccgcagcgcgtgcatacaaaattcatcccaatacacttcaagggagacttcatggccgccaatctcaagcagaactctgcaaccaccagcataggctatccctatattaagaagaggtcttgataggataaatagtattacttgacattcatggagcagctcccaggccctcgcgcgtacgtgagatggcacaacttatcctggatgaatcctcaaccctatcttgactgattagaaagaactgggtaacagagtttacaaaaaggcgccctgaaatcaaaaccaggtttgcttggaagattaatcatcagagagcactttgtgaagatcccaagataattcacccatttttcaatgagatacagaggattaaagttgagtataggatattagatgatgatatctacaactttgatgaaactggctttgctatgggcctaattgcaacaataaaagtagtatcttgagcagaaatgccaggcaaaccatggcttatacagccgggggatcacaagtgggttaccactattaaatgtattaattcaactggatggtcagttctattaactattatctttaagggaaagcactatagagagggatggtttgaggaactctctattctacatgcctggaggattaaggttagtaataatagatagactatagatataattgggctttgctggcttcaaaaatgctttattccagctatacagaggtggcaaaggggggagtatatactccttattctagacagccatggaagccacttgaccccggcctttgacactatatataaggataataatattatccctgtctgcatgcctccttattcatcttacttcctgcaacccctggatgtgggctgttttagccccttgaagagggtgtacggatccctgattaagcagaaggcacgcctaggatacaaccatgttgacaagcttaatttcttaaaggcttattcagaagcctataagaaagtctttataatagagaacattcaaagcagattcagggcaactaggttatatcctttcttacctgctgcagtactggataagctgtagttaagactattaactcctacacccccccccaagcagaggtactgctttaatcccctcctctcaactctgtatgccttatacagtctgtcaggtatattaaaaagctttatcagtcaaaaagcttctaaaagagggctctaggagtccttcaagcccctcaaaataggcgctggatgaatttgtaaagggctgtgaggtggctatttacaatgctaggttgctggcacaggaaaacaaggatctctgcttatttgtagcagataacaggcaaaaaagagttgttctaggtgtctaataactcctacagatggactcttatttaaagaagccagggaccttatttcatcgaggaataataaattacaagctggtggggggggttcaagctccagtacccttccaacttcggagagacttaggcgcgcccccccaaggtgtacaaattgcggagtacaaggccataaaagaacaagctgt

SEQ ID NO: 26160 - DNA, 381 bp, Emericella nidulans
atatatgccctaagcatagcgaccttctacttcaccggctcatattaccatctgtcaaaacgtttctggggactccgctatgttttcacgaaaaaattagaagagaacgaacagcgcgtggggtatgaagtgttgggagtcttactcgtcctacaaatagcagttcagagtattcttcacgtcaagaaggtcagccacagcctgcagtcggaggaccaagacgtacactccgaaacctctggatccagcagtaaagaagatactttgacccgctcgatcgaacatccagccttccttcctgtcctccccgtgtctaccgcgagatatgacctctcggaagatccgaacgcaatcccttggatttcagatggacagcaggca

SEQ ID NO: 26161 - DNA, 423 bp, Emericella nidulans
tcttcaaccattttcagttacgtggacgcctctcatgccccgttgacccaacgttccgcgaggatgtcgacaacctcgctacaacagttcgccacggccacgtccttctcccccttctcgaattcccagtcggcgagaatgtcgcaatcccagtctcagacgatcgggcttgacaccctcgccgagggctcgcaatatgtgctagagcagctgcagttatcgcgagagggcggcaactctgagaacaactctactttcaagccatcctccgtccgcgactctttagctgaagcccgttccatgatccgcaagaactcttcgtcagcgcctgtccgccggagaatcagtcgggcttgtgaccaatgtaaccaactccggacaaagtgcgacgggcagaatccgtgcgcgcattgtataggtaaa

SEQ ID NO: 26162 - DNA, 435 bp, Emericella nidulans
cttatcagagtcaatccctacgagatattactagcaaatacccttgtaatatttgcagaggacattcaccaattgttggtccgaattattgaatcggaaaagacgaggcaggaagagctcgacatgaacgatgcttttcacctttacaaacaactttgtgctgtgcgtcagctgttcatgaacgcacttcccgagtatgtcccattataacatgacttgaaaatctgactgacatttgatagcgcctcattcccattccacatcgaaaatgtgctcgaagacttcgtgtggagatggatacgtcttactgaccagaaggtcatggaatgggtcgagcaagcactgcgacaagacagcttcacggttcctgagggtaactcgacatctccggagtccaggcatagtgtatctgtgattgatatatttcgctcgttc

SEQ ID NO: 26163 - DNA, 946 bp, Emericella nidulans
cccattccattgtgtagttctcctagtctcatggaaggtccgcgtgcacgaaaaatccaagaactgcttgcaaagcgacctaactatcagcctcgccgacaaggaatcggaagctactttgattttctccacccttcccatattcctcaccttgaggttttggtgctcacagatgttccgtcccacgtttctgccacctcaccaatcctggagtcgttgattcgctttgtgactgcttgctccaacgaagcgctactcgcaaccctacaagcaggatcagattactccctaccaccgggccaagaccgggcgagggctgagcaggaacgagcaaagtccctgctttggcttgcgccagctagtcctggaaataacaccagtaacccactccctccaacctattaaatcgaccgcttggaaatccgtcagcgcccagattggacaccaaaggtcagtgacgggtgactgggatctcgaacgcctttggtccgcagcatcggatgactttagttttttcaacgaaaccgaatgtgggattccagctgatggtacaacatgcacagcggaaactcataatgcttcgtctgcatctgtaccgtcagtaccaatcgtggatctcgtatctgaactggccgctttccggcggagaaagaaactggaatatgagcaggttgtacggtccacttttcagagaagaagcatggatgacaccctattgcctcagtctcagtctcagtacacaatgggctcggctgctggggcgtccccgtcttcaagcgtccgagcgttgagtcccgtccctggaccttattcgttcatcgcccaccatgttgaagggcactggaaaggggaagtcaagattgtccgaaatgcgacccctaaggggcgaagcgggtgggtggacctgtatgggaactattttgagacagggtacttgtatccctga

SEQ ID NO: 26164 - DNA, 429 bp, Emericella nidulans
acaccacgtgtcgtccctacaatgcctttgcttcattgtaggccactaacagcatccagcgcaatggggaaatcccgctccgcaactgtctgcattgcataccttttgcgtcggcaacggaatgcgctcacaccgcagtccgctcttgctcttcttagggaatcccgaccgctatgtgaacccaacccggggttcatggagcagttcaatgtttactaccaaatgggatgccctgatgatgtcacttggcaccctctgtacagccggtggctttatcgcctagaggttgaagagagcgttgcctgctggcgtgctcccgagatggactccgtttatttcgaagacgaacagtcgcaccagaatgtagctaccacgggtccagcaacggagataaaatgccgcaaatgcaggtgcggtcttctaatttct

SEQ ID NO: 26165 - DNA, 375 bp, Emericella nidulans
gaggccttctgggccgacccctcggctgtccccataatgtgggtcgggctgctgttcagcatgatatgtcttgcatgtgtggcctcaaaccaggctgataatccggaagcagaaatgcaatctctcctgtttgacctctaccgctaaaaaaccgttcaatgcttgatcatgggcgaatatacaaagtcgggtccatatgtactggaaacggtcatcaactatatatacgccgaattctgcatatgcacggatgcgaacaaggatatgtggttcctcctcgccatagaggtcaacctcgcgatgcgcatgggttaccatcgtgatcccaaccactttcctggaatctcaccttttcgtggtgagatgcggcgccgc

SEQ ID NO: 26166 - DNA, 684 bp, Emericella nidulans
acaccccgctttcctattgaaaggctggcaactccgcagagcgctcgggaggagcgcgccattccgacgccaccgcccgaggtcgacgacatggactggactccgtctatacagcatagtttccaaccagcctcaactgttcatcaacgcgaccagcgacagtctctcctttccggccctactcctttttacggatctcttcctcccgctccagtgccgccatcatggagcttgcgaagccagtcctcaaagagaccaaaaccaatcgaacaggtcgttgagcgcaatccttttcatcgcagccctgctcaatcgtccgctgattggaggcgcaaaacggcctctccagatgctgtattcgcgcctcctaaattctttccagtgaccgatcatgcctccacagggctggagaatctttttgatcgagcttttaccatcaaatcaccagataatgatgagcatgattggcagagaccacagcaggcacatctggatactcagccatcgcgctctgcaaacatgcggggggtcttcatatctcagtgtgttcgatttggtattctactcgtgtcgattaatgcgtggagtctctcgcagtacgagcttgtgaccgtccccgacgactatattgaagttgcctctataggatgtgctagcctactcgctggctttgctcttgtggag

SEQ ID NO: 26167 - DNA, 1455 bp, Emericella nidulans
gttgcatctgaaccttcctacatcaagctcttgcccacgtcatctggcagttccctccgtgctctggtctcacgcaaatacaatccgaacagctttccatcgccgcttacggaatgagcataaattatggaatccctggtttacgagaattcgccttttgccgagtatcttcgaggttagtttgggataccactctgcggatgatgttttgacttctgggtctttcaggagaaggtgaacatagttcagactggccagtcaaagagagcgagcatgaagacgacctatccgactcgacgaccgccgactttgcgcctcgaggggcgtcgaagttccagacccggatacggaacaaattgccaaaacctgtaaactttaatgcgtcgcgccagacagccgccctgggtcggttgtacgatgtctgcacagtatgtataaaacacgagtggtgataggagtctgctgacggcgatagtctgctttgaattcccgtctcggtcggaatgataatgagagattcttggaacaattcggatacgtcattgtcgcatcgcaactactgaacgaacatagcgctccgtcgtacacctccgctaccgatgtgctatccaataccgtcccaactgaccttcctgcaatatctacaacgtttggtctacaaggcgcctttgtgacagcctcaacctccttctcgatcgcttggttattacattggagtcggcctcgggcgggaacgggcatcaaccctcgaaaggttggcgtgcttttagtgctggttccggtgcttggagtgttattttacgcgtttgcgagacgccagtggctgaaatacctgcgacaccaagccgtcgatgctgctgtgctgttgataggtaatgctcagggattcgactcggcggcttcagcatccgtagtgttcatacaggaggtggaactggtatctaggggctatcgcatgcgagtcttccagaacccagtacaacgcacaatggctaattgtcttgcagaagtacaccgctaccgccgataagtagactcgaagaccagacacaggtccgtcggtgtctgcgactgcgtcgcatcgtatccgaatgcttttactctatgctggaccactatattcaagcgcagcatgttctacagccgctgacagacagtgcaaatctcgctaaatactacgacatttacgatatttcgcaagaagatctcatagaggttgaaacagcgctcgctgaccgagaaaccgaagatcaattttctttacgcggcctacgtacactattcggacggttataccttgttaggaagagcattctctgctgtcttctggccctcggcgccgacgggggcggctcagatatcgcgaggtggagtaccgctattgaacagatgcgaaacttaacaacagtaactggccagaacatgcaaaggatgaccagcgtcctcaacgaagaa

SEQ ID NO: 26168 - DNA, 315 bp, Emericella nidulans
atgggagatgaagacaacgaaaactgttagattgctttaccgaaagacgcatacgaccttttatatcacgaggcctgatctttttgtgcgatgatcggcttacgattcgatgagggatgatgaaacgacaatgcaactaaagagaatcacaaaaagaaagtatttctctgatccagccaagtttagaagttattttggggcagccctctaggcgcgccgttcatacggactcgattatgtttctcccattcgccgaaaaacgaaatcacgcaagttgaagccatgactttttgcgatacgcggacgccttgcatg

SEQ ID NO: 26169 - DNA, 258 bp, Emericella nidulans
gacccagccgaaggcctgtcgggcgctggcatcaagatacgtagggagttgtctcaccgcgaaggatttgatgcatcagtcgcggcccctaagaagacttccccagagagctcggttaaacgcaaagccaagcaaacatttctgaatgggatatacaaggaactgcccccttattcgcccctcacacaaactaaactgatcgcgactgcatcagccgaactaacgtacctattagaccaggttcaagaacactccaag

SEQ ID NO: 26170 - DNA, 561 bp, Emericella nidulans
aaagtacttgggctttataatataggcagggaaggaatttaaatagacctagagaaggtaaaagcaataaaggaataggaaacccctactattataaaaggtgtccaaggattcctgggctttgctaacttctactaaaggtttatccctaacttctcagggatcatatacctactaaacaacttgacaaagaaaggaatacccttcttatagactaaggagtgccaggatagctttaatctgcttaagaaaaagtttattactagacctatcctagcaaccttcaacctttcctactatatagtagtagagactgactcctcaggttataatacaggaggagttctttcttaatataataaaaaagggaaattgtacctatatacctacttctctaaaaggaattctccagctgaatataactacaagatctatgacaaggagctacttataattatataataccttgaagcctgggatgctgaactgtacttatatagagaattctaagttattataaattataaaagcctagaatactttttctccctaagaaaatta

SEQ ID NO: 26171 - DNA, 333 bp, Emericella nidulans
cagactcatcgtttggtcacagctccagctctggtcgacgttcatagtcctgcggttacctcctcgaagctcgcagggtcatcattgtgactttgcaatctcggaatgcggtggattccttctccagggggttcaatgctagtgtctcgtggattgctacataaaataagaccgtcgccttcagctcaattgccactctctgtcttcccatcttcctccttcgtctttggttctcgctgccatagtggtgctgctgtgactcagaaatccagaatggctcggtttccctcacaacaaagtcgtccggtccatgcgaccccccatgtgaaccac

SEQ ID NO: 26172 - DNA, 471 bp, Emericella nidulans
aaaccaattgactacttctatcccgagcgcgacctagtccccgagcagcttgtcagcgaagatattatttcacgtttagcagacaagtttgaggataaggttcgattatcacgagaggattacgacgccgtgaagcggacgttggataaggatacggctttccttgcgtcggcgaacattgtcgactattctctgttcttggtgcgctttcccgcttcatctaatcctgggcggattgggaggaagacacagtggcgtgtaggggtgtcttctgcggatgggaagtggaagtaccggagtgtgatcttagacttcttttgggccaagcatacgctgcatgcacaggcaatgacaggtgcggtgcaggcgtttaatataatcggccggcagggtccaatgagcattacaaccacggcagaggaatatcgcgaaaaattcttgaccatggtggatgagatgatggaggtatat

SEQ ID NO: 26173 - DNA, 453 bp, Emericella nidulans
tccttagggtatggatcgaagggcgaacggctcgtggccggcgtcgtcccattatcaaaagataaaagcttagtgatgatgattcagtcagctggtcgaggtggttgggtgcttccgaaaggcggatgggagacagacgaagcaagtgcccaacaggcggcttgcagagaagcctgggaagaagccggagtaatttgcactgttctccgggatttggggacgatatcagacatgcgtccttcgacaatgctgacgtccaattcaccaagagcctcataccagttctttgaggttaccgtggatcgcgaggaggaccgatggcctgaaatgcacaagcggaggcggcagtgggtaacttatacccaggctgcagccgcacttgcgagtcgcccagagcttttagaggcgttaaaccgaagttccatgaagagatagtgcaccttgcacttcttc

SEQ ID NO: 26174 - DNA, 875 bp, Emericella nidulans
agagatcagctgtttttcgaccgggcgtatgcgtttgcgccaatcatccatactcaccgctaccgatcatggtccaaacaaccaaacttgagcaaacagaggacatgcctgcagtacgctatgtggacgttagcctcatcactctccagccagttccatgttgaaggttgcaagttatatgcgaaaacgaggcagcttctgggcgaactcgacggagatgagccctgccaccaaatctctttggaacaagcccaggcgtgggccttgctttcgatctacgagctaacctgtcaggacttcgaccgagggatgatgtccgccggcagagcttttcgcttgattcaaatgatgagactatacgagctcgacatgcctcgaacacctcaaaccatgcagctagaccagtatcaaagggaattcactccggcccagaacgactggattgatatcgaaacgaagagacgcaccttttggtttgcatatctaattgaccgcttcacgagtatggtggatgggctacatatgttctttgacgagcggctggtcagtcttgagtcctttgtgagagggaaggaacagatacttactcgatctagatacgaacacgcctgccagctcctgaggtaaactttgtaaacaatcgcccgatggacatgagtttcctcgccgacgtggtcccagatgtcggcgtcgagtggccacacaataacttctcgccctgtgcggagtgtgtcatcggggccacaatgtgcggacgggtcctccagcataagcagaacgcgccgagcaggcctcgtgaggagttctgcagtcggcctcgtactcattgggccctcggagcccagcggacagtattatatgtactacggacatca

SEQ ID NO: 26175 - DNA, 372 bp, Emericella nidulans
cggacgcgtcctcatatcggccgcactgtttcgacgcctcagtctactcggaaacagacattgccagggaccaacaatgaccgcctggcgcagacgtggacttctcgccataggcaggaacgcccttctgtcagcagggaagctgaaccgaagaatctcagaagtcccccaccgccactggagacagccttaccttctccattaccgcagaatatccctttaccaccagcatccattcccacatatttacaactggaacttgcttcgggcagcccttctccactgtatatacatcggccttccttgaatgacttcccgtatgaatctgcgcgtgtcaagctagagcgattggttaactttctggtgcttccc

SEQ ID NO: 26176 - DNA, 339 bp, Emericella nidulans
gatgcgaaaagtggccacttttcaataacgtcagaaaaggccatcggcttggtcttcgagcactccgaggaatccgctgctaaacaaggctcagaaaaccgtacgctacatcgcacgtcgctggttaatgtgctcgagaattctgaagctactgctgcattacatcgattcactcaggagccatcatctgctatcaacaaggacaaagatcgtgaacgaactctaaagctttccgaagctaagatacaggagcttacatcgtccccgcagtctatcccttatcgcgctgctcctcactgcgatcaagagcatagtcaaaagctggtttactccgatggg

SEQ ID NO: 26177 - DNA, 231 bp, Emericella nidulans
gggcatccattcggatacttcgagatatactgggttaaagaagaccctttaggatcattgattgggggaactgataattacgaccgaggcattcatgttcttgttggcgagcaaaagtaccgcggtccgcaccgggtttcggcatggctgacatcgctggtccatttctgttggttggcagatatgcggactcagactgtgatgttggagccaagagtagacaataagaag

SEQ ID NO: 26178 - DNA, 459 bp, Emericella nidulans
ggctggaactgctgcaagccccgcgtcctcacctttgaggaatttatggaaatccccccctgcacgacaggaaaacactccgccgtagacgatactcctgcgccggcccaaaagaaggatacgccagccgagtcacagcctcctgtggctgctccggttcctgtcagagatagcggggttccccggcctgtcgcacactcgcctgctatccctcctccctcgaatgcgcctacgcctgttcctgaagagcctgaatctgatgatcccgagcttgcgatccctgagaatgctacctgccggaggaggggatgtggcggcacctataaacccgacgtgtcgcgggatgaggagcgatgcgtctaccaccccggccagcccgtttttcatgaaggcagcaaaggctggtcatgctgtaaacggcgggttcttgagttcgatgagttcttgaaaatcgagggc

SEQ ID NO: 26179 - DNA, 204 bp, Emericella nidulans
tggggttccccgtatgccgcacctagcccacggacactgtcgtggtcattgagtcagaaagacgctgtccttgaccgcgattcgggagatagctctccaatctcaattcagttcgggctcgagccgaataggcctactatactgcgcagcctccccccgtcccagggtccagtgattgaggtcggcagtaatagtctcgaacgt

SEQ ID NO: 26180 - DNA, 264 bp, Emericella nidulans
aggtacgggacggacgtctaccttcaccttaaccgcctatcatcgagttcggaacccctccaatgacaattaccagtcatgagggatggtcgcgttcggttttctacttcacacaggctccaccctttttattcggaacccgatccagcgccatctcaaggattgacgccaatgaacatagaagccattcgcgcacggatgcgcaccagggaagtatctgagcgaaagcaggttggagatgcagcgagcctgctgaacgcggaa

SEQ ID NO: 26181 - DNA, 577 bp, Emericella nidulans
caggagaagagaatgcgaagccggctacgtgaggagcgccatgcagcgctctgtgttctaatggaccgcgagcttcttacgatccaagctttggctgcacaagaggttagctcctttggctcccacattcgtacccgtatacccccatttatctgaccgatgttcctagacccttcctcaagcccgtcggcgcttcctctcaactctcctctctccctcagatccgacaacagcagcatccatccgcgccgaccagttcacgatccagcgcccaacctcatctacaccgtcctcgccattcagcacggaaccgatggtcgtctcgcggagcattgttgacgtatgcgaaacagacgactccgggtggtataagcccgagccggatttggcgtctgaatcggcgatggcggcgtcttcaccgtctgcggcgtcgtcgcctatgtcgggactgaagatgaaggggagggcgacgcctgagaggagcagagcgggtaggagggtgtcgtctgggcggcagcagcagacgagggagagaaggcgaagatggagcggggcggagaggcaggattatggtgct

SEQ ID NO: 26182 - DNA, 468 bp, Emericella nidulans
ctgtacagcagtcctcgtttcaagatgctcgaagcctttgagattctgtctacatccggggtagtcttatggtccaagtcatacgcgccagtcggtgcccatgttgtcaacagcctcgtcaacgacgtctttatcgaggagaaggcgcagcttcagaacgcaaccaacagcgtttcccccatctttaagaaagagaagtacacattgaaatggaggaagtcaaaggattttaatttgatattcgtggtatgtatgatctataatgctgcgcacattgacagcctgctaacgccacaacccatccaggccgtataccagtcgcttcttcacctcggttggattgacaaacttttggataatatatcgactatatttgtcgatctatacaagacccagctgcaaagtgaacgggctaggattgtccagtatccttttgacaagtattttgaccagcaagtgcaagagctt

SEQ ID NO: 26183 - DNA, 887 bp, Emericella nidulans
  unsure (1)..(887): unsure at all n locations
aaatggcctttcacagtcctggaaaatatggttgtcctctggcaaagcatcncagctcacatgcctcataatccgaaccatacccatatcaagtatgtgagcctccgtatccaattttggacacgccactgatttaataaagaactcagtatattcgatggtgtcatatccaatctcgcaaccagaatggctagacgagcgttccatcaaggaatggcctccttgatggtgtctccatccaccaacccgtataccgggattcctgtggtttcagtcctgaatatgctttggtaggtccatagcgaacccttacaagagtaatccccctctaatagccagttaagtgatgcaagcgaattatacaataagatcgaaaatgtgagactgagggccagcggacacatatactctactggcgctatcgaagcaatccgaatggttcattaccggaatttgactggtgatggagcgggggttttcaatgaaacggcggctattgtattggttgttcccttaaatacgcgccttgttgactccacagaggatgaaccgttcgaatttaccctcactggtgaacgtccaccagtctgtgatgtagcggatgagagagctaaacttccacagtgagcggtcaaacacaaatcaccctcggaaagaccgcgtcaaatgttcgtgtatcgcaagcagactgtctttccagaacaaactccgggcaagaaaacatagtgaaaggaatagatgtggacgtagagctgacgaacacgaacggtaagaaagcccgtattgttggtcgtttgctaacgtgcctagatgcaagctatcttgttcagcaaatgaagcatctgcaagagggcttgctcctctgcaagatccaaaacatgctacga

SEQ ID NO: 26184 - DNA, 620 bp, Emericella nidulans
agcagtatcgcgcggatcctgcagaactgccgcttcacactggaacacctcgaggcactcgtaaacaagtacatgatcattgagaacgaaagtggacccactgaatcgaagaaaaggcgatggcgtgaggagattcggaagaactggaaaaaagtgcggtggacaagggaaggaggcgatctcacgatactccagcatcatcttggggtccatattaacagcctcaaccttataatagcagtcctgaacaggtgatacccctttcctgatgtctctgtggtcgctaaaccgttatcaatagtggaattaatcagaacacgggccggaaggtagaggacgttcatgaaatgctgcaagaaatccatgcctggttcacgagcaatttgaaaggccgaactatgagtttctatgagccttcatcgagatcacaagagacgccacccgagctgtctttcgcactgcacctaggagagcgtgcgccgtttgacgctgctgctctttgcgacaatgcgtctttcaatgcgaactggctccaaactccggatcagccagtcttcaagtgttactgtcagctccgacgcaccagattcggtgacattcacgatgaagagctgatgcag

SEQ ID NO: 26185 - DNA, 213 bp, Emericella nidulans
ttggttggtcgcgagaccggcggtcaatccacggaccagccatatagctaccgagactcggctcgaacttgggatacggttacccagtcggtatgccttagtgcaagcacgatctgcatagggatgcgaatgtacacgaagtttcaggtcttgaaagcgccaggatgggaagactgtaagtatcctctgagcctcaggcttctacggagggtg

SEQ ID NO: 26186 - DNA, 229 bp, Emericella nidulans
agttgggactatctggttagacagtcggggatgtttggattcttggggctggagaggcaggttgttagaatactcaagggtgagtcgcgtctgccattcgttgacggttgttagactaataacataagacgaatatcacatctacatggccgagaactcgcgaatatcgagtgctgggttggattcagggatcgttgactatgtggcacggtcgatcggagaggttcta

SEQ ID NO: 26187 - DNA, 681 bp, Emericella nidulans
tatttctgcgtattctcgtggaaattactatttcagcttaacgatgagaagtatgagatcgttctaagtgcctcctccgcagcggaagaaaaacaatggaaaactgggatcctgaagtcagcagctgcctcagtggatgtgcctgatgcagtctcatccgaattacgagggagctcattcttggttctggatatcgctccggaggaggaggtttcagatatcgcgcctcaactatcacgcagaccgtccctacaaacgctaggaaccataggcatgcaacgtgtgcgctccaatatccaaccaataattatccggaaaacttactgtccacataaacacagtcagttacaccaggtcgacggtgagctagaacgtcccaaagttccacctcctatttcgcagcaattcaccatcacggctagaaggcaggataggattcgcctagagcgcacaatataccctatttacacccgagatatactcccttaccctggcatgttcctgggcgcaggtgagcttttcttcgggccaggttcaattatgagacatctcaccgccggcccaaacgaaacaaacggtccagctccatcaatttgccaaccagtgtacagaattctggccaaccacaagggcccgacgactatgaatgtaccttgcaatctgcggcaaagcggaagagac

SEQ ID NO: 26188 - DNA, 246 bp, Emericella nidulans
tcgacagttccaatcaaattcgtcgcatcagacttaggtctccctatccacgaagttgacaccttcacgggatggcaggtatctagaacctggtattcaccaacatagtcacacacaaactcatgatgctagcccccggtgtacccccatggaccgatcaatctcatagtggccgtatcgtttggtctttttgtgcccccgcgaatactcaacggtgctagatacggtggattgaatgtgcaccca

SEQ ID NO: 26189 - DNA, 210 bp, Emericella nidulans
aaaaccaaagcggaaatttaggcctgctaccgctacccaggggtttaaggcgcaatttggaaaacggattcccccacagaaaatatccaaaagggcggtcatggcctgttcaagtttctctggacccctttttccaaattcgaaaccatccccaaagggtcattggtgtcgtttcacaatgttatagcagctattgtaaagcgcaaaggc

SEQ ID NO: 26190 - DNA, 291 bp, Emericella nidulans
atctaggacagtgccagccctgtagttgcaatcatgcctacaggtagtagcaagaatatactatttatattgcctgtatatacagccccagggggatgcataattatggtagtacccctactattgctgtatatagacctgataatacactatcaggccctgggcatcttatatatgttgtaggagagctaccagccccccaacaagacagtaattatacttataatacctgagtcaaccaagaacccagatttctatatattcctaaactgccaacagcagatgcaacag

SEQ ID NO: 26191 - DNA, 586 bp, Emericella nidulans
cgcaccgaaacaccaacgttcacgtttgtctcgccattgctaaatttcccaagttctactttggccgtgaagtaccgagcctctcgcagaccgtctcggtgagaagcggatgcgagttgcctgagaatatctgaacacccctcattcttgaatcgagcggatcaaagaatcatagacatcaagctgaaaaggaatgagccggtcaagaaatgagtgtcatctcaagggaagtctggaaaagaaaaaaaaaaatccaaggacgaagggatgagaagaagctaagtgcgccccaccgacattttctcgtcggaagctggcgtttttggtctccgtggttccccgtattgatgccctcaccaacgatctcccccaccacgatcgttgccataaagttaacatacgaacctcatcgaaaatggcgtcgaaatttccagaagtccagggagggggctcattaattgttgcatggcaagtaaaagaaaaaaatattctagtagtaggtggtggtgaagtcagtttgttccctattctgccaagctatatatatgttgcagctctcttacaatatccgcaggtagctgctgga

SEQ ID NO: 26192 - DNA, 567 bp, Emericella nidulans
tcaccaaatccctttccccaaagggtcgcgatccaatgctccatcatgtgggtcaatgtcgctcgcaaggtcatcgagttgatccacactaacattccctgcgatggaacttccgggccgcttccggcttggtggtataatatcctatgtgagtctccaaaaagctcaccagttcacgcaagagctaaccctcgagttctagatgtatacacagcggcaacagttcttgtcgccagccgcctatgcccgtcagtcatagaagaggtaactgaagcagccatcacgcggtcgtggaactgcgcgttggagatcctacgaaaataccaaagctacagtacctccgctcggcgatgcgtggccgcactagagatcctctacgagcgggccatttctgaagctcctgctggggatattccaccgcagtcgcaatctggcgtatccatggccaatacgattggggacatgcccttgggcgaaggcatgaatacaagtcttttggaaggctttgacttgcctgactttcaggatatgtcgtggcttaatagcgttcccagccatctatactga

SEQ ID NO: 26193 - DNA, 216 bp, Emericella nidulans
gctccttttctgaacgatctcacgactcctcgtcctttggacacgatgaacggcttcgattttcggtccagtcagtcgtcatatggcgacccgaggcacttctcggacgcctcatacggcgtaccccaaccgccaccaaccaaagttctcctggacggctaccgggatgctctaggtcccgctaatgcagagaagtcgctgtacaactcggtgaga

SEQ ID NO: 26194 - DNA, 517 bp, Emericella nidulans
aaccagaggtcgctatatctggttggagcactgaggcagaacggttgggccagaccgattaggatctggccgaacatggtcaccccgaaaatgcctccattcgctttggcccctgcgaaacggatccaattacccaccaagagaagagacgaggtaacaattatggccggtttggggccgcctttgttgagggtgactatgacaatactagattggcacacgtgattagcgcatctacgaaaactgacaagagcagcaagaggacactcacggactcgctacgcagaaagcgaacatgtagccagtactcagccaattaatagcgctctcagacacgtcaaagtattcggctgcggtggttgagacggcagaaaaggttaaccactaccgggcgagagtcagtcacttgtctatacaacccctccgcgaaaggccggtgcgggcgggcaacgtacatcccaactaacaataatgttcagcaagacaagctgtgctaacccccaaaatctccgcttat

SEQ ID NO: 26195 - DNA, 582 bp, Emericella nidulans
gccactgcttcgaccacgccaatctcattctcccagcgggtccatgtgttctccatcaaggtctccattcaagctcgacatccgccgtcctactttccctccctgcgccaccttcttgacgacctgcacactccttctaacccgttgcctgattcggaactgaaggatcacacttcgtatcttatccttgattatgcatgtcggcaggaggatttggtggccgctttcgaattgcgggcccgtgcgcgcaggcaatataatttccactcgcgcgaggttgatcagatcctacaagccatcgcacatgacaactggattgtattttggagggtccgaaaggaggtcgattccgccatgcgcgcaatcatgaactgggcagaagatcgggttaaacaacatgctcttaaagcagtcgggaaagcttatctcggcgttgacattgcatggattgtcgaaggctgcactggtgattcgacttggacatgggaaaagctggcagagagagagaaactaggttgggagaaagaaggcgatagggtcatcatccggaaaccgagatcaaagccgaaacccgagggcaat

SEQ ID NO: 26196 - DNA, 471 bp, Emericella nidulans
gtcaagatgcaggaagatggaattgctgagcctgggcttcttctcccacgatacccaggcgatgacacccggccaacaaacaagaaagagctgctggggtggtatagttatggttgggcagcagaggttttcacagtatgtgctatgggtaagaagaattgtctctgctttcaagatcttcaagtccgtctctaatggttggtagggtcatttttacctatcactttagagcagatggcccgagaacgtggggttctactctcggacaaaacgacaccgtgtactgcgatctggaaaactccagagtcatcaaacacaagctggcaaaattcaagtcccgccgctgcaggtcaatgtattgtttacatccttggggccgaaatcaacaccgcaagcttcgcaatgtacaccttctccgtgagtgtcctcatacaagcaatcctgataatatcaatgtcaggcgctgcagat

SEQ ID NO: 26197 - DNA, 258 bp, Emericella nidulans
actccacctcctgtgcagcctgaaggggaggatttgcttccatctggcaatatacgctggggcttcctgaaacttgactctcaagagcgccgctttatcattgatcgagaaatggtcgaaaagcacatagccgagctccgacgccagctttccgcctgtaggagtattttcgcatggatacaagcatggaacggctactttggccgattttttgtgaacaactttgctaaacccgctgtttgtttcgggagggagcac

SEQ ID NO: 26198 - DNA, 522 bp, Emericella nidulans
  unsure (1)..(522): unsure at all n locations
cggatccggtctttacnccaagttcaaggcatgctggcccaacgtcggtttttgcaaagccagggtatactagcgcgcaaggattttatgctgcacgaccgcaacaactggcccacaatcggcctgccaccccaaatggcagttcaacagggctaccaacaaccacaggggccgtatccgaatgccatggttggacggcaaccattctacccgcagcccggcccaggggtgcagcctcccactggcccagttcaaccaaaggcgccgcgcggacaccgtgctccatcagcggcagttaatgcagctactaccgacttttctctagaggatgaagatgtatctgcgggcgatatcatggacctgcttactccacgagaagtgagcaagatgaggtaccaacaacatcatgaatggatggaagaggtcttagcctctccatatgctatcagccaaatcacccccgtttctcttggcctgggtagaaaaggcgaactggagtcgttaaccgcaggcaatttcgac

SEQ ID NO: 26199 - DNA, 270 bp, Emericella nidulans
cgcagggtcgacctcaagcttaatccgacgctgggtcgtgatgtagctgttgtccctgagcgcggacaagatttggaagtcgcgctcaagagactttcgggaattctcaaggagaataatgttaagtatcagtacttggaccagaagtatcatgttcggaggggccagatgaggaagaacttgcggattcgaagatggagaaagctgtttgcttattcatttgcgcatacggttggaaagatccagaggatgagggcgcaagggtggtag

SEQ ID NO: 26200 - DNA, 411 bp, Emericella nidulans
acagactgcattatatccggcatatcactatattcgcccagccacttggtcgtgcttgcctatatagaagcagaaaatgaaccggcagacgagcaaattacccgtcgtcgtcctcgtggacaagagcctgagcttcgtatcatcgacattgaaagcaaagaggaagtcagtgctgataccttggcgatcagtcggtacgagaatctgacagcttcggactaccatatgtccgttctgccgccctggaaaacgaacatgccaatatctcaacgcggtgcgttggaagcccttggtaccggcctttgggaagctacgatgtatcccgcacgactatttagttcaaccggcagcattcgcagttcaacaagtagcggagacaggagctcctacaaagcgcccaagcacgttgcc

SEQ ID NO: 26201 - DNA, 238 bp, Emericella nidulans
gcggtcgagttcctcctggagcacaaatttgatatgggcgctttgtacagaacgggcgtgacgtacgtatcgagagaagaggaagcacgggctatctcaaaggcccaagaaagatgtataatggcaccggtgctgacttcaatcaatggacgttgacgagaccgactacgaatctctagcacttttgaaattcgtccggaagctcatagacgaatggatcgcgctcggtgatataaag

SEQ ID NO: 26202 - DNA, 630 bp, Emericella nidulans
ttttccgctgctttttttggaaccctaccgaaccatgtagaggactttcagtccatggtgcacaagcattttcctattgccatcgatacaaagtaccttgctacacatgaatgcgggtccaccaatcccatatcttcttttacaggaaatcaataacagtctgctgggaatatctaaaccaatgagtggatgacgcaatatataactggcgacagacagacctctttaggcatacatcctcatttcgccaggtacgaaatagagaaaatcgatcatgaagcaggatacgacagtctactcactgcgcagatattcgtcaaactctcagcccagcttgggagcggaagtcaaattaggcccgcaggatcaccctcaaatacatctttgacggcggcacacggcctcaacaaccgattttcccatttgcacgttgaagagacgagcaacggactggccagcccgctcgtggttgctgaaagcgaaaggagcgatggggtcttgggccagcaaagccatgcagaggagatacgactggctgagaaaggacttttgatctccagaccgaattttcagttctggagagtgtatggcaacaatttacgcaactttggaaccaaagagaaggtttgc

SEQ ID NO: 26203 - DNA, 429 bp, Emericella nidulans
gctacagaccacatcctcaaactcgaatggaccacaacccaaggctggagcgatgcgcaaatcactccctacgataacctgcggctcgaccccgcctcatgcgtcctccattacgcattcacctgcttcgagggcatgaaagcgtataaagacccgcatggcaacgcgcggctattcaggcctgaggagaacctggcgcggctcaacagatccgcagctagactcgctcttccgacattcgaagaatccggcgtactggagtttctagcaaaatatgttgatctcgaaaagagattcatcccgcacttacctggtcactccctgtacttgcgcccgacgttgctaggcaccgatgcgagtattagtgtttcgcggccccggagcgcactgttgtttgttattgccagtccaatgggcgattactttgcc

SEQ ID NO: 26204 - DNA, 351 bp, Emericella nidulans
agcagtgaacgcttgggcgagttactcaacactacgtcgctgagcttactacagtctacgcttcgtttgtccctctctttagcacaaagatatcactcacgtcaccggggtggctcgcatcttcaacagagcttgttggcaacgcattacaacattgacctcgagaagctgcaaaaaatcgcggctcccttctcccggcctactctcactagtcgaccagggatttctccatctggtatcaagaataaagaaaaagtccctcagactaaacataatgccaatgacctaacgtcgctcacacgagaggaccatggctgggatgattggggctatgtccacctcctatactac

SEQ ID NO: 26205 - DNA, 693 bp, Emericella nidulans
caacatgtgtgcgcggtagttcaccatggaggtgccgggacaacagcgtgcgggctccggaatggccgcccaacggcaataataccgttcttcggagagtatgagacccaagtcttcctcagattctgagtcacgttgctgattcactcatccagccagccgttctggggaaatctcgtagcagtttctggcgcaggacccaaaccgataccgtaccgagacgtcactaccactaaacttgcagaggtgattgaattctgtttacaacctcagattcaacatgctgctcaaactattgcgtcgagaatgcagtacgaagacggagtcaaaactgctgttgattcgttccatcgaaacctgcctcttgataagatgcggtgcgatctgctgccaaaccgcagcgcggcatggacgtgtaaaacgccttcactacgcttatcgaagcttgcggcgcagatactggtagagcatctacgggttgacaggaaggctctgcagttgtacggttcccccacttgtattttaccttagaggaaaccatatactgaatatacttacagctacgaaaccaaccccgtggtgatagaaaatagacgctgggatccagtcactggagccacatctgctgcaataggaacaggaacagacatggtcaagtcgacagctgatatcttcctcaaaccctatcaagag

SEQ ID NO: 26206 - DNA, 499 bp, Emericella nidulans
aaaagcatcggcagagttctcaccacctacttcaaaggcactatggtcgacatccccctcgcaacagctgagggcctacgcgcagtcccgcgtctctatggcgaagaagacaaagagcataaaccggtgaaggactggaaatccggcatggctgtggggtgtctttccttctcgcagggaatgttacccggtattacggggattgttcatgcagccgtacaggggcgctaaaaagaatggcgcactgggtccggacaaagggtcttgctaaggggactgtggaagggacagcgagtcttcgatcgggtgtgtgttccctttgcggcgtctatctgcttttatgcggaaaggggctaactttgacgttctgccagctgcgctagggcttgtggcgtacccaggtcagggtatctgcaagagtatccactcctcggtgcggtcgaagactcgcgaagcgctcatacaagcaaggcataaagaaggggattatctcgttcgg

SEQ ID NO: 26207 - DNA, 713 bp, Emericella nidulans
ggctctttcgcctattcgagcggcttagaatcctacatagctcaccaaaagcctctccctcgcacaataacaccggttgcctcatttcaacgcttcctgaaactttccattgcctcaatgggaagtatctcactcccttacgtgctcacagcctaccgcaacccaatcgagcttgaaacgctggataacgatctcgacgcatcaacaccatgccctgttgcgcagcgtgcgagtatcgcgcagggacgggcattgctgggtgtatgggagcgggcatttcgaagcacatatgcgcatggtaatgggaactgtcaactcagaggctcaagggtgcagagcggcatcaaggccgtcgcggacttttcagaagcgttgaaatgctgtatggacgacgagctaggggttaagggccattttgcaccgctgtggggtgctgtgtgcttggccatgggaatggtgctcgacaaacagcgtacgtgttcatgttgaaccacgccaaagctgttcttagtgctgctgttcgagcgtcagtaatgggcccatatcaggcgcagagtgtgctagctagcaaagacttgcaggacatgattactgaacgaatagaccgggattggcacactgctatagaagacgcaggacaggtagtgcccccgctagatttatgggttggacgccatgagcttctttatagcagaatatttaattcataatat

SEQ ID NO: 26208 - DNA, 375 bp, Emericella nidulans
tctacgcatcaatgcattctcgcacgaaagaaggcttatctagccgagatcaacgaaagttgcaatatcacaggtagcacaccccccatatgttccaccgcttggtacgggcctcaaactccgccctttgccttgtggatcgacggttcagaccagctagtcgatggacgcaaactcttgcatcgcctgtagagtgggcgtgagccgcatgtccacgtggttcattcaaaggttatcaaggagtacgagcatcttgatgtcctctgggcgatggatatgattgagcaggtcgcacgggaggtccggcagatcctttgggagactatgcctgcggatgagagggtgttgagtgtgacaccgaggggggtggaatga

SEQ ID NO: 26209 - DNA, 762 bp, Emericella nidulans
tcgttaaacagtctatttcagcgggaactgggcagtcatcgccctccaagactgaacgcaaagttcgttgacaacttgagactatgcaaagcatggaaaggagcttctaatgatgttgtttcactggcatggtcgcctgatgggacaaaattcgcagcaggggccactgcacaatgtgatgaacacatgatggcttataataggaaaaataacctccttcttggtgacctagtcactaacgagctccacgaactatcagatcactggatccatcgaccaaagaacaacgttgtgaatgatccgcgtcttttcatgagcgttactgctgtacaatggtttgaagacacattatacactgccagctacgaccatacagtcaagctttgggatacctcaagaggcagaacctcatgttacaaaaccctgaagcatgactctgaggtggtcgttatggcacgctcaaactttgccgagaacttactagctacggggacacttacaaatacagttggctactgggatattagcaaagctcagtatacaccgctcgaactgcaacggggaagattaagaaaggatattgaattgatgccgacatctatagcatggggctctacgcatgcgactaaggattatcttcttattgggatgtcggagaaagaagatagcgtggcccaacatggattgcttgctgcgttccgcgttcgagaatcatcaatcgaaccggagtcctttctgccaaatgcacagaatgtcttcgat

SEQ ID NO: 26210 - DNA, 363 bp, Emericella nidulans
tcctcttccctgaaccgatggtctaatacctcctagacgaagcttacgatacagcgctcgtggtgtttcgatacgaacgctacatacattatcgccggcggtctcggtggcattggccgcgctacagcgcgggggctagtgagcaggggtgcgaagaacctcgtcttgctgtctcgttctaggtccaatgcagagacccagcaagttattgattctttgataagagatgggactcgcgttgaagtccatccgtgcgacattagtgactatgaacctctaaaacatgtgctcgaggacgtttgccagacgatgccgcccattaaaggctgaattcagtaggccatggtactccgtgtaagtgtg

SEQ ID NO: 26211 - DNA, 391 bp, Emericella nidulans
atcaatccagtgaagcaattcattcgcaatgttcggtcagccaatactattgcagacgaacgagcagtcatccaaaaagaaagttccgccatccgtgcgtcgttcaggaaagaaagccatgattcgagcattcggttagcattcacaactatactctactatatgcttcgctttgaaccaatatctcatatgtccggacaggagaaacaacgtcgctaagctactttacctattcacactcggcgagcgtacacatttcggccagattgaatgtctgaaattattagcgtctcatcggttcgccgacaaaaggttgggttatttaggcacgatgttgttgctggacgaaaaccaagaggtcttgactctggtgacgaattcgctgaaaaag

SEQ ID NO: 26212 - DNA, 465 bp, Emericella nidulans
cgtgaagatacatacagcagcatgaagtatcatagtcagcacttctccggtgttgactgggacgacaacagcaagcaaggcggcatataccttatccttggagaagtgggaaatcaggataagaaatgggcgcacgacgtctcaacggaaaaggggaactacgattatctaatgtttgccgatctggacctgtctcatcccgaggtgcgcgctgatatgttcaactggagttgttggatcacggagcagttgtctctggacgggatgcgactagatgccgcaaagcacatgtcgactggctttcaacgagcatttgttgagcatattcagaagaaggttccggggttctatattataggggagtactggactgccaatatacgggagctggtctcctatctggtaaaaaaacagtatacggtcttggcgtatgatgttcctctcgtggagaagcgttccgagctc

SEQ ID NO: 26213 - DNA, 460 bp, Emericella nidulans
ctgtccgatccacagaaatatgctgcgataaccacatttccttcgattctggactacgccggctacgtgctattcttcccgggcctttttggcggtcctgcgtttgactatgttgcctaccgtcgatggattgacaccacactttttgaagtacccccaggcactgacccgtccaaagtgccaccaacccgaaagaagcgaaaaattccacggagtgaactcctgctgccaagaaggcagtgataggtctggtatgggttgtggtttttcttcaaatgagctcgatttacaacaaagaggctttattggaacccagtttccgggactattccttccttcgacgagtctggattgtgcacgcgctgggattcacacccgcgccaaatattatggcgtgtggtcactcaccgaagctgcatgtatcttgtcgggaatgggatataacggctttgatccaaga

SEQ ID NO: 26214 - DNA, 347 bp, Emericella nidulans
gtcattcagaagattgggctctgtattggtttctatgatctcttagagtcatcagatggtctgatcggccatggcactgggctcgtcaatgtgaacggtgagctagcccagtctccatcccgatctttcatgatgttctagccgactgacatatactacagtgaagttccggcttattgtgtttcgcccatttaggggggagattgtgctgggcaagatctcaagcgctactgaaaatggcataaaaagtaacgatgggtcattccgtgatgacgctgtatgctaattcactggcaccagtcggcgtagaatttttcaacgacattttggtacctccagaactcctt

SEQ ID NO: 26215 - DNA, 364 bp, Emericella nidulans
ttgcgctcgattccgactgagaagaggttgaggacaacggcgcccagaaagccctctgattgcacgttgacccagccctcgagggtctcgtccgcgctgcgggcggaagacaaggaaggtcgctgtgagatagacatacataacgccgtattcgccggccgtggtggctagggttagtggttgcgggtttggtgaggttgtggaggtcggagacgagggcgagggtggttcacttgatatcgaagcattggagtaagcgagaattatgccctggaaaggcgggtagtaggtaaggagcagcggggataggtgttcagcaagtagcgaggcgagagcgtgcgtaggagagattgagatgggcgaa

SEQ ID NO: 26216 - DNA, 366 bp, Emericella nidulans
ttccagactatcctcccttctacaaccgccatcgcgatgacaaaccccgcgcagccgttcgactccagacggtcgactatttataaccgtcaaccggaagagcttcacattccggccggaaactctacatcaggcggtcatccgcgccagccaatgtcccacgaataccctacgagccccgatacacatcttccatccataaacatccattcttcaagttcccagtctaaccaatatggaggcgcaagcgggggcgttacaggagggacgcttcctggctctctccaacccggcaattctgccaatcgaccaccaacagtatccatgaatacagccccgtccacaattccaacgttgcctcattta

SEQ ID NO: 26217 - DNA, 525 bp, Emericella nidulans
gtcttcattttctctcgacccaactacgacggtccgccgggtttcgccgtacctgtgaacaaagtcacgcacccggatctcgaccccgatcatttaggctcctggcccttctaccgccctgagccgtcccgcatctttgctcaacttccccatctccggccgagcgtgctatatattttcggcggcacatcggacatgtccacgccgacaatgatagcggataaattagcccatacagggactggactcggtggcagtggcggagtcacagcgggacgtgttcgagacgtagtactcaaggataaaggacatcttgtcgcccaggaagcgccagtccaatgcgccgaagaagctagtaagtggcttgggccggagctacagcgttggagagaagaagagaagatgttccaggatcagtggagtcaaaagtccaagatcgagaaggttactattgatcatcggtggaaggcgcatgtgcctgctcctgtgcgacctaaaaagaaagactcgaagtcgaagctgtga

SEQ ID NO: 26218 - DNA, 276 bp, Emericella nidulans
ttatgcagagacggacgggcattacctttcgatcgcatcttaggccccaattccttacccccggttattctatatgccgatgtagcctcgccgatgtttaaagatttccatcagactctgagtgctttggctaaagagggtgagatatcgtatagagtgcggtatcggccacctcaacattggatctcgcgtcctctatttgtctcgggatatggcgttgagcttgcattgaagcgtacggactaccatgtgatcgatgaccgtgacgccgaacaa

SEQ ID NO: 26219 - DNA, 648 bp, Emericella nidulans
ggtgggagcagagatcgtcacttcgtggtcccctttgcaaggaatccgcaatctgttggccgccaggaagaaattcagaagatagagaatttaatctctatgaccaacggaccaagaaaagttgccataaccggactgtgaggcatagggaagacccatattgcgctggagctagcttactgcatgcgagaaagagagcctgattgttcaattttttggatctcatgcaccaactacgaggctgttgagcaggcttgtatgaacatcgcacaaggaataaaaaatgtgcagccagcagaggtcaaagagcgtctgaagacctacttcagctaaacctacaacaaatggattctgattattgacaacgcagatcaaatggatatgtggactaagggcaaccctacagcaccaccactcaacaacgtcattccctggagtgaaaatggccatatactctttacatcccggaaccatatgcttgcagtgaaactggcatcgccaaaaatactctctatctcggacgtggatcagagaactgccaaagagatattcaggaaactattggttgaaaaggattttctacaagacaatcatttaacaagcgcactcctcgagcagcttgcttttctccctctagcaatcagccaa

SEQ ID NO: 26220 - DNA, 611 bp, Emericella nidulans
ttgccagtcatgtaactgaggaatttcatatagctcggcggtgcaagcattgcacaccagtggtactgaccaccagaagtcggcgcccttgcactgtcagtctccacttgcaatgcgaggggggtatatacattgaggccaattcagataggaccgcaaagcagcacgcggtgcctgtccaggcgaagatgaacgcatagacggctcctccgggaccaccactagatcagacgctgtcaattgcttgtcttccaccacgggtaccgggtttcgcgttactgactttgacagaggtagtagcaaagtgctggcgagcaagcaaagccattagccgaggacataatgcacgcgagggggagctcgtacttgaatatcccttcccatgtcgcaaggatagtgcagctgaaaccgagggtggatagaattccgaacgttcgctgggcggaaattgtaagagcaggcaatgagagcaaagggcagatcggtcctggacactctactctaccttcaaaaccgatttcttccccaatcgcgccagttcgctgacgtcgcggtcctggaccgtgacgctggccgcgaccgcaccatgcttgagctcctgtgacgccatc

SEQ ID NO: 26221 - DNA, 586 bp, Emericella nidulans
aatctgaaatagctcaaccaggatacgaatgccctcagaagaactttcactggagagatttcccgcctggataatgtggagaggcaactgcgtaggtgaattggattccggttgagctgctgcatctggtcgcgcgacgctgacttgactgcatacaacaggctactttcgttcccagctggacaaagcatctattttgataccaactttatctgaatactccgacacaatggcagataacttgacattggagatcgacgagcttgccgaacacattgggtgtctagagcagcaaatttcttttctgaacgatacctacgagaccataatgcagcgtgtgttggagctgaccgaatggcgctgggtgctattagaggctggcagatactttgaccatgctcacggcccaagggaagagattcgccagtcgcttaataataatgaaacgccttcccttcacgacgttgaacaacaggctggcctgggtaatgatactctggggcagcggggattccaggctatgagcattgggatcattgctggagttataccacgagttaggatgggactgttacaacgcatcctt

SEQ ID NO: 26222 - DNA, 1068 bp, Emericella nidulans
ttgaacctgaaagattttcaaaggcgaactcctctttcacatgcagcatcaaatggccacgagtctgtggttaaactattcctgcagcatggtgctcaagcagactctaaaaccgactctggtcagacacctcttatatttgcggtagtacatggccacgaatctgtggttaaactactcctgcagcatggtgctcaagcagactctaaaaccatctctggtaaaacacctctttcatatgcagcatcaaagggcaaagaatcggtggttagactactcctgcagcatggtgctcaagcagactctaagaacaacactggtcagacccctatttcatatgcagcatcaaagggccatgaatctgtggtcaggttgctcctaacgcacggtgctcaagcagactctaaagccaactggggtcagacgcctctttcacgtgcagcatttgatggccatgaatctgtggtcaggttatttctggagcatggtgctcaagcagactgtaaggatggggatggcgggacacctctttcatctgcagcagcaactggccatgaatctgtggtcagattactcctgaagcatggtgctcaggcagactctaaggatgacgattgtcggacacctctttcgtacgcggcatcaaatggctatgaatctgtggtcaagttactcctagagcatggtgctcgagcggactctaaggatgacgattttcggacacctctttcgtacgcggcatcatatggctatgaatctgtggtcaagttactcctggagcatggtgcacgaacggactctaaggacaaagacagtcaaacacccctttcatatgcagcatcaaggggctacgaatctgtagtcaggatacttctggagaacggcgctcgggcaaactctagagataaagacagccacacacctctttcatatgcagcatcaaagggccatgaatctgtggtcaggttgctcctgcagtatggcgctcaagcagactccgaaaccagttctggccagacacctctttcatatgcagcatcacatggccacgaatttgtggcaaattac

SEQ ID NO: 26223 - DNA, 828 bp, Emericella nidulans
gtcttcagtcgggaccaccccgttcgcactcttattttggccacttcagacgatgcgttggttttccaacatagcttacgggagtctgccaacaatcattcatcagtcaatcatgacaggcaacgctgcttggtgaagtttgccagtctatcttccatagacttggcaagttaccgacctttaggatctgggtacggtaccctcgggctggtcactatagaccatgatgtgtttgtttgtgttgtcacgcgctcttccaaggcagccacagtcaggcctggagagacagttttaagaattgagaacgtagatctctgtaaaatatctaccatcttgaatcaatctgttatcgctgctatctaaccaaggaaaaaagattgtttgaaccgttccgaatatgaatttactccctattatgacgcggagtcttctgtcaatgaagacaccatttctaatacactcccggcgaaagatccttttctagccctgaagaaactcctgactgatggtagcttttactacagtcttgacttcaatcttacagatcgactgcaggatcggtaggctaatagtccaggacaagagtcaagataactaactaataatagttcagacaagttgacagcttttgatatcgattcccttgacaaagatgttttgtggaatgcatatatgatccaacctcttctcatgtttagatcccacctaccaccgtatgaaaaacaacttctcgatgcctctcagattctcacatgtgttatccggggattctgcgggacaatagccattcctgctaatgctaacgtcttacattccgagcccaaggca

SEQ ID NO: 26224 - DNA, 1018 bp, Emericella nidulans
gttggaaagacgcagatagcactcgagactgcctaccgcatgcgtgaaagagattttattccatatttttgggtcccgtgcacgagccatgagagcgtcgagcaggcgtatatatgcatagcacaaaagcttggagtacacggagtgaaggcaacagatgcaaagagtaaagtgaaagcccacctgagtcagagaggagcagcaaagtggctattgatttttgacaacgctgatagcttggatatgtggcctcgcagcactgtagtcggatcaataccgctgaccgattatctgccccagcatgaacaaggccatatcctattcactacgcggaatcgaaaggtagctgtgctattgcgttccgctaatgtgatccatgtctccaaaccagatccacaggcagcggtacaaatcttagagaagtcactgattgacaaaaccctcctcaacgacggtgaagcagtggcacttaaacttattgagcagctagcttttcttcctttgacgatcacccagcagcagcatacatcaatgagaacagcatcgacttctctgattacctcgagctcttgcaagaccaggaatcagaaatgattaagttgttaagtgaagacttgggggatgactggaggtataatgagatacagaacccggtggctacaacgtggttgatttcatttcagcaagttcaacagcctgattgtctgctattcatggcttgcattaatcctcgcgacatccgaaatccctactccccgagagagtttccaagaagaaatccaccgatgcagttggtcttctgaaggccttttccttcatcaatgaacaaggtggcaggctaagtctccatcgactggtccacctttcgactagaaactggctaagaacacagtcccgctttcgtcagcagttatccacaacggcttttcgctttgatgaggtcttcccaactcatacttataccaaccgagcgatttggcgggaatatctgccacacgttctctcatttatcagtgaa

SEQ ID NO: 26225 - DNA, 234 bp, Emericella nidulans
tcgacctcagtccgcaaagtgcccgatcttctcatgtctacgaaaatcgagatggaaatcaagaactggcagctaactgggctacctccgtttcctgaactgatgcactttccgcgcgattgctggagcaagctatcgcggacggacctccgtctgatccaccatatcatcgggctctcgatcgacctccaccggcgggggctcagtagctgcactatctgggcccagaagatg

SEQ ID NO: 26226 - DNA, 201 bp, Emericella nidulans
gttgagccctgtcagcttgcctccaactggccgacctgtcactcccctccaacccccctaaatccgcgcgccatgaataacgattctttttcatccttcaaatttcgccgaccatcgagcaaactccataaggaccctcccggttacggatcccgcgcccttaacagccagcagagcaccacgtcactaaaacggcaccct

SEQ ID NO: 26227 - DNA, 972 bp, Emericella nidulans
tagagcgaaagagatgtagccggacaagtcccaataaatttcgtcaccacatccgctatctcgctgcgggcagcatgctttggcgacaacaagtttgcccggaatgcagccgagagatgcatctccaatttgctggctatcggctaccggcgcttcaacatcgatctatactggtcaaccgagctccgtcgttggatcctatgccctgtttcgattcctaagggcctgcatgtcgtgaccgtatccccggacgctacatccactgctactgcttcggttgcacaaggtactgtcacagcggagctcgactcgtcggatacgctgctgtatgatcttggctcgtataaatgctcggataacttggatctgcaggacttgatagatatctttagtgattactttcagtataccaacacaaatctggtgatatatacgagatatctgtcgctcaatctccatgttgctgctgatcccacttcagccgaggagtcaccatcgactgtcacgggcgaacagcttccggccgtatcagaacgagtcggctatatcctgaatgataagcttgggtcatacatctacggcccctccaggcttctcgaggaccgccgtaacctgaatgtttcgtggtatgcggtagatgaatcgaacaaaccaattactcagtacttcaccattgaggagggcccggagggtatacaaaccacgccagatggatggccaagcgcaaatttcatacagctagcagctgaccgacggctgcttattgagtatggctcggttggttcgcagctgagcgaccacgatctctctgcagaaaacgacgttatatttcctcccaactacctgacttcatctatatcggtcgacgcaggtgacaacgggagtctggattccgggtgtctatacaacccaggtacgacggacatctcaaaagtcaactcatcctgggcaatgtctagccacatccccgtc

SEQ ID NO: 26228 - DNA, 300 bp, Emericella nidulans
cgaataatgggtctcattctcacagctgacaatgactttacgaaggacaggggcttacactacttcaggggcatccttaaccgacactcacctattacagtgggtgacgctggcaaacaccgaggcatgtgtagccggcattgtataagatgccttaacagaaactgacaaggacagaacgtatgcctatcatccgacctcttcgaatcctgtttgatacatctgatggatgttgaaaaccccctgctgcgacagtggtcgtgcctctgtatcagtatgctgtggtcagactttccggag

SEQ ID NO: 26229 - DNA, 701 bp, Emericella nidulans
ggtccattatgatgtctgatgagacccataatccaagccatttccacgcaaccctccagagagaacttgccgctagcctccatttcccagcgagtacgggagttaccccatggtccaacttcagaaaaccctgtgacaacgacgactttgtccaaattgaccatgcctttaaggttttcgttgagaggtttgatgtcctcatcccaagtcggcaagttcgggaactggaatttgatgttcgcgcgaggttctgcgatgactttcttgtataggacttcactgtcctctccattcacaaccttgttttcaatggcggtttccttgataaccgctctgcgaacatcactcgtctccattatctccgtcctaagccgagtcataagatctttcagatcagggatgaattgaagcccgccgttcaggtctgcccagacaggatcaagttggcaaaggtttacaattgcaggagccatgaggccgagcaagttgaatgccatctcctgctgcgagaaggtccgaacgcccagtttctcaactcttcggcgaccatgttgttaccgctcatcaagcccgtaccgcgcgtccatccaataaccgcaccgcaaatggtgaggtagttgctccagttctcggagtaccagcggttgaagagtgtttccaaagcgagcttggattctgaataaagtccgtcattaccgaag

SEQ ID NO: 26230 - DNA, 372 bp, Emericella nidulans
ttattttcagagcatgatgccaggacctggccatttggtgaaaaggccaccgattcaaccctatctgaatggccctccatagtatgcttgaggctatcgctggcagaattccagagcttgatggttgtatcactagagccagatgccagcagctggccattcggtgagaaggccactgactgtactgaacttgaatggccctccaacgtctgtttgagaccaccgctggcaggatcccagagcttgatggttgtatcattagagccagatgccagtagccggccgtctggtgagaaggtaactgtttcaatccaatctgaatggccctctagagtttgtagttcaggaccccaattgtcttcgactttgggc

SEQ ID NO: 26231 - DNA, 519 bp, Emericella nidulans
ccagcgttaatcacttctagatttctcgatgcttggagggcaggagactacccgtcatcatttgacaatcttcatcgctactttgactacacaatgcatagtcgggataagggaacctatcaatacgcgcttctaaatctcgcaatactgcaagcggatttcggctgttatgaagaagctgtgtccgcgatgcaggaagccgtctctattgctagagagtcccatgacatgaactgtctgaatttctgcatgagctggttataccacttcggaaaagcctttccagagctcatcacagaggttgaatacactggcatgctgagtaatgaaaaagaagggctctattatctcaaagccaatgcgaaggacacggagatgtgccgatagctaagtactacgctcctgagcgaagcaaagcttgagctacagaacgtaagttttcttgtatgtcacctctactatatagctgactttttaaagggggagagtctagcgtcgtctattgagaacatagttcgg

SEQ ID NO: 26232 - DNA, 411 bp, Emericella nidulans
catccggacattgttgcgcgggcaatggtggacacaaccatcgcgatcataccagcaagtgcctttcgacgcttgacgcggctctaccccagagctaccgcccatatagtccaggtgatccttacacgccttcaaagagtgacatttgcaacggctcactcctacctcggtctcaccaatgaggtcctcggcattgagaaacagatgacaaagtttacaacttatgacttgccgaatgatatccgtggagcagctttagaccgattgaaagacaaatttctgaaagagaaagaccgtttaggctctgaggaagtgaccaggggaattgcactacataacccctacgccggccgaagacgccggtcgatgagttttgtgagaaaagaggctgctctcaaagcaaagatgcca

SEQ ID NO: 26233 - DNA, 620 bp, Emericella nidulans
gctacggctcccttctcggtgtccagctctaccaggtacatgccaatctctttcgcatacatatcaatggtctctaacgaacaattatagagctttgtctccggcattattgccttccgcgcccttccgcgccctcagttttcagctctccaagccaagatattccctacctacttcgctctccagaccgcgctccctgtcgtagtcgcacttactgcctcccgcggcggccagccgcttggtatttcggggctcctggaacgagagaaccaattcagtgtcctcctcccgctcgcggcggcattcatcactggtctggtaaactttggtgtcttgcgcaagcttactgtcgatacgatgcgggagagaaagcatcagggtatgtacatgtctcacaaataaacaaaaaatgctctggctaggtcgttaggatcactgacatgctcggcgaagaaacccgcgacggcaagaagagctacgaccccccacctcactccaaggagatgattgctctaaacaagaagtttggtcgtctacatggactgtccagcttggtcaacctggtgacccttggcgctactattttttatggtgttgtgcttagcaagaagcttgagtag

SEQ ID NO: 26234 - DNA, 1079 bp, Emericella nidulans
atgcagggcttgaacgaagagtggcaattttcagcaaaagaaaagaaatttcccccagtcggggaagcgcatccagcatctaatcaactccatcaaatccctagcttgactgacgtcaagtatgatcagtggtcaagagttactggacaggctcgtgattgaccatatgctgcgatctggatactcggagagtgcccagcggcttgccagagcaaagaacatagaggagcttgtggatcttaacgtctttgtacagtgtcagcggatcgccgagagtctccgcaatggtgaaactaaggatgctctacagtggtgtaacgagaataaagctgccttaaagaagagtcaagtaagtaagagccaagctctgctctaattcaaccatgacctaatatggtgtatgcagtacaatttggagttcgagttacgactgcaacagtacattgagatgatcagaacgagggacagggcgaaattcgtggatgcaatggtgcatgcaagaaggtacctggcaccgtatgacgaaactcaatcagcggagattcgtcgagctgccggccttcttgcctttcccccgaacacaagagccgaaccctacaaggtattttagcccggtccccaagaaaacctaatctaatgtgcaatagtcaatgtatgcctccgaacggtgggtgtacctctctgaactatttattcgcacgcatcatgagctcctctcattgccttctcggccattgatgcatattgcgttatcagccggcctatctgccctaaagacccctgcgtgtcattcagctaacacctcttcgagctcaaactctcattcgaccgccacatctgtatgtcctatatgctcaacggagttgaatgagcttgctcgaaatctgccgtacgccaatcatacgaagagttccgtggaaaacgacccagtagtcttgcctaatggcagggtatacggtttacatcgtttgttagacatgagcaagaagctcagctccctcgaggcaggcaaagtcagagatcccacaaccggtgagatcttcaatgagagcgaattgaagaaggtgtacataatgtaa

SEQ ID NO: 26235 - DNA, 426 bp, Emericella nidulans
agaacatcgcttcttgcctctgtgcaagcgcatgcaaaagcccatggatataacgtggtggttaaatcgtctagtacaccaactgaaaagaagccggggcgtacagccaaagtgtggttgcggtgtgaccgaggcgggcactaccggccgcgcaatggccttactgaagagacgaggaaacggcggcgcacgtcccgtctgatggactgtccgtttatgctggttgcagctggaactcctggcatttggacgctgacagtcttgaacggcacacacaatcatggtccgattgttgagaagccacgacaagttcctcatcacaaagttcgaaaaggccagatcgctgcggttccttatgactggccgcacgatgcaacgctcacgccgtatacaactgcactggttatcattgatatgcaaaaagac

SEQ ID NO: 26236 - DNA, 582 bp, Emericella nidulans
cccattcacaccacttatgttctcaacgtctcgcccggttatccaactcacgcccatttggtggctaccacctctatggatggagagacgcgactaacatcaatagtcgaccatgaaaaggacgtggtcgaaacaactcgcatgcgagtgggctcgccgtatctgacctactcgccctggctacactcattcgtctctagtgatgaaaacgactttgtacgtctgttgactttgcggcgcttcttcaccaccctggcggtcgctcggatgccgagcactgtttctgctttagcgacgtgcagcccctggcaccctagtgcgcttattggctgtactgggggaacagtaatctcgacgaatcccttacgaagactattgcattccaaggaaaagcaatggcaacaggcctggttctcgcatacctgggttcaaggagaagacccaagcagtcccggggtcagtcgattcttcgatggtttccgtgctgaaagcatcagtctgttacggaatatgacaggggaccgcaagatggtcaatgggactatggtagtcaccatttacgaggaggagacgcacgtcacg

SEQ ID NO: 26237 - DNA, 474 bp, Emericella nidulans
tctgcactcgaaaaaacaaatgaagctttcgatttcataaaaaaactcctaccggaaccactcaaagctcctcgtgtagctatcgtctgcggctctggattaggtgggcttgcaaacacaattgacaatgacctaagagtagaaatcgattattctgatattcctcatttcccacatttgaccggtcagtccgaatttgccttacaaccccattttcgaaggcggtccgttcgcttataacctataaagtcgcgggacatgctggcaaacttgttttcggcctcatcgacaagaaagttccggtagtcttaatggttggccgcgctcagtgagaatgcccttataatagtaaaaatgaattggttaactaagatatgtcaactgcttagctactatgaaggccattccatagaccaagtgacgttccctatccgggttttcaagttactaggaatcgacactgttgtctgtaag

SEQ ID NO: 26238 - DNA, 456 bp, Emericella nidulans
gcgtcagccgcccctatggcgtccagaggtgactctgcggagtcgacccgtgtgcgctctcgccgctctatcgcccatgtaccccgatcgaggttgactgctggaggagacaaagataatgcaacgacagaaatcagcacttcccagccacttgctaatcgccgatcggcaacgggaaaggagaaaaagtctcgtagcaaaagtctgggacctggaggtttggacgcgcttcagacttcgaacggaaaccgacgaaaggtattgacgccccgcacgccgcggtctcacttgttcccataaactgaccgtttactgttgtatagtctgctgcagtgtttccactaaagtcaatcctcaaacccacagcacctgtatcccccatacggaacattcctacatttgaagaaacgcgcagaaaaacaccggcccgcggaggaaaggaacaagcgtctagca

SEQ ID NO: 26239 - DNA, 231 bp, Emericella nidulans
gcagcgccgtccaccacgtgctcgaggtctccgccaggtccgtaccagccctttgtgaactttgagcgtttccggatcaggtagcgtcgttgttctgcagattcaattcctgcatctcgagggtcctcagatgacattgagaataatttgtcccaggaagggaatttgctggcatgttttgacatatcgcggccgattagtttgaggaaggtttcgacatttggaacgaac

SEQ ID NO: 26240 - DNA, 258 bp, Emericella nidulans
gatctcctcgggccgctgggtttggcgcagacgggcgagttcaggctcagagcgcaggcgttgagtccgttgacggtgttgcaaagtgcaaccatcaacccggcaaggatgatgggacagtccgagtcaatcggccagatcaaggagggattctttgcggatgtgctgttccttagcaggaatccgctggaggacgtgaccatctttgatcgaccagaggagtgcgtcctgggtgtgatgaaggagggaagagtgtat

SEQ ID NO: 26241 - DNA, 585 bp, Emericella nidulans
ccgacactatacgaaaatgcaacctctgttcaattcgtcaatggtctgagccttctcttttcgataggagttcccttctttggaacacatgagactttgaatcgtgatgggtttgtgatatgtcggtggatgtatctttcactcgggattgctacccaccgcaaggaaaattggaccgttgcttgtctcttaagatcagaagcttcctgtcaagctagcaactgcagacatatcctaaacctcgatcgtgggcggcgcctgagggactgggaagtagtggcgcgcctctatggataccaagactcaaaagctactcttggctgtaaagttgccacatccccgaagggaactagaatcgccgttacgaattggaatctcctctacatttgggcgttggagcctggtgcccttattaaattggattccgaaagttactatcatccgtcgtggaggtcgtcaagcactggacatattgaattgcgacctattatcctgcgtcttcatgcggtttgcttcgatctccgcttcacagaggaggatgaactggtcgctattactgatctagggattaaattgtggaatctg

SEQ ID NO: 26242 - DNA, 276 bp, Emericella nidulans
ataatggcggcttcttttgtgccgcgtcaggcgtttcccaattatgcatctatcccacggtcctacttccttggtcaccaccgcgctggactgaacaaaatgcgaaatatgctatcttcaattgactatgtgattgagtgcagagacacccgcgtccctttcacatcagtgaatcccatgtttgaggaagcactggggaagaccagacggctgatcgtatacacgaagagagaccttgggtctgaagcgggttcgcgggagcagaagagtgtaagt

SEQ ID NO: 26243 - DNA, 291 bp, Emericella nidulans
gaagcagcggcaatctatgcaatccacggcctgacccgcacggtctccatgttggagatagcttcatcctctgcgatgccggcggtggcacggttgatctgatctcggtataaaatcatagcgctcactccaatcctgcaggttgaagaggttacgacgggaactggaggtccctgtggctcgactttcctcaatcgccggtttgcggattttctgactcgtaaactcgggagggagcaaggttgggacgatgaggtgttgcaggaagctgtggaacggtttgactctatt

SEQ ID NO: 26244 - DNA, 1184 bp, Emericella nidulans
gatatgatagcaaccgcggaacttgagacaaagcgctatgctgcaatctcgtacacctggagtcaagtcagtaaagcaaagttactagaaagcgcaacaactcgagcaaaggagctcggatatgagtatatatggattgaccaatattgcatcgatcagaccaaccggcaagagaggaatgccgaaattaagcgcatgagataacgcaatacaggtactggtgcttctgcctgacgtgacaagcctagcaagattcgacgtggtatcggctgatcatctgatccacgtggatgcagctacaaatgcctccagggatgtcttaaaagagttcacgtcttgcctataactgaaaagagtctggacttttcaggaagcctcggtggcgaagcaatgcgtactgtgtactcgagagcagatgcttgatggacagtaatggatgccttgatcggcagctcagatacgcaactgtcgacaggcccagagtgatgtgcataacaagcaaaatgatagcgagcccagtcgctgccaaatcccaacatagtcgtctaggacggatgcctcagaccccgtcaggcatttattggctcaatagacaagtcaatatttagaagctcggttgacgagcacgaaccacggctgcttacacttgtacaggcctgggaagcgccgagcggtcgagacacgctgaacgatgaggaccgagcctacgttctgctttcccctatggagggtagagacagagtcaaagtgaatcgtggacggtctttgctagagtcatccaggactgtgtcgaggcagggattgtcacggctgacctcctggccggggatgccccttcgcctctgcctggtcgatgctgggcgtcagatttaacaggatcaggaccgcaacacccatcccgggtcaaagctggcaatgaaagactaccatccttgacctggaaaggaggcagggtatcagtaaaaggcaagttttttcctctgcacaagctatcagcctggctgcacatagtgcaaacccacgactacagaccgaatcccattcagtggtctgaagcaagtgaccagccttggaggcagtttgccgcgggaacttattagaataattggattctgtcggaaatgattgggctcgaattttttctggtgcagccgatggaggggtccacgcagactgtaatagtc

SEQ ID NO: 26245 - DNA, 327 bp, Emericella nidulans
gaaaatgcctttcatcctggtgcatttcagcgctcgtctttaaagctgatgttaaactatgccaaggtggtaataagccgtcgaattaaaaacccaggttaacgcatgcaggtttttacgtactgtgcggccatagctagaatacagaaactgcagcagaccccggaaggtgatcaaggcatcagctctgatgctgttctagggctatggaagtcactggtcgaggtaatcgagagtcagttgacgctattagtgacggagtcggcttatcgatgccaactggtctgggccccgacttacccagccctaactattgctttcatcagt

SEQ ID NO: 26246 - DNA, 568 bp, Emericella nidulans
ctaacttgctgcagagtgaaaggcctattcaccagcgacttttccggcgagatcagtagcggcgacgtcgaaatccatacctggaatggcccgaatgatcctgaaaacccgtatgccgttttacctgtgaaaattctatatcactttccttgctgacccagatccaggttcaattggagcaagaaatacaaatgggcgttgacggtcaccgtttgtttcatgtacgaaaccacagcgcctctatcccaacctagaagaagaaaagagaaaaatacagattctaacagctccttctcacagctcaatcctcacaggacttccggcaggaacctatggttctggcaacgactggatggctgagaaattccacgtacagaactcacccttcccaaacctttactgggcaaccacatcatggaacatgggcgccgccttctggccactcatttttgtccctttgactgaatcttccggtcgaatgccaggttactttgtggcatacatcatcctaatcatcagtctcttcccgagcgcattcgcaccgaacttcgcaacgcttgtcgtgaca

SEQ ID NO: 26247 - DNA, 573 bp, Emericella nidulans
ctctaccgcgccgctttatgggctgtacctgtagcctggagcagtgtcccgctggtcggaaacgtgaagctgcaaattctcagcgagaggatcgtgcgtggcgggatagttccagatccacaggtggacacggcgcatggaacacaagccaaaaatggggattgcggtgatgagaggcttgtagtgcgctggcggacggagaagccgaactctcattcatcttcgtcttcatctaaatccgagacttcaacattatcaactgcatcttcatcccctctgaagcgagatccgaaaaccggcgacgaatccaagacaaacacgaacaaaggcctgagcgttcttcttggtggggatgctccgatcttcaaactttcgcgcgacgaccagttcactggcctctttatattctctttcgatgaagaaggccgtgttctgacgcagacaatcgagcatgcggaggacgcaggtggctgggagcgcacggcgaaatttgtcactctcacagattggctgattgggaaggcgaggggatcgttggatacgccacaaccggccgggttgtgctgttctggt

SEQ ID NO: 26248 - DNA, 393 bp, Emericella nidulans
agggaaaacgtattttttggctggaggagcagagcgggcaccgtaaaatcgacgacctcacaaacaattgcgaggactttcaatgaagcaaacttattgggggcaagcttcttcttcaaaagaaatgaagggaatcggggcaatacatcaaaattcttctcgacaataacaagacaattagcgataaggattccccaactggtccccggtgtccagaatacaattcaggtcgaccctgacatcgcaacaaaagggctaaaggagcaatttgatagaatactccttcagccactcattgatttgaactcatctattctgctgaccccactgctggtgatggtgatagacgccctagacgaatgtgatgtggacaatggcatactactcctactc

SEQ ID NO: 26249 - DNA, 352 bp, Emericella nidulans
tggcccgagctagctcaaaagactaacgtcagcgacgaaaatctccgattcttcttggagtacgctgctcagttccttggtaactctggtaactataagggctttggtgactcgaaattcattccacgattacccctagatgcttttgaggctctagcttcggccacagcctgagaccaaagctgcgtttcaaaaggccaatacaactggtggaggcatttacgagacataggagcagtctcttatgcaccttggctatccagagtctgggcatatgacaacctattaccccgactcaccgtctatcaccaaagatgagattacagccattggggacttctttgagcaaaag

SEQ ID NO: 26250 - DNA, 531 bp, Emericella nidulans
atctgctgtcgtaatggataaacgaacagctgaaagtccgatggactttgagtggcagtccagagctcccggtgatgtgacttcgccattttaccagctcagcatgcagcatgacaatcagaagaagcgtgcgttcccactaagacttctcaatagactaaacttaccatcacaggttcacataatgtattcgagtctcccgagaaaaaacagatgcctgctcttcgcgagcccaactcccagcccttcctcttttcgcaaacgaaacccacagcacccgagacgccgaaatccgtattcgcccagcccgcgttcatgacaccgcggaaatttgaccttgacttctcttctggcgccgaaaatatgtcttccccggagaatgcagacaatgacgatactcccgagcagcctacgaagacaggccatcggaattccctttttggcatgtatggacgctttgcgccgagtccgggcagaggcgagattcctcgattgagccactattctaacgcagtagcgcgacgggttcaa

SEQ ID NO: 26251 - DNA, 369 bp, Emericella nidulans
ttctcggcggcagtcaatagtcaatactgacagagcgcagcatgggctaccgcatatagcataggctcgacaatcgacgagatccatttccggtccgagcgccaatcgctacgtcgactcccacggtctggggcaatcgtcttcactgtacggacatatttcgaacctatcacgacgatcgccagggagccccatgttcccggccgtctggcggaggcaatcaggaattgggacgagactgtgtcaaagtataaggggaaatcccattgggagcacattcttttgccgtatcttgacgagcagcatcgactgcagatagagtctggcgtcctggagagccagacagaaggcgaattccccttttagcgc

SEQ ID NO: 26252 - DNA, 534 bp, Emericella nidulans
ccacaaagggcatttgccatcttccttttcttctcttccaactccaatgcttgtgtagggccgttattcgcttcgagttgttgaataacgcccctcagagcccccacccctttctcaaaccattgaacactgtccttcccaccaagctcactcaattgagccagccaaaggaacttttcagcgccgcctccctcagactcagggatagaaccagttggatcaagctcgaccgcctgtagaaaatgtttccttgcgaggtcaatctcgcctaactcaacgtagatctccgcaatcgtattcaaacttgaaagctgcgcgggggaattggaggtcgcaatctcgagcgcctgctgggctatcgaaagcgcagcatcggcttgtccggtctggagaagtattgtcgcttgctcgagaagcttcctaggatcttcgttcatcttccgttttgagatcgagccgccggcgctcaagacggacttttcgcgggttttggaagctttcttcttgtgaggtctgggcttccccatggtatgg

SEQ ID NO: 26253 - DNA, 378 bp, Emericella nidulans
gtcctccagacgctggcgtctattcgaatctcgcaattaagagaggatgatgcgcgggcagcactttcaaggagtcttgagctgtggaaagatttgcccccagaagatccgcatgtccctgacttcccaacaagaatcagtctttctcgtctcctaatggaggtctccatgttgctggaggcgctagaagtactcgagcgcttgattttagaagacgaccagagtgtggaggcatggtatctaggaggctggtgtctccagcttttggccgaaataggcgaagctccaagagacccggaagccgagtcaaatgagacgccggagtctaagaggcaagaatcgcttgtggccagtagagagtggcttaaacagagttta

SEQ ID NO: 26254 - DNA, 543 bp, Emericella nidulans
actggtacggatcatactggatcgatatctccagggctaccagcgcctggagattcaattgtccagcgaagaaatgaggccatccaggccgcaacgcagcagccgactgcggacgaggggatgctgtctcaacttacaagcaacccttttttcacagcggtgaggacccccaaaatgcgagtttgttaagtgttaggataaatactgatggcttatccttattattagggatttggccttgcagggctcggtgtcggcgcaaggcttgcccagcaaggtcttcggcgtggcgcggatctgattcggagacggatgctcatcgatgtcgagatcacacataaggacgattcatatccatggtttctgaattggatgacacaatatcaacagtcgcagctcagcgcatctcggtcccaagccagcgggtctggtttcgtggactcgctcttgaccaaactcacgcccaggatgcgccaactttcagtcgatactaagacagtcaaacactcgaacggcgccataaacacccatttcacattggtc

SEQ ID NO: 26255 - DNA, 1703 bp, Emericella nidulans
  unsure (1)..(1703): unsure at all n locations
taccgagaacctgggatcaagctggatgctggggacaaattgatcattgaaagacttgcaagaattgaagggctcttacaaaccagcttagcagcacaaaactcacagcttacgttgtcttcgacttctcccgcaaccagtaacggaaccaacgttgggagcgacgacacggttgcgaaagcgtcaactcatctggcggtaaccgggagaactacttccattgtaggactcgcctcatgggcgaacccgccgacaagcatatcgaccatgccgagagtacacaccacgcctgcattgaaccttttgaaatggcccctgatccgggacttagtggctcgaccatatgattcccagacccttttgcagttggaaatggctcgcgaaccgctgaaaatgacacctcctatggccgtagatctatcttgtgcgccgctttatatcagaaccttctttgagaaagtcaacgtctggtacgcctgtgttaatccatacacctggtcaaaatactatgacgccgctgtatccctcagctttcgagagggtccagagagctgtgttgttctcttggttctagctcttggttgcgccgctcaatgcggcagtattgctttaatatcaaccgacagagatcctcctggcgtgccgtattttatagcggcctggaatcttctaccatcagtcatgatgcgtaattcagtcgtcgccgcccaatgtatcatcctggccgctgcttacttgttctacctggttcgaccactcgaggcctggacactactttcgaatgccagcatgaagctacaactattattcggcaacccgtctcgtgtgcctgtccagtggagagagctgagtgttagagtgtactggaacgccctactgtacgaaagtgatttgttggccgaattggatttaccgcactctggaatcgtgaattttgaagagctggtagatcttccgggcgggtttgatgagatcgaagatgatgaagacgaagacgacggcgatactggcaacaaactggtcagtcccattggttgcgacgaactctggttttttctagccgagatcgcccttagaaggctactcaatcgagtcagtcatatgctctatcagaaagacacagcctgacactggcttctctagcgccaatcgtctcagagttggattttcagctgtcncaatggtatgaaggcctacctcagcccgtcagatttcctctgtcccacgctcctatatcacatccagtgcagactgtcctccgactaagatactttgcctgccggacgatcatctaccgaccgtacatcctggctgtcttcgagaacgagcaagcttcaggggattcgtgggtgagggaatgttgccggcgttgcttggaggctacgctttatcagctggaaagcgtaaccacccatcgtgagggtcatctcccgtatttgtggcagggcgctctatcaatggtctcgcagtcacttctaatcatgggcgcaactatgtcccctgcgctctcaagtctactcccccctactttgcgcgtggacgaaattatatccagcgttatagtggaggtcgacaggtatgcgcatcttgcgccaagtctcaagctatcctcagaaatcctccgtgacgccgaaaggcggcgtcagatttgtctcagatcctcgggaagcagagtataaaaaaatgattttggacgtaggaat

SEQ ID NO: 26256 - DNA, 285 bp, Emericella nidulans
ggtgattcgcgagagcgtgccacacgcacgtttctagccgcgatcagtgaatattccgacgatgtcctcgctgtcctcctcgaaactggtttagtagatattttcgccgaggatgatattaacgagcggaactgtttacatgaggcggccatatctggccgcgagttcgttcttaaagctggcctcgaggcgggtgtgcaggtatctaggaccgatgtttacggaagaatcccactacattatgcttgtatccatggccgtgtgggcatggtacaacaactgttg

SEQ ID NO: 26257 - DNA, 234 bp, Emericella nidulans
agacgtatgaagacgttgcatcacatgtcaatcatgtcattgaacctcagtatgccattggctttcatcaagccatttacaccttcgggcatgcggtatgccagttcagccacgcccatagagcctgcagctgacaaagcttgagtttccggttgttcggcttcgtcggaggtgtcggctacaagtacaagtccaagttccttcatagttgctaccagagctggcacaacattc

SEQ ID NO: 26258 - DNA, 315 bp, Emericella nidulans
acctttcgtacttaccgcccccgatttaacaacaataaatcggttggacctggatacacataccaagcccccaacgcgacgccatcgctctcgcaacgccttaagactctctctcgcgaatatggatggtctgcgctctggatctatctcttcctctcggcgcttgatttcccgttctgctttgcggcggtgaaactacttggcgcggataagattgggcattatgagcatgttatcgttgagagcgtcaagggtgctgtgaataaggtttggccgggagcttttaaggagtcagaggagcagagcgaggacgag

SEQ ID NO: 26259 - DNA, 561 bp, Emericella nidulans
ctaacggaggcaacaacgcaaagtcctcgcccgtttgtcgttgggatcaggcatgccggtatccgtggtttgagcagcgtggtcaatgcgtcaattcttacaatggcgtggtctgctggcaatgcgtacctctatatgagctctcgcgctctatatgcactagcgatttccggtcaagcacctaaagtctttctgcgctgtactaaaggcggagttccttatgcagcagtgctcgcatgtggcttgtttggctttctagcttacctgaactgcggtaatagcagttctactgtattcacttggtttgtcaccatcactaacacctccggattcgtctcctggatttgttgctgtatcgtgtacctgcgttttcgagcggcctgcaagcgtcaaggtgtgcatgaactgccgtatcgcagttggctgcagccatacggcgcatggtttggcctcgtcttctttattgtcctagcactgatcaacggcttcaacgtcttctttcctggccagcttacagcgtcaagcttcttaactgcttatattggcttaccgcatttgcta

SEQ ID NO: 26260 - DNA, 300 bp, Emericella nidulans
agagtatctgtgccctgcggctgaaccgtcgttcctggggctgtgctgacaaggccctttgagacggcatagcacgaggaacgatcgtggtttgaatcctcgttgtagtattcgtctaaaatcgggtgaagatgcacggtttgcttgtgtatcgtgacaatcgagtttgccgggacagagacccaattgtctaggatccgcgttagttaaaataatgcaaagacaaggaaagcagacgagtaggtaactcacgcctttaaacgtaatcggctaactgccaccagcactatatccggtcct

SEQ ID NO: 26261 - DNA, 662 bp, Emericella nidulans
gatgatgaagacatcgttccttttccctcgaaaaatgcgggcactgccccttccgcgtttcacagttcctccaatacttccagcaacagcggagctgcaggactgcaccttccgactccaccatctagcacagactcatactactcacttcaaccggatcagaagtacagggctgctcatcgcgccaaatcgcctctcgcaacgcacgcggtcgacattactggcagccaggaggcgatgagctgggattactcggagaccgagtggtggggctggataatcttgatagtgacctggctggtctttgtcgtggggatggggagttgctttggtgtttggagttgggcttgggatgttggggagactccttacgcccctcctgagttggaagatgacccaacccttcccattgttgggtactatcctgcgctcattgtactaacggcggtcatgtcatgggtatgggttataattgcatgggtgggcatgaaatacttcaagcacgccaacataacgggggatgacacatgacctaatgaagaacattcttatactccgataaacctacctactgcaatgaacgtgtcgacctaaataataacaccaaaaaggctgactgaactactctaacccgggatagcgactccaacaccagtgactcc

SEQ ID NO: 26262 - DNA, 390 bp, Emericella nidulans
gtcacgcagcagatattcactaagaccatgaccattcaggtgtggaaaccggagtatgagcgccccggtagacacttcgtatacacgacaagatatgcatacttcttcgtcactctacttgatcagcttgatgacagagctaatctcgagcaattgctacgtcgtgttcgaaaaaagcaaggcgatttcatcaatcatactaagttatgggaggatatgtgtctaacctacgcccgcgtcatacgtagagcagctgggattagtgagggccatgaagaaagtgtcttcaaaccgatagggtgggaggagttctcctccaacaccgcccgtctagaagagcttcctcacgttgcgcctgaaagtccgtcacttctcgagctcctccgggac

SEQ ID NO: 26263 - DNA, 533 bp, Emericella nidulans
aaacataataagatacctgttaatgcagtcgcagaatgcttcctcttcggcttcgttgtgcccatccttccatatatgctcgagacgcgcctccatctcgacccctcgcgaacccaacacttcaccacgacactgctgaccatttatggcgccgtctcgctcgtctcagccccattcatcgcgcactttgcggataagacgccgagcagaaagattccactgcttttgtcgctgtccgcgtgtgcgtccggaacggttctcgttgcgtgcgctaagaccggtacatctatacacatatcctattgcttcaacttggcgaggctgataaagtacagtatggttgttgatggccggtcaaatcttgcagtccattgccagtgcgtctgtgtggattttccgttcgcgacactctcgacaatgtcgacgagcgtagcaagggaaaggtcaccgccacggcaatgtcctttatttcaatgggcattttcgctggccctatggtgtcaggatttctgctggagttggtcggctactgg

SEQ ID NO: 26264 - DNA, 558 bp, Emericella nidulans
gacatggagatcaggtcgacatcgctatactatgatcccaagtcaattagagcatggagagccacatgccgtttgatacgcgaagcaaggacagatgggaagccctttccagagctcccaaagttaactgaccacgaccacattctcctggaagctctggggatggcttcaaaagaagccttccgcgaagcatgggaccgactgcctaaaaacgatcaaggcgctcactggcaccgcctgtcgctgtggttattgtgtcacttccccagccttgtgccggattttctaaaaattacttgccacggaccatttttcaagcccgtatttgtggcagtcacagactgcatccagcatctgttgcgtttcttccctgacctgctggatcgatcattcatcatagacctcatgcacccggatagatggcccgtccttctgatgccccaacggcctgtccgaatctacgtcgcgaatgccgatcgcgattctgtacactatgcctggaatctggcgcgcgaaaaaaggatacacatggcacctaacacaatcctatccttcatg

SEQ ID NO: 26265 - DNA, 315 bp, Emericella nidulans
ggtgtcgccgacggttgtatacaagcagggtgcgccctcatcgggggcgaaattctttaaatgcctggcttgttcatcgacgacacctactacgccgtcggtgccgccgttggtgcaatcaacacctccggccccaacgcacgcaccatcctacccgacacatgatccatgaaggcgggtgatgttctcctcgccttggcttattcgggaccccactcaaacggctactctctcgtccgcaagatcgtaaagcgctccgggctgagctacaatgacccagttcccttagccatgccctgttgcctctcctccgag

SEQ ID NO: 26266 - DNA, 512 bp, Emericella nidulans
ccccaatattctctgaacaaggacttctcagatgttcagttatccgaaaagtggcaggtcctcggccccttccaatatgggacaagaggttcgtcttcatacgattaaatctactaaacgaagtaatatgccaacgctatctttaaaccgacctagaagccatttggggggcagatcccctagagtaccggggcggatttcgaaacgtatcctttgatgaagaagttgaatatagcagtcctctttccacagacggattcgtgaaatggactcatgttagggccaacatcacgaataccaatgctgaacagagcagagcagagcttgctgtggccttccctcaagtagattggggattacttcaggctgtctacgggtggtctgcgttgcaatatcaggcctggacgcgcgggtatatgtacttgaatgggtcaaatcatcaagcagtcgcaattttcacggaaggtattttggagctatcaattgacggtcaacggcacttcggtggtgat

SEQ ID NO: 26267 - DNA, 249 bp, Emericella nidulans
caaggccgcgctgtacgttatggttagtagagaattaagcaaatgtcactcagaaggggtgcgtaccgggttgacctcgaggtaccagggctcgcgcggggtgtcgaggtcaataatcacctcctcatactcgagaccaagctccttgagggcgatatgagcgcggtgagcccaggggcagaggtggtttgtgtagaggatgatcttgggggcggccatgttgtgctgatagacgggcgtgatctttca

SEQ ID NO: 26268 - DNA, 417 bp, Emericella nidulans
accaaacagttgtgggactggtattatacgcttacgcgccttatggacccgttcgactgggccttgtattataataactataatcctcacctgtggacgattcccgttgagttccgcagctctatcgttctcttccttacaattctcgctacagcgcgcgtgaagacagccgttcgtatatccttggttagcatgttggtatggttctgtatgcgctatggccgctgggatgtcgttcttttcctgggcggtatgcttatggctgaggccgacctaatccaaggtctttgggagacatgcccatcttccggagaggctggtgataaagagaaacgcagctggaccagcgctgccttgcctcaacgccaattctcctttcgcttggtgaatcgcaagcgctggatcgctcttttcatc

SEQ ID NO: 26269 - DNA, 486 bp, Emericella nidulans
agcccctcaggcgtggccacacgactgtcagaagggaatctaattgtgattacctgggttggtgctgggctcggggcactcttcacgttgcttcgtgtggccattcgtctcacgcggatgagacgtcttctgccagacgattattttatccttctagctttttcatttctcatcgcaaacgccgttcttcagaccatacagattcctcatctgtattatattatcctaaaccccactggaagcgatattgcgccccatgccctcaagtatgtgcactacatgtttgctattattgggctcttctggtccgtcctctggagtgtcaaggctgcctttctggcacttttctgggccatgacaaacaaccttcctcattatcgtcggtggtggtttggtattgtcatcttcacgtttgcgtcgtatgctgggtgttggtttgcgtctgccttcacttgccatcctccgtcaacatacttcaaatttggt

SEQ ID NO: 26270 - DNA, 588 bp, Emericella nidulans
aaaagcaaggacaccgaaagggcctggaagatggatggctgggtacgctggcttgaaggtctacgagcaggttacgaacaacgcatgcagcagatgtgcagtggcctggaggagggtaaatatatcgcactccacactaggtcggatgagttctccttgagcgggaatgaagaagactcatgggaggtcttggaaaaagtacaaatgtacgacttcgcatggcccactggcggcatgttcgtctgggttaaagtaaactatgagagtcaccccttacgtcagatatatggacctgagaggctctccaaagcgctatgggtgcatttcacccaaaaaccacagctctgcctccttggtccaggcaccatattctcgccgacggacgaggtacaagctcgtggtcatcaatacttccggctgtgcttcgctgcaatgccggcagatgatgttgtccccatcactcaacgagtggtcgatggtttcagatcgttttggcagagaaagaacttagacggacttgaaggtgatgacggcattgcacaaacgatggagcagctgcagatggaaccatctgctaattttctggga

SEQ ID NO: 26271 - DNA, 546 bp, Emericella nidulans
tcccttctgaatgttgttttcaagactttcaaatggtcaatacttgcagtggtgcctccgaggctgtgtctgattggattgacgttctgtcagccactccttctccacagagcaatggagctctctgcagaaaaggtaacaatcgagtcaacacatgttggatacgggctcattggtgcttacgtcttggtatatgtcggaatggcggtatgtcgagaaggcagcttcctttgctctaatttgagggctaattgtgataaaatccagattatgatgagtcaacaacagcatctcacgtatcgcgcaattactatggtccgcggcgcagttgtatccttgatctataaaaaagccagcatgctcacaatcaaagatgctgatccggctgcgtctatgaccctcatgagcgcagacatcgagagaatcgtccaggggtggcaaacaatgcatgaaatctgggcgaatgccactgagattgcactcgcaattattttattggagaaacaacttagtatcgcctgtgcggtacctgtgggcgtgtctatc

SEQ ID NO: 26272 - DNA, 504 bp, Emericella nidulans
agggaaacttgggcctgggacgtcaaaacaaagcatatcacgtacgaaccggttcccacaattgacaatcccttgggaattgctaactacggaccgaccgccacccttttcacgctcggtcctcaattcaccgttcagcaatatgacctggagaacccggcaatggtggcaaacgtgcagcaccctcccacgaactccatgaccgcagctctggatcagatgagagctagaacgaagtccccacgcacattgcaggatgccccggagatgcgggaatcgggctcgtattcaaggcgtcgggccccctttgattccagtggtatagaggctgtaaagcaacaacgcgccgagatgagcagccctgaatcctcccgcggccgtgcagcctccgtcagctcaaaggctttttctgacagatacaaacccccatactctccccctacaagatcagcgcataccgcaacctctttctcactaacgtcagccggggcgggagagaaaccc

SEQ ID NO: 26273 - DNA, 231 bp, Emericella nidulans
agctcaacagctgatctggtggagtgctgggcgctctacgggtactcgaatttggtttggattgcggtcgcgcttgttagttggagtccgttgacagcgttgaactgggcgcttgtgggggttggctttgcatggacggtctttttcctacttagaaatctgtatcctgtgcttagtgcgacggatgcgaaggctagtcgggcgctgttgatattggtcattgtgttgcat

SEQ ID NO: 26274 - DNA, 477 bp, Emericella nidulans
agcagcatgtcgatatccgccatgctaggctcggacgctgaccgaccaccgcgggatataggctcgtctattttctcgcgtcttcccgcttcctccggcccgttcggcagcgcgccgccgccgcccgcggctccaagtgccatgtctcctcctactgctcctgctcgacctgcgcaacacgattaccccctctttcgccgatcacagacccctgaaaagccgtattcgaggaacaatcagcctagcagaccgtatcgatcgagctctggcggcggccctccgacgacggctgccgagcagcccaaatacggcggtctgtctcgtctaccgtccgcgccgcagtattcgggtaagcccagctatgcgcacccgtcgccgcaggttttcccggccgagccgtcgtataacggtaatgagactcgtcggctgagctttagcgggccacccggaccaattagccagccacaacaccttgaa

SEQ ID NO: 26275 - DNA, 351 bp, Emericella nidulans
gcaggagcattctttacaacttacgaaaccgtaaggtctaccctcaaccgaactaagcaagcttctgccataccatttcttcaatcagtccccgcacccgcgataaacgccatctcctcatccactggtgaaatggtctcctgtctcctccttacacctgccgaagtcatcaagcaaaatgcgcaggttatcaacaactcaccaagcgccaacatctctgaaaagctaaaacaaggtggaaccagcgtaaccctccaagttctcagacgcttcaagcagcaaccttggaaattgtggagtgggtactcggcgcttgtaggacggaatttaccgttcacagggatcaatttc

SEQ ID NO: 26276 - DNA, 540 bp, Emericella nidulans
atcggaggcgtgacacccaggcccgactggggctggttggccaaagcggcaggattgcccatgttcggcgaggactgggtgttggcgaagccaaactggaggctgttggggcgacctgtctgcgccctagtgctagggttgtagtctgcggtgatggtaaccgagggcttctttgagtggtcgccttgaggcacaccagaggccggggcgccattcacaatggtcgggtttgaaggttgctgcatgggtttgccgctcacagaagttgaggtcgacttcccatgttgcgatgagccacccacggtgacgggagcggcggcgctagagtccgtcgcggacttcttagtcgcgtttgctaggaactaggcaccgcggtcgatgtcgaggtcggagcgggaaccggcgcctgaggcgaggttttcccactgagcgaaggggtggaagagtgcgaggcggcctgagctgcggtactctgtccttgaggttggccggacttctgagggatcgagctcattagacaggcgggtcggtcgagatggg

SEQ ID NO: 26277 - DNA, 1022 bp, Emericella nidulans
tctgttacggagcaccctccaacgctggagcaaattgaagcagatcaagacgaatatgatcgcctattcacagcaaaagtggactctttcgatgttccaacgacaactcggcgggaactgtggtcctattacctttattataatggtagacatggacggtgttaatggtgcccttacagtactgctactgatcgactctctaacatctaggagacaacggagtaggccctctttcgtatacccaagcattgtaaggccttgtcccattcttgtacaagcattcttgaccgtctaggtttcaatggtcccttaacggcgccggctggcaaccagggaccacgccccggcaaccctgcaccgattcgtctccttgcgtagtcccttgggccggagggacacgaaccgtctcctcgattgtgttgatagcaaatggcctcagcttcaccttcatgacaataatctttgtctggctcgggagtgccgcagactacggctctttcgggcgctggttgctcctcgctcttacagtcgtttgctgggctttgcagtatgggacgcttgctatcagagagccgactcagtggcccgccgctatggggctgtatatcgtgacgtatgttgcgtatggcgcaacgctggtgttttatgccgcaatgttcccgaagcttgcgaggtatatgccgcatgtcaggaaggcgagggaggaggatttgagagaggggaggatcgatcaaagggattatgatgctgttgagtccttggagaggaatcatatttcgtgagcgtggttctggttcttgatattgatgatactgatgagaaaatgcaggaatatatccacagcacatagtaatattggctatttggccgtgttgcttctcaacctaagtgttctattgcctatgcagggcaataactatgcgaataatttagccatctgtctgacgaactcgtgtgcgcaatcttcctgcttgggtacttaacctgcaactaatatagcgtcagattgggttgtcttgggg

SEQ ID NO: 26278 - DNA, 907 bp, Emericella nidulans
attcagtcaaattctggttgctctttagaagcatgtttacgtggtttgattctctaagcgcacattgatttgagcccaccgtcatgggcgatacagtccggacagatgtcctgatcgtcggggccggcccgtccgggtatgctactctgcctgcttccctttgctctgcggaactacgtagttaacagcatgtactaactgtgagtgaacaggttgatggccggagtttggatggcccagatgggggtgaacacgatgataattgatcaaaagcacaatcttacgcgatgcggtcgagccgacggactggagagtcgaacattagagattctggacagtttcgggctcgcagataaaatctggactcaggcaaaccacactgtggagattgcgttatgggtacagctccccaaatggctctcgataggaaacccactgattcgagctctgttatgttcagggcgctggagccgatgggaggttgcaaaggcagagcatcaccgcaaattccaagcctggatggtcccggttctatgagtccacgcttagccagggccaagtagaagagtatctcatgcaatttgtgagggctcgaaagcacgtcgaagttaggctggaaacaatccccacttcgttggagattgataacatgacgatcgaccaccacgatgcgtttccgtttcgcgtcaatttggagactgcgccatttagtccgcagtcttcgttcgatggcgtggctactccgaacagcgagctcagctcgggacagtctgatgactcggggtatgcaggcatggggacaatggttgaagccaagtacattctgggctgcgatggagctcatagctgggtcaggaagcaactcgggttgaaactcgagggcgatacttacgacagactgttgggg

SEQ ID NO: 26279 - DNA, 333 bp, Emericella nidulans
cagagactcttgcggcagtatgagggttatacactgaagcaaatggcggcagaagtactcaagcatgagggatgctggcggaaaggcagaaaaggtatggtaacataatcatgctcccatttgctgaatcttatacgccataggttgaaggagaactgcagaaaaagcacaggctctgtccgcagagatcgtgtttactgctgttatgccgaaaagtgtggaaccgaacgtgtctccgtgctgaatcctgcgtctttcgggaaactagttcgaatcatatttccaaatgtacagacgcgcagattaggcgttaggggggagtcaaagtatcac

SEQ ID NO: 26280 - DNA, 569 bp, Emericella nidulans
cttatagaggctggtcgaagagggtccaaaaggctaagagaaactttctccagtgacctctcgctcactgaacagaatggtgcaagcctaaagttcgtcaataaaaaacgcatatccccgagtccgggactagctgatggaacttcaagtgcccttgcaaatgggcttgtgaacgtgcgtcttcttcttaaggaactgccgctctttgctggccttccacccgacattcttcactttttgggtctcaatgcgcagctcgatcattcccgcccttcaccgacatcatcaaacaggactctcagggacgcgaggtctatttcatcgtccgcggcgaggtagaagtcttgagcgagaagaaagacccattgaacgggcgacgacccctacccagcaccattgagtatcccggcttcgaagtgaaggcgcgcttgaaacagggtcagtatttcggcgaggttgtgagcctatctctggcgcctcgctggactgcaaccgtacgctctatcaatgctgtcgagtgtctgatgattagcggtgaggttttatctgaattgtgggataaatgcccc

SEQ ID NO: 26281 - DNA, 276 bp, Emericella nidulans
accctcttcattctatgtggtgatcatggaatgaacgatgctgtgaatcatgggggttcttctgcaggcgaaacttcacctgccctaacttttatatctccgaagcttcaaagcttgggcgctggcagggaaagtcccgtgaatgcgacgcatgaactacagtactatagtgtcgtggatcaaaccgacattacgccgactctggctggtcttcttggactacctatccctctgaacagcctaggtgtattcatccccgaatttctaaatatgtgg

SEQ ID NO: 26282 - DNA, 347 bp, Emericella nidulans
gtacaggcagccgttgtcgccgaagacaagggtttgataacagactcggtcctcctgtaccaccttgccgaagattatgatcgtgtcattgatatcataaacaggacactgtctgactccgtggcaactccccttggaagccccacactcaggctgcagcctctatggcctcgcactaacctgtcgcaggaatctggacaggagacgccaatagagccaggcaccagcctgagcttgactgtataatcggcctctacaaccagaatgctctatattaccagcgcatccgtcgatcaaatcgcgacgcatgtggtgttctgcttcgaatgatggagagaggatatgtt

SEQ ID NO: 26283 - DNA, 361 bp, Emericella nidulans
cgcgcgccgcataatacgactcactatagggatctctcgccggggatgccacaagggtcgctgcacggcggcgcaattgatttcagcgcgctggcgaaggacggaagggatggggaatggagagctggcccccaggcacctccctcgctgcatgcagtgaaacacctcaaggtatatagcccgtcctcgacattgttacccaagacggttgaggagcgtgcggggcaggtcgttgaacagtggacgcagttcgcgcctggcgggatgcccgcgcggtggtctaatggcgctggtgtgccttgcggatatctttcctgcggcgttggatcggatgggggcgatggaggcaatgagacttctt

SEQ ID NO: 26284 - DNA, 591 bp, Emericella nidulans
tatctcaccactatggccgccaacccacaaacctatcaacccataataagcggcccaggagacatccgcaccgcccaaaaaagacgccagatctatattcgcccgttccttctcttctggctcgcctcgttgctcgccgaaaccgtgtttctggccgtgggcatcttcgtcatgaccggcacgcgcgatctcgtctataaagtcctctggacgctcgtcttctgcccgctaggcatgggcggcgcaatgggcggcctgatcaatgtcttcatcgtcgaccactactacggcaccaaggcggcgcacttcacgggggttctcgccttgctggtccttagctcatgcaattatctctgttataatctggatagacatttcgggtggtttggcgcgtcagagcatccgatgtggttccattggcggtatccaatgatctgggcggttgggtattggaacggggtgttgctgttcacagatggcggccaggagaggcttgcgaggatggggttgtaggtcgatgagacaggaccagatctcgtacggtagtcccggtgaatatacggttggattgaaggatgcctttgcacgtgg

SEQ ID NO: 26285 - DNA, 549 bp, Emericella nidulans
attgtcagtactgctcaagagcttatagcaagcctgctgtatcagcctgatcactagcagtggctggccatcctgtaggattagctgtttaataatccaactaagggtgcagccggctggagcttcctgcaggatgcttgtatgctgtagcctgtagcagggaagacatagctggtcaaccagatcagtactgaactggctgttgctcaagcctttattacccagggcactgtcagtataaacaaggttcagaagtactttcagcaggtcgcacaattcaaagaaaagctggcagtagctgtgcaccttactagcaaggtgccagcatacatgcctaagctgctgagcatctagtatattaataccaacaataactggcatcacaacatctttattgaggacagccttgtcatgtttgtgacagtgtattacaaggggttttatacaagcaataatatcaagatcatctaccagtacctgcctcgcgaagtgggcaagcttattatatagtacttgtggctggtgctgctatttgtgcgccagcttgca

SEQ ID NO: 26286 - DNA, 334 bp, Emericella nidulans
agggtatgggcaaatttcaagaaacacctgctatatgccccaattggcacgaagagacataaccgtgagattcagctcctgctgtgctatcaacgtgggcacccttccgcgttgataccagacgatcctgagtgtgctatacgtcgcgagccatgatgcttactgcgctctgctggactacgatgagaacgacaaggccgccctcgtggcagagctacgaggtcgaccggcaacgctggccgctctcaatatggtacctttgttcatccttgctggtcgcaacaacccgtagattcccttgctgcgcatgagattagacacctacaacctactg

SEQ ID NO: 26287 - DNA, 510 bp, Emericella nidulans
ttcatgactgagatgttttcgaccttgtctttccagcaaatctctcgcaaggctctggaaatatttactccagtctttacccttggccagggattgaccaaacaactgattgagaacactactgactcgctgggcgtgctgatgtgcgtacggctaaaccaacaagctgccttcgaactccagcggcgcagagtccctgttgcagactcgtacatcaacggaatcaacatgcatctgtggcctcggtttcaagtaatcatggatgcccattgcgagtctcttaaacggataggcgccaatacaagccgcagtgcggtatctgccctgtctcttgcgggtggtgacgatctgaatcagtcatctgcaccgcatttcctcacgcagcgctttggacagctgttacatggcatacttgtactgagcagtgaagcaggcgatgacgagcccgtagccaacagtttgtctcggttaacgtcggagtttgacggtttattggcgaaactcagtcgg

SEQ ID NO: 26288 - DNA, 715 bp, Emericella nidulans
gcaatcacggagcgcaagcgctcctatttgccctactcagtcaagttggcgggccttcgctactcccagtcatccttcttgcaccctctcctgggccccaagttcagggtcttctgcgggggagacaccaggcccccctaactaggctgtcataaacacatcgaatctggcacacggtcgcccatcggtaatgccaggcccttgcgaggggtctggctaatggatggaggagcaacgtttctcgggactagttaacccatcctcgttattgtgattggacacgacacgccgatactcgagacatctcggtgacattgaccgtttgaaatcatactgtgcaggctcagaagcggccttcccgactacataccagtttactccactagcgaattgcacgaaaatgtccgagtccgcaaagtcggagaagttcatggatctcaccaggttcagcacaccggtgcctgaactggatgaccatcggttccaattagataatcaacatcgcatggaagcgacactggatgtgactttgagccgtcaaaatactgcgcagcaagggatagcagaagtaccccagcgccccgacctacttcaagtccaggatgcctacagagattctggaccgtttttgcgggacttcgaacacgctattctggacgatgatcggtcggcgaaagacgtgaatgctgtgggacgccgagtatctgtcgatccc

SEQ ID NO: 26289 - DNA, 414 bp, Emericella nidulans
cccatcaacccagacgagaacatgggaatcatggcctattttgtccaacatattcaagttcgcaagcaggttctccgttatataaagcatctcgatacagctatttcaccatggcttccaaactcagaatttgccatcctagacaaggcatgttggaaatggtacgataatctgccggagagtttacagtttacgacgtccacaatttacgcgcggaaagcttcttcccaactaggagcactcgtcctcttacactgctctcactatcagaccctgtgtgacctatatcgcctaggagccccagctctgtttaagctgcgttccgctatcgattttccaccggagcagagcgagtttctccaaaaactgcggggggatttgtacaacgcagctagaacccttgctacaatcatt

SEQ ID NO: 26290 - DNA, 494 bp, Emericella nidulans
ttttgtaacccatacctggccgacaaaccaccaaagcgagttctagacctggcctgcggctccggtctttggtcgagcatgtgccatgattatttcgctcgccgcgggcatcgcgatgtggctctctatggtattgatatagtgaacgtcgcaccggatcttcgcaagaatggcgtcaattggcacttcaagcgacacgaccttcgcaaaccccgcttacccttccccgacgattatttcgatttcgtattcataaaggatgccgccatgtgtcccctgagcccggcgcagaggcacaaggtttggccgaacccctcagagtgctgaagtccggcgggattctggaactctgggattccgattcggtttttcgctcgctgcttcccaatcctgcaccagctcgcaagttagcctcaagagaacaagatacggcagaggcgactgcgacgtacacattttcatccgcgactcctttcacaaatgctcaaaacaaa

SEQ ID NO: 26291 - DNA, 306 bp, Emericella nidulans
accaacttggctaggattattggcagatgcttgctgctcgggttatcgcgccgcgagaagctcgagaaatggcgtgtatctggcggagcagacctcggtcaatgcgttgagaacgtgatgagacaagcagaaaatcatattgtcagcggccaagaggtgactgtggaggagattgacacggcattgaatatgatcacttcgcgatgccggttttccgggccaagtgtcagaaggcagcgttcagcggttgatgtagaggagacgctcgctcctctataccgtcggctcagtagcagggacgccaag

SEQ ID NO: 26292 - DNA, 465 bp, Emericella nidulans
gagcctattctctggcttcacggaggccccggagtgggcaagtcatatattgcatcaaagatcatcactgagctctctaaggggaagttgtctgtggcacaggcacctgtagttgcatcattcttttgcaggaataataatatagacttgcgctctataaacaaggcactgcaaatactggcatggcaggttgtgactcagcaagtaggctttgctgaatatgcagaggagttttgtctaaaagaggatcctgataatacttatactgtgtggcgaaagcttttgctggactatctcaccaaggttctattgcaggggacatgttttattattgatggtctggacgaggctgaccccaaggagtaggagatcctatgcagtcttcttggaaagactttctcagaatataaccagagtctcccgctgttctggattataatattgagccgagactccctgaacacc

SEQ ID NO: 26293 - DNA, 511 bp, Emericella nidulans
gtcatgccgccttctcgcgaggctttggtaaatcgcggggatgaagatggtaagctctgttcccggaccatgaggctttaatccatgctaaccacgtccttcctagaggtctgccctgtctgcaaatcctcgcggtatctgaacccggacatgcgattccttataaacccagaatgctatcataaaatgtgcgagtcatgcgtggacaggattttctccggaggcccggcgaactgtcctgtggccgggtgccacaagacattgagaaagcaacggtttcgcaaacagacattcgaggatataaatgttgagagggaggttgatatacggcgcagggtaatgactgtgtgagttgttctcctgtctgcctcccccctgagtgctaaccatgcttagccttaaccgccgagaagaagagttcgattccaagctagactgggacaactttttagagcagagagaggagattatattcaaccttgtcaacaggattgacgtcgcgaaaactgag

SEQ ID NO: 26294 - DNA, 346 bp, Emericella nidulans
cttttccatcgatgccacattggtcttaacgtagtctattcgcctcgaaataaggtcgataacttgttgtctggttcgccgacagcttgtttctcaccaataatcactcgaaactcgtcttcgttgacgaaagtcccccgaatttgcggctgactcgcaggaaatcgtttgttgtagcatcgttgcctaagtcggcgattccttctttcagcccctcatattccgcttcccatgtcctccagtggtaaagggattgttgtagttgtagaatgttgctctcgagttcgcgacgctggcgttcgagcccttcaatactgctgtccggaactcccatttcagattcaga

SEQ ID NO: 26295 - DNA, 1015 bp, Emericella nidulans
caaccgaccaccatgccacgaaaagcgcgtaaaacaaaacaagaattgatcgagcaagagggcaggatccaatgcgcgataaatgatttaaaaaataaaaaaattcccaatcctcgtcaagctgcattgatttacaatctacctccctaaaccctatatgatcggttgaagggactttaatctcaagcagaactccgcaaccacaggcataggctatccctgcgtcaggaagaggtattggtagcatggatagtattacttgatatatgtggagcaccccccaggcacttccaagtacaagatatggcacaaattatcctggaagctgattcctctaccccccctcaactggtcggaaagaactgggttacagagtttaccaagcgccgcccagagattaaaagcaggtttgcttgaaagataaatcgccaaagagctctttgtgaagattctaaagttattggtaaatagtttgctgagttgcagagggttaaagctcagtaggggatccaggatgaagatatctacaactttgatgaaactggctttgctataggacttattgcaacaacaaaggtggttactagagctgaaatgcctggtaaaccatggcttattcaaccagggaacagggagtgggttacaactattaaatgtgtcaactctatggggtggtggtcagttccctccactattatcttcaagggaaaggtctatatagagggatggtttgacaaagaagcaatcccaggcacttggaggattgaaacaagcaccaatggatggacctcagatgagatcaggcttcgctggcttcaaaaagtctttattccagctacatacagctgttctaggggggggtatcgactccttgttctggatggccatggaagccacctaacacctgaatttgatcgtacatgcaaggagaataatgttgtgaaatatctgcatgccttcacattcatctcacctcttgcaacctcttgatgttggttgttttggatcccttgaa

SEQ ID NO: 26296 - DNA, 739 bp, Emericella nidulans
atcatgggcgacgagattgtcattgataaaacagccttcttcaatcgtctctcgagcttctatgcagcatggaaggcagacaaacgatccaccaactctgtctttggcggtgcgggatctatcattatcctgatggggaagacggatgaagcaaacagctatcaaaagaacaatgctatacatgtatgctgcttacgtcgtcggttacttattatatctactgatacttttagttttggttactcggctacgaattcccagctacacttttcgtcttcacaccggaggttatgtacgttgtgacaacagcgaagaaaggtatcacctgatctgaacaaggaatagcccaggaatcctctctccctaacttcatgacagccaaacatttagaacccttgaagggtggaaagatcccggtcgagattctggtaacgactaaggatcaggaagaaaagacgagattgtttgaaaagtgcgtggatataataaagtccgctggggtatgttttctatcatgtccagggatcaagatgaccatgcgtggttcgttaacttccgacgctaacaagctatctgccaacagaataaggttgggatcttaccgagagacacaaccacaggtccatttgtggaagactggaagcgcgtatatggaaagatatccggcgatgtagaagaagtcgacatttcgcccgctctttcagccgcatgcttttcggtcaaggatacggatgaacta

SEQ ID NO: 26297 - DNA, 506 bp, Emericella nidulans
gaacaaatgcatacgaaactgaaagagaagttggtatcaagatgcttcgatccgttcagtgtattcccgctagaaatagccaggatggttgtggattattttgattttaggcagattgtgtaagtctgccacggctataccgttttcacctctgaccggatagggctattttgcgagtctcgaaaggatgggaccggtttctttcctctatgcgtgatttattcatgcgcatagattttaccggagcccgctgcaagattcactggtcctctgttctcgcctatattcgtcgttctaaagcgatgctcactcatgccatcttgacaaacctcaccaaagcctctatccataggagtctcgagtacatcagccgttgtcccaacctccagcatctcgagattctatcaccttcatcaccagaagccatttataacctcttcaagggctcaaagaatctcaaaattcttctagtctctgcgcagacaacaatcccgcaagcaacaatc

SEQ ID NO: 26298 - DNA, 473 bp, Emericella nidulans
atgaatcccaactacatggagcataaatttcctcaaatcaagccacatcccttcaacaaggtatgatcacactaccccgcacttcctctccagtgattccggtttgacttgggagcctaggtcttccgaaaagcgccacatgaggctatcgatttgatttccgcgctgctagaatatacgccaacgcagcgtctttccgcaatcgaagcaatgtgccatccctttttcgatgaactccgggatccgaacaccaaactacccgactcgcgacaccccaacggtgcagctagggatctaccaaaccttttcgacttctctcgacatggtgcgtttgagctccggttttctctctaggacataaacgaactatttagactggatgctgacagcaggctacagaactctcaatcgcaccttcaatgaacagtcggcttgtcccaccgcattcacggcctgcgctcgaagctcgcgga

SEQ ID NO: 26299 - DNA, 620 bp, Emericella nidulans
gccccctggatcaatcccgcccactcacctgttacagcaatgcagatggctcaacaactgcccagtagagcgttcaccctctggcaccatatcccccgcttcataatccaggccagcccagtgctagcatcgagcggcgccgctgtccgacagatatccatgatatcggggagtggcagcctcaatcagacggaagtagaccgctcgttccttgacgcgaattggcgtcgatttgagcaggactacggcgtgcctcatgggcaacaggccgagctggctcgcttagccgcccttttcatgttctccgagaacaccgtcggcgcgaatagcgaggctttgcaatgtttgaggaaaggggctggtgcggactggagagcatgcactcactatgcgagctttgcgctgatgatatcttctatcgagcagaacgccggcagatgcgttagccttcaggcgtacttggtgggtaaccgaggtcaaaagtaccttgaagagtgctggcgtgcacagggggtagaggagggcgttggatttgtctcaatacagtcgatggaactgatcatgacactgtagcacagtcagtggatgtgtgggaggcggtatttactctcgtgcagcaa

SEQ ID NO: 26300 - DNA, 740 bp, Emericella nidulans
tataagccgaaccggttctgccatccatcggtgcgtgggttcaggatgatgcgataaggaaacggattcgattcggtcgtggtgatgggggggatatgatctttatcgcggttgacgacggctagaatcttgagcgcagccttttgcagcatgttctccattgctttgcggacctttgcgcgttctagtttcgggaacggattagccaggtgattcatattattgatcccttcgacataccagattccgtccgtggagtagcaactgttacatctaaattccatacctcccagcaaacttcgtcttccccctttcctgctaacgctgggaaccacatattcgagcgcctgcgcttcttttcgtagaactcgacggcaatgcgcccgcgcacgccgtttgaatcatgcgcacccgcggccgacgaggagtgctgccgaactagggcgctgatacgcgagtcaatcagggtgtctaaatctacatcgttgattgctgggagtgtaaaatcaaggacgtcaaatgtagttgggcggattgatgggaagtatcgatggaaaaagattaggttgaggacgcctaaaacgagaaactcagtcagaaagaagatcgtaactttaacatagcaagactcctgtcaaatgtgacatcgccgaccttttaacacgtctctgactgtagtcgtgtctgcgaagatctctaggaagtattccggaggggttttgcggggctccattctaact

SEQ ID NO: 26301 - DNA, 611 bp, Emericella nidulans
caccgattccctcttcgctccaccatgatcagtgctacgaggcgctggttcaggcgcaatcgcaagaccctcgcaatcggcacaggcgtcatcggtgtgggctacctcgcaggtcaatatgtactaggcaagatatcagaagcacgagaacggatgagcagtgatcgtatcgcccgtgagaagtgcgtagattatcttctatctccctctagtcgcgtgctcaaagaatgcaagctgactctcttgccttaccatgcagcttacggcgacgatttgaacagaaccagactgattgcacatacacagtgttggcgttattgccaactgcggcggaggatatattggaggctctgcccgtggaggaattgacaaaggagttgcagaagaaacgcgctgagcggctggctcgtctcaatgccggggaagggacggcgacagggtcggatatgagctctgtggcacccagccttctagaggatgaccgaaaaagcgtatcgagtgaatcgtttctgcggacaagccaacttggggactcggcagttgacgaggatgcgtcccagccgaaacggaacaagacacagctgtggaacgaggttaagattacctgtacg

SEQ ID NO: 26302 - DNA, 594 bp, Emericella nidulans
gccattactcgggcgtttaccctgatatacactctatccctattgacaatcttcacgcgcgtccaactaaacctcctcggccgccggaattatctctcgagcgtgatttctttagccacgcctgcggactcctcgagaatcactttagaggatcatgatgatgatttgacgcaaacgctggggaacgacttcgagaccaaccgacggtatcttgcctttagctggtggctgcttcatcgtggttggaagcaattaatggaggaggttaaggccgcggtagtggaagtgttcggcccactgaacccaagggatgatatttcctttgacaagctatcggaattgacccttcaggtgcggaaaaagatcgaaggtgctacggaggaagagaggaagtgcgtcacctttagaccctatcacttgagcgaaagaagacgttttgctgacagtatttaaagacgtcgaaagtggctgccctacttgcttccgccgagagaagacgaggatcacctgctggaggagtccggcgtcctcggggtcacagaaccctcaaccccccaaacagcagcgacattgcgccatcttctcgacgagact

SEQ ID NO: 26303 - DNA, 477 bp, Emericella nidulans
cccaaggaggaggcctggatttatgacagactcgaacaatcttttgggactgagatatacaggcttatggaaggtcgattaggtgacattgaggacctgaaacttgtcttcaggtttgcatggcaggcaagcttcgagctcggtagatggtgctcagatggcgttttgaaatacgtattctcggccaaaatgctaccgaaactcgagggaaaatcaaaagaactgtcgcaactgcgtgacgctagtgaggttgctagcagttatatactcggcagtccagaagagcccggacagtcaagccataaagtccaggtgctgcgcagaagactcaccgagcattaccgagaaaccccagagacgagaagtttagtctttaccaccaggcgttacactaccttgatgttattggagctcttcaatgctttagaaatgcctcacctacgacctggactgctgatcggtgtgcaagctaatgac

SEQ ID NO: 26304 - DNA, 459 bp, Emericella nidulans
cccgttcaaaatatatttgttctcggccaacgccggaatatagctccatacgctaattggtcatcaatcacatcaactacctcagagagatctcaaggctcgagaacatcaacaaataccgttataacgctctctaacgatttgaaagtcaacagccttagagcactgatagccaaggcggctttgaacaacggcttccagcgcaatggagcacagggctttatgtcgtttgtcaaatcaatctcgtctgacgcgtttgggtccgccccttggcagatatctcttctgaatcattacaaggcgttggtggcttacgagccagtttttcagaccatcggaccttcaaccagggtgagcgcaatggatatagctagggcggttaagctaatggcccaaagtggacagtacctctggctgtatgacctgtatcgccacgtatttggtttccatgtcgaagag

SEQ ID NO: 26305 - DNA, 339 bp, Emericella nidulans
attgtaaatgcagggttcgcagctggtcctctcctcttcggccctttgtcggaactatacggacgcaaacggccgctaatagccggatacgccgtctttgtggtcttccagataccggtaggagtcgcccgcaacatcgagacgctcattctctgccggttcatcggcggtgtggccgcatctgggcccttgtctattgcaggagggtattttgccgacttttttgatcccgttcagcgagggctggccctggccatcttcagcgggacgaccctagtgggaccgatcgtagggccgatcctgggaggcttcatcacgcagaggtgagaaggggggagg

SEQ ID NO: 26306 - DNA, 288 bp, Emericella nidulans
acagcgcccggtgacagaacaactgacaatttcttttcccaaccgtgggtgcagattggagaccctaagtttttgttcatcaaaagagcttcgcgcgttggcgaccgctggaccgaccatgttgctctgccggggggcaagcgagttcccaagaacgccaatgatcgaacagctgcaattcaaaaagcttgggaagaagtgggcctcgatttgacaacggacgactgcatatacgtagggaatctgcctgagcgtattgtaacatcgagctggggcagcgttccgtac

SEQ ID NO: 26307 - DNA, 240 bp, Emericella nidulans
gatgtctttcacgcggttggggaacgggagctgaaatgggcccaaacttacgcgaaaccccgtcttccttatgaacgcctttacagagagatccataatttttgtcaagtttcgccagatagccacataaaaaatctgtctgataatctgactttggcgcgatgccttggcttcaaatcagaaaactcactaaatcggccagtcattcgccatcctgatttacagccgagcagtgtactg

SEQ ID NO: 26308 - DNA, 210 bp, Emericella nidulans
gtatccagcagaatgcccctcaccctgcgtagcataacgacttcctttacaaaacatcagttgtccctctcattatcgctatcctacttaggaggtaacaggctatcgcaatatactgatactcgtccgaagatacctcagctattgtcccgccgctcattctacggacacataagtgaccacaaaatggcgccccaactcgaacccttt

SEQ ID NO: 26309 - DNA, 266 bp, Emericella nidulans
actctctcaatcgagcagacgtgccagctttcaactttccagtcctcaaagaccgagcttgaaaaatgtcatggcagctgccccgctagagagctctagcaccccgcctgacgctacatcgaccgacacgaacgcgttccctcggtgattccatggaagaaatcgacccccaatccacccggaaacgtcctcgtctcgatagcgggagtggtgcttgtgaatctctgccagctcccgacgaggcgtcacgccgctccccgaaactg

SEQ ID NO: 26310 - DNA, 318 bp, Emericella nidulans
aaggttcgagcgtatatacgcctcagggaatccaggagagaccttgcgccggatggtaccgagctccaaatggtgggggatgattactgctggatcctcatattctatcttctgcgttgcggattcatcacagaagcggcggagtatgttgcccgtgatcccggcttcaggtctttggatcataaatttgtgacatatatgacgacttatgctcaaaacaaacgactgccaagggatatgcagcaaagaattaatggtgagtatcaacaacggtcgcgcaacgctccagacaacactatcgatccataccgaatggca

SEQ ID NO: 26311 - DNA, 216 bp, Emericella nidulans
cactgcaaagctctagcgcctcaatacgaagaagcggctaccgaattgaaggccaaaaacatcgccttggttaaggttgactgcactgcggaggaagatgtttgtagggagcaagaagtgacaggttaccctacccttaaggtcttccgcggccctgataatgtgaaaccctaccaaggagcgcgaaaaacagaagcgtaagtcgatcacgagatt

SEQ ID NO: 26312 - DNA, 255 bp, Emericella nidulans
gagtgtggtcttacctgtcatgcgcactgtacgcatctcgtacctgatttctgtggtatgtccatggaggcagcgaaccagatcctagagacccttatccgccacaaaaaccacaacaagtctccttccgtcagctctggattgagtgggaagacgcttcgacctggcggctctcaagatgcaggtcatgcatacccaaagcctgtggaaagcccatcatcctatggccagcgaccaccgtctgccgaagcagtg

SEQ ID NO: 26313 - DNA, 219 bp, Emericella nidulans
acatgtcatgttatcgtggaggacccagaaatgtttgacaagatggaggagccctcagatgacgagaacgacatgctcgatttggcgtttggtttgacagaaacgtcgcggctaggatgccaggtgcaaatgaacaaggaactggacggattggtggtgcgactgccttcaatgacccggaatctgcaggcgagcgacttccaaacgaagaaataaatt

SEQ ID NO: 26314 - DNA, 756 bp, Emericella nidulans
caagctgcgcttaaggacaagtcggactccagtgccatccctataatgcgcagtcccgacgcgtacctcttgcaagagaagatgctagccagcgtccacaactatattctctctgtcttcaagagtcctaggtggagttttagctcccctgacttactggaccccaccggctccacacatactgacacagattggaagcggttgagtgaccaggtttggggagcaggctgcctcttccgggaagcaactcaggatggaggctctatgaagctcaggcgcattctgctggatatggaaaatgtcgtcggaactccagaccctcagttcatggtacgaatctggcgcatatgccgatacttgcacggcatctgcacctcgacaggcgatgaggatcacttaaaagcgcgcttcttgcaccgctttcgagagctgctgcggacttccaacggcgaggcaagccctatattccagtttttcgacgcgctggcctctatggatatgaactgttttcttcgggctctgcgcatcgggaatctacgagcactacatacttttgaacaaactatcggccctggacatcccatgattttaacgatgtgggtatactactcgaaacaatggcgagtcgcggaacaaagctacgagaagattatagaatactacaactgtgcactacaaaccgcagacgcatctctcggttcagagtcggatacagcgatatcgattctccacgattacacttactttgtttactac

SEQ ID NO: 26315 - DNA, 333 bp, Emericella nidulans
gcggcagaaccgtttgcccctggccatattattttcgaccgcggcttcgtcgctgcgtacggatgcaatttctttagctttggtggctggctatctggtcttttctacctccccctgtacttccaggctatggacggcgtctcagccacggtggctgggctacgacttctgccttgtatctttgccggtgtctccggatctttgtttgcgggctttattatgagatggactggaaagtattattggctgaccatcgctggctatacctccctcactctgggacttgtcacgatcacccttttctctggggccgttgcagagagcctagtacct

SEQ ID NO: 26316 - DNA, 554 bp, Emericella nidulans
ctccatgaggttgacaatgcggagagcttgctaaaaaccaaaaatctcattgcgctctttatgcaaacaatgaatgtaggtacctttgccacaatcggcaggctattaataactccaaaccacagacttgggactttgcgatgggagcttttgaagacttactccttaccttgttcaaaaaatatgctgaattgcttaaaaaacggttcagcgacgattttcaagaggtaggggatccaggaattcctggttcaatcctgctgctgacattccaaagatcgtttctaccgatgattatatgccaatgccgattcagacgcccgaggaattcgataaggtactcaacgtaagctggtatacacccagcgaaccgcaggaacaagcgtatgtgccctccacattatttacatctaatggtatactgactcatcagctttccctgcgttttgccattctctcaaatgtacccgttatgctgcattgatatccgcaatttcctcaatcaattttatttttttgcgaacgacgacttcacaaaccctgatataatcgac

SEQ ID NO: 26317 - DNA, 324 bp, Emericella nidulans
aagccgcagtctgttacgatgatcgaccgtcgcgtggttgaccgtcggaggaactctgaaagtactgttcaaaaagacgccgccatcataaaagtagggaaaatgcttctttgggataggcctagtgcctcaggtgttcgaccgtcttctggtcgtcggatctcaactttccggcagcagcgcgctctatcctcgtcctggcaaaaggtgagctgcacgctgcaggagaatggcgcttttcgacttttcaccgagtccgacatcacgctcgtgacctgcatctaattgtctcagctgtcacgctgcacaatctataaattagat

SEQ ID NO: 26318 - DNA, 545 bp, Emericella nidulans
gtaaaacctacttcaaagaaagcaaatatagctaatattgttgtagtaacaactgaaacacatgttattaaatgtgcacctgttactcctacttttctaccaaaaaaacctgaaactattgatcctaataaaggtaaaattattaatgttaaatacattatttatattgtattgatatacttcctcttaatctataatatgctactaatattcctaaacctattgcagattcagctccagctatagttatgatatatattgcaaatgtttgccctaaaatatcgtcaaaacttagtgaacttattagtattaaaaatgttattgataataacataatttcaattgaaattaacattaatattatattttttctatttaaaacaaaacctaatattcctattagaaataaaaatattgaaaaattcataataacttttttacatttttttttgatttatctatactatatctctaagacatgtataagatttgaacttatattcttgtggccgtactacaatattctaccattgaattaacatgcc

SEQ ID NO: 26319 - DNA, 303 bp, Emericella nidulans
cttctagcaaacacatcaccgctacccgacgaattgacacgtctaccccgccgccgaaagcaagtgacaccgcttctgagctgtcttcgagccctctgggagtttcagaaaatcaaccatggcagattgccaaccttttcacaccaagatcttgaatcattcacgaaactggctcgggatgcgcaccaggaactcaagcttgacattagcaccctcgattcagcattcttgcgaactttcctgtcaaatctcggaagcgaactaagtccagtggccggtttcttaggaggtgctttagccaag

SEQ ID NO: 26320 - DNA, 905 bp, Emericella nidulans
tccatcatcgttcatcatcgtgatctgaagtgatgttgagactctgtttcttttcaattctccacaatgattaaatcacggcccggatggagatttctgtcctctcttcgagcccctcctaccagacgctttgcgacagaggcgcggttaacttcggaccatgtccgcatagttgaagtcgggcctcgcgacgggctgcagaacgagaagaagtctatatcgctcgagacaaagcttgagcttatatcgaagcttgcaaagacgggagtgacgaccatagaggcaggttctttcgtgccggcgaaatgggttccccaggtatgtctccaaatgccgcccgctcgtaaccgataaagccaacgaagttcgaaatttgatgctgatatttgcaaatgatagatggcaagtaccgcagagatatgcgagcacctccttcaaaccccgccgcagtccctgaacgcgattgcatacaattatcttgttcccaacgtcaagggattagagggtctcatcaaggtcatggatgcaacaggggcctcggcaagcacaccgggaaccaaaacaactccgcgacaacgaccgagatttctctttttgctgcagccacagaagccttttccaaagcaaacaccaattgtaccatccaggaatctctggaccgcattcgccctatcgtagcattggcgaagaccaaagacattcgagttcgcgggtatgtctccgttgccctaggctgtccgtacgaaggtccagatgttccgccgtcaaaggtggctgatatcacggcaaccttgctcgagatgggagcagacgaagtatcagtagccgacactacgggcatgggtactgcaccgcgcacgatggagcttcttcaggctctgaaggcagccggcatcgccaataca

SEQ ID NO: 26321 - DNA, 683 bp, Emericella nidulans
atgatcacgatagccagtatatcagtgggctccagcatcttcttcactttagccctccttataatctccgtgcttgtgctgctactcctccgacggttcctgactctgcgagcgacgccggcatatttatccatccccgtctttcttgcgcttgctcttcccgccagtgtagttcttctagtacccattgacctggcctcgagctcccgtgacaagggcgaccgtcccaacgcgatatggcttcctgaacgccttcttttggtctcctggcgcatcgcctactggttgatcttcgtcctcacctggtatgttgcctcgtaaatgacctcgatagtttctcatctaacctctgttgcactaccagggccattcttccattactaggtgaatatatcgactccggacaccgcgatggcaaagcccgtattcaatattccgtccgttccaacgcacgatatcagatgatcgtcctaggatgtgcgactgtgggccttatctacatttccattcagaatgggtttgagttctctaccatcaaagccctcgccatggccctggcttatgtgtggggtctcgtccttgcaatctacctaatgggacatggtttggtttctatacctcgtacactctttcgcaatgcaagtgccagtggcagattacggaggctccagtctcatgcaccg

SEQ ID NO: 26322 - DNA, 372 bp, Emericella nidulans
tttttcccgaatcttgacgataacgttgaaaatttgtccatcttcacagggctctgaaccgtgtgcgtaagtctgcgacaattaatatgcgtatgaattggccgagggtgcgccacttacttctccaataaagtagggccgttgatcgcatctacacgcccatactttttatttcgcatggatatgtcataaaattcgtccgcgttctccgcttgcattagctgaaccgtctgttgcagttcatctagattctctcgaagaatggggttgttgagactgtcgacgaattgatataagtattcaacatctttggcgagagccatcactccgttagggttaattcttttcacttccgctgaaagcgggagggcc

SEQ ID NO: 26323 - DNA, 594 bp, Emericella nidulans
aagatttttcatcgccttgagcgcctcccaggatcagtgtttcccgcgaggagtagcttcctccatgcggtgctgaagtctatggctatgcactgggcatggcatgttgattacgatgggcagtttcttggctttctgccgacgcatattaaagtcctattgctgagctatattgcctattatgctagaatgcagcccctgggtatgcggggtctcaaaccgttgtttgacaatacggcggatgttgacgtcgtggaacatggtcgactggctgatggcaattctcacgttacacgtcttgatctcagtggagcattagggagatggatatccttgaagcagctcttcgccgagttaatactttccaagagaaacgctggttcagcccaggatggtacgactaaagccatcccattatcctgggaggacgagtatgaaaatgatgcagcctctggtaccgctggtgcgatttcaaaaccgctgtcgcatctacgatttacaaacctacagtacctctctttggcacatcctcaaaaggcaacagtaagctggaactcactaattaacttgctttcccacctgtcgaccattacg

SEQ ID NO: 26324 - DNA, 660 bp, Emericella nidulans
gatccaatcctagatcataccatcggctcgccaaggttattaccggctcttataaaaatgtataatgtgcccgtttattttgtctttttctcgaacaaactccactccccattcctggccgggaacccagaaatcaaccgtctgcggtcttagaccattcagtcagactggcacacctctaccggctctcttgttgaaacaccggtagaacttgtcttgatcctgtgcctcaattgttctggctgtgcaccactcgatatcgtcttgccgtgtgctgagtgtctcagttgagcttgaaaattctcgtaatatcgcaggagtcaaatcctgtaagtctgggggtcccaaggtaactttccgctctttttgcagtacagggttcgatccacctagaactagttaggataattaactgagatatctggagtggaacttacaacccatgcttttcttgcaatcatgatggaaacacatagagttcgttatattccccctttctgagcatctgcatttgtgcagccagccccttgtaacatgtctcggcctctttgttcggcttacattgtacatttcctcaaaaaccgtagcaagaggcttgcaaattctgtggtaaaccaaacgccctgaggcagtgagcaggatgttggctcatgagccgca

SEQ ID NO: 26325 - DNA, 249 bp, Emericella nidulans
ctgggggtgcatatttccttcgtccgatctattaccatggacgctttcaaaaactccgaaacacagcgcatggaattagggggcaacgacccttggaagaaattctttgactcgcacccaatcacacaatccgagggtcgcacgttcgaagattcaacaatcaaagagaggtacgagggcgaagttggcgaggagtggaaggagagactcagcgctaaagtcgaggggcgagagttcgtacctggccaa

SEQ ID NO: 26326 - DNA, 543 bp, Emericella nidulans
tcaaccctgatacaatatttcaaaaattggggcccctccctggccaaccgaaagcaaacccaaagagtggatgcttggggtttcgaacccgcctgctatggctcaaaagggcttaattggcatcaaatatggttggctcctcccgagtatcaggcagttaaagctaagcttggtcaccttcgaaatcttcgtacattaggatctacacgcggagagggtcttaaggttgaaaacagctctcagcaccaggagttcgtggcttccttctggacacagttcagccaagtcttgcaacgtacctggaagcatttttggcgatcaccgacttacatctggtctaaaattatactggtcgtcctttctgtacgtggaactcgtcgtcagctctctgcaagggactaatcatattttgactatcagtctctttacttagggttcagtttcaatgtcaacaattcgatacaagggcttcagaatcaactatgggccatctttatgttgctcattttgttcatcaacattactgagcaaataatgcccatg

SEQ ID NO: 26327 - DNA, 543 bp, Emericella nidulans
accattacgcatctctcgctcgcacactggcccgtcccaatggtcacaccgaacgccatcaatgccagggtgagacacccaacgcacagatcccttacgttttcctacggcggcaccgactcatattccgcaatggagaataattgggccgaatcggcaggtatattgcgtaggctgtcgcgcgctacatactgcctcaaatggttggacctcgaaggctgtgcggactggataccagccctcaactgggaaggcgtcggcccaaacggtgagatgtactctacagggcctgaatggaacgggtcgtggcgagacattgaatggattcgtcttggtcccggatggctcccgcacctccaagacagtgaacttgccacattaagcggggcagcttcgacatcgaacataaacgctcccagccctcggtccctagcgtcctccatccacgctcctgcagcatccgacgtatcgactgaaacgtgggacgtcgaactcgagcgccaaaagtaccggagggcaaaggagctggagcggttccggaaa

SEQ ID NO: 26328 - DNA, 421 bp, Emericella nidulans
ttcactgacgcttccgctccaaatgtctcatcgaactttaacaatgcctcaaagacccggtccgctctatcagaagccgataaaggcacccaatcagggagcgatttgctgcatcgcctgagcttaaaggagattctcacaatgcgagcacccgatttccagaagcagtatcagggcttgaacctttctggtcgtatcatcagtgctgctttctgtatcccacataagttatacttccgggctggccgtgattgggtatgaaattccgcgtcatcaaagataaaatgattagctctaacctacggctgtgtaggagttgaaacctcggcctggatcttctgctttgttcgattcatttgcatatttagcctccgagaaatcgggctggagtcatacacttgtcgggtggaccggtgaagtg

SEQ ID NO: 26329 - DNA, 213 bp, Emericella nidulans
ctcttggacccagcagacgtcaatactgcatttccaggatgggagggcatggagttaccgttatgggacaggttcccgtttattgatgattcattcctgaattagcagggcagccagggttaccagagtctgctatatatatgcgtaatgcgcatacactcgtctcgcttttaaagcgcgctatatatcatgagttatgtgagttcatgtatt

SEQ ID NO: 26330 - DNA, 789 bp, Emericella nidulans
  unsure (1)..(789): unsure at all n locations
agccatcaacaacttcgccattatatcagcaccgccgatcgggatcgaatatacgtcgtcgtcgatagagtggtctacgcaattcacatttcatcgcgaaagcgggagaccattgctgttatcccattcgagccgaagtgcctcgctgctggatatggctggatcggtatcggaggaaccaataatggcgagtgcgcttttgtgaagctttccgatcgcaatgtgcgtgcgtctcgagagacaccgggcagccaatcggtggatgtggacagcgccttgccaattgatctcgagccttctcagacgacctccccacgagcatcagcaggagctgaacagacaaactcggggtctggtgtcagccaactaccggaggttcaattgcataaatttggcggcagcattgtgaactctgtgnatcattcaccgtttaccagccgaggagaaagggtttttagacgaggacgttgcggtgctaaggtattgcggtcaatgtcaagctctaatgaatctcactaatatgtttgcagcaacaatgataagtccgtgacagtctattcattgacgcgctcaaaggttctgaaaaagctcagccacccggcatgtatgaattatgcaatcatttcaccggattcaagcatcttggctgctgttggtgacgaagctaacgcatatttttatggcctttctcgggatttctccaccgtggtttcgactgagaccggggagaagctgagtggctggacactggaccttcttctctgcattgagatggagattgggccgaga

SEQ ID NO: 26331 - DNA, 237 bp, Emericella nidulans
atggatagcgccgatgagtctattcttggcagacatgcgagtatcgacggatcagttgactcgcgaacccataggaactctaggacaggagacgaacctcgctcaccacggttgactgcccaccaggaggccttgtttaaagaattagaggcactaaaaagtcgaaatgcttggtacgcctcggagctcgccttggccaaaaaagctgggtatacccctaatatttcggcgaactct

SEQ ID NO: 26332 - DNA, 243 bp, Emericella nidulans
atatataggacgttttggtatccttatctgccttgccctcatccgactgaaccgcagttgtgcaatagctggccttccacctccacccaattgattcggtacatggccgatcggacgggtattatttcgttcgcaaacctgccgctactatggctattcgctggccgcaacaacatttgcgcctgggcgacaggctggaatttcgccacctttaatgtctttcatcgacatgtcgcgtggatt

SEQ ID NO: 26333 - DNA, 594 bp, Emericella nidulans
tcaatctatttctccagagtcaatcacatcttgcctattgttgatcacgaactgttcgccggcgaatacttgaacggagcagcatctgtattcctcgaaagggcgatatgcctggtggctgcgaaagacaaaaccgctagccctcatctacgtttgacagctggaggtgctctcaatactgcacggaaattctgctctgaagtatatggtggacttgtctgcgctatggaagctgggcttgaacaagacagggttactagaatccgtatcctcgccttaatgtccctacatttcgaagggtacgaaggtgctgaggcagcgtcgatgcatctttgtcaggctatacatcaagctcaaacgttaggtttgcacctcgaaagacctaagcttgcaccagatgattctttgacaactctcttttggtgtttgtggtcgttagacaagatgcatgcctccataggtgcccggcccgtccttctggctgacagagatatcggcatcaggaggcatgacagtgctgcacgtcaatcaaaatctgctttcgacgcttggttcgcgctttctgaattgttatcgaaagtgatttcattctat

SEQ ID NO: 26334 - DNA, 979 bp, Emericella nidulans
tatctctcttctcccacccactcctttagcatcccatccatctacgacagcatccagcttgcatgtcggatctacctcccacagaacgtattaacccggaatgatacgtctcaatggcgcgtacggggagccatcgtcgcgcacccatatgcttcgctcggtggttgctatgacgatccggttgtgagctcaatcggaggagagcttcttgaagcgggctatgtggttggcaccttcaattttcggtattatcccctcatcaaccgaccctgcatataactgacgctgtttaagcggtgctggtggctcccatggccggacgagctggacggcaaaacccgaactagcggattacgtctctttctatgggttcatgatgctttatttgagctgcttgacgcgacaactcggaaagacttcagaaatgatccacctcatactcggtggttactcgtacgggtcattgatcgcttctcatctcccagaaagccagctggttgccgacctcttcataaatgcacaccaaagcacccctgctcatggaatgctcctcatagttaagacagtctgcgcgctgtcgagagatgagataccgcagttaactcagtctcctatcccagatgcgaatgatcccggccacgaagccagacagctgctacagtcaagtggtaccacgatttcatatcttctagtgtcgccgctcctccctcccgtcaacctatttttgacactattcaccgatctgtcacttgaggtagctactcaagcatcggggaaacggagacaaattccttgccctaagccgaaagaccagctatgtgcgcatagaactctggcgatctacggtgacgaagacacctttacatcaataagcaagctacgcaagtggtcagacgagcttagtagtgtgcccccaagccaatttcaatcagcagaagttaatggggctggccatttttggcgcgaagatggtgtagag

SEQ ID NO: 26335 - DNA, 231 bp, Emericella nidulans
gggacgacggtcaagacactcctggaggttatccataccttttgtgccattgcggattggatacaggcaatcattgcctggcataatagccagctcgatgctgaccagccggcgggaatgatggggtctcccgatgcgatgctcttgtttgaggctgtggggatcctgctttcggttctagctgggactgggaagggaatagaggttctctctgcaggtcctcatgagggt

SEQ ID NO: 26336 - DNA, 396 bp, Emericella nidulans
aagatacgacaaggtgtaaccgcgatccccgtgatagccatattgactgcgcctttcttcctagcctaggtgcgtggttggtcaaagctgtacaactttgcgagcgaggctccatttcctgcgtacacgtggctgcagtatccgctctttgtctgcttcacggactttggaatctattggattcaccgctggcttcatgttccgatggtataccgctggcttcacaaaccacatcacaaatggatcgtgccgtcgccattcgccagctatgcattccatccagtggacggctggtcgcagagtctgccgtatcacatcttcccgattttgtttccgctgcagaaaagtgcctatctaggactttttgttttcgtgaccttatggacagtgttgatt

SEQ ID NO: 26337 - DNA, 264 bp, Emericella nidulans
aatagcgcttggatacccaacactgacctttcttccctcgaccctgctgcttgcaaagacatatcatagaagggtaaatcccagggcgcttgtggctgcttacaatgtcgccgcggaaaccatgatcttgcgtactttaagatatgctcgccgaccaccaagccgaatttataggaggaagagagagtgagctcatgagccccttaggccgcgcaagggcgaaataagccaaaagaacagaaaagggctggaatccccatgatt

SEQ ID NO: 26338 - DNA, 399 bp, Emericella nidulans
ggaagagcattcacggccgtaaccttacaagaaggcacggtcgatgtagcgagaaaacatgcgcttaagcttatcgaaatcgaacaggccctcgggttgttctgggaggttccgatccagcagttcttcctccggcacccgttgctcatgaaatggaccaattggatctattcgtttatccatatccctggaacaatcgcattcttagtttggctatattactatacaatcacgagaaaccattccgatgagccccagtctggcaagccccgagggacggcaagtggctcacctgctgggccgcttctctatcaagcccgccgacgaacattagctgtttgcaatctcctcgcatttgttgtattcactctatggccctgtatgccgcctcgcctgcta

SEQ ID NO: 26339 - DNA, 429 bp, Emericella nidulans
ttagtaacactggatcattacatatatgccggaacataccgtcagcctcctcccatgcacgtccagcaccgaaacccaaaccaacccacgcgggccatgccctccgcttgaagaggagcactgagaagacaacaccgaacgacaggccgagggaagagcgaataatcatggaagagatggcacgatcccactaatgattaacaaggcacatgttagccgacgcttctatgattgttataatgcgaggagataattctcagcgaggccagagttgagcatctgatagaattatggagaaatcatattcgtcatcaacggcgcggacggggtaagcctagtaccttctcgttaagcaaggcctcgctgacaagcttggtcgagcgggcgacaggctgggagtcgcttgagtcggccattgtaagcgatcta

SEQ ID NO: 26340 - DNA, 740 bp, Emericella nidulans
tacgccggaatctctgagctggtagtggaaggatcatgtgcccggctcgcgctcgtcgtgcggaatgggtctgatatcgtcagcttcttccagtacgagcttcccctcttgccctcacacgatccgtcagacgcagttccggaccttgttttgcgcaaactatttgagcaccgaagcttgtatgatgagaagtttgcggcagttgcgtttccgcggtccctagcggatcaatgcccgtcccttagcttacagctttggaaagagctcgatgcgatcccgtatgtggttgcacgaaaaccgcaccagagaacgcaggatgatcaaggcgagttggcgacatttgccgggtgggaggaaaaacaaattgacgagaaggcggattcgattgcgaggaagtgtcttaggtctgcattctccatttcgcaggtcattcatatatccagccagttctgatcagatttagatccttcgggatcggccatgtgccgcccatccagctcgatctgcatggaatggttgcagttgatatgaactttagagcgccattggtaagcgcggctgaatacgaaaagacggtcgagagccgcacatggtctctagtgcagcattatgctagtgatctgcgaaagagacaagtaagagtcgccttcttcagtgcgactgcttatggaaggccggatgtctatacccggcatgccctcatccgactatcgcaatgcttgggcgtcgatgttcgatgg

SEQ ID NO: 26341 - DNA, 339 bp, Emericella nidulans
caacccagttacgacgtcgtaatcatcggcgctggcttctcaggtatctacttgctgcaccatctccgcatacttggctataccgttcgggtctacgaggctgggagcgacctcggcggcgcttggcactggaacaagtatccaaactgccgggtcgacacgcagggatcgatctaccagctgtcaattccagagggtttgtgagacatggtcgttcagcgagaagtacccctcggccgacgaactgcgcgggtattttgcccacctgagcgcgtgcttgtggtcaagaaggatatcgagtttggacggaccgtacaggaggctgtttcgataagccac

SEQ ID NO: 26342 - DNA, 687 bp, Emericella nidulans
tttccccagactttctttctcaacctcgacctgacaactaatcacggacccttacggccgccgcgccgccgtaatgatgcctccgcttcagccccaatcagtgcagtgaataccgctaatccaacgccggccccttcgcgccctgacgaccgagactccgccgtagtcaatcctgaaaccgacgacgcgccctcggaacgcgtgcaagttctgggacttcatactcgcaacccgatcatctcctaccagaaccaaatctttagtggagcgtgggcagatcagattggcacggaattgttctttgcgcggcctgacacgactagtactgaattcaacgagcccggtaacgcgcctgcggaggtcactccattgaaacacaccaaggatttcgacctcattgctgccaatagcgtcaagattcttggtcgaaaagccaatctcatctcaagctcaagctcagcggcagaccagcgggatggtttgacaccagagacgtcaggactggtgtacaagccagcgcatcaatcgaaccaggcccgcttcttagagcgtctaaggaggtcaaaagaagcaaaggcgagacggatacggtacgcacggtgtttagcacgttcagaaagggtccgaatctcgaagatcgactacgcggatgggtacagacggaggaacaagttgctacgattcagc

SEQ ID NO: 26343 - DNA, 630 bp, Emericella nidulans
gtcacatcatgtataccaaaccttctagttgtatctgacatggggcagcagcttgggcctttttacacccatgacgtgctagcagacgtgattcatgttttatctgaggaagatagactggtgtatcagcggcagcgggaagaccatttctactggaacaagaagctgcaaccaaccaaggcaggatggagactggaccgatacaagtttctagccatgatcgaatacgcttacgcccgaaatccaagtgcgaaatggtacgtatttatggaagccgacactaccgtgatatggcagaacttggtacagcttctgagccgctacaaatggattgatcctatatacattggatctccgaccccagggaggcccataggaacatggtgggacccggagccaaccttctttgtctacggcggatcaggaattgtgctttctgttactgctatagaacacctgctacgggaggatctagaggggagtgccaaagccgagtcgggccaaacatcgcagcttttgatcaccaagtaccaggacatggtccgagaagactgctgcggggactcggtcctcggctgggttgcagcacagagagacgtgaaaattaaagggctatggccaatgttcaac

SEQ ID NO: 26344 - DNA, 315 bp, Emericella nidulans
gaccccgcaatccgccagctcttccctgacaccccgggcgtgcgctcgtagctgactgccgcaaaccagcacgatctgcaccccaagacctttcaaaaatacgtcaagatcgttgattcaagcgctcgagacaaacacggccaggagcgcgaacgcataatcgcgtatgctaaatgggacctttcgacggctgaagaacgagggagccggtatcctctttggcactacgacatgccagcagctgaatgcgaggcgttctttgagattgaggaaagagcgaggaggagagttatggaaggactcaagcattattgt

SEQ ID NO: 26345 - DNA, 429 bp, Emericella nidulans
ctaatcatgaatatccaaagtcagcctgggtttaacaacttcttaaaagcaccaagcgaagaagagatattacgggctgcgcagaaaggtcccattattactataaatatcagccagtatcgctgtgatgctatcattgttgagcatcacaggatatcttctttgcctctacccaagctcatcattgccgatattacagagaaagcaaggtgggatgatttaggaagccctcaagttcttgaatggctgtgggatacgactatggaaccgattctagaagtactagggtttatccagtcaccatctaaccgcgaatggccacatgtatggtggatccctacaggtcctttagccaaatttcctctgcatgcagctggatatcacagccagggcaattccaaaaccgtgcttgatcgggtcatgtcgtct

SEQ ID NO: 26346 - DNA, 812 bp, Emericella nidulans
ttcaatccatataacgaagacatgatcaagctggctaccgttacgattcaaagcttcctgtcttacctcctttaccacgacgtctgcccagaattcaatgagaatatcaatgaggcccggaagtcctgcgacatcgtcaccaagtagctttggaaaaaccagcagattacggccaacggaccgggaaacttcaatacttcctgttctatactcattggtggtttcgaacacgacttgtacgtcgagaacaactagtgggaaaaccccaaggacgacaaggtccagttgaccaaagccatggcgcagaaaatagtgaggtttggattgactgttgccggatccgacgagcttgcgtcttcgtttcaccaaaagttctctacggatactctcactgtttcgaagctagaagatattcacggttttgaagtgacaaaagtgcatttctttgatgacaagggtcggaggttttatcaagataatgtcctgacctgattcctgtcggaatattgctcgggagagcctactacgatccaagtgagccggaatacgatttgtcaccagaagagcgcgaagaatggatgaagaagagacgacagatgccagagctgatgctcttcttggaggaaggcctcttggagcattgttaccccggcatgaagatcattactacgatctgggaaatgaactgcggacttcactacttcgaggagatcaagcgggcttacagctctatctatacgccgctttgcaatgatctcatgcttggttggaagagaccacgcgacctcaccgcaaacaacgaagataaagag

SEQ ID NO: 26347 - DNA, 342 bp, Emericella nidulans
gcagaccgctcaccaaaatccatcattgacgcctcacccttcctctccctccaccgagacctcgtctcaatcccctctgtttccggtaacgagtccgctgttggcgaattcctagcgtccttcctcgaatctcacaatttcaatgtaataaagcagccagtcgaagggcgcacctctcggttcaacgtcttcgcttacccgtcgtctgctccatccaaaccatccatccttctgacaagccacatcgatactgttcccccgttcatcccatactctgtacaatacagtgataatgaaagagatattgtcatcagtggccggggttgtgacgacgcaaaaggc

SEQ ID NO: 26348 - DNA, 474 bp, Emericella nidulans
gttaatggggattattcgcgaccgtccgttgatgagctggtctgctcagacacgacgggaaatactgcgacagcgcggctgtcgacatcgcccccggacaacagtggccgcctttctccagaccatggcagcctgtccccaactcaaaaaggcacttatcggcactcgtctcccccgatcgccgcaggagtcaagcgtagcaacacgcaagactcggctaattctagcattcgacagcggcatacgttacaagttccgagaactaccagtggccgtcgaagtagtcgtgatcagccggacgacgttgcgtacagcagcggccgcctatctccgacagcgggagcccgccgttcgtctcttgggttggctcgccggaccaccaggacgaatcagtccgaaatcttgtttgatgaagcgaatccggatgaagatgcagcccgttgggcggaagctatcaaacaaaggagagcgtcg

SEQ ID NO: 26349 - DNA, 965 bp, Emericella nidulans
gccatcatgcatcctgttctagaatcgctaggattagaccgatccccatctggcaacaattggccacacatatggtggatcccgacaggtgctttgagcaaattccctctccatgcagctggatatcatggtagaggtacacaggagacagtgcttgatcgggtcatgtcttcctgacgagctcgtctgttaaagcgattatacatggacgtcgacgtcctgctaagtagtcaacttcggcacatgcacttctaattgctatggagcatacaccagggaattccaggcttccatttgcagctaaggaaatagcaatacttcatgacccgttcagatcaatgggtctcgaccctatccagccaggacaatacaaacgcgatctcgtaccgtatttgccgcaatgcaggatattccacttcgctggccatggttatacagacaaggcaaatccatccaaaagttgtttgcttcttagagatgggaaagatgggccccttacagtagctaatcttctggaaatgaatcttcgagagtactcaccattccttgcttacctttcagcttgtggaactggccagatcagagatgagaggttccttgacgagagtattcacctgatcagcgccttccagctggcaggattccggcatgttattggcactctctggaaggtagatgacgaaacctgtatggacatggcaaggattacatataaaacaatggcgggtggaaacatgaaggatgaatcagtgtgtcaaggcctgcatcaggctgcccggagacttcgtgatcattgtctcaataggccgtcagtgagtcaaacagaggttgataacctaggtggtcggcatgttggaagcgacaggttaccacgagacatcatttggtatgattccgacatggatagcaacgacgtttaccaaggtacaaggtatttaccgtgggttccatatgttcattttgga

SEQ ID NO: 26350 - DNA, 288 bp, Emericella nidulans
tcgccctaccactggtccacgttccaaaagagctttatcacatggctctcgtgcctcaccactcttttcgcttcctttgcaaccagctgcttcagtccggcggccgagcagatctcttccgaatggggcgtcagtcgcgtcgctgccctcttgggcatcacgaccttttgctgcggtatgggcttcgcgcctatgcttctagttcccctatctgagatcgtgggcaggaggccggtcttcttgggaacgggagcagtgctcgtaatttttcagctgtgctgcgctgtt

SEQ ID NO: 26351 - DNA, 432 bp, Emericella nidulans
taccaataccactacgcaggacgcccatttctctccgccaaacgcgtccacagctacattcccagccgcttcaatgcctcattctctgggctgccagggaatgacgactccggcgcgatgggcgcattcacggcctttgccatgatgggcctgtttccgaatcccgggcagaatgtgtatctcatcactccgccgttctttgaggagatttccgtagagaatccggtgacgagtagaacggcgacagtcaggatcagaaacttcgatccgcggtatagtagtatatatattcagaaggcgtggttaaatggagaggtctatgggaagagttggatcgggcatgagttctttacggaaggaggaacactggaattggttctgggagaagaagagagtgaatggggaagagcgagtgaggaccggccaccgagt

SEQ ID NO: 26352 - DNA, 323 bp, Emericella nidulans
tcgccaaactgcatcttctgtccgaacattgagggcgcattcaaccagaccaccacttccaagtggtcacatcttctctgcgcaatctggattcctgaagtatctattggtaatccttctttgatgatgcctattaccgatgtcgaaaaggtgtcctaggagccggtggaaactctcaatgctatatctgccgccagaaaatgggcgcatccattcaaagcagtaacaaaaattgcttcgtagcatttcatgtcacatgcgcccggcgagcccaactttatctgaaaatgaaatcggggcacggaaatttagccgtgatggac

SEQ ID NO: 26353 - DNA, 531 bp, Emericella nidulans
tgccgccacgtctgcaccagttacgacatcccgcaaccagttcctggcggttcgcgcaccctccgtccaggctttgccatgctaaatcgcgttaacaccgaagacgcccgccgcgccttactccatgccatcgccatagaagacatcatcgcacaaccaccccgcgcccgcgcccacgtcatccatatgccctcttcgctttccgccgcagcaacagtctacgttgtcttcgctctcgcgggtatagcgaatattcatctcccgcgcacagttgtatggcaggacgcgctgctttcgcatgcggacttgaacctcggctgtgagtctggattccggccatctacaggctctgaaacgagccggtttgtaacggagggaaggacggattctccacctggggttgcggcggtccgcaaccttctttatgagatgaattcgatgcagaagctgtttcggtgtctaatttcgcagtggggtattgcgcatgatatggaggagattgtcaatcagtggattattttatgtcattag

SEQ ID NO: 26354 - DNA, 391 bp, Emericella nidulans
tctagcgtcgctacaggcttcttgattacatggtccaaacgcctgaaaccaactattatgattggtgacatatttctgctcctaggaggcttggccgcagcgatgatgggcgccaacacccctgacatcgtggccatgacctgtgtttctctcgcaagtctcggtcaaggatttgctttccctacgctgatggtatctgtcctcgccactagtgaaacggatgagcaggccgtggctaccacaacattagggctcttccggaatctaggatctgttatgggagtcgcgacgagcagctgggtttttcagaatgcactgaatttaacagctagaagagaaggtcacgcaaccggacaaggacgcggtcattcagcttgttcgaaaatccgtc

SEQ ID NO: 26355 - DNA, 262 bp, Emericella nidulans
ggatggcttgctgctagcgtgtttatcttcattgttggacttgctatggtatgagccttttctctatccactcaggtgtcaggatattaatgtttaatgcaggctgatctagcatccgcgatgccaaccgcaggtggcttctacttctgtcacgcattatttcaacggcgaaaaatgtaataggcctctgagctttgttgttggatatagcaataccatcgggcttattgggggtgtctgttatattgactgtgagtggtca

SEQ ID NO: 26356 - DNA, 270 bp, Emericella nidulans
gtttctcaatgccaggctatccatgcacggtcaatcttcccgtgtcaagacacgcccgatgtcaagtgcactttcgatttcaacattacttcccctctgcctgtaattgccagcgggctacctgttcgcagtacctcgactgtcccccagtctggcgtaaaaaccctccaccgatttcaccaaaaagtgcccattccgagctacttgtttgctctcgctagcgggtgagagcaatgactcctacccgtcactttacagttcgtgtgtaaa

SEQ ID NO: 26357 - DNA, 591 bp, Emericella nidulans
aatgatacctttatactgtcgaataatctgcagaagacgaatgcatcgtttcatctcgtcctgcccgcgacccgcagcaacccaggcctatgccgtaccttgacttcggccatgattctaaattatccgccgccaacgctggtgcgctatgggagagaacttccagcgggatcggccggacatgattacatggttgacagaattactgggatatataactttttggcgtacaccccgcgcctccaggatcatgacattgttttggttgtggacggcttcgacattttcttccacgtgccgccagaggttctagtcaggcggtatcaggaattgctacgggaaatgaatgcgaagttacgtgagaggtacggtatggttacggtggatcgaccattccgcaaggatggcgtggaaacacaccagaagtactcgcagcgcgtgattttctccgcaagcaaagagtgttttcataacctgacagacgatgccggctgtgccagtgtgccggagtcgactctcccgccggatagttatgggtggaaaacggacacacaggagcaattgacccgcccgcggtggctcaagccaggc

SEQ ID NO: 26358 - DNA, 436 bp, Emericella nidulans
ctgggatgtttctggcaccaattggttttcagtgcatcatgatgcaggtcatattgccatcacgcggaactaccaagtggacagcgtgattggcatacttattgccgactacctgggaggactcagccttggatggtggaaaaggagccacaatgtgcatcatatcagaaccaacgagcccgaacatgatccagatatcgagcatatgccttttttcgccatttcccatcgctttttcatgaaccttcgaagcacatactatgaccgcgtcatgtacttcgatgccttctccaatttcatgctcaaataccagcattacctttactacccaatcctactattcggccgcttcaacctataccgactaagctgggaataccttatcctcggccaaggaccacgaaaggggccagcctggtggcaccgctggtttgaa

SEQ ID NO: 26359 - DNA, 261 bp, Emericella nidulans
cgtggtcaatttgataaaatcaagcgcgggaagggcgtgggaacacagacggactacaacgctaattccgctttcatcgatacaaccgaatacttcatgaataaaattatccagaagcaggagatcgttccgccctggatcgagaagcagcaggaacttgcgagagagatagatcggttccgacagcgtttgagagttgagtggagacggcatgcagcgagagtgatagccagccaaggagggtcgttggagacgcagatg

SEQ ID NO: 26360 - DNA, 351 bp, Emericella nidulans
cccctgcgcgactcgcaatacatttccaacgaacgctcattccttgaactttcggttaaaacaatcaacgcactagcccgctcctacaacctgcaagccccaccggtagcgcaaaagccttatctcaatctcgagcgtgaactggagtcgtgctatgcggatgtggcgccgagtttagcagatgagatcaaacgccgtgctacggagaaagtacggcaaccttcatataccggggcaaagacggctagtgtacttagtcatctggctacgtctcagacggccagggtgtatgatgaggatgaatcgaaggggtatggtttcaagcagttctggcaggatctgttttcgaag

SEQ ID NO: 26361 - DNA, 666 bp, Emericella nidulans
gtttacagcctagaccttttcgagcctggcgaggaattcaccgctgtgcaaaaaaagtcagcgaatccgagtcgcctccaatacatccactgcgacgtcacatccgaggaaagcatcagctcggcaatcgacgctgtggtgtccgccagtggcgccgtccacggcttcgttgccaatgctggaatgaccaagcaccaaccagccctggacttcacccgggccgaaatcgacaagttgttcaacctgaacgtgtttggcgcgtacttctgtgcaacggcagttgcgcgcaaattcattgagctcgggatcaagggctctattgtatttactgcttccatgacgagttatagacccaaccgcgcgccgagcgcaccctatggcgctacgaagggtgctgtgcggaatatgacacatacgctggccatggagtgggcgcaccatggtattcgcgtgaactcaatatcacccggttttatcaagacccagatgacttattttgtcgaccaggcgccggactggaatctcaagatgcaatattacggtggtatgccaagattagccgatccgaaggagctaggaggggcttatgtgtatctgctgtcggacggagcgtcgtacacaacagggattgacattccaattgctggtattgtcggagcgtggtag

SEQ ID NO: 26362 - DNA, 438 bp, Emericella nidulans
tacataaacgaagtagcccactgcacagcgacgagtgatgatgttcccgaagataacgcccagcgcttgacgccaccaccaccgattgtggcaatcgagccgcatgcgattaccgagtttatggatacgatagataatatttttcgggtgttcacctcactggatatgtcgaccattcgagccctacccgcgatgtacctgattcggataatctacacattcatcatcctggtcaaactatactttgcggcagccaaactaccagcgcaggacgccgtgttgcaagtcgacggactgcaggtctctaggcgcttcaatcgcgtgatccagatgaccgcaggatggggcccgttgtggcctgctacgaaactaaccaccgtgttcaccaagatgcggtcgtggtttgaaagcggaggggataacaattgccagaggctg

SEQ ID NO: 26363 - DNA, 501 bp, Emericella nidulans
tcagcatcaagaccgcgtagctcaactaaaggacccttagatcagccagacgagtaagaggcgtaatccacaatgtacaacgagcaatggctgctaacgacctatagccccctgaacgttgagagcttgagcgagatctctacccctttgcatcagaatgcaacggactatggaatgtactctggtgactcattcagctcattggatccattagccccggaactgccatcggaaatggggaaagacctttcgtttcttcttcgatacgacaattatcattccctctctcaagttgacatacctcatgctttgcggtcagacttcatatcacctacatctgatgaaaccctggcttcatcactcagcactcttgaaaggctcctagcggaaggccatttcctcttagcagcgtacctggccggcacgatcctaacgtcgtcactgatatccccaacagatatcaaggtgatatttgcattgttttacacacggctcgcatgt

SEQ ID NO: 26364 - DNA, 885 bp, Emericella nidulans
cgtgatggttctggctctcacgttgactaccggaccagtgctactgcacttgcaactcgcgcgggaaggaagagcagcaagggcagtgcgtcatccaacttggatgggggctcttctttctcaagacgccaggcagacccgaccagcgagaggcgatcagcgagctttgacatgggcgcaagaaaaccattcataaattcccaaggtttctctccggactttgattcgatgggatacgacggcatggatgcggcgcccacgcctagcattcccgcaggcccgagaaaaaaccacgcagcatcgcaagaatttaataaaacgccaaaggcccagtcatcgcgcacaccagtggcatcacgacgggacagccttaaatcttcgcggattaaccaatcacgaaatcctcgccctgagaaccttggcacagcagccatgagggctcgggatcatgattttgcacttctcaacgacgctgacctggagcctccgccgaatatagcagcttcgctagatccgccagcgccgagtccaacaatatcatttaataagccgacatttcctattccagaaccgaccccaagcaaggagcgcccaggattctttcggcgtgtcttcggatcctcgagggcccctggtaacatgccttttgacagcctatcggattacccactttccaaggagcccgagtcgaagaatatgagtggagcgagcgccagcccaagaacacggactcaaccgcagaagactggcacggccggcacccacgcaccccgtgaaggtgcccaagtggtgaacaagaagtcatcatttttccgccgacggaagaagtcggtgacggagaatgtccgccccccctcatccttccccaaaatctcgggcccaagg

SEQ ID NO: 26365 - DNA, 580 bp, Emericella nidulans
tctgccccacgactctttgtcccgactcccctctcctattttgcttttcttctcagtccaaacatcagtcgcagcgaagcaaccgccgatctggctaccatcacggatccaaacgagttgttcttgcccggtgagaggcaaaacagtctcgccatgtcgtcctctcccgtccccctcctcaaggctccggtcccgggcaatcgcgggagctcgaacagcccccggcctcccaagctcacattgggaattccgccctctgctacgagtcgtcctgttgccggcaatggcgttcctattatgtcggatgcaccccagcctcaacggccctccggcgatcctgctactccccaactacgccttggcaactccgatgggcagcactcaagatgttccacctcagagaaatgttcggccgatgccaacgccattagcgaatacgggattgaacgatgcgaatggccactcacggtcgggaagctctactcatctggatgggaaaggcagtggtcctgcgtccgcttcgtcatcgaattactcaaatctgtcattcgctatgggtggacttcggcaaccacacggg

SEQ ID NO: 26366 - DNA, 513 bp, Emericella nidulans
ttaaaggccacccaacgcgatgtaaggcgttacattgctctccggaagggattacgtcgtgtattcaaggacgagtgtatccggtctaatagtgatgaagatgacagctcagacgccgcgtcaactttctcttccagccccatagttgagcctctatcatggacccgactggcctatacatccttcatttggtgggcatcggctggtgagaaacgcgacggattttccgaggaggaagaggaggagcacgaagttgaacaagacgcgaggcttttagcaagtgtagacaatattcctagtcctccctcaggctcgattcggcaaccaaacatgcaacaagaacaaacaccgacgcaaccgccggagatcgctctcattgcatacttccgccagctaactacgcagatattcgtgacactatctgatgtcattgcacggcaagatgatcatagcgggattgatccagaagcagccagcactatttccaacgaagatcaagtcgaaaacactgag

SEQ ID NO: 26367 - DNA, 246 bp, Emericella nidulans
aagggcagccctcctcgtactctacctgacatggcgcacgacgtcaaccaacgcaagacgctataccagaacatgtcgccccatgtccggacccgcatgaaagcacaggagattgtcactcagtgtggcgcggcggtgaatgaatacggggttcttaccctgagtgcggcggacgaaggaggattggacttgcttctgaaagcatatgagcagcgtgtcaatgatctacatatcgatgcgacaact

SEQ ID NO: 26368 - DNA, 484 bp, Emericella nidulans
atcaggtcggtcccggaatattcaaatccgcggtcagcaggtaaattctgcccataccccgcaaggttcattaccggtacaggacaattcttctcgaagtctgttgccagttcaatccttatgttcgtaatatttgccctaattgataagggaaacatgggcgccggtccttttatgcctcttggcatgttcttcactatttttggaattggtgcttgctttggttgggagacagggtacgctataaatcttgctcgagattttgggccccggttggtctcgtacatgcttggatacggaactgaggtgtggaaggcaggaaactattatttttgggtaagccttcagactaatacttcaagtttcagcgttctaacaatccgtctctccaaaggtaccagttgtggcccccttcttcgggtgtacgttcggcggctggctgtacgacatgtttctctacgtcggatcagatagccctgtgaat

SEQ ID NO: 26369 - DNA, 225 bp, Emericella nidulans
ccggtaggctcgtggcctaaaagtccgcgtctcaaagagatcggtcgcgtcggcaaggtggcggtaattgaagccatcgagccatattcattagctctcttcacgcgagtacttggctggagctacgaacgtgcccaagactatgtcaacaaatgccgccgcgaagcaatgaactgctcaggccatatccacatcctatactactttgtatacgcacaacgacct

SEQ ID NO: 26370 - DNA, 326 bp, Emericella nidulans
gtagttctcagtaagaaggagatgattaagcggaacaagatcaaacgtgcattggcagaacaagaaattctcgccaccagtaatcatcccttcattgttaccttatatcactccttccagtcagaggactatctttacctttgtatggaatactgcagcggcggggagttcttccgaggtatgatcatgccgcgagcttggtgctacgtgcttgctgatgtcacttcgtactcatagctctcccaacccggcccggaaaatgtatttctgaagaagctgcacgattttatgcagacgaggtcactgccgcccttgagtatcgccat

SEQ ID NO: 26371 - DNA, 330 bp, Emericella nidulans
cgactcagcgttaaaacatacaacatttcaactggccgcttagtccttgaacataattacccccgggccaagaagccgaagcagccaaagcaggatcctccatcggtatctgtggacgtcaatgctgtcttggagacggtgacgtgggaggagctgtgtgtgggcgcgtgggtcaatgtcattggttatgtgcgcagagagcctgtacagagcctgaagggagaaccgtcagactctgtgtatgttgatgccgtggttatctttccggccggagcggtcgatctgggtgagtatgagcggatactctgtgatttattgctggttgagagg

SEQ ID NO: 26372 - DNA, 671 bp, Emericella nidulans
tttatcagatccgatccgcaacctactaaacaccttgcccatgccgccagcttgtcgatactgctatcacccggattgttcatcatcgatcatattcattttcaatacaatggcttcctgtacggcattctggtactgtctatcgtctgggctcggaagcagtcgaaattgctgtatagcggaatcgccttcgccgttctactctgcctaaagcacatctatctctaccttgcccctgcatactttatctacctgctgcgagcatactgcctggacccgaaatctgtttttcggcctcgatttggaaatgctttcaagctaggcctcagtataattacggtgttcgggcttgcgttcggaccatttgtttactggggccaactgctccagctgaaagatcggctgttcccattctccagaggcttatgccatgcttactgggccccaaatgtctgggctatgtattcattcacggaccgcatcctgattccatgtgcgtatgaacctagggtttctcttcctgcaccacgctgacgttcgtagttgcaccgaaacttggactgccggtcaaccaagatgctctaacaagcgtcactcgcggcctcgtcggtgacacttctttcgcgattttgccagagatttcaaaagagtacacatttgttctgacgctc

SEQ ID NO: 26373 - DNA, 624 bp, Emericella nidulans
gaatgtgctcgggtatatcgattgatggcacgtgcctcctgggctgcgccgcctaacacgagtaaacgtataaaacctctgcggaccacttcctctccctttctagaaagtcgtgcgtgggcagacgtctatgaagggtttccaaatacagagattatcgatgtacaaatacaggatgagaacgcgactgtgacttttcggcatccagatgggatcaccgtttcccggtcagtgcgcggaatggtgtatgcgaccggccgacgaggcaccctcagttacatagaccagagccttttgcgtgaaattcttggttctgacgacaatgctgaggtaaaccctacaatatctggacaaaccttgcgaggcaaggctgtcgagaacgtagaaatttcgaaagacgttttcatcattggcagtttgacaggcgactcgctcattcgatttgcatacggaagttgtgtgcaggcagctgggaaactaatcgacgggtttactggtagtgacacgcccaaaacaagttcaacttctgtttcaagaaacgacttgaatataggcgtaatgcgtggcattgacgggcacgatgtctatctcaagaatggccacttttgcttagaccaggacaag

SEQ ID NO: 26374 - DNA, 360 bp, Emericella nidulans
ccaatacgcattgcttgggcaaaccggacatacttccacccaacagacctgagcaaaggagaagcgtacaatcttttcgttctttgctcggcttcgaaacgggtccatggggctgaaatatccgaaggtggctatatccaaggtgcaggggatgacagcgaagcttgggcccacggtcttacaccagctgtattttgggctgacaaattcacgctcttgacacgggcagaagaagacctgcccgaggtgattgcggatttgatgcaggagagccgtaagcagggttcggggcaggaagcgacacttatcgccgccgtctcagaacctatatgtcagccgaacggatcctagcttggctgc

SEQ ID NO: 26375 - DNA, 252 bp, Emericella nidulans
atgcaggtgcattatagtggactccactcgtcgtggcaaatgtaagtaatttacctcgttattggcatattgctgccgttagccactctttcgctctatcttaacggaccaccagtgatgcctgatgccttgtcaaagactatacctatctggtgtgccgtctttaacagagcgttgttcccttcagagactgcatatcattccgtcgaattgccgccgaactacttaggtgcctctgaggagtcgcagatt

SEQ ID NO: 26376 - DNA, 453 bp, Emericella nidulans
tatctttatattgctgagcgcaatagcttgggtgtcatgatttatgatattagagtcaccggacaacatgtgggatggcttcaaggacgcaatacttctacgaatcaaaggatgaagatcgatctggttccaacaggggagggcgatgggcatgggatttggggtggtggaacggatggtgtagtgagattctggagagatccgacgcactctgctggtgcacaagatcctacttgggaatggaagctccatgatggtaagtaagaattcaactccagaatgacggcatactgaagtaacgaaatagactcactcagcagcactgtaatgcatccaattgggaacattttggccacgacgtctggccagaagcacttcaaagactacactgatatgggcggacttgcctcgactctacaggctgatagctcgctggacgtgtggcttctccct

SEQ ID NO: 26377 - DNA, 402 bp, Emericella nidulans
gtagaactcaccgtcatcatgcggcgggccatcgactcgctctacagccctgggtttgcacgccggccgtggctaaccatcagcgcctccatcatggatttggtccaggagaccgacgagtggctgagccgggtccctgccgtgttccagtggaggggcagccatccctcgcctcacttcgaacgtcagcggtggagtttggcctttcggttctacagtctacgcattgccctcagtcgaccctcgctgtgtcgctcagagcggcagcggtcccccaacgaagcgtcggcgctcagtcagcaacggatagcgcggatatgcatcaactctgcatgcgagctgctggatatgctgccggacaagccagatgcgctctggctcgtccaagtgtcgccctggtgg

SEQ ID NO: 26378 - DNA, 213 bp, Emericella nidulans
cactaccgtatcatcatatcactgacggcagcaggggcattgattgggcgccgtatcacaccaactggacttccgcaaaccgtagctgctttgcactcggttgttggtcttgcggcggtgcttacgagtgccgggagtgtaatggcagacatagatcacatttcgactctccatctagtgacggcttatcttggggttctaatcggtacttcc

SEQ ID NO: 26379 - DNA, 492 bp, Emericella nidulans
accaaagcgttaggccatgtcggtctgtcccagctgccgctacaagtggctatgtcaccggtcttttacgtgtcatcaacaccaagagcttcatccctgctgtccatcctgactgctgttccgcaaccaaccgtgacagcttaccatcgtctctttgctcgcgtggtcatttctccactactcatcggccacgcaattttgtattgcgcgttctttttgcagtcgagccaccctggattcagctctttattcttcaaacgtattttagacttggatgtccagttgggcatcgttgcaataactgccgctgccgctattacagtgctcgcgcgaccgcaggggaaagcgggcgggatatggcagggtaccgttaaaaatagacgacgtgctttctacgctgtgcatctttcgttggtggtcttgctgtgtgttgcggcgtatttccatgttgcgcaggcgaaagcatttatacttgaatcactggtggttttc

SEQ ID NO: 26380 - DNA, 525 bp, Emericella nidulans
atcatggctgcaccgagcttggatcagctagtcaagggctctccagcccccagcaatcgtctacgttcgttgtcagccccgtctgcagagccattgaagtctagctcctcttcgtacccatcaacagcatcggtttcatcgacaccttcgtctacaaccgccaacgatcctctttcagcactgccttcttcccccccgcaaatctatttgaacctgctcattctcgagagctcactcagagctcagtatctggcgttacgggaacgccggcgacagaacacattcttcctgctcttgctcgcagcatggattacatactttggctacgcgctgttcctgcgtccgcgtgaggacggacgtggagttggaggatcggtatactggatggtcgagatgtgggaacgggtcgcgctccttggaggtgtggcaacagcactcctggtttggggcactggacaatgggaacgtggaatccggtggcctcggcgctggcttgccgccgcaaatcgtggcctacggcccatg

SEQ ID NO: 26381 - DNA, 204 bp, Emericella nidulans
agatacgagataagtaatggcgatgcagggtgggaagaagcagagaaacagatccgttctggcggcgccgcaaccgtcagcgtcaagtcatcgaagcaaaataaacgcaagaagggtgagactgcgcgagagatatacgaacaggagatagagtccaagagacaaaagatcatccagaaagggacagagggaaagaagaagaag

SEQ ID NO: 26382 - DNA, 315 bp, Emericella nidulans
gacggcaaccctacctcccagtggccgatcgcaacgtatcaaggcatcctaatctacctgatcttctcgctggttctgtacggcacagaccatgcctcattcgaactcagcttaactttccgtatgagcccgtctgaccattccctcctctcgtccgtggtcaaaacatgtcttgaaaacaacatcttccattatcctcgtatgctgcagcggtatgtgggcgttgaggatattacctgtatctgggttggagtagaggagaacaaacggttaggactggcgcagtatagggtttgttgcatgtgtgctggtgag

SEQ ID NO: 26383 - DNA, 462 bp, Emericella nidulans
atgaatggtcaatcagggaccatgtcgcccgtctccgtagacggaagtgactggtcagggcttaatcagtaccagaagtcggatgcgcctttttcgccaaccttctcgactcgcagcaatttggcgacgcctcctacctctgggataccggcgcctcccaacagtgccggcctgccaaatggctcatcgcaattgagcgattcgggcaacccatctccgcccaactccattgctgcgagatctagcgatggcacattgggcgatcagcgtagcaggcgacagcgacaggtggaggagatcctggcgcagcattattccgcattaagaaggtttctatatacgagttatcgggacgagcggtcgaacagaaagtcaagcaaaggccagaccaaattgttagggctctcgccaacccagttttcatgacctaagccattatggtttatgccaagctactccggc

SEQ ID NO: 26384 - DNA, 405 bp, Emericella nidulans
tgatcgccattctgcacgtcccctcggtcaaagtcatgtcaagcaaatactgtgccaaacgatgaatcagaattggaacctgcgtacaaggccttggttctggctatgagctttgccgctgtggtgagcatgacgccggtgcagtgctagtccatcctcgacgaggatcatgttacctgcatccaagagtacagagttgccgtggagcagaccctggcagaagccaacttaactggcaccacggacgtgcatgtcttacaggctgcagtcttgtttctgctgtgtcttcgccggcgtgctgattcacagctcgtatgggctcaagcagcggttatagtccggattgcgcaacgccaagggctgcaccgtgatggtcaacagctaggactgactccttttaatatg

SEQ ID NO: 26385 - DNA, 276 bp, Emericella nidulans
aggtcattatcgaaagatctggagagcggaacgctttccttgacaggaaccacttcccttttcaggagaggttctgcgaagtcttcgaaggggcaaagtccgcctcaacagccaaggttctgtttttcggcttccggacagagtcttttgatctgggacgtaagaagcagctcggtgatacgatttgacataaacttcatggatcgaaggagattcatggggcatcgttacgaagtcactggcgtgcagcatgctgcagctggaagtaagcgatgt

SEQ ID NO: 26386 - DNA, 474 bp, Emericella nidulans
gcagccatggcgaccacctcgcaaccgcctatcaagcttaccggccacaagaactttgtctatcgcctcgtgttctctaccctgaccggccgcacaatccacatctcgcagattcgtccttcctctcctaccaacccaggtcttgcatcgcacgaaatctcattccttcgattactagaggctgttacaaatggctcacaaatggagatctcgtacactggtacaatcattgtctacaaaccaggcctaattacaggaactgcttctggcgttggagcaagcagcggtagtgtaattaggcacgagattccagcaggatgtactcgcggtgtcagctacttccttatcccattatgcctactggcccctttctccaaagctccaatcaaagtccttttcaccggtcccggtgtaattacttcctcaacaccaaccggggacatgtccgtggacagcgttcgaaccgcgatcctg

SEQ ID NO: 26387 - DNA, 210 bp, Emericella nidulans
ctattcctagccatgacatcaaagcaaattcccgacattgaagtcaagcctgctcctggcatctcctactttaccccagctcaagaaccgccggcgggacttgcagccgatccgcagtctgatggagcgccaattcccaagctgttccagcctctcaaagtgagaggtatcaccttgcacaaccgtattggggttcgttgctccttcaat

SEQ ID NO: 26388 - DNA, 471 bp, Emericella nidulans
atatctcaacataacactgtcttcaaggctatgctgcagagctctttgatttgcctccacctcttcaacagcatctgcgccttgccctggtgccttcgttccatgctagaccgaatgttttccaactcacgtatagtcaaatctgcttcttccatatacgcgcggatccagcctttgatgacgtcttctgatttctttgcatctactcctctggtagagtaacctaggacgtagttctgccagtcctcaggtctcatatacatgatacaagcggcaacctctgtccggtagcatactccagtgtccatgacctgatagtttctactccgcattagcagggccccagatgaccgcaagcaatgagcaaagacggccagaactcacccaagatactgctgtaggtacaattcctcctgttgtgaggagctcagttctcgcaatactatatcgtcaagatataatgcttcagac

SEQ ID NO: 26389 - DNA, 372 bp, Emericella nidulans
cactacaggaaagaaccgggcgatgataatgcatatgttaatgggaggattggaaatcataacgtggtggtgtgctatatgcctggcataggcaaagggagtgcagccagtgtggcatcgagcttgaaaatcagctacaaaaggattgaagtggcgctggttgtcggtatttgtggaggtgcaccatacccattatctggtggagaggtctttctaggggatgtcataatcagtgactctgtggtacagtacgacttcggcaggcagtatcctggtggctttaaaaagaaactgggtgtcagggacacgcttggacgaccaaaccgagctatccgttcaatactggcaagtctccaggcaaaacgatcgcgc

SEQ ID NO: 26390 - DNA, 216 bp, Emericella nidulans
cgtgtatagagccgaaagctgcgacatctgacaggtgtttccgtccgtaatcttgtggtcaaccctcctagccgggctcgagggaaaacaatcgacgacgaggatatcccaaactctttgcagtcgccgtcaaagatacttgcgcaagaggctaatcgaaccctcaactactcgcgatcgttctcgaatctgaagtcctccccagcatccagcaat

SEQ ID NO: 26391 - DNA, 619 bp, Emericella nidulans
gaatgaatgtcctctccgggcactcaaggtacttcctgggaccgatatcgctccaacaatttgaccagcattgaattggacggccactcggcagagacatggaattgggccgcagaagatacagacatggcggctacttctgggacagggtcggtttctacagtagaggctagcccggcaggcgaagtctctatcactcagaaaatggtctctgcaacctgtggcagtgtcctaaccggcctcttaggtaggcaaccacgcttggttttgacctgcagctttgataaatgcctttttgagaagagctaaccgttttctagtgactcccctagatgtcgttcgcgttcgattacaatctcagtcacctatcaaaaacacttcaccatttacgtcacacacgacgcctaccctaaaaaatgcccctcccaaccttggagtcactgcttgctgccgagaagttttctggggaggtcaaaactcggaaatatgtatggttggaccgagcgggagtgctctgggggccacctcccagtcagttgccgagtgtgcggtggaggaaacccaacgcaggacctttacgtctaccttagatggtctgcggaagattgctcggaatgag

SEQ ID NO: 26392 - DNA, 389 bp, Emericella nidulans
atccggtatgccgccgcacccgtaggaaaattacggtggcagccgccccaagcggtccagcctccagcccatggtatgggagccatttccgctatcgatcagccccccgtgtgccctcagtcgggtgcggccgggaccccgccctcttacggctttaactcgggccctggagacgaggattgtttgttcctgaacgtctatgccgctgcgggcgcatcggatcttcccgtcctagtgtggattcgtaaggcgaacccccgcccccttcctccagtggtagatctggctggttgacgatatgaccgtgatcgcgtcttctagatggcggtggatatgcattgtttggcgcgacttatgatccgagcgccatgatcaatactaatgataac

SEQ ID NO: 26393 - DNA, 673 bp, Emericella nidulans
ccggagtatctggaggtctctgaggacccgacttcgaatcccggcgatgcgaggcgctatttcaaagaactatttgaatgtcccgtgccggcgacgcgaaaataagagattcgacgatgtggagaaggcggaccgtgtccgcaagcatttcccgctggtgagcatgaagggttgcggcggcttgaagagttcttagagaaagcgacacttcatgatgatgaaaggaactttttatcgggcgagacaacgtcgaaactaagtccgtactttgcaagcgggtcattgagcgcgcggacggccgttgcgaaggcacgcgaagcaaatgccggtaaaatatctcgcggcgaggccgggtatatatcttggatcagcgaagtcgcttggagagacttttacaagcacgttctggttcactggccgttcatttggtaaggcccacctccaccatttagcacagaaagctgatgctgtcagcatgaacaaatgcttcaagtttgaattcacgaacatcgactggtcatataacaacacccacttcgaagcttgggcggccggcaagacagggtaccctctggtagacgccgcaatgcgccaactacacgcaaccgcctggatgcacaaccgctgccgcatggttgtttcttccttcctctgcaaggatctgttgatcgac

SEQ ID NO: 26394 - DNA, 618 bp, Emericella nidulans
caagcatgttcttacggaacgcgcctaacaaccgagcaccttcccaagatcgcacaaccgtcactctggacctcgttaattccgaagtctttccggaaccgctccccatccacatcaccagcgtcatctccgaaaacaaaagaatggaatccagcgtccttctatatcatcatcttcatcctgatcggctcgcaagcaatccggatgattgcactcaagaacgaatacaattcctatttgcgcagcacagatgcgaagattaggcttttgaaagaggtcattgggaagatacagcggggagaggaggtggacgttgaaaagatgttgggaactggcgatgcgagggttgagcgggagtgggatgagggtttgttttcctttctgggtctgttgctggaagcacactaatcggtttctttgctagttttgaaagaaattgaacgcgaagactcgctatggcatcagaagcaaaagcgggcagcggaagataaagcgaaagaagaagcgcgggttcaggaacaggcaacgaaagatcctgccgaacctgcggtaggtaggaatgaccaggcaacagcaaaggacagccagacgaaacgaaaggccagcttcttttagcca

SEQ ID NO: 26395 - DNA, 741 bp, Emericella nidulans
ccacaactgaacatagaatatctggcagatcacggcggagatgcattggtccccctggaactcactcagtctgaacgatcgatatcaatatctgaagatccaggactcagcttccgcaagttccacgcgccgctaagcctcttcctccaatggatccgcgaggcccaatcttcatcgcaactacagtcgcgcctatatctggctcaatgccaactccttgaccttccccagattctccgcgacgatttccctacgcctacaatagtggcaaaggcggggaaaggtgatgtctatgatacaaatatctggatgggatatccgcccacctacacgcctttgcaccgagacccgaaccccaatctgtttgtacaacttgctggacgcaagactgtgcggttgctgggaccgcgagatggacaggcagttttctcacatgtgcgaggtaagttgggtcgcagtgggagtcgggaggcggcagccttcaggggtgaagagatgatgcagggccgggaaagaggtctgttggagcaagctatctgggatgatgcggggaagggacaatcaggacaatgcactgaagggtttgaagcggagcttgacgcgggcgatgggctattcattcccaaaggttggtggcatagcataaagggaatgggcgagagcgttactgcttcagtaagtcattcattccatccaatactaactcctctaacattcccaggttaactggtggtttcgtta

SEQ ID NO: 26396 - DNA, 318 bp, Emericella nidulans
aaaatcaaagctctttcacgatccactgcctcgcagcaggcgccggggtctgctgtagctcgacaaccacgaaatcttgacccggctcaacatccattcgaacgtgcgcgcgaatatacgagagccctcaatgctgtaaaattggagcgtctctttcgtgcgcctttcctaggtcagatgggagagggccatgttgatggtgtctacacgatggcgaaggaccctggctctttagaacgatttgctagcggcagtggtgatggtgtagtgaaagtttgggaccttgtaacacaaggcgaggtatggaacaacacggcg

SEQ ID NO: 26397 - DNA, 321 bp, Emericella nidulans
catgtcctctgcgagaaacctcttgcgttgtcgttggatgattgtctcagcgtctacgccgcttacaccagacagccaagaagtatcttctcaattggccatgtactccgctacagcccccacaatcttcttctgagacgactggttcgagaagaaaaggtcattggcgatattgtctcagtagagcacaccgagccagtcgggtactggcattttgcacacagttatgtccgtgggaactggagacgggaaactgaaaatggagatggaagtttgctgacgaaaagttgtcacgacgttgactttttgctttggcttgtt

SEQ ID NO: 26398 - DNA, 909 bp, Emericella nidulans
gagatgagctgtgacatatgcactcgtactcaagcatccgcgtttttatgcgcaacatgtgctcggaatcgactttaccagctacgcttcgatagcgccagtgtcattttggaaagagaatacctaggtcagcaaattgaagctgctataaacgcagacaacgaacatgaaaagtgtttgagtggccggggaaataatagtgcggaattggaggagggcaggccccgactctggaccattcagaggattaaaaatgagcagtcacggtcagcagcgagaatagaaattgtcgcgaaccatatcaaaagcctccaatctcggatcaaagataagagtctcgacatatctcaacgcaagataaagttaacgcgacaacggtccgactctgaatctgctctataccagctgtcagaacgagagtcgggaatgttgagcggtatccaaaatattatcaagagaacggatcatctttggcatgccaaccacaccaagacagctgaggctcggatatttctctgccgggaggctgctagcctctacggtttgaggcaaaatgtgaggaaaaataacaatggaatgaaggaaacatatactattggaggtgtgggtatccttgaccttcgggaaatgaatgggaagtctctaccttactctggtgtgaagcaatttgttaatactcatacaggcgccgcacctgaccatatctcgacgtcgttttcctacattgcccacatccttgttcttgtttccaactatttatcactgcggctcccggcagagataacgcttcctcataaggactatccgttgcccacaatttacacaccctctgcatcatatcttccacaggaattacgtgccgtgccgttttccgaccagttgccgtcttcgaggccgacatcgcgcaca

SEQ ID NO: 26399 - DNA, 375 bp, Emericella nidulans
tttcttttaacgactgggcgcattcagaaattcgctgctttatacttcaagtactggcacgcgaattgcccaatgatccatgcgccgactttcaaccctgaatatgttgcattgccacttcttacgtctgtagtcttcatgggcgcaatgtacacgaaggacgagcgagagcgatatgctgcgaagagactccttgacctcgcagagctatacgtcttttccagcgacattttctctagcgagtatgaagtggccgcgacgatttgcggtaaccgacaagccgaaggcgaagcccacggttggcttcagttccagaccctccaggctggatttctgatggtggtggctcagtactgggctggggggccggtttcg

SEQ ID NO: 26400 - DNA, 360 bp, Emericella nidulans
atccctgccggagagcctcgcgtactggcttcagctatttcctcgcggaagtttcccggcttgatacatgtggagtatacactggaaaacccctcgctgcactttcttaccttcagccttaccatggaggctagcgagtattttgcttttagcggcccgaaaacaatggtggttcagctggcgcccgtgagtcggcaaaccgtccgttacaatctattggcgtcgaagagaggcttgtggattcaaccccagctacttgtggtggatacgtatttcaataagtctttacgtgtgcttccaacagaggatatgaggtccgataaaaagggtatcctgatatgggtcgatgctgaggattaa

SEQ ID NO: 26401 - DNA, 576 bp, Emericella nidulans
tcaggccagtatatctcacggtgcaaacggtacggcgaggtcatctggtttggcttcggcatgtggacactgtaagcgttccacgtcaggacgcaccctatgcatacactgacacgtcttccaaacagcggcgccggcctcaccctcctcttcaagacaacgacccatccagctgccatcgccgtaatagtcgccataaccggcgtcggagtcggatgcacctttcagccaacccttgttccttccaggcccactgcacaaagcgccaacgtgccgtcgtcatctcagacaggaacttcttccgctgcatgggcggcgtgcggccttgcgatctccggcgccgtattgcaagatacgctccgctcgcatttgccagtcgggtatgaatatctgtccgactcgacgtactctctacccgcgcagtcgtcagtcccggaggctgtatggggcggcattgtggatgcgtatacggctgcgagcagggcagtgtttattttgcaggtcccgctaattggggtttgctttttggcttgtttgtgtatcaaggatcaaggattagagagaccgaaggatcct

SEQ ID NO: 26402 - DNA, 743 bp, Emericella nidulans
tatatatccccgtcaacggcgagctatgccactcacagcctgctttcgacggtacaggtgctgcggaatgtgattgcggctgcggcgcaggtacgcaaacccatcgctagaacccaatactcttcttctttggaagaaactgatatgagagactgacgagaacggtagccgaccgccgcgaagatcgccgacatgttcggtcgcgtggagttgattttcttctcggtgttcttctatactctcggtatgttgccctaacatgcctgcttagcaatgaccacgctaacctggattggccgggtaagggaccgtcattgagacggctgctgataatgtgcagacattctgcgcgggtgcggtgatttatcaggttcgttgtcgccttcgccgtcgtcgtttgttggtctgggttcattcaggaggactgacactcagtatagatcgggtacacggggatcatgttcctggtggaggttctgattggggatactacatcgacccgctcgcgtcttctcttctcatacatacctgccacgccgttcattgtgagactccttgcgcctggttagacgattatcttcagtgcggctggctaaccagatgcccagatcaacacctggatcggtggaaatgtgacagacgctgtgctcaaagtaacaagctggcgctggggaattggaatgtttgccatcatcttccctggtacgtgcgcttccatcccaactttgatagtcaagctggtc

SEQ ID NO: 26403 - DNA, 232 bp, Emericella nidulans
tataccaagaagcaatctttaagcttcataaactcttttacacacatgtccttgtgcactccttggtagtctgcgacaatgcacttgccatacgcagctgcctgcattgatcgaattagattctatcaccaagatgccgggaaaggcggacattacctccgtggcacacttggaagtggcctttgcaaacttttcaattggccgtgtccgtgttgatggcatcttttcctct

SEQ ID NO: 26404 - DNA, 306 bp, Emericella nidulans
tgctatactaaattcgctaatgaatcaaagcggcaagacaatatcacggcactcttagacctactagatacaagggacttctattcccgtctatattcgttacaacttatgttccagatttcgagcgcccgacccgagagaacgcaggaatgtatcctaacagcgccattgggcattcctaggctagtgagcacattgggagatgcgcgggagccggtacgaaatggtacgcatattcggtttattgagtggggaaaacggtgaacgtccagctgaccggcgctttacgtcttgcagaagcactgc

SEQ ID NO: 26405 - DNA, 270 bp, Emericella nidulans
aatgagtgccaccaaggcggagtcccaaaagatctttgagaaactcaagaccaaaccagcaaataaggtgacttaacccctccatataccgcaatctcgtagactgaccccgtgttcgcggaaattacccagatatgttttgactgcggctcaaagaaccctacatggtcatccgtgcctttcggaatctacctgtgcctcgactgctcagcgaatcaccgcaacctcggtgttcatatctcctttgttcgatccacaaatctcgaccgt

SEQ ID NO: 26406 - DNA, 312 bp, Emericella nidulans
agttactatgagaatgcttcctaacgatttgacctacatgccgtgtccacgtacctggctggtctgggtcttgggcttttgtcaaccgctgctgcggctttatgctctgcattggccgacgtaccgagtattggtgccgaggtagtgcgagtgactttccgtctcggcacgatagcggatgagatctagcagaacctcgagcctcgcgatacgtgctgctccacaaacacctgagcttatgctggtgccggcgctcagggtgaagaagtccaagctggggtggacgctatccacgcaggaaaggtagctgcc

SEQ ID NO: 26407 - DNA, 378 bp, Emericella nidulans
ttcgacgacgaattcgacactccatccttgcaagtacttgcaacagtgatactgagccaaaacgccggcgaacatgctcctctgcagaccagaagaattagagactcgtggggcaagctttcgccgctacgggattccacggattcagccctaagtctgctaatgagatggctggtcaaccgcagggtccagctctgggactgcaatggagaattggaagctttctcgcatgattatcaaaaacatctgacccaatggttgcataattcgtcttcacaggccttcggccatccaacccaaatgaagagggggaatgtgggtgctgtgtacgttgtcaactgccctgcagtccacccagttcctgaggcgcttctggag

SEQ ID NO: 26408 - DNA, 306 bp, Emericella nidulans
caaccgttagtggagatgggccagctgggccgctccaagaagatcttcttgcacaccgatgccgtttttttcgcgggcaagattccgcgcgatgtgagggagatgtacatcgctctccggtccgactctagccacaagattgacggcccgaagggaattggcgcttggtacgttcgcagactacccagggtgcgtctagaaccgaccatctgcggcggtggacaggaacgaggacagctcagagcaactctggctccctacctggaagccggggtcggggaggcttgtcgtgtggccgctcaggat

SEQ ID NO: 26409 - DNA, 1029 bp, Emericella nidulans
atggcaagcattgcctttcctctactcgccaagagcttatcgctcacgacagcccatacatacagctatgcctacaactcgcctataaacccgtcgctcccaataatactctttctccatggcttcccatcatccagttacgactggcgtcatcaagtccagttcttctctgcacaagggtttggagtactggcaccggatcttctggggtacggtgatacatccaagccgtggacgctggagagctacaaagccaagacaatggctgctgaaatcatcgagatattggaccatgaaggcattcacaaagttcatgctgttgcccatgatacaggctgcaccctgctatcccgccttgccaactacttcccaagtcgccttctatcttgcacgtttctagacgtgccttattccaggcccggagagcatttcgatctggctgctgtgaatgccctgacgaaacagttcctaggcttggagagattcgggtatgtggagttctttgtcaggcctgatgctggggatattctcgatcagcatgtaagctcttctttgccgggaactgaaaagggtcgaagctgatatttcaagttcgactcgttcttcacccttttctatccccaagacccggaactctggttagagcacgtcgggcccaaagggtccatggagacatggctcctccaagaccgaactgcgccccagccagcctacatttgcgaagaggagcgcaagatacaccaggatatcatgcgtaacaatcacgggcctgccttgaactggtaccgatcactggtgacaaacattaacgagaaagatgagattcagtcgaatctcgacccgacattacccatgcctgtcctcatgatctgtccgcagccaacaaagctggaattcccaggcgttgaggagcagctgaaacaggtagcaccggatctaacgtttaggagggtaagcacgactgggcattgggtgcagttggaggcaccaaatgagatcaattccctactcaaggagtttttcgagagg

SEQ ID NO: 26410 - DNA, 444 bp, Emericella nidulans
cacagattcattcctaaccgcgaaggtcaagatctccaagctacctacagtctgcttcatgaagatggatgtccttcaacaccatcgaaaacgaaaaagcgaactccacactcagagcttcattttcaaaagagtatgcccaccatgattgattttggcttctcatgctgatattttctagcggaagaagcaaatagaatgtattcacgggttctgcgcagcgagttatttggaaatacagttcctcaggctgacttggattcgcttccttctaacacgattcgctcatccggtattaacgacaaaacccggtctcatacacccccttcgcatgtcgtctccgctcttccacctgccagtatcactccctccactcctcacaaaaacctcttcaattacgcctctccacgcgctggatcggcgcatcccacgccatccaagacc

SEQ ID NO: 26411 - DNA, 345 bp, Emericella nidulans
gaccctgtgtctcgagcagccacaatccaagcagcacgccaggcgtttgaagaaaaggaagcggccaagaataggaaattcgaagaacagcgtatcaaagcagaagagaggcaaacaaaacggaaagagaggcaaagtcaccgaacgtcaatcaaggacgatatacgggagaagagttggggtcttgatcctgatgataaccatggcccgcgtcggaccacagaacaatctaccccggggagctggaaatcccagtcaaaaagcacttggatgcttttccttacttggctgcgaactaggatattcaagttcagaaggaaggtgcgcagcttgagctgactatat

SEQ ID NO: 26412 - DNA, 354 bp, Emericella nidulans
gaaacggacagcgatattggtgaagagtttactcctgaggagcaattggcgttggaacgggagcaggcggatctgatgtaccctcccgtacatcgcaaacgcctgcagaagccgggaccagtaggtcgggccgttccttggctaatcatccttacgctttttacaagctttggtgcttggtggcgcaaggaaaagattgagattggattctgtggcatcggaaaaccgacatggtcacttgctgagactaaggttcctgagtgggccaatgtcctcgaacctcaatgcgaaccatgcccaccccatgcgttttgttaccataattttgaggctcgatgcgagcatgactttatt

SEQ ID NO: 26413 - DNA, 288 bp, Emericella nidulans
tggcgcattcgccccgcacttcacgtttttgggcacgtccatgctgcatatggccgggagcctgtttactgggatgaggctcagaaagcgtgggagcgaatctgcagttctcgtcggcctcgtgcgcggaaatcgcgcttcagctcgctttttgggcttctgcgcgatttgcttgacgttcccggctgggttgacgccgcccaagtgcttgcgtacggcgtactaggggtgatatgggccaaagtctggggcggcgagaaccgggggggatggatggtcattgcatcc

SEQ ID NO: 26414 - DNA, 387 bp, Emericella nidulans
ttaccgattaccaagttacccgaatatacttcttacaccgtcactcctaccggggggtcgcggttttgcaagaaatgccaatgtccgaagccggaccgggcgcatcactgctccacgtgcaacgagtgtgtgctgaagatggaccatcattgtccgtggctggcgacttgcgttgggctacgcaactacaaagcgtttctgcttttcctcatttacacgtcgctgttttgctgggttgattttggtgtctcagcaatctggatctggacggaggtttttaatgacacacggtatacccacggtatactaccggtgcccgtcgtgttgttgtcgattctcggaggaaacattgggctagttctgaccggattcacggcttggcatatc

SEQ ID NO: 26415 - DNA, 265 bp, Emericella nidulans
aaaatggcgctctcatccccacgcgccttccagagcacattcaaagtgacactccccgacagacaggtccaaaccccttaccacgcacggcgcgctcacaagaagtcgaggaatggctgtcttgtctgtaaaggccggcgggttaaagtgaatatcttgcctcctgcattatttagccagcggcgttctgacatattggaactagtgtgatgaacgcaaaccgacatgcctgaggtgtgagaactatggagcagcgtgcgtctac

SEQ ID NO: 26416 - DNA, 430 bp, Emericella nidulans
gacaccatcatggctcccggtgtcttattacaaccgtcgcaatcggagcttgaggcagcttccccgccgaaagctgcggcctcgttattgcaactcactgaagaatgggacgataccattcgcttctatcttaatggcaccaaggttatcttggactctgttgaccccgaaatcacattgctggaatacctgaggggtattggcttgacagggacaaaactagggtgtgcagaaggtggttgtggtgcttgcacggttgtaagttgttggtggataatgttctatcagtttcactgacattagataggtcgtttcgcaaatcaatccgactaccaagaagctttaccatgcctccatcaacgcctgcattgcgccgctggttgctgtcgatgggaaacacgttattacggtggagggcattgggaacgtt

SEQ ID NO: 26417 - DNA, 326 bp, Emericella nidulans
gtagaaacctttgaaggcctcgcgcttggctctcgcatcgcgagcttggaaatggcctgacaggccattcagccatggcttatgtcactggcttatggatgcacgtacgttccccaaagctacatgttacctttactgagcaagttagtacacccatcgggcaagcgattggtatcgcaacgcattcgctgtatagccctgattcagaggtcggactgctcctagtgggcacaatgaacgccatctcagcagggctgctgatcttcgcctcgttaatcgagctgttgtcggaagactttttgagtgacgagagttggagagtgctc

SEQ ID NO: 26418 - DNA, 227 bp, Emericella nidulans
aaattcgactgctcgtacgaagggtgtggcaagagctattcgcgcgcggaacatctataccgccatcaattaaaccgtatgctcatgcctttctcccaacccactagcatggatactgatccttggctgccctagacgcccccaagcaaatctaccggtgcgattttcccgagtgctaccgttccttcgtccgacaagacctctgcgtccgtcaccgcgaacgtcac

SEQ ID NO: 26419 - DNA, 321 bp, Emericella nidulans
ttcaattccccgccactgcagcgtccgttgcaagttggttccaatacccgtcatgccctgaatggctcgcctaccaacgagctgggtcctgcacgatcggcagcgttggatgagccgctcgtctccaacaggtctcaagatctcggggccagttacgcggtatcagctgatctgaccgggtctttggtaagcccgtccgcatacactgatcaagcgggcttacaaatccctgtcgatggatactccgacatcaacatggcgccagtaacctcatcggcgtctgctccgctcgatcaaacaaatggcctaacccttgactct

SEQ ID NO: 26420 - DNA, 240 bp, Emericella nidulans
tatggatacgccttggaaggtccgattgcgggcgccccggcgctgtcaacggtcgcggagcagaggcaagatatgcaggcattcttgcgccgtgtgggcggttgtcgggagccgagcgaccttgagaccatgaaaggacgaaatcagtgccttggactattgattattttgcgggatgggttcaccaacgcccgatgggagctattggctgaagctgcaaacctgctgggcagttgcatt

SEQ ID NO: 26421 - DNA, 453 bp, Emericella nidulans
agatgccattctcataagatcaaatgttctggtgaccagccctgtacgaaatgtcgctccgtcggatgtgctgatgagtgccaatacccggcacgcgaccgtcaagtcaaagtcagcgaaaggtagactgtccagtataggcattctgtgtccaggtaggtctaggctaatattgtcaacagttatttagaacaagttctggccgagaatcaacgccttcgagcgcaatcggcctcctcggcaaatacccccgaggcacgtcctggggccgagcccagccactcccgtctttgtgcggacggctcagacgaggttgaaagtgaggacgagggcaacaccggcgtccgaaaccccataattggagaccgggcctggtttcatgcctatgacccctcagcaccgccaatttttgtgggcgaggcggcctgtacggcgttcgcaacccgctttcgc

SEQ ID NO: 26422 - DNA, 360 bp, Emericella nidulans
atgcctattcaagggatccgttaccggtgcgccaactgcatcgattacgacctctgtgagacatgtgaggcgatgcaagtacatatcaagacacatctgttctacaaagtccggataccggcgcccttcctaggaaatcctcggcagtcccagcccgtctggtatcccggaaaaccttcgatgcttccgcgcactctacctcgctcactagcaaaacgtttgatgaaggaaaccagctttgaggggactgaattagaagctctttgggatcagtttcgctgtctggcgaaccgtgaatgggctgaggatccgaacaaactctacatggctatcgatcggaaaaccttcgatcgctgcttc

SEQ ID NO: 26423 - DNA, 201 bp, Emericella nidulans
cttgtggatcgcatcaaaccgttgctggtgcatctaaagaaatctaactgtggcaagcaaattgcggcgatcgaaaagctcattggagactcgagtccaagtccaaatcctgcgattcctgcttccaaccatgcttcatcgaccacaccacccaactctcacaaatcttccccgcagcctgtgaagcgcgcagttgaagag

SEQ ID NO: 26424 - DNA, 231 bp, Emericella nidulans
tctaagccaaatgcaccgacagagtggttttacttcaacggtcatggggcgacaaagttctatcctctgggtgatcatcgacagtatcgatttgcaggccagtatcactatgtaaacggtccgcttggcccgcggttcaagcatcttaaccgccgcaaagtatgtcagacgccggatgaagagccctgtatcatcaaagacttcatcggagagaaaaagcgcgctaaacgg

SEQ ID NO: 26425 - DNA, 573 bp, Emericella nidulans
ttctctttgttcaggccaaaggagcatgggcgcaagcaagctaaaatccttacacgcagtcaaacgatcgctccttcgataacccaagatctgagacagcaagatggaccctactttgaccatgattcttatgatactggcttcaccgcgcccccaagaacaactgtatttgaatcagctggtgacatccttatgccaccccttcccccagtcgactacatagtcaatcccgaatcaaggccacgtacgatcttgcacgaccgtgtttaccaccctaaggacattccccctcccattgtgaaccggcgcagtgtagcggcacgtacatcccaggttagggatactgctgcaggttacgatatcgcgaaggacttttcaaataacgcggggctcaaagtggaggaaaaaatcgctcgggcttaccaccgaggactctcgtggcgaaaggtccttgttcgtttagaacctgacgctcacaacaacataatcgttcggcgtatgttcacaaatgcctacggctggccagtcgtgcagcatctagtagatgcccacttcgggccaagctcctcagac

SEQ ID NO: 26426 - DNA, 270 bp, Emericella nidulans
accacagccgaagaaggcggatcgggcctgatcaagggtctcaagaaagtcaaaactccagagcccgagaagccttacgatccctttggcggaatggttccaaataagagagactattatacattgcgagattactatccatcctcgtatcttgatcctatccgtcaagatacacggatgctcgcgggcggatatgaccttcaagaatattactcacgaaccatgctcgaggcatttgcgggcttaggttgctttgttgacgaggaggtt

SEQ ID NO: 26427 - DNA, 489 bp, Emericella nidulans
cccgatccgcgacatagcgagttgctccgaaagccagagctggcatcagagttccccgacgctgtggatatagagcattccccagttatcttgatatgcggtcacggaggccgtgatatgcgatgcggagttatggcgccaatattggaagagcagttccgaaagatcttggagtccaggggtatatataccccagctggtcctgacaacgacaagtttgatcgcccggatcgtgctcatatcgggctaatcagtcatatcggcggacacaaatatgctgggaacgtcatcatttatatccctaaaagcatgaagtatggagactcgtctgtggcccatccgctggccggtagagggatttggtatggccgcatcgaacccaaacacgttgagggcgttgtggaagaaactatcctcgggggcagagtgctatcagatcattttaggggtgggatagaccatgacggaaccatcttgcggctatagaac

SEQ ID NO: 26428 - DNA, 310 bp, Emericella nidulans
gagatcatgcccatgatttacaagcgatttacggacaagacatcggaagaatggcgacagatctataaggtagagatgattcaatatttattctttggaaggtcgctgactgtgccttgcgaaaattcaggccctccaactactcgaatttctcatcaagaacgggtccgaacgtgttgttgacgatgcccgatcgcacctgtccctcattcgtatgcttcgccaattccactacatcgatcccaatgggaaggaccaaggaatcaacgtccgcaatcgagcgcaggaattagtgaagcttctgggcgat

SEQ ID NO: 26429 - DNA, 288 bp, Emericella nidulans
cctttttctatcattaccccgccgaacccctcagaacgcggtgctcagctaagtttgcggctggctccaggtctcctggatagcgttttagaaacgttggaagaatatgcagttgtgatcgacgagaggaagccagatgtcattagggttgcacccgcgcccttgtacaacacgtacgaggaggtgtggcagttttgccagattttttcagaagcctgccgcaaagctcttgaaaagaaagactagcagccttgtctctctatgggtgcattatacgatctattttac

SEQ ID NO: 26430 - DNA, 356 bp, Emericella nidulans
tcatcgcagcgctttatcaccaaatcgcgctctcttacggctgattgcgtcgcctacgacctcgaagacagcgtcaccccgcacaagaaagccaaagcgcggtcgctggtgcggagagccctggatgagcccgcaccccccagtatccgcgagcgcgcagtgcgcattaactcggtcgacagtggactggcactggcggatctgacggaagttgtacgtcgctgcacatgccgtaagctctcgctgtctagctagatagctaataaactgtgcagctcaagtctccaaatctctccacaattgtgatcccgaaagttaactccgcgtcgcacctgaccttcgtcaacgatgtaata

SEQ ID NO: 26431 - DNA, 207 bp, Emericella nidulans
gccgctccaaccccgcacttcgaagacccgcctgacggtgcaaacgctgaagacgacgctgaagaccttttcagttcctttctccctcatctattcccagatgatgcacctcaattccatggcgaccctggccagtacctcctctattcgtctccgcgctatggagagctacagatcatggtcccctcatacccgagccagagccag

SEQ ID NO: 26432 - DNA, 547 bp, Emericella nidulans
gcgcatgtcttcgataactggtggtcgacggaagctgggtccccaatcactagccgagcgattacgcctcacatcggcttgagaaggaagattgcgacaagcaaagccatcccgccaaataagccagaaagtgctggacagcccatgccagggtttgatatccgggtcgtggacgaccatggggaagagttaccagcggggtcgatggtaatattgtactgggccttcctcttgggccgacggcgtccaacacgctatggttggatgagaagcggttttacagaagctatttgaagagataccagtccaggttcctggatactagtgatgcaagatgggttgatcacgaaggctatattcatgtgatgagtcggaatgatgatgtgctgaacgtcacgtatcgactgtccagtggtcagttctgtcctcattggacactggtttcgataactgattctcgcaacttatatgatccatcgaggaagccataacctcccatcctcaggtcgtagaagcatgtgtagtggctattccagatgagctcaag

SEQ ID NO: 26433 - DNA, 851 bp, Emericella nidulans
ttcaacgcgggtacaatggtctcatgcgcggactgcaatgatttcgacttgtgcattacctgcattcttggacacaaacatgggcatcgcccttcacacacctttgtgttgttgggagaccacgatgctggcttaaagaaccttgttctttctcgctgcaagcccggccgtggttatcatcacgcagctatatgtgatggctgtgaaagcgtacgccatccacccgtatgactgttcgatagtacttgctaacttactttcagcatattaccggtgtacgccacaaatgcctcacatgcccagactgggattactgttccgagtgccatctctcggcatctcggacccatcctggtcatcggttcgccccgctctacacggctatctctgagccgctgcagtctcacgaggtgcactttggcgtcttttgcgacggccctctatgcaaagacaagccaagatccggatacatcactggtgttcgttataagtgctccgtctgccacgacaccgatttctgcgccaagtgtgaagtccatcccttaaatacgcacaaccgtacacaccctatggttatgcttaaaacaccagtgcgcagcgtcactgtgaatactgtccacgagaacacatttagccaggagacgacttccgtgggcgaccacatccagagctcgacgtcgactcaagcttccgctcgcaatgacccagacaccgaaatggaaacagtagctgagaagaaggttcaagtctctgaggatttacccagggaagcgaagtctatcaatcttgaaaagacttctagtccagttatggattccgaataccaagcatttttccttgaggataccatt

SEQ ID NO: 26434 - DNA, 438 bp, Emericella nidulans
agtattgcagaaacgatcctttgtggctgcccattacagtgctgggataattcgaccagaggtcttgacagctcaaccgctcttgtaagtggactccgggctgttctctactgtctctaactctggaaaggaatttgttcgaaacctacgtctttccacggaatatactggctccacagctattgtagccatttaccaggcgagtcaggcaatttacgatgtgttcgataaagcaattgtcctgtacgaaggccggcagatatactttgggagtgcttctgatgctagacgatttttcgtcgagatgggtttcgaatgccctgacaggcagaccactggcgactttctgacatccctgactagtcccaccgagcgccttgtgcgaaagggtttcgagaatcttgttcccggacaccagatgagtttgcggaacgatgg

SEQ ID NO: 26435 - DNA, 420 bp, Emericella nidulans
tagaaatgtctttcttggtcttgcgcaagataaactgaatcacttcctcgaatccgaaagagcgtacctcgcggccactcgcatcaagggcgacgataaaacagcgtggcagggactcataagtctctatgaaagacaaggaattcagtacctggagcagtatcgagaggttgtaatcaaacttgggctggtatttgctgctctgtgagtgaaggacagacccctggtgcaactttggacgctaattagaacgccagtgacgataaacatcggtgtcaagatgtcgtggacaaatacgttgcctttacaaggaagaatggaacccgcctgcagtacaagagagcccttgaactacatttgccgacaagcccgctctatgattatctcgaaggtcgtctgcctcaccctgcccatacttac

SEQ ID NO: 26436 - DNA, 444 bp, Emericella nidulans
gaaggcgtcgaagtgcagttgaactacgacaccgaactcagcgacgagacggaggagatgattcttcgctcttcaacctgcggtttcggagacttcattatctcattcctaggacgcgtcttcacgctactggagaatctccccgacgtttcaagagtgcgaaatggttcgccagaggagaatatcgtgaacacgctaccagcgacctttatgcctttactgtcatcgctatcacccgaatattatgagattgctctgactaaggttgtcgattttgtgtcaaaccatgtcatccaccaagctcgcgacgcaatggctttcatctgtaacgctgtttgcaaagtcaatcctgaaaaggcactgaaacgttttattccagtgttgatacaggccatcccgactgagattgatgacaacggtgcgggttcgacccggacactggga

SEQ ID NO: 26437 - DNA, 795 bp, Emericella nidulans
cactggtggaacgccgctctgagaacgtcacgggtaaccgagctgccagttcttgctcaacttgcgaccgatagccacttagttgccttcctcgccatcaatttattcaatgcggccgtggtattggcggtcatggcactgagcgatccattatcagacaccgctcaagtagtcaaacgtaccattacgcgcattttacgattgcaggatctcttgggaaggcgctcagccttgtcaaagcagagcacgacgatcttaaaaagggtggtcacgttgctccttcgtcgcgaatcggaagccatccttgccccaatcgcagagaatacccgagacgatgttcagcaatcatatcaaggatctgggcgtatgtcggtggaggatactctgcgactaccccttgacgtgacgttggaaccgaccaacacgcacattggacgccaagcctggccggatcttgctactgtcattcgcctgaatgaaagtttaacatcggttcaaaacggtaaacaccctgtcatgcttttacatccaatctagctatggagacactgatttggcatgtatttagtcgtaccttcgggaaatgatactctcccatctgattggtatgccggcagagacggtcaccttggcgacaccgtggcccaacccccaggacggactcatacctggccgccctcttgcgagaccgagtgggaaatagccaatattcagagcaatgatcagtttagtccgacccaggacaacagcggagaccaagggctgtattggctctgggacatgtcctggaacggg

SEQ ID NO: 26438 - DNA, 522 bp, Emericella nidulans
ttcgcctatcgcatcgtacatctagctcgcaagtacaaaaaggctggaggcgacgcatcaccgttatacgagaacaaagaggtttggcggaagtacagccttttttatgataactataagaaaggctgttggtggcttttcattcccgccatcctgtatatgcttatcaaaggctgtataattgctggtgcaaatgggcatggactggtccagtcaactgggcaacttgttgttgaagcgctaatgttgggtctcctgctttggcaccggccgtatgttgccaagtcaactcaatggatcaacattactattcaggtagtgcgggttttgtctgtcgtttgcgtgttggtttttgtcgaccagcttggactctcccagacgaccaagacagtcactggtgttgtcttgatcgttgttcagtcagcattgactggtattcttgccattcttattgctgtcaacgccattattatttgctgccgtgaaaacccccatgcgaggcggaggaaggaagctggtaag

SEQ ID NO: 26439 - DNA, 252 bp, Emericella nidulans
agctacggcttcgggacggacgaggcgcccgggcccgtgatcccgttccactggtgttgctttgagatccttctccggtctttgaccttttcaacagatccgaagaacgtcaatttggacgttttgtacgaggtcatgatgggcatgtgcaatgggtccggatcggccctgcggcttgcctatggagacgacgttgcccacgcccaggggcagtattggcgatgtcttcctggagccgaggtacgcagctcg

SEQ ID NO: 26440 - DNA, 732 bp, Emericella nidulans
tacccttttctgatgcacgcttctcttgccgtggcattcacatacgaccggtatctcaaccgtccctttggctgccgtcgcagcttagacgaatgctatcactggtctcgagccacgacccttcttaacagacggctagcacagccgatcagcgcgacttcaagagacaaagacgcgatctggggcactgctaccgctctggccatcctctccttcgcgtcgcccgacgcgcgcacgccagaagagtcctggcccctgagacgctctgctgaccggtcggacctggactggctatgtatgagcagtggtaaaatggcactgtgggactctgtcaacccgctaagaccggacagtctattccatgtgatggaagcaacctttgcgcagataaatgcgcccttacccgagcgtggcattgacggtataccagaccccttggctggcgtctgcagtctgaacagcgcgacgacggcccaagataatccatactttgaggccgctcacgcggtatcagccatcctggacattccggacagcatagttacgactggaaagactcagctctttacgcgctgcattcaggggccctttgaagacttgctccggtatcacaacccagtcgcgctgttgctgctgtatttgtggtatggcaaagcgagctgcgtatggtggattgagcttagggctagagtggaacgtccggctatctgcgagtacctgcgcagattccat

SEQ ID NO: 26441 - DNA, 492 bp, Emericella nidulans
gcgcaaactgacagcttttagcgtcttgcgctcctcctcaaagggctgagtgactttatgctgcattttcatagccctgacggatttcccgatacatttgactttgatgcagaccgcttgtggcaggcgcgaggttggatgcagaataccatcaatctcgagatctgctggtatatcttcgagtcatatatccattctcagagacggtatcttccagctccaacacagacctatgccacatttcggtctcgtatcgggactttgctggaggagaccgaggattgtatccggggatcttcccggtggctgaagaatgtgcggtacatcgccttggaaattgcgcggcttgcttcagagtgctgtggtgacactaccatctcagacgatatcattgccccaattgaggcctcgctggaatggcatttgtcgaatgagcatggtttatttcagcactttcagggttcttttagggagaagctactggaagcaacg

SEQ ID NO: 26442 - DNA, 267 bp, Emericella nidulans
aggagattggtccttgtggctcgagagacgccactcagcgagattcacttgaggaatatgctggaggtgacaagagcgggcgccattatcttcccacccgttccggcatattatatacggccaagtagtgtcgaggacttggtggatcagagtgtgggtagggtgttggatttgtttgatcttaatacgggcgatttcgagcggtggcaggggtggaagaaggaatgactctgagccttgttgtatattcactcatgcttaatgaaa

SEQ ID NO: 26443 - DNA, 408 bp, Emericella nidulans
agatacacgctgaaatacaggccagcagccgatgaaatccagcccccaccagctgcactgcatgtgaaggtaaggaatacatcggcgataccactgcgagccgcatatttacatggcccttacaccctctacgtgtcatgttatccatacaccttcgatcccaatgttgcgagttgcgctgttgataccgctgaaattccccaatttgagccgtatctcaaggctggtgggacgtggattgcagtcatcccattaccggaatgtagcgagccgcaagttccagggtgccgcaactctccgagtcgacaagatacaacctggattatagagatcatatctcaagtcgtgttctccagcaccgcgtcggtgaactttgaagtcgttgttggtcgcaatgaagcgtcattg

SEQ ID NO: 26444 - DNA, 294 bp, Emericella nidulans
cgtcagagtgaatgcttaccgcgaaagaccaccatagtccagaccatcttcaccgtcaaacttgatcatcagccgctttttcaaatcggacgcgctctggcgcatgatttcggcatatgagtcctcaaatatgttatttcggcgaaccttgacgtggcattggccagacatgatgcgcagcgctggctgtgaccggaagtagatgagtttccgtcggaagtcacgcttgtattgagggacaccctgatccagtgaggatggcagacggggatcatcccaggtggttgtcttggt

SEQ ID NO: 26445 - DNA, 650 bp, Emericella nidulans
ggagcagaaaccaaagcccattttgttggcttatatcgagacctgacaagcgagaggagtaaacttgagggtgatattgcgaactacgaagaaaaagagttcccatgcccatatgattcgtctacagggatggtggcctgcttcagagacatttgtatatcgtacatggatgatacgcagttgtgtcctgaaaggcgtctctatgactctcaacgtcagctactacgccttaccaggcgaccgttgctagcccaggccttctcgaatcggaacgttgcgaaagtaaacaaccttctccaaggagagaggctgatatatagtcagctgtaagagcctcgaaaatactcgaaataagctgagctaatgtcagtaatagggatattctaaagaaacttgatgagtggcatgttccggacctcagcgagattccattccacgccctgctgattactgaaggctgggactacgatatacggaacgtcgttatacctctaaccgcgtcattcttcttcactctggtcgtgggttccaaagtcatttaccatgactggggaattgtgtggaatgcggcttgttttttcgtttcgttggctggacttcttctgatgtgggctaatcatgcggtccgccaatagagttgaccatatctt

SEQ ID NO: 26446 - DNA, 360 bp, Emericella nidulans
caactgatcatcctccctctgagggtgcctgttcgagtatattctggagtcgccccgccagcagcattgctagaggcaatggcgacaaatacgcaagataagcctaagcgtcccattctcacaccaagctcgccgtggacagaagatacggagcgaccaccaatacccccaaggccaactgcggctctggcccccatcaactcagacgaattccaggaggaagctcctccaagttacgaggatgcgatggctgaaactctgagtcctttggaaggccctcgtcgcgagtattacccaccagatgcttcttcttgttcttcttctttcagatccaccgttgaacccgctttcgatcacact

SEQ ID NO: 26447 - DNA, 384 bp, Emericella nidulans
atggagccaagattttggtcggtcttccgcttatcccaccgtcttctacaacaacttgaagggtacaatgatgggctagtcagcgtagcaagcagcaagtggggagcttacaaggggacccttatgggggtcagtcacttggacctcatcaattggagtaatcgactcaagtggcttgccggcgagatcactggccagagaccaaagtaagtgctgctgactactggtcatagcttgtggctaattttggaccttctagcttcaatgccgtcgcgttttacttggacattgctggtacgtgtaaagctgtttgcgtcatatgcatttgcacgagcaaggctaaactgaacttgtttcccagatatgcttgccaaggagggtcta

SEQ ID NO: 26448 - DNA, 939 bp, Emericella nidulans
atacctaagatattaataaaatgaattaattcattaggtgaagccataaataaaaggataaataaagttaatgtagagatagttatagataaagaattagataatgaagaattagaaaaatagattttatctacaactttatctttttgtaaaacaagagctggtaatttaagagcttttaatttactaaagtatgtataagaatgttgatcaaagaacattgtttttacaattaataaataataaacagcactaattacactagttaatacagctataatagttaagaaaataaatccttcttgtaaagcagcagagaataccataagtttagcaaagaatcctattaaaggaggaatacctgcaaatgataataaagtaatagataaacttaaagctaaaatactattaataaagaaataacctttaagttgactaattaattgaattggagaattatttttatctattaaattattatgattaatattattatctgtataagcatataaactataacctatagctactaataaaacaaaagcatttaaattagataaactgtattgtattaaataaaatatgaaagattgaatagattctatagtattaatagctaaagctaataacataaaacctaaatgagagatagtactataagcaaataatcttttaattctaaattgagttaaacctaaaacagttcctattattaaagataataaagaactaattaagaaacttatagttcaaggatattgagaagtaatattaatactattagtattatgtactaaatgtaataataatgttaatatagatatttatgctataatagcaacaaaagttgtaacaatagtaggtatactatcataaacatcaggagatcaaaaatggaatggtgcagctgatattttaaataagaatcctacagaaatt

SEQ ID NO: 26449 - DNA, 631 bp, Emericella nidulans
taccagcttctgttctcctatacatttatctacgccttgtgctgcaccagcaccagactctcgatcctcttcttctacaagcggatcttctcgcccctagagcgatatcttaaaatcgccataatggtttccggggcaatcacgctctcgtaccctataatggtttgggtaaccatgagcactgcctgccggccattaagctacttctggacccaattcagcggcacgaaaggggaatgcctcgatatcaacaccttttttctcgctgcgggcattatcaacatgttgaacgacatcattatcctcgccattccctttccgcgcattatcaagctgcagatgactctgaggaagaagattgctatttgtggtatcatggctgtggggatcttgtaagtgccggctggaggagctctttgttaccatccgatatcccaactgccgatgaagctgaccagcagggtatggcagtgtctgcatcgccagcatcgtccgaatccactacttgagcgtcttcatgaacgctctcgatattacctggctcatgggccccgtcttcatctggtcgaccatcgaaccatccgtcgcaatcgtctgcgcctgcctcccccatctcgcgcctctcgcccgc

SEQ ID NO: 26450 - DNA, 273 bp, Emericella nidulans
aactgtagcgcatgaatcccaccctcccgactcatctcctctttcaacaaagcgtacaccatccgatgtctcgccggctgcatcttcgactggaacgcggatgatgtgatcgttacactggactaatcagcactgggtcaccgtcgccaggaggtatatatgtactggaaatgcgtctctttcgacgtcgatccttgcattggcgcatgatgcgcgtggagatgcgagtcattgcggattattaaagtggatggggaaaatgccgcagttatc

SEQ ID NO: 26451 - DNA, 516 bp, Emericella nidulans
aacccgcgcaaagcacgaggcgatctcggtatcctcaagcggaaaccctccgatctggtccgatatctggcctggtccaaagaaaccaaggccaaatatggcacaatcatcaactatatctgccagcggggcctagggtggcagttgccgacggaagggcccagcttcaacaacccgatcccctttgccgaccccgcagactacaagattctccgcaacgactggccctacggcgtagctaaggggatcgcgcatttggtcgtgtggtcgcggacgccgatccccgtgcaagatgcagacggggtcattacggcggagagccatgcgctgattgagaatttcgtgcagcgaatgtttgtagacaggctggcaaaggaggatggagtaaaagatccgcaagatcgggttctgtggtttaagaattacaccgccttgcagagcgtgaggggattggagcatgttcatattcttcttagagatgttcctgatcggttgatatatgagtggacgggtgaa

SEQ ID NO: 26452 - DNA, 599 bp, Emericella nidulans
ggtgcaagctacgtaagttctaaagcaactgatattagcgaaataacggtaatcacaaactggcctggtccttctcgagacattgataccgtctacaaaacgccctcgcgaatcgcatatgcagcggaaaattcgcggctgaataaagactgctggggcttccaggtagagcccggcatgatatcatacgcatggacaaagctactgctcgatcggggaacgcccttgactaagtacgatgactccgcgctagagaaggcgtcaaatgtcggtataatgcagctgccagagaataaatctcccgaagacctcgttgcgaatatctcgccaaagtttatgagcatatcctcaagattattggcaaaagtattacggaggagacgctgcaagttacgccaatcgaattctggttcactgtaccggcaatctggtctgatcgggcacagcgcgctacaagagatgccgcgcggagagcaggttttgcgggaacattgcaccggccgtctgacagactcttcttgatcaccgagcctgaggcggctgcaattgctgtgctgagcaaatacgccagtagcaaactgggaggcgcggtgaaggta

SEQ ID NO: 26453 - DNA, 648 bp, Emericella nidulans
gatgtggtggtcagcaaaccgggccgaaagcatagtggagtgatacagtatgactatggcaaggcagttgagggtgggcaatttgagcaaacaggaactgtataattttatattaaaattatactttatgcaatcttgaataaacccccacaaatgcttctgatgcacatgagtcaacttgaggccaaacttatgacccacggagagagcgctgtctcaaagatagtgtcggaggtattagaacaaaatccgaacatgaaacagcaattctcgcctccgagttatgattcagatcttctattctgttcctcgtactgccatgccgacgtggaggctgattgcgaggcgtgtgacagagagcagttagtcaaacaatcatttggggatgcaaggacaccctacgttcattatggcttgattgcatctggtaatcaagtgataagggatgcaaaaaagcgctgatttattggcccgtcagcacgggatactctgcttcgagatggagacggcaggcattatggacgaacttccgactcttgtgaacgaggtatatgcgattattgcgactcccataagcagaaacagtggcaaggatatgcatccttgactgcagccgcctttgcaaagctgttgctatcaatggttcct

SEQ ID NO: 26454 - DNA, 249 bp, Emericella nidulans
gccgcccgcgcgatgcttgacaaatttcaccacccacctcaaccgatcactgatcagaatgcctacgaatttggagaactgaatggccattatattgtgattgctcacttaccggatggcgtctatggaactatctctgccacggcgatcgtatctcgcatgcgcttaaccttcactcggcttcaattcggattaatggtggagattggaggcggagtcccgagcaagaataatgatatttgtttaggg

SEQ ID NO: 26455 - DNA, 408 bp, Emericella nidulans
ccacacctcttctatctgatgcggtgtgtccccatcacagcatcgcgatcgcacatgcagtatgaagtgtaccaacatataaacgccccagacgaagacttccacaaaattgacagtatctgcaaacaggttttgaaagaagacaaggatctgtgcaatgcggcgcaaaggaatctgaacactggggtgtatataaacgggaaactccatcccgagcatgagaagggaccactgttcttccagcaaaacgtcaaagacttggtcgtgagccatcgtgcagaggagaaacagggtagggagatatgacctgcaatgccggtcttgagtatgccgagcaagcttgatgaggacatggagctctaccggaagatcgactgtcaggttgatagtagcgatttagcttggtag

SEQ ID NO: 26456 - DNA, 519 bp, Emericella nidulans
ttagctgattttctccatgacgcaaagcactttgttctgaagaatcagcagattgctgatgaagcaccccttcaggtttattgtgcaggattggtgtttgcgcccataacagcgtttattcgtacggaatttgaagacgaccttccaaattggatatgccagttgccaaaagttaatgagaggtggggcgcagaattacagactctggagggccattccggctctgttaactctgtggccttcttgccggacggccggctgctggcatccggctccaatgacctgacagtgcggctctgggacacggcgacgggcggcctgcagaagactctggagagccattcccgctgggttaattgtgtggccttctcgccggacggcagactgctggcgtccggctccgatgacgagacagtgcggctctgggacacggcgacgggcagcctgcagcagaccttgcctatcaaggggacagtcactaaactccaattttctcaagatggttcatatatcagcact

SEQ ID NO: 26457 - DNA, 1056 bp, Emericella nidulans
tccgctttaggtccctctgaatgtcgcagtacgcttctcgtcttccaggaatggagcattgtattcggcattgtgatttcgtattggaccagttttggcacacgatacatggccggtgaatggtcctggcgtctccccttcctcctccaaattatgcccctattcaacctagctgccgggataatggtcctctcattctcgcctcgctggcttgcctccaagggccggaacaaggaagcactgcagagtttcagcaggctgcgcaggttgcccataaccgacaggcgcgtccgccaggagtacatggacagccaagccgaactgagttttcaccaccagatcaacgcagaaagactccctgacctacaaggagggagaataaagaacgcaatcctgcgcgaaatggcttcttgggagactgctttcgaaaacgaacctggcgccgcatccacattgccattatgattcctttcttccagcagttttccgggatcaatgcgctgatttattactcgccgacttttgagacaatgggatttgacttaagcatccagctgatcatgtctggggtcctgaactctttacagcttgtcgggtgcacgagcacagtatggacgatggataccctgggccgacgtaaacttctgttcgccggctcggtcagcgaaaccatctcacacaatatcattgctgctttggtcggcaggtacagctccaactgggcgtcgcatcagaccgcgggctgggtcagcgcggctttcttgttggtgtatatggttgcctttggcgccgcctggggaccggtgggcttggcgataccctccggtatgctaacatgtgctatcctccaacttgtctattcacatctgatccgtagattcattagagatcttcccttcttctctccgcgccaagggcgtcgccatcgccacgtgctcaaactggctgaacaacttcatcatcgggcttatcacgctgccgctcatcgagaggacgggatacggcacctacgtcttcttcgccgtcttctgtggcataatggattcagcgttcttt

SEQ ID NO: 26458 - DNA, 381 bp, Emericella nidulans
attaatttggacccgattgccaaagcatcaaagttccagactttaggtaaaacaatggatgaaggtgtccgccaatatcaacgcatgctccctctgactcctaaggatctgcgcttactcaattggcacttcgccaacctcgaatatgcgaacgccacaaacattaataacctcagtctttccgggtgggaccaagatatggggaatgagtttgagggagaacattcgcaaatcattggggggtaccaacgggtcccttacgggctatggtcgtatccaacgaaattgcacgtccgaacgaataagactgtttcacgcattacatacgatgcctccggctcgatcaaacataccacggtagtacattgcgaagatggtgaa

SEQ ID NO: 26459 - DNA, 1003 bp, Emericella nidulans
tctatcttcaaccaactatcatgccacgaaaagcgcataaaacgcgccaggaattaatagagcaagaaggtaggattaaatatgctataagcaatttaaaaaatggaaaaatttgcaatgctcaggaagctagccgcatttataatgtgcctcctacaaccctacatgattagatgaagggccacctatcttaaccagaactccataaccagaactacaggctatctctgcttcaggaggaagctttaatagcttggatagtatccctggatatacatagcactgcccctaggccctcccaggtacaagaaatagcgcaaataatcttggatgctgcaatattaactctatctctacctattagcaaaaactgggttacagagttcaccaagaggcgcccggaggttaaaactaggtttgcgcaaaagattaatcgccaaagagtactatataaggatcctaggattattggttaatagtttgatgagctgtagaaaaccagagattagtaggggattcaggataaggatatctacaactttaataaaactaggtttgctatgggtcttattgcaacaataaaggtggtttccagagcagaaatgcctggtaaaccatggctaatacagccagggaattgggaataggttactactattaaatatatcaatactagggggtggccaattccctctaccattatctttaaaggaaaagtccatatggagggatggtttgataaaggcacaatccctggcaattagaggattaaaataagtgctaatagatggactatagacataattggcctttgctggcttcaaaaagtctttattccagctacaactgagtgtacaaggggggggtattgacttcttattctagatagacatggaagctacctaatgcctgagtttgaccatacatgtaaggcgaataatattatacctctttacatgcctgcgtattcatcttacctcctccagcctttggatgttggttg

SEQ ID NO: 26460 - DNA, 345 bp, Emericella nidulans
tgtgtgcatagtattgcagctagtcctcaggcagacaagccgccactcaaacgatattggcaacaagcttgggacttgacgtctcgtgcatctacgtcacagctcacttccagggctgcttgttatttacagaacagtattctccaatatagtctccttgactacgctgccgtggctgagactattaattcaatgctctcatttgtcagattgaatgggccgtcaacagtgtcagatgcgtctttagagttatgggcgagcgttattaggatgacagcccaaataaacccagggtctgtatcaaatgcttccgtccagatctgtgcgtggttgagggatgcatgg

SEQ ID NO: 26461 - DNA, 300 bp, Emericella nidulans
cgagttcagaaaatcaaacagctgacccctcgtcaggtgaaatccaggagaaatcctcggatcgcctaccaggatggcggtcatagttctgaaacgacgattgccccggaagaacgttgggtcgagcaaggcgtggacgaaattctacacctgaagatcctggaaagtctactagatacggacgagccagcgacgatcgtgctggcaacgggagatgccgcggaagcagagtactctggtggtttcatgaaaatggccgagcgagctcttctgcgtggctggagagttgagttggttagc

SEQ ID NO: 26462 - DNA, 255 bp, Emericella nidulans
cactcggcgatggtatctccccttctctttccacggaagtcatatttgccctgtatgtaaccgtcagcgaaccatcccacccaaccgcataacccctcccaaaggtcgggttatgtcaaaacaaagggcgaacgcacatcagacttgtaggcaacatagcccaacgaagcggggatcagaaccatgtataggagcgagtgccatgcggtgcggggggtccagcggaagtacttgtagcggtttgagttgacctct

SEQ ID NO: 26463 - DNA, 753 bp, Emericella nidulans
agagtcctctatgacctcccttcttacccatggaatcatgagcacggatattgggcggagccacgtttgaacaaggagcaccgtttgcgcaaacagaagcaccacgatctactgggcagtcctctcattggaggcaatgcactgtctccgacatggcgtcatatcattcgcgtatctgatactccgtggcttcgtgcccacaaggtccagaacaacatcatttacccaggcgctgggtacatatgtatggccattgaagcagtcagccagttatcgcgaggtcaaggccacaccatctcgagcctcagtctgaaagacgtggagatcctcaaagcactgatcgtccccgacactggggcgggtgtagaggttcatctaacattgcacgagggctcggagaaggcgttaaccggccaaccctggcaagaattccacgtttactcttgcgacgacactggaaaatggagcgagcactgcaagggattcatcgcgcgtaatcaaggcaacgatgcctacaagaaaaatgcgaacagtgacgacgaggtctaccttcggcgactgaatccgcaggagctttatcgtacacttcaagccaaaggcatttatcacggcgacgtcttccagaatcttgtttcaatccaatctaaccgaggtcggtccctgtgcactttgcgagttgccgatacggcatcctcaatgccgcatggtgttgagcagccttacgttctacacccaacgacgttggattccatt

SEQ ID NO: 26464 - DNA, 975 bp, Emericella nidulans
tcgaatcgcgcaactcaaatgatattgagatgtctatgactcgcacaagctcgcatggaccatttgatggccggacccatcaaccgttgatcgacgattagcagcatggacggatctcaactggtggattggggtacagggacgcagaacgcaggcctatgcttcaccactcgagacgatcgacaatgcgcagtaaaagccctgatgcgcttgcgaagcagcagacccgccagaagtatcttatagcttcgggattcttgctgttaagcttagcgagttttgtggtccagacggagacggctgtttacattcagcatgatctggggtgggacaaaccatactgcatgctgtaagtaaaaaaaaaaaaaaaaaacctaaaaaaatttaaataaccaaataaaaggagggattcgttctttgctgattattttctggacgattaggtatcttacgcatggttcttggtttctactctggccggtgcaactcttgatacttcgatcacaaaagcggaagctcctctgggaagcgttctggcgtcgtcatatctatctgcttcggacaacaggccgaatggtggaaactcaggatttacatccaacttcagatactcgccgatcaccggttccttacctccttaagacaacggcttttgtgacgagtgctcttacggtagctggcggttcatggtatgtcgcggtcaatttgacaactcccagtgacttgacagcgatctacaactgctctgcctttttcgcctatgcattctcgattccgcttcttaaagaaaagctgcggttagataaggtcttttcagtgggcgtggcgatagtaggggttctaattgttgcatatggaggtaaagacgacgggaagggtatagacgacggagtaaagcatgaaggagggtctcgattcttggggaacgtcatcatcggtatcggcagtgtgttatatggcttaacaaggtgctgt

SEQ ID NO: 26465 - DNA, 926 bp, Emericella nidulans
  unsure (1)..(926): unsure at all n locations
tgggccacccttctagccggatccgacagaagagctcactcacagggccgacgtgcacatacagattcaatctgaccccgatatgtccttcaaccagccctcctgtgcttcacatgcagctggcgcttctgcggtgcagggatggcttggaatgactgcatctacctgcaaattgacagacaggtcgcacggacatagaacacgccgcttgcacggggggccgtcactgcatctgaagcgttgctctggatggccgctcagtatggcgcgagctggttcttggtttcatggatgctagaaggggagaatgtgtatgttgctgccaaccttcaacctcaaactgtacaagccagtgagttgttgaaaactaaccttgagaaagaccagcagcgatgctccccgtaacgctcagcacgattctctacccctttgctaaacgacccatcttccgccgcttacacatctacccccaatacctcctcggcttcacactagcatatccttccctaatcggggtactcgcgataaaaggcctcaaccagcccctctcagcttccatatccgaatctctcccgctagcaataatggtcttcacctggacgctctacctcaacaccgcatacagctaccaagacatcgaggatgatcagaagatgggcgtgaactcttcgtatgtgttcgcgggctcgtatatccactacttgcttgtgctgcttgccggactaacgctgggggcttgggggtgtcagctggctgtgcaggggtctgagtggcttggggaagtgaaagggnnntctagcttttggtctttcttggggcacgctggggacggtttgataagactaggcctgagagtgggggcggtttgcatagtggagaattttttgttgggggtctggacaattggtatttgtgctgttgagttg

SEQ ID NO: 26466 - DNA, 429 bp, Emericella nidulans
ccagactatgctcaaactcaggaacagcagccgggactttccccattgaatttgacccagaatgctggacctgcgctctatacgaccgtcactcactatgagtgcatcgctcaccttaaatttctcgcagcgctgtccgacctgcgtgatacagtaacaagtatcccaaacctctttgatatacttgaccccaatccacaggagtttggtactcatattaacgaagcctgggctcttgtcaaggaaaagcgatgggctgtttatacggccaaggctgttgcgcgttatacgtcttggtggaatgcatgtgtcccagcctctcgcccacggcctactgttcagcaactttcctctcctacattcggagtaatcacggtttgcgaaagttccttaacttgggcccgggatcaactgcctccgttaggtcag

SEQ ID NO: 26467 - DNA, 495 bp, Emericella nidulans
catcctccggccacaatctctttcgcgattaatcacccgtcacccaacaatcgtccttttgagtgtagcatcacaatgaccaatccagctgcggggaaagaggcggagaccaaactacagacgctttggcctgtacactgtgtccaaaaaactcccggggccgacattattcccgaactcgatgttactaagattgacttattcgtgacaaagggtatgcatccgcgcgttgaaatgtattcagctttcgcagatgccttcggaaaccaagaccccgcaatagtgtctgtaaatgcggatctacgatcttttctacatgacaggggtgtcacggatgtttttgtcgttggagtggcgggggatttctgcgtcaagtacacggccttagatgccgcgaaagcaggctttaggagccatgttgtgcaggacgctaccgaatgtgtggtaccagggtccggatgggaggaaaccgcacgcgaactagcttcagctggc

SEQ ID NO: 26468 - DNA, 1035 bp, Emericella nidulans
ggacaccctggctaggagtaaatatatatactaattagctgttaatatttctggcctaatatgtcccaagatatcaggagatttgtctgaaactgtgatatatatagaaggacaaaatcttggagggactagagaaagggactattaaagcccctccctgtacctaattatccctggcaggaggttttaatagattttattatagacctaccagagagtaaaggttgtataaatatcatggttatcacagaccagttaaccaaaggtgtgatactagaaggaatatcagagattaactctaagagcatggcctgggcccttgtacaagtacttataagcaaacataggatcccaaaggctattaccttggacagaggaagccagtttacaagtaatatataggcttatatatataccctgacagggattaactactaactatctacagcctatcacccccagactgatagatcaacagagaggataaacagtatagtagagacctacctctgcatctatacctgctatgactagagggactagaacaggttactcctacttacagagctagtaattaatagctgtatattaacagcaacaggggtcagccccttctacctaagccatagatataacctcagcctatttagccttactgaggaggtagagcaactagctgaagaaccagccaagagtcctatccagaaaggggaagctattgtacagaaagttaaggaagccctagactgggcttaagcctctatagcctattcccaacagaatgtagagaatcaggctaataaatacaggagcccggccacaaactaccaagtaggagataaggtctggctaagtctgaagaacatctgtacagaccgacccagcaagaaactggactggaagaatactaagtacaaggttataggcctggtaggtagctatgctgtacagctgaatacacccccagggatccatccagtcttccatatagacctgcttcggctggctttatcagatccacttccttcccagaag

SEQ ID NO: 26469 - DNA, 546 bp, Emericella nidulans
ctaaagattgctttactagacttcaatagcaaagcagagcgcgagaagtttgagcaggagacctttgaatgtgggatctgtcttgagcccaagaaaggtgttaactgccatcgtctcttactgtgctcccatgtcttttgcataccttgcctgcaagacttttataacacttgtatcacagagggagatgttgagggcgtcaagtgcctggcgcctgattgtggtcaagaacaaaatccaccagcggccggccagggtaatattcgcaaaaagcgagatcggacacttagcccgtcggagctactgcagatacctcttgaacaagaaactgtgcaacgttatgtcttcatgaaaaggaagaggaagctggaagctgacaagacaactatatattgtcctcggcaatggtgtcaaggtgcagcgcggtcaaaaaagcaccctaaacctattgatcctatggcagacgatttggaggattctggggatgagtcagaaggcctaatctttgaccccttggggaggagaccaactgccccgatggcggat

SEQ ID NO: 26470 - DNA, 204 bp, Emericella nidulans
gaccccggacagtccacaaggttgagaaccgagtacgcgattaggcccagacaacggagcagcacgacatccgccgcagactcccatggtcgactcggggtgcctccgatctcgtcagtttctagaacgtccgccgtggtgttgtctgactatggtcgatctccaagccctcttacagaccaagatggctaccttgtgcctgca

SEQ ID NO: 26471 - DNA, 585 bp, Emericella nidulans
gtgctatatgttctgtataggtattgtgcacgaccacttttagcaccgctgtcgccgcccatttaccagctcaccaaaacctttctttatttacctcctgcgttcgttggcggcttgaacaactacacgttcgcgagattgattcctcttgagcgcttgactccccatgatatccagcaacaacctggtgcgaagctcgcattggccctagtggttccgaccattatctgtattattgtgacccagacccaccatattcgtatgggtggtctgatgccacattatctcaaggtttacggcacgatggcgctcatacttttgattctcctcccacttcccggacttcgtctacgtatccaccattacattctcgcaatcttattgatgtacgggacggcttttcccactcgaccctcactgatttaccagggattactgcttggtttatttatcaacggcatcgctagatggggttttgcttcaattattgaaacgcctgctgccttgggcgaactagccccgggagctggcggatcacacggttggtggggagctacctggcccaacataaataatagctctgtt

SEQ ID NO: 26472 - DNA, 378 bp, Emericella nidulans
tgtcttgcaggcagggtactgacttttcagcgctatggggatctcactgtttccaactcggaggaatacggcctggcgctcgtttgctatgctcgcgcgcacaatcgacgcaaggtcaagtcagtggtcgacctacttatctcgtacagcctcgtccaatcccgggcgtatcctgcctcgagcgacctcgactaacagctgcggacgctgatccgagaacccaaaacgtgcctctcagcgattgcacatgcagacgaggaggccgcttcaatacttcagttttacttcagtggatacgcgactttgcgccggttctatgagacacgtgatgaggcagtcccccttccagcaggacagaagccccgctataaaacgctg

SEQ ID NO: 26473 - DNA, 316 bp, Emericella nidulans
  unsure (1)..(316): unsure at all n locations
atgtctgactacttaaaccatttattctcctatgtcccaaaggatcgtctaaatactttcagttatggccatgtcattccatcggagaacctgactgcgcacactctggctcngggcgttacaggttgtgagtttgactttacatatgccggtcgtgatgcagagaagatggtacggacccccccggccttccctgcagcatgccaatagtttttaacttcggtactagatacttgacctcggacggacattcactcagttatgtcgtgcaataccagaacgcattgttgcttttttcccgagctacgagtattta

SEQ ID NO: 26474 - DNA, 920 bp, Emericella nidulans
gctctatttggcaatggccagtcgacttcgccgtcctgttaccccgtagaaggagagtggccggaagtttctttctacgacaacgtgcgcgcccagtataagcttgtcactgggcactttgggataacacacctgcgtgcggtaatcgggtggtcaatgggcggagcccagacttaccaatgggccacgcaatatcctgactttatggacctggcggtacccttctgcgcttcggcgaagacgtctcttcacaaccaggtattccttgaaggcgtcaagagcgctttgctagcggcaaaaggtatccaatctgcggggtctggtcaaggtggtgtccttgtgtctgggcatactctgaggacatggaacgatgctgaaaaacgagtcggcctgaaagcatttggcaggggctatgctggctggtaagactcgtctgcttgagccggtgtgcgtgattctaaccctcagctactataaggggtttctctcaagcgttctatagggaaaagctgtatgaaaccgccttgggttatgcagacctcgaagactttatgcaaaatttctgggaggcgtgggctctatcgaaaggttcaacaagtctctcacggcagattgacattctagctaactgcgaattctcaatttagacccgggcaacctcctagcaatggcgcaaacttggcaaaatggcgatgtcagcaagcaagagccatacaatggtgactttgaggcagccttggcagcaatcagggctaaggttttggtgttacctgcaaaaaccgatctatacttcccgtctgtcattcctcagatgaagagacaagagctgacagcattgtaggcctgaagattctgaatatgaagttaagtgtttaagtccaggaatcgggactctttgtgtcttcccgtcgatctggggc

SEQ ID NO: 26475 - DNA, 765 bp, Emericella nidulans
atgtccagattgacggtaagaaccaggttggtcagcgtaatcgagtctttcgacgcggcagatgcgaatgaaggattgagggagtagaagattatcacgctggcctggaattcctccagattccatgctggtctaaaaatgactgggcaaaaggtagataagtcctcgggattaatatggacttgatatttaaacgcgacagttggtgcagagcgcgttatactagcaagagaaacgtcgtattcgcccctcttgtcctctgactgatcttgtacttcacggatgaaattcgggtttgcggctaccttctccaacactggaaaattattcaggcgaactcggattttgtccgacaggacatcaggagcagcattaaacgccagcgcgagctcgccgacaacaaatgatttggtaaccgcaccttccgagaaccaggcgttgactgtttctattatagatgcattcagtccagaatcgtgcagttcagggtgtgcgacggggcctgagatgctatgcaaagtatgcgacgagcgtattgacgttgtgtcagacaatgcatgctcgtctgtagcattgctgagagaagctacatgtcttcctggcgaggttggagaggtaggttcagagacgtcctgggccacagcttgatttgggactggatggactggtggcggagtgctagggatgaagacagtattacggacgtcgcggcgtccacgtatcgtgcctgcgttccgccttatcccgctttgctgcgcttgctgc

SEQ ID NO: 26476 - DNA, 450 bp, Emericella nidulans
tagtatgacatgctcactactccaattacaaccccacacttccagtcgcgtgtgctcagtcttctttcttcacacttatcgaatatacaggctgtgtctcatagtgattctgggactctgatgaccactgagaacatacgacctctcgttatgccgcagctaggaccggcagatactcatttgaccccgaatgaggcaatgtcgcagttggtgggagtaacgagttcatggatcgacctgtgttctcccgacccactaatcgcagacctgtcacgccaagtttttatgctcgaagtagcctatgccgccttctgtggcattggctatcttttgattccaggaccaaagttgcatcataaaggaatgcattcggatggagtgatgtactatgcacgggcgattcaagatgcacttagtctcggcccatacatccagtttcatatctggtta

SEQ ID NO: 26477 - DNA, 204 bp, Emericella nidulans
atctacaccattcggcgtgaacgctcttggatgccgctggatatctcccgctccctctttgacctgctgttgaagcttcacaatgtgtttccagagatatggaaggtcatccttacgtttggctggaagcggttcgagaacgaatatagctttccgacacttcaagtgtgcgagtcgagatcagagtcagctgatactcagggt

SEQ ID NO: 26478 - DNA, 432 bp, Emericella nidulans
atatgcaccgccggttacaccatcatcgctgtcgccttgatcctctttgtccaggctagaaatgtttaccctcagcttcttctgggtagactactattcagcataggcggcgccgcggtttcaacaatggtcacagccatcctaccagcagttactggacgtagccccaggactgagcttgaagaagaaccagagccaaggaccatcgtagctccctcatcgagactcgccggtttcgttggcacgtgcgccgggtgtggtgccttgatatcccttgtggttctcctccccttgccagctcaatttcaacagtggggactctctcccgcgaaatctatccagtatagttactacacggcggctgcgttggctcttgtggtcagtggttgttgcttcgtcggacttagaaatcttcctggcgaagacggcaag

SEQ ID NO: 26479 - DNA, 207 bp, Emericella nidulans
cactctatctcttgtaactccagctcccctcaactccatttcaactccatttcaaccccattttccttatcgccgcaagatgctcatgatataacgcatccggatagtcaatttgatcccttgggcgggtactgcttcccgtcgctctcgaccttgggttcgcaggtgcagcgttcgctttcggggacggcgtcgaggactgcgggg

SEQ ID NO: 26480 - DNA, 410 bp, Emericella nidulans
aagtcatggctcattgcaaagcttccaatatcggcaaatgcaaaggccgttagtgaatgcttgacttacgtgaaaacgaaactcgcggactaaatgtgtctatgttcttgcctctagtcttgaagatggtcgtgtaactcatggatgctacgtccctaaagtaagttgttcctgaattattctatagcgagcagctgtatggtgtctaacaggccacattatgtttataggcaattagcgaccagggtgcgtctgctagcgaatggtccagtgccgtctctagagcggttggtggcaacgcagggggcaaaggtcatacgtcgattggcaacggtatcaatcccgagaaggttgatgacgcggtagacttggcttcggaatacctcagcaagttcaagttatagctcttt

SEQ ID NO: 26481 - DNA, 495 bp, Emericella nidulans
tctaaaacctccacgtttctggaaaacttgaatgtgaccgtggtcaatgaactaaagcagcttcgtgagcaatacgaccaggcgtggagaagcgtagcgctggaatttgagcatcagaggattcagtaccatcaagagatacactccctgagtgctcagctcggagttctcgctgatgagatagtgtttcaaaaacgagtggctgttattcagagcatcgtggtgcttctctgctttggtcttgtgcttttcacccgcggcgcagttggcagctacattgactttcccagcgtgcaaaacatggtctcacggtcatacagtctacggccttcctcgcccatcttggggttcgggtctccccctggaagccccggttcgacgcgaccgacatcatcttatcgtaccacccccggtcatcgtcgacaggtctcacaagactcacaggacgggtcagtcagtccaactatgtatgcccctccaaccccaacttcggac

SEQ ID NO: 26482 - DNA, 236 bp, Emericella nidulans
  unsure (1)..(236): unsure at all n locations
gaccccaatgaggacatcatgagganccgcagtttgcatgtgcactgcccgtcgggtgccattcccaaggatggcccgtctgccggcttcgcacaccaccacgcttgatttctctgttctctggtaaagctgtacccccgaagcttgcaatgaccggtgaagtctctcttcgtgggcgcgtaatgcctgttggcggtatcaaggagaaactcatcggtgcgctacgagccggcgta

SEQ ID NO: 26483 - DNA, 264 bp, Emericella nidulans
aaaaacttttatgataacaaaattgaacatgctaatttgcgcaagagagtacaaattgagtgcgcggtttggcacctcgatgtcggcttagctcatccacatgaatgcaaaaatcatgaagggttcgactgttcgtcgattaaagagctacatgagctgggtttaatacgtcgtgagacagtatggtttctatcttctagagggaattaaagtagaataaagatagccccttcgtacgaaaggagttgggtatattgacctatg

SEQ ID NO: 26484 - DNA, 453 bp, Emericella nidulans
gtggagcgacggacatgtttggatctctccagagcagcacgggaatctggtacgttaccccttgttgacagaatcaccatcgagtttccgcttagtctcgcaaaccagactggagtattcaagatccaaatcgactggatcccactaagcacggggagcattcgtccaactcaaggccgaacccttgctattgggcaggtctgtggtgggtcacaatcattcaacgcagtcaactcgctgcggattctgggacgctggatgcgcatgttcaccataccaaaccagtcgtccataccgcaagcgtatacacatttcccagaagagggagaaccgggcgaccagcggctcaaggcaagcagtaacagagatcgactggtggattgtatggaggaatttgtcaagtatacgatactaatgaggccacacaaggacatcttcggggatcggttcagc

SEQ ID NO: 26485 - DNA, 363 bp, Emericella nidulans
gcgaaccacggccgggcaaagtcgttattcagtctattaatgatttcaacacgatgttgttttaatgcagcttttaaccgtttagggtcccgaattgagaagaaccggtcatcgaactccttccacaaacgcattgctcgagtcgcaagcacatggattggttgacccatctctgaagtgaccgagataacaccgccaactgcgtcatgttcacattttgcccaagcaccgttgtcattcccatcatccttgactccgggggcttcgactataagctgctttacagcgaacgatgtcttcgcctcacgagccaccatcatgcggctccctaggaggattccatcaaagggcataggcgcataa

SEQ ID NO: 26486 - DNA, 405 bp, Emericella nidulans
aaaaagagaataggataacaaaaagacaagcgtgagggggaaaaagtcgaaagatagcattaaagaccagggagaaaagtttttaacgagggactgaaacagcgaacggacaacagtctcgaaaagatgatgggtgattctaaaatagattatgctggggcgctgactttgctgttacgactccgacagtgctgtaaccatcccgatttggtcagaagcgacctggctaaagacaaggatgtcctcttgcagacgggtacttcgaacagtcaatcatcgtccaaaaagcaggatgagctggatgatgtggcggatctatttggtgcactgagtgttgtgtcaaagaaatgcgacatctgtcgagtgacattgagccaagtcgaatctaccggaggaggtagcaga

SEQ ID NO: 26487 - DNA, 595 bp, Emericella nidulans
atatctgggcacaacaaaccagatgattgttggatcgtggtcgacaatcatgtgtgggatgttaccaacttcctggctacacatcctggaggccccacaagtgagatcaaaagacgagattagctgagtgctttgactgatcaactcattagttatattgaagtatgcgggtcgcgatgccactaaggcgtactccgaagttcacaccccggggcttctaaaggcagaattggcaccggagcagtacaaaggcaagcttgacgaggcgacgatagatgaaagctggcataaacaaccagcgagtgaaaatcctgaacgagtatgggaaaacgacaagccgccgctcgaaacactgataaattcccatgatttcgagtatgtggcctcgagaactgccagtaagaagacgtgggcattctattctagtgcagcaacggatctcattacgcgtgatgcaaacaagtcatgctttgaccgtatctggttccgacctcgagtgttaaggaatgttcggagtgtggataccaaatcaaagattcttggagttgacagctctatcccattgttcgtcagccctgcggccatggccaaactt

SEQ ID NO: 26488 - DNA, 276 bp, Emericella nidulans
taacacctaccagcacattgccttgatattctccgccaacagctaatgtgcacgattgatgtcggcgtcctagggcaggtctggatccatccggatcatcctagtcccttcgttgacttcaatacggaacacgtttgtcggaattttgaggacattcgggagtgggcacagagaaatcagttgcctttgcctgcgcatggacatggggctgatggtgcacaggctgactttttggtcccaccacgaaaagataaggttttgagcgaaattccctga

SEQ ID NO: 26489 - DNA, 567 bp, Emericella nidulans
ctaggtgaccgcctgcgcgccaacaacatcacgcctcaattctttggctatagttggatgacggccgctgagctggagttcacatttctgtccatatcagagcgacatcggccctacaagcacatcctcgaggcggtcttctatcgaactcttcatatggcaggggtcaaagacccccgagcgctagctaccgagaccgagcgcgacgagtgtatccaggggtactggagtctgcagctccgacctgggatcagcgagtgctttgcgaaattaagggagtcggggttcgccatctggtgtctcacgacaggcgacatcgcacgagtgaaggggtattttgagcgaggaggcgtggacttgccagcagagaatatcatcagctgcgacagcaagggggtagccaagccagcactggatgcataccgaccagtgttcgagcagtttgcgcctcgcgacgagaagtggttcgctgcagcgcatatgtgggatgtctcggcagcagtcaaagttggatttcgaggggcttattgtacagtctacgagcaggatccgtgtctggtgatcttt

SEQ ID NO: 26490 - DNA, 372 bp, Emericella nidulans
acacttgacggaatgattgagcttggcctcagcaggatatcccgtctcgttcaacagaccccgttgtcctggaaggctatccacatcgccggcaccaatggcaaaggctcgatcagcgcctacctgtcgcatatcctggcctccgcaggggttcgctgcggccgtttcacctcgccacacttaattgatcgctgggattgcattacaatcgatgaacgggttgtccaggagtcgctcttccgacagatcgaggccagggtaaagctgcgggatcaaacactaggcatcggggcaagcgagttcgaattgttggcggcaacagcatttgagattttcaatcatgagcaagacgagattggagttattgaagtg

SEQ ID NO: 26491 - DNA, 760 bp, Emericella nidulans
tccattcggttcaaaaccagtcgaacactcctgcaaaacttgctcgcgagtgactcgtggtccttctgcacgccgagcacggtcgccactgctaccttctcacagaccctgctcaatggtatggactggctcggtagacgtgataccgccatctggatctgtacattgaggacgtgcagtacacaaaggccaacggtgaggtcgtatcagggacatacctgccgatgctatttgagactctagcggacccgattgtcagcggccgtgaagagcttgggatgccaaagctgtattctgcccttgaggcgaatgagcgcgagggctcatattaccttcaagcgagctggcagggcgccgtctgggggcgattccagtgcgaaggactcgaggaccaagattcggcaacaaccgccaggccaagcgacagtggtgtcaacggaggcttgcttcttcaccgctacatacccaaagttgggagagactgcaagggtcaggcggaggttgagtatccggtgtttgtcccgaatgcagatgagagcaagatgctggtctcaaaggtaaaccgggttcgtacagctacaagggctgcatttgagattgatggccttgggtgggaggctttgcaacgttgcaccacatcatcgagcgattggccgagattccagtcgatgagattctgtcggcgaaaattgtcgagggagagggggtgccggatgtgtcgtctgcgcgccggatagagtgaggaccacaacaaagtgtg

SEQ ID NO: 26492 - DNA, 614 bp, Emericella nidulans
aacgcttcctttgagatccttgccgccacccgcaactcgcaatcgccctcggcccagagtctctctaggctatcgtcaaacatcaaactggtggaagtaaatctggacgacccagcagcaatatttcataacgcacaccgcgctgaacagatacccatttggggtgtcttcagtgtccaggtcagtagcctgtgaacaccctagacacaacgaaatcgacgcgagctgacaaaagcctagcaggtcgccattggcaatgaatccctagaagaaactcaagggaaggcgttgatcgacgagtctctcaagcaaatgtcaagtccttcgtgcagacctccgttgatagaggcggcgaggcaaagtcgcctaacaaccctacccgcatcccgcactttattcacaagcataacatcgagcaccacctcatacagcaggccaaggtgaatgatatgcagtggctcatcctccgccctaccgcgttctacgaaaaccttgtcccccgcttctttggcataatctttgcgacctgcttcaagatggcgctgaagggaaagcctctacagctagtggctacagcggcattggatctttgctgctgaggggttctgaacccc

SEQ ID NO: 26493 - DNA, 461 bp, Emericella nidulans
aaagagctatggatagagggcgtcaagaccgaccttgcatcagggatagaggtattcatcaagaagcctaaagcaagggatccaggagatatgcctaacaggggggacaccttgcatcccaataccatgctgtttttgaaggatttggccaagaacaatgaaagacagtggctcaaaggttccatggtctgcccggttccatttgcgagacttataactgattatttggaacttagcgcacgacgcggactatcgcgcctccaagaaagactgggatacttttgttgaaaccttgacggagaagatcattgagcaggatagcactatccctgagctgcctgcgaaagacttggtgagatacgtctaattggagggagaagacaaatactaatatgaatgagcaggtatttcgcattcatagagacattaggttcagtaaagatcctacaccatacaaggta

SEQ ID NO: 26494 - DNA, 359 bp, Emericella nidulans
agccaagccgtgtcaaggccgcctatagttctgacaattatcagagtcatccttgacggcagtgcccggcgattccaggcccatcgaatctaccttcgaactgcggcagctaagcgctggatcattcatcgagacggtctcctccgcggacagcgacctggaccacagcatgccggaccgatgaagactattagcaacaccttacgagaggtgtgttgcgcctttgcgttcactagtacttgcaaacatcactaattatagtgcaggagctagcacagatctcgaatcagcatgtcttcgcagatctccgagccgctgacgtacgagcaggacacttgctttgcgaagacccacccctg

SEQ ID NO: 26495 - DNA, 333 bp, Emericella nidulans
ttctttaaagatttacctgattatactagaagtgatgaacctcttaattctatagagtctattattaatacatcttatttttctgcttgattagtaggatttatagaagctgaaggttgttttagcgtttataaattaaataaagatgatgattatttaatagctagttttgatattgctcaaagagatggggatattttaatatcagccatacgtaaatatttatcttttactactaaagtttatttagataaaactaactgttcaaagttaaaagttacaagtgtaagatcagtagaaaatattattaaatttttacaaaatgcacctgta

SEQ ID NO: 26496 - DNA, 438 bp, Emericella nidulans
  unsure (1)..(438): unsure at all n locations
gtcgctttgaatcaagatagccacaagccattgcagattgttcaggaagacggtcaaggtggatctatggcgtctgctgatttcgtttctccacaccgtggtgctcgtcgcaaggggcctttgaccatggctggtagggctaatgctggaatgcgaagaaagaacaaggacacttgcgtccagtgtcggttgaacaagcgaaaggtatttcccacagccatttattataatcaatgtctaaacaagtcagtgtgatggaaatgctccgtgcgaagcctgccgtcccacgcttcatgaacagccatgnnnnnnagcatgtttctcaagcattgtcgagtatggaacgtgcaattatatctgtatgtaaaacaccttttttttggtgtgtttcactactaactgcatcagctcaacgagctatcaaccatccgactttgg

SEQ ID NO: 26497 - DNA, 210 bp, Emericella nidulans
accccgtcgagctcagaccgtgccttgttcgtcatgggatctgccaatgaccaagtcactccacataaaaaggtccgcttggcctgcaaacgctgcagaaccaagcgtatcaagtgcgatggaggcattcctgcctgctccaattgcgcgaaggctgccgtaccctgcattgatgtggatggccgcaataacgaccggtcaatcccccgt

SEQ ID NO: 26498 - DNA, 372 bp, Emericella nidulans
attatgccctggaaagatgcgagaaaaacacgtcatttgatgatccctttcgcgagaaatccgcatttcgtgggccgccaggaagaaatccggaagatagaagatatgatctctatgccagatggacccaaaaaaatcgccatagctggattaggtggtgtagggaagactcaaattgcactggagttagcttaccgcatgcgagacagagaccctgaatgttcgatcttctggatcccgtgtaccagctatgaggctcttgaacaggctttcataactattgcacaaatgctagggttccacaagatagagccagcagaggcaaaagaccggctcaaaacttacttcagcgaaaccagtaagaagtggcta

SEQ ID NO: 26499 - DNA, 579 bp, Emericella nidulans
cccttcagagtcttgactgtgcatacaccacccgacttagcgaccagcttacccagcgcaggcttgccctgctggctttgagcaacagggacggcgctgctgtcaaacgcaacctccagagaatccgttgtagtgaaaccaggctggaaagtctcccagaccttcttcttggggttgagtactttttcaggctcgccgtcgttccagccctcgaagtatatcctgtcgccggcaggggcatctgcgggaggagtaacaagctcaacggggccagcgtgagagtcctcgccctcagcgacacggggggaagcagccaggaccatggcagcggacttgatgccacgcatggtaacgggcttgaggttacagacagcgacaatcttgcggccctgcatctcctctaagggaaccaggccattcaagccagagcatactgtacgaacggtctttccagtctcctcatccacagatgtgttgtctgagccaggagcatcaccacagtcgatggtggagacgtaaagtgagtcagcgttggggtggttgacggcacggagaatatgaccgacacggaggtcgatg

SEQ ID NO: 26500 - DNA, 351 bp, Emericella nidulans
gaaactcacggagaaggggagttagcagttcgagtccggtatggcaatggcgaaacggaggacataccatttccttccttgttacacgaaggttccactgcgtccgccgtggcttcggcggaggcaatggaacaggcgagatactccgtgctcaatgaggttcaaaggcaaagtttgagaattgccaagggccttgtcaagctcaggaaggctctcttctccctcgaagcttcggcccgtgaacatgctaatatggcaactccattctctgtcgtggccttccacgactccttctcttacgcattgatgctggcactgaccttcttacctcagatcacacaggtctctaag

SEQ ID NO: 26501 - DNA, 632 bp, Emericella nidulans
ctctacttcgcctacggctccaatctctctcccacgcagatgcgcatgcgctgtgttcacaaccccacgctctcagggcaccccgtcgccctggcagccctagactcctggcgctggctaatttgtcaaccggggtacgcgaatgttgtgcctcccgcgggctgcgcgtgggaccacaaatcactgagggcgacaacgtgccggagtcgatctcgaagtctataccccgtggaggagtttacggggttttgtacgagatgagtgcagaggatgagacggtgttggataggtatgaaggggtgcattgtttagcgggggaatccacggaagaacaaaaggttccgctggagattaggccgaaagagcaggaggctggggattataataagtggtatgttgacgcgagagttgtgaagtggttagatgaggggtatagggagcgaaaagggttgcagggagttggcgggaaggtcagggtgttggtatatgttgatgagttgcgggtgaaggtcggaaagccgaaagaggagtatatcccccgaatgaatagggcgattggagaggctgtacaacttgggtttccaagggattgggcggaggaggttatgagaccttctattccgttggagtag

SEQ ID NO: 26502 - DNA, 421 bp, Emericella nidulans
tcccactttctgtcgacatggaactcgcgcatgtttgagtttggcgctgtcgtgttcctggcatcgatattcccaggaactctgctctacgcctcggtgtatgctctagtgcgctcgctatttgcagtgctattctcgtcatggcttgggtcacttgtcgatcgaacggatcgattatctgccattagacattccatcagtgcgtgtttcgagtcttgaatttgctattttgcttcaaattctgatttcaatagtatggcaacgtattcctgtcgcggtttcttgcgtttgtctgggactgctcctgagatcaccgcctggtcatctgtcaaggctgctgttcatcgcgctggttctgcttgcgggcgtcgagaaactagctgcgactgtcaatactgtctcagtagagagggactgggta

SEQ ID NO: 26503 - DNA, 456 bp, Emericella nidulans
tccgcttcatcattcacgaccttggctttgaccccagaccctagtttcaactggtaggaaatctgctgtgactgtcagacccgagctgatggatttataggttctttcttctccagatcatagtatcttgtatcctgtaagttggcgaagtctcctgcgagaatatctggcttaccagaaggctgcaccagtgtgcttttcttcctgctctactttaaccgtctcttcgcggctctcttatcgtacgggatacgggcatacacgtggcattattaccgcgcctatgtcgacatcaacgcgcttcaaatttccctaataggaggaaggatattcttcaagggcatccgatatcacggcgtgaacgagacgattttcatacacggaggatttctcacctggaacttctggaagcacgcagtgaggcgcacggatttctcgcgcaccggggtacaaaac

SEQ ID NO: 26504 - DNA, 249 bp, Emericella nidulans
atgctacccgtgtcgcgacccgagggtcatatgagcctcaattacatccctaccacccaatccatatctgggacttctactggtcgcagttctccgagtgatccatccgcaaacaccatcattaggccaccattcgtctcgtcaaacattcttaatggtaatacaggctcgataggaagtgcaagactaggggctggatccccttctcatgaacttggtgcccgcttatactctaaacggtaggtggcc

SEQ ID NO: 26505 - DNA, 297 bp, Emericella nidulans
ctctacttcctcgcctgcatctcgatgcgccgtctgctcaaccgcgtgcatgatctcctgtacgcacgcaacaacggcgtcgcctccgatatcaaccagttcccgccggtcgtcgccgaactggaccaccagctcaataaatggagggacttgctgccgtctgcattccacttcgatcttagccgcgctcccgccggatccatggaggcgggtttcctccgccaacgctatctgacctgtaaaagcgtgatctaccggccgtacctcactctggcgctctcactcaccacgcgagcg

SEQ ID NO: 26506 - DNA, 498 bp, Emericella nidulans
gccggcggaatgatcgatccatccaaacatgccgaataccccatcatcctgggcgaacggctggcaagaaggaccgacaagacatattcacagttaataaacattcaatataattacaagcccaagtcggcgaccccgcagcagcgatctattatcaccaactcccctcactcccgggaccactttaacctaacgatcaccgatcaggctccgaactcggaccagaatgtcctgacctactcctaccagggcagcgttgacccagcacaaagcgcatctgactcgcaggaacatgagctagtactcgtattcgacgcggcaaagaaagcattcgtgctggaacctgtggctacacaactcaacttcaatcttcgttcggccccggcaaaaacgcaaaagcagttgatccagcagtatccccagcttaggactctacaggaagaccacacgtctggagatgaccgggcgcccgaccaggcgagcggaaacgacgatggg

SEQ ID NO: 26507 - DNA, 303 bp, Emericella nidulans
gaagaaaatgacgccccaaaaagccaatgtaccccccaggcgtctcaacacatcccctggtatcttcaggaagagagctcagtacctgcagtgtccgaggtcaccttacaggagaaactcccagagctcccggaaaacccacccaaaatcttgccggaactcctagaatacatctttaaagacctcggccttgatgagctcaagttgattgacttgcgaccactggagacgccctcagcgctcggagcgaacgtcattattatcattggaactgcccgccagggcaaacacttgaacgtttcg

SEQ ID NO: 26508 - DNA, 228 bp, Emericella nidulans
cccttgtttcttggatatgctttgttcgctatcttccaaatccctgttgccgtggccaagaacgtgcagactattcttgtgtgtcgatttttgatgggctttctggggtgctcgcctctggctgttgttggaggtgcaatggcagacttttgggatcctgttgatcgcgccatagcgattgcgctgttttcagcagctaccttcgtcggacccgtgctcggtgacctt

SEQ ID NO: 26509 - DNA, 675 bp, Emericella nidulans
cgaatcaatcggccagttgactcgtattttgcgacacgagcaattggtacagcaagtctccagaccttcgaacggcatttcaccacctgtttatccatcttcccggagcaatatcagcctaactctgatcaatacatcgagccacgaaccctagccccaatcatctacctccaaaacgcgcgcctcatgcttcatcgccacaatatttcaccattctgtcctcctgatgtgcgttcatcggcgttggattattgtgcctccgtttgccaagataccgcacggctcctgtcgcgatgtatgcgaccgtcccctatcacgggcaacagggattggcgtgcgctgctggcggtgtcggggtccgcgatgctgtgcgcccatctgtggcgctgcatactcttattactctttcgccaggagtacgaagctgcattgatatgtgttcaagctagctctgctatgagggattcgcgtgccatcaatgctgcatgcgggcggaacattgtgtttttcctgaaatgccttcttggccgattgcaccgttctggccccgtggaactggatggggacgaggaaatgatggcgtatgtgtccggtgatatgcagggtaccagcaatggaagctgggtttgggaaagcagtgagactgggtctcaattagagatggcttctccacaa

SEQ ID NO: 26510 - DNA, 276 bp, Emericella nidulans
ttgcttagcgcgattacaacttatcatggccgtggcgttgcgaaaagaggggtggacccggacaagcatgcgattgtacatatgagaggtacaacgccaactttgggcgttggggagccgcgcatggccaaggagcccctggaggtggttccagaaaatccgagtgagaatcttgattatatgtcgagattgaacttcagcaagatctataccgtggagcataatgtcaaagtgcttcccattggccgaatttcatcaagatcgatgaccaggttc

SEQ ID NO: 26511 - DNA, 698 bp, Emericella nidulans
cgacagcctcacccaatgtacctcgccaaactcgcctacaaagcctctccgacacgcaagacactggagaaatgggatcgcgtaataacggctacagcggattacttggtttcgtacgcatgggcaaacaagagttcagggtattatgatcttggaccgccgtgggttctccctatcccaagccttcttgatactttgctcaccccgaaggattatacaggtcctacggcgtcactgaaaacaccccgcccactgagactatgaacttagcctacgaagtaacccctctctccccctctccacgaccctagcatcacatattaagctgattggattagatagcatactggcggtacgcactcgatgtggcaatcttctggaaaacaacgctagacaaaccggtcccatccaaatggaagaccgttgctaccagactcgcaccgcctcccatagtcgacggcctttacgccgtgtacgaagggctggatagttcctggtggaatgacatctccctgaccgacgatccacggagcctgatcatgctccaggggatattgccggatacacccgccgtggactttgagatcgcgaagagaacggcggataagattgatgagatttggaaggatgaggatgtcaggggatgggggagggttgtcctctcaatcaattctgcacgcattggagaacgagagcgg

SEQ ID NO: 26512 - DNA, 336 bp, Emericella nidulans
ctggttctccaggcggaccgtcgtttcatatcccgcgtcaacgatgaggccaccggagacccagaatcactcgcaggtcgtataagcattcgggaaatgggctcgaggatagcgcgcgatgacgcaccgaagtccaagaagaaagctgttggtccggttgacattgagcggggtgccattcgagagggcgaggatgtccttgcgcgtgagcagaagaaacgacagaagggtcaacctgcccaactacgcggccaaggaatactatccgcggccgatgctttgattgaaggcctcaaatatcgccctcgtacaccagccacgcgggctacgtacgac

SEQ ID NO: 26513 - DNA, 452 bp, Emericella nidulans
caggctgatagacttcttatggagcaagccgatgagcgcgataataagagactagacaagacgaaccaagaaaaagagtaattctcacatctgtcttgttcctagcatgtgcttattctggccgtctcaggaaacttgaatcgcagattctgagattacaccaacgcctggctcagccgattgggacatcagcccgggtgcgtctccaaaatgatctcgcaaaattggaagaacgtaatacggcccttgcaaatgatctcaaagagattcagcagcgtatcgatgaaaggcatcaagagcaggagatgaacatggaaccgagtgggacgggaagaatgcccaacgaatctcgcagagactacctcataaggactgcaaagcctacaccgttctcgcgaatgggaactggttaaagcgccggccctttagctagccttcaggatgcgcttatg

SEQ ID NO: 26514 - DNA, 717 bp, Emericella nidulans
ctgtacccagatcccatttctaagcgcaacccaaccactaaaccctctggcatctttggctccctttacccctcacggcatggtcgcgccctgcagcttatcatgagtgcctcgaaagctccagcgcaggcccagatctatccggggaaagggctgggctctataagtaagttccccctttgacacatctctggcaacgactaatcccgagcagcacttggtgcttctcttcataacgtcctaagccgcctcaaagcccaccctcagacctaccccgcgatcgatatcgcgtactccgcatcggatcctctacggcaacccgtcactcttcagctcccgtcaaatggtctgcgattccgatttgacgggccagatcaaagattgcgtcttatagaagtcttggatttctccaaaacacccttagtatataaaaaccaggaagtgtggaagggagtggccaaacctcaagaacattcagcttctccacaaggtccgggttttcgtcacgtctacaaccgcctctttggtccttcatatcctggtgaatacatcccgccgacatcatcttctgcgtatggcacatatgtgctatcgtatcaccgcgttgccttctcgtttccacttcagcattccgcttggtcggaacaatgtgatttcgtagcattgctatcatcctctgcggctctaccggcaaaaaaatatgtcaatatttcaggg

SEQ ID NO: 26515 - DNA, 366 bp, Emericella nidulans
tactaggtcttctgcgctgatcaggtgacgattgtcacttctgccgagtgtgtgcagctccatgtttggacagtcagggtcaagcgtgctgccctgcagtagccctagaaggcacttttgcgtgcaatattgagcaacatgttgacgagattgcccgctttggttcacttgaggatctgtccggggcctagactgttgggttggagaggacgatgtaacctggctaaatgtccgcttccgtccatcagatgcggcaggctctacctcagaatccgaagagtcctctaggtaatgctggtcggaagatgacgcgcagcgagaggccgcttgtgtggtcacttgacggcctttggtgacgggagatcc

SEQ ID NO: 26516 - DNA, 393 bp, Emericella nidulans
aggtccaggtgctctaccacctcttgccagcgtcacggcggtccgggtagtgaattttaccacctacaattctgccaaacaccgaatatccgatttttttgagcgcatgacgggccagtcccctttagagctctataaccgaccgggcagcgttcccaccctctcgacgactttcacctttatcaccgcaggatgctttgccggagtagtaacctctcctcttgcctgtacgcatgtctcttggtctggcagttctaggctaatggtctaggtccgtttgaactggccaaaaatgtggtccagacctctgttctcgtatcgaaccgcgcccaagcatccccgaatgccgtgagagatccctcgttgcgccacaagccgcgtctcgggaccatt

SEQ ID NO: 26517 - DNA, 873 bp, Emericella nidulans
tgctgtcaatgccagcatggtatatatatcaaggaggctgaggcctatctctgcaagaaatattgcctctcaagcttgataattcagcctatcatccagactatctgacaatggtataatgtctatcttgatgccactaccatctatatcccctgtgagcttgatcacccagttcctataatccctgtatacactaatagtatgcagtactagcaagatctatcatgcctgtatattagcagctgtctcaagactatgtaaaagtactggtaccaggcccatggctggacacagcacccacaccaaggccatgttactactgatgtcaaagtacagggtttataagaggtttagcagtcatattacattgttgcctggcagcaggtattccccacacgcaagaacttgcaccttgtgcacatccaatcatgcgaccccgagcccgacgagccctgacccccgtcaactgattacgagcagatcgctgccaagatcaaagcgcgtgcgaccaacaacaagtagcaggcagcctgccagacggccgagagtaacatgctgcataatgcaaacccatggctgcgcatgacctgataggcatgataccttgccaatgtgtacttccaagaccttctcaacgtcgtcacgccccctgactgtgatgagaacgacgccaccctgcataaacaaggagatcctgtcagccaggcgatgtagtatatatgggatgccatggggcagctggcttggtatagtcagtatacagtgcaatactgtaggaacagcattcgcatgatggccgcgagcatagtacctaaccagatcccacaccgtccgctgcaggcatatatagatgagacaagtattacaaagcat

SEQ ID NO: 26518 - DNA, 486 bp, Emericella nidulans
tcctatttgctgaggcctaggataagcggggcagggcaccatgacgccaagttgcgcaagatgccgagccgcgcaatcctgtttcacatatgatagagtacattttatactttcctgataacgtaaggaccacatcgctagaagcctcttgttaaagctctacttcatcagtatagatcagcctattaacaagaaaggctaccattgccatgtaaagccaacgtaggggaaagaatggtcaaagtaatgcaaggctaatccttgggaaaccccaggccggatcatccgtgtcttgaaatgcatctgcgggcatatatgatttagcctggcgacaggtccatgacgaggtcaatgttggggagaaactaccttagtctaaggtaggtgtgttttgcgcataagaagggtctcttgatgggaaaaagaggggaagggggaatattgttcgaagcgaagcgagagtggggcgcataggagggtagttct

SEQ ID NO: 26519 - DNA, 411 bp, Emericella nidulans
tctagcttgcctccacaaaatgagggatttctaacagggttagaaagggttttcaacgcttagagctgctgatagaagatgttagaggtcacatgcttgattggcacattatcttacactatcattgactgctcggtacgcagtacacagtccggaagaaagagactactacgatgtgccagtctgaaacagtctaatttagagttctagagcgttttcgcccatagagacccaacgtctcagagcatttccattcgctttcctgcggatagtccccatcaagtaacctatccataccgacacgtgcagcggaatacgtaaagtcctagggcatacgaaagagacatgcccatccgtagctcccatagtcgtcaggttactccagcgtgatgtccttgtaactcatacaaa

SEQ ID NO: 26520 - DNA, 257 bp, Emericella nidulans
gtcgtcaccctggaggccgcttcagcacggatggcagctagggaccgctttggtggtgcctatgctgacctgggcttcacccctcttcagagagcgattcgtacgttacaatgccatggcaagcatttgtactcttcaactaactcgcttcctcatttgcaggaaatgcctgcgacttatcacactacgaacccaacctggccctaaacctggaagttgcagacctggtcaattccaagaaaggcaatgcgtgagta

SEQ ID NO: 26521 - DNA, 300 bp, Emericella nidulans
ttgagcatgaaatcacgcacagtcccagctggcaagctggtactcgcatcaccggtcacaccccagacacctatatgctggcaatgcctccgcaatgatctctccctaggtcaatccaaattccaaaaccgcaaatatcacccctctcgtcgaaaagatgcttccccctttggcgcggcggtttcagcagcccaaacgctcttcaagggtctacccaaagcgcctcctgggatatcagtcgatccgttgaggatcgtgggcaaggaactcaaatttctcaccaaaaatatccgtcagctt

SEQ ID NO: 26522 - DNA, 282 bp, Emericella nidulans
caatcagcagctattgcaggatcgacttgcttagacaggccccaactagagtactttcagcagcagaacaattgggtagattcagcacgcaaactgcaaagacacacgagcttgggtatcggaaatgtacgatcagtcaacagcggagttttgagtcatcttccgggtccggtttcgacaaccttggattcatttcacgctgacatcccagtgccctcgcttcatgtcaactatggtcccgggtattctggtgcacatgggccatccaaccatcgagatttc

SEQ ID NO: 26523 - DNA, 471 bp, Emericella nidulans
tttcatagttacgttgacgatttatctgtgaaaaaacaagataaggcattaatccacgccaagagagcgcgaaacataagaacagtcttgatagaccctaaggacacagccattgaatcggcccagtttcggtatgaagtaccccattctaaaccgagatatttcatctgtcattggcatggaccatatgagaagctaaagggcagtttaggttttgggtcaaaaaaatgttcaagcttcaaacagttggggggaatacctcagatgtccgtaagccacacctgtctgcagtcaaaagaccacagctaataggaaggtgtcactcatcagtgcaggcgaatgatctgtcatgaaggaaagccagtcgctatcagggaaaaacttttcaaaatcctcacgaaggcgcatcagcagtgccaacacggtggtcgagataaaacatctgctcaggtacgacagatatactcatgg

SEQ ID NO: 26524 - DNA, 537 bp, Emericella nidulans
gtggcgatcaacgactcgaaccttctcaacctgatgctcgcctactccgcaagtcatcgcgccaggtttctgggccatcccgagccagcaaatcgaattgcgcactgggtcagcaatgtctttccatctttgcgcgtagccttagatgagcaggagaagattactgacagtcatcttgcaactgcgatcatgctgctctcactgaaaatcgtctctcctagcacctttgaggtaccgataccatggcaaagccatttaaaactagcacgcgatctgtttttagctcgtcaggcccaaattgcgtaccctgggaaccgcgtcggggcttttctgacccgttggcttggctacctagacatcatgggttcgctttcatgccgtcatcaccagccgcccctgttggcgtactattctgtcttaaatacttgcacggctattgaagattgggacgagtttgcagtagactgttttacgggatttactcctcggactggtttgtttctaatgcagcttggaggtctagtgcatcattgtgac

SEQ ID NO: 26525 - DNA, 431 bp, Emericella nidulans
tggacatcaatgacattcaacgaatcatcctcgctaaaagcatacaaccactacgagtactttctctaccaagtcccctctatcttccaccgctggagtatatgggcctcaaataacgctccatctgagcaagcaccttcatattcccatccaccctcgccgctacgaaacctaaccgcgttcacctacatcgcagtcttccctttctacaaccatgtccagctggtcctagacgtcgtggaaaacatgcccaatttacacatgttaaaaattcaattagggccgtctcagaatgatcgggtcacgagcttgagcagcggggttctatggatccgagtgatccatggatggagctcgctacgggttactcactaattgcgcatgtcgtcaggaatctagggagaagaggctgtctcacaagctttactgcg

SEQ ID NO: 26526 - DNA, 474 bp, Emericella nidulans
cgatggcaatcatgggctatcctactatcaatggttggcctggctctgctgcaattgtattacctgcatcggggtttgaaactttgcagcactagcattctctacccatttgtcttctgcatatacaacatcatcgctatcttggacggtttaatatacttccgccaaatgtcgcgactctcaagcctacatgccggccttgtcacactcggtacaatcgtcctcctgggaggtgtcctctgtctatcctggcgattagaggacattgacagccacgcacccatgacagttgccggcccgtcccaaactgccataggacccggaatggccgccatcgacgagaacgtagaggctcagcttaggctcgaattagaagaccaagaagatcaagtcggcgaacgagaacccttactccgttcgcgcccggccaaccatccactccaagaatcagcgcgccagcgagctcccagtctt

SEQ ID NO: 26527 - DNA, 316 bp, Emericella nidulans
tccacaatggtgcaagtcaacatgtttggcagggggcggtcgctccaagccgccatttggacggcctgcggcatggctttcatcctcttcggtatggcccttcacaccctatacggaagttgccgcccggtgctgatttcatgcaggctacgatcaaggcgtcttttcaggcatcgtcgagaatgagaacttcctggaccatatgagtcaccccaacgacagtctcatggggatcatcgtctcgatatataacctgggttgcttcaccggctgtgtggtgaatttcctcgtggccgataaactcggccgtcggcgt

SEQ ID NO: 26528 - DNA, 846 bp, Emericella nidulans
cagatgtttatcggggagatgggctgttggcttgttgtcctcatgtcccatctatataaacggcacctcgctcctcgacttttccaggaccagtcgcctctgctagccggcggctatcgcccagtgaacgtcgtcgatggagatgacgaagatcaaacaattgaaggacacaatgataacattgacccgtcgaaacctttacgactgccagacggccgcataccacttcgtggcctgaggacatttctccttgcagcaccggcatgctgtgatattgcgggcactactcttatgaacgtcggtctgctgttcgtggctgcaagtatataccagatgactcgcggagccttggttctatttgtcggtcttttcagcgtcctgttccttcaccgtaaactatacttgtaccaatggctagcactttgcgtggtggttcttggtgttgcgttggtcggtcttgcgggtgcgctgtttggcgacaaccagggtcatgatattactcaagaaactgtagcagcagctgttcgatccgcaacaaccgaagtcggagcaaccgcacagaccccggaagctgtgagagctgttgtgggtgtactccttatcgccgcagctcagatattcactgcttctcaattcgtcctcgaggaatggatactagagaactatgccatggagccgctccaagtcgttggctgggaaggtatcttcggattttctgtgactgtcatcgggtccattatcctgtacctaggcgtgggacgtacggaagcaggacggtacggatattttgacgcgagggagggttggcaccaggtgttcacccacaaggctgtagccatctcgagc

SEQ ID NO: 26529 - DNA, 342 bp, Emericella nidulans
atatctcagcctcttcaaacgcttggcgaagcttgcatccacgccgcacgacactctcactccctaatactcacgaaatggatcaacggctcccttcccgtcttcggatattttcatgcacactacctcttttcatcttccctcgttttggcgatgtctgccttcgtgccgttgcctcttggttcccctgcagatctaaatgcctttgagaccggtcttgaagtgttggcgagtatgagtgagaacggaaacctcgcagcgagcgagttctatcataaccttgtgcgagtcaaggagtgtcttgattcttggagggcaaagaaggggcttgccaatgggagt

SEQ ID NO: 26530 - DNA, 258 bp, Emericella nidulans
agaacccctttgttggtcgcatacccctgtgagatctggccgttcgcacttcgatcccgtggtctgagtgtcgcctggttctcagcaatcggagcattgatttttaacactttcgttaaccccatcgcgctgtcagctatcgggtggaggtactatttcgtgtttgttgctatcctcatttgctacggtctcacgtcatggttcgtttaccctgagacaaaagggtataatctagaaagtatatcccatattttcgat

SEQ ID NO: 26531 - DNA, 505 bp, Emericella nidulans
atctctccttctgtcatcgtcgcatcctctcgcacggtagctgagtatcatggcaagtttatgaaaccgcattccggtcttctttcctctattgctcgctggttccaggtgcgatcgcttgattctggaaatatgccgtctcagggattcttcagtcggctagccagcgtcggacctactgccgagctttctctagataggctccggctactttgcatttcacaccggatcgacgatgataccgacgctcgtctcgaccatgagcagttgactgacctgagagtcctcactggggctcgcgtggtttacgctctcacaggcccaaggggttgccggtgccatctcgcagacaaatgtctttgactaccgccgatttgaggggcctagccatttcggtgccccattgagcacggtcgagcttcttctcagtgatttatctgaagataccgagcaaggacaggtaggcttttctttatttttttacacgggctattctttgtttttt

SEQ ID NO: 26532 - DNA, 338 bp, Emericella nidulans
tggaatgctgttgctctatgggcgtgggatatcgttgttgataactgtgctatttgccgtaaccacattatggatctctgtatgttgattccatgttgaatcgatgtatgcacttctagctgccgacagagctaatatcttccggacaggcatcgagtgtcaagcaaaccaaggctcatccaccaccgaggagtgcacagttgcttggggaatttgcaacgttggtctaccacgaattactgactatggttgtttactgacaactaacctagcatgcattccatttccactgtatttcccgctggctgaaaacccgtcaagtgtgccctctcgataac

SEQ ID NO: 26533 - DNA, 1445 bp, Emericella nidulans
gatgggttctccaacgtctactggaggatctacactgaagataccagcggcactaatcctccaggtgacggccccaataatgggcataccctattgaagcatatcagtcgcctcaaagagctcgagcttcggctaaggagtcaaggtagcttagtgttgatttacccgagacgccttggtctgttgatattctccgccactcccgactttgagcacctcgcaccagtacttttaagtgaaagcggagatcagacaaatcgccttcttgttggctctacaattctaaaaggttagttgcctaacaggtcaattacaacgacagtacgcttaccaattcattagtctggacatcgggaagcgtctctgctgcggatttggcgaagagtcacctgtcagatctccagaccacgaacgccaattctcccgcaccatcccaacggctgcaaaacaactctgtgcaacctaggcgggcggataattctggcggctccgcggcaatatatgcctcatttatctcagccgtcaccgccgcattcagtctacaaatagttcgacaaaacaacgccattcctctgggaccgcggactctcttcaacaccgtcaacggtaatttagatgatggccagggccctgccggcaatgggtccacttctgtttcagcactgacctccctccacgtccagttgacttcggcaggaaaattgaccattgccttacagactattgcgcagactggattgttacgactgagccaaccagaagaaagtgcatctgctattctacccggagctgatttatggctagcacctactggttcaattgcaagactaataacttctcactcggagaaaaacagccattcgcgccccacgtcggcctcggaagatattagacgatggccgttaactgttctagaatggttgggatactttggactacccactgaaccggtgaccgatgatggctgggtggaggttgaggtctgggaaccgttctattccaggttgtccggagaagccgctcgactcaaagaagagaattcttcgctcccgctaaaacgtatactttggcctgcaatatactgcttccgaagatcaaagtcaaaccagtcagaaaccttggacagaaccggggagagttttccctttctttgtgacccactggacttcgcggagggttggtgtgctaaagagatacccaaggctgtggagacgaagtcggagcttccttccaagaaccaagaacggcaggttaacagccaagacacatcatcacccggacctgtcggtctgccagaagggatagaaagtctatcccgtgcctctcttcaccctgaagtgcagagcgccaaccttgtgtatccgacgccgccagatgggacggccggcataggacttaatcccgtagtgccgactacgacaaaaaacgcgttagatccagatacg

SEQ ID NO: 26534 - DNA, 273 bp, Emericella nidulans
ggagatgcagtgtacatggatggcacttcacggttcgcctggcatgccgtgcctaagatcctgcctgagacttgcccttcatggttggcagactggccctgcattccggatgacgagaacgggtcgtgtctcaaagcgtggaaaggctggatggcgggtaaaagagtgaatctgaatgtccgacaaatagtggccgaccaggcttaagcaagagccagctcgctcttcgatataacgttcgtgatattccaagacagtatctgtcagagccaa

SEQ ID NO: 26535 - DNA, 279 bp, Emericella nidulans
tactactctgtctgtcttagccgaacaaggctggggcccagacttttcagtagagaaacggtgacaccgcagatgtgggattctggactttgcgtcggtgccggatgtgttatgtgtggttggagcattcttgtcgaacatgcaaagaagcggcaggagatcgcattgtttgtggcacccagggctgcagcaactgtcctacccaggttttatgatcagaaggtatggttgaaccgctccgcatacaaacctgctctgcttggctggggatggttacac

SEQ ID NO: 26536 - DNA, 573 bp, Emericella nidulans
agcctggcgacattataaataatgcgtcactcattctcggaaagcaaataatcaacatccttccggaagggtaaggttacccaccatatgcttccaactttattctctttacaaaactgaggcgtatgtaggtctgccgtcttgaacccagagctggcaccactttgcctggacgctcagaaaacagctgttgaattgccaatccgagtgaatcaaaccgatcctatactgatagagctgctacgccttgacttcaacaatggcgacagtgagattgtgacgattcaaagtaaacaactgaaacaattgaaacggcagtcagacaagaggcgctcccaattgtcttctgagttacaccgtgatctcctcctaccaattcggaaaaccggaatatatcgtttacagcgtgtcgttgatgagtccaagcttgaggtccgggtgcgagcttcggattctatagtcactgcctgccctcgcgctctaatcaaaaactcacacacgcataagtgccgtggtgagctctcgaacctagtgctagccgttgagggtactccgcccttgaaaataaagtat

SEQ ID NO: 26537 - DNA, 1149 bp, Emericella nidulans
tcctcacagtcggatccaaacgatcttggcattctcgatttgttgcaggcgaaatcggaaagtttccttcatacctggcaatcattatctgaggataagtcgcgtcatgtcactccggatattgtgcagattttgacgtccttctgcataacggtagccctttatacttcttgcctgccggagcagccagggcctcggttacagactctgctttcgaacagccgtcgtatgtgggaaagcgtctgttcagtcttagcttctcgcgaatccacctttgtggtctctagcttaatactctttcctcctttctttcctctggattcatgcttttccaaaccagcaactgccatccatagggcattatatggactgctcacgcctttaagtgaagttcttgagagccaaagacagtcccacaaacaaagactatacgctctcaacgacgacactatggacttggatgatccgtttgggccgtcaactgatcaggtagaagaggcgtcaaacattttatgtacaaatcgcagcgatctgccactgttccaggattctgctagcttccatcgctatatgaccatccttatttccatttacaacaggatgtattctcaacagtctgaacctcaacaacacgttactagggctttggaagactatctgaacgatcttgatgaggttgatcttctggctgcgcatgatctcctaccttacgtatatcaatcctgcgctagaacggaccgacaaacgcaacttgtgctacttgaaaacctaggtgaaaagtgccttcaaacatacgaattggagcgctgcgagaactcacatttgctctgtatccagatgatgtgcagccttgccatgtcatggaccagaggaacccaggacagcctcagtgactcagccgcggacatttatacctggttcacgacaatattcctgaagaaagggagggcctcctcgtccgtcttaatcgcctttgcaaaactactgggagtgattctaagcttgaacccagcatactcgagtgatcaatcaagcccatcccctaagactaccctattcaagattattagcgatggtgaagtgctagtcaaatttaacgcggggagtctcgttccgcagctgttcggacagtttcttctcgaagaccac

SEQ ID NO: 26538 - DNA, 210 bp, Emericella nidulans
atgacagattcatctccaataaacctctcctccttcgatcccgctctcctacactcccaagaccccgacctcccctccgaatccttctccgacgagctcgaagcgctcaatgcagtgcgattagaaaagacgcgcaacaaagtcgtgatccagcaccgagcctggaacctgtctgatgttttccgcagcgacgaggacgtgagaccgggt

SEQ ID NO: 26539 - DNA, 467 bp, Emericella nidulans
  unsure (1)..(467): unsure at all n locations
ctaacgtcaatttcgaccagcttccattatcactatgacgggcggtgtgtaccccctatctcacctcctggccatcatctgactgatccccattgcagctttgcagagagtgtccttcccgaagaagaaaccctcccgcatctgtccgcgctcattcagacgtacttgtcaacgatggccgatcttggtgccgaaacatggataatgcacggctcgcttctggcttggtggtggaatcagaaggtgatataattcgaatgtgtgaatatgggaaagtttttgctgatccggtccagatcttcccgtgggacaacgatcttgatgttcagatcaacgagcccacgatccactttcttgccgactactataacatgacagagcatncattttgatctccctgacgttgaaggcgggcgtacctatcttctcgaaatcaatcccattatgtcgttcggtcgaagctggat

SEQ ID NO: 26540 - DNA, 309 bp, Emericella nidulans
ttccttacgcccgacacgctcccaccattttcctctacaccgtacgcgcctcagggatacggcgcctccccatttggtgttcctggttataatgaaccgcggggcgggtttcgcggagggaagtcctatcatgaccgtcgaccgcgtggaccggaagaccggccgaaatcgaaacatgccctacctgggtgtgaaccatgggtgcttgtgaaaaccaaactggggagaagattcgttcacaacacggaaacaaacgagagtttctggaagttcccgacagaagtactaaaagccgtcgtggagtttgat

SEQ ID NO: 26541 - DNA, 726 bp, Emericella nidulans
ctagaaggagttatcgttccttcatcacaacctttgccccccgaagagcgtgacctcgcgatccgaatttttgacgagattactctgcactttgagcgttcccaggaaactgacagcggttataaaccgatcactcttatcagactcatgaaacacgaagtctcagagacagacgaattcttgagcttctttttctcctttaccgggcaagatctacttgacgaggaggatggaggaatcggtcttgatcgaatcttattacaccttgctggtttttctaactggtcaactgaagagcaaggcactttaagcgaaagtctcgttacatttgccaagtatctggtggacaatttcttcctaccccgtaagtttctagaccaggcgcgggacgaaaagtactcaccatccttagtaaaagcattagcagctaaaacccctcaacctacccctgcctcctcccggtccaaactgcacgaactcgccattggaacccctcaacgcgtttcgaaccttcgaaaagactgtcttcgtcgtgaccgccaccgatgtgttattagtcggaaattctatgcccaagaagcccagaatcgatataagcgagatgggcgtgatgtgaaggatgatgatggcaagtcactactaccagaacgcgatatcatggcgtatctggaagttgcgcatataatgccccactcccttaggtcaattaccagcggagggagtgaa

SEQ ID NO: 26542 - DNA, 748 bp, Emericella nidulans
cttgtcctgggcggcacgggtccagctggcatctgcctgctacgagaacttgtataccggcagcacgagactatagtctatgcccgaaatccgtcaaagatcgatggcgatatacaatcaaacgagtttctcgaggtctgcggcccttgctactgcagaattggcgctaaccgcgtgttcgctacagatcatcaagggtgaattcgtcgaggacgacctccctaccctttccgcggccatggcgaggacaaaagtcgtcatctcccttcttggccccaatattatacgaatgtccaatcctacattattcgctgatatctataagacgttcgtctttcccctgatgcgcgagcatggggtccgtcgcatcttcgcgatgggcacaccttctatctctcgaccccaagactcttggacactgtttaccgctgttgtgatccctattatccgcatattcgcacattctgcgtacgccaatgtgcgagccatcggggacgcatttgagcagcatgctgacgggcttgactggaccgttttccgaatcgcggcgatcccggggaatcacgacgaggaaagctggcgcacagatagggaggatgcggatgtgtttgttgggtgggtgggcgagaagggctggacgccgtcgcagaaaagaggtgctctggccagatggcttgttgatgctgcagaaggaggcgcggataaatgggttggtaagatgccagccgtttctaagaagggatgactg

SEQ ID NO: 26543 - DNA, 333 bp, Emericella nidulans
ctatatctctccctcccgaacactggcccgtacctgaagctcctagggggagggagagaccatctcatcgcactcctcaagaagtcgccgtctggagaggcgcctcttacacttcttcgagaccggtgggatggtgcagtcgaatcagagcggagttttgacgtggcaaagcgggcgaggggtgagtttgcgggagttttaccggggaagacaaagaagtggaaagaattctacgggatgagtttccggtgggtgctggaggaagcggtcggggcggggttggttgagattttcaatacggggagtgttgggcctggagtccggtgtttatga

SEQ ID NO: 26544 - DNA, 585 bp, Emericella nidulans
aatatgccaacctggcagtttcctacggaatcgccaacagattccgcaagtcccggcggaaatcagagctctgagtttacccaacaggctggtgactcgggtgctacctctgagcaccctaaaaggcactatccaagtcgcttatgtcgcatttgcctggagaccgtgcctccaacccttgttcctccttcggaacatatgcctggcttccttcagcgcggagttcgtgtcgtctacgagtctgaggatccggagctcgggcgccttctcaagccctgcaaatgcaaaggttcatcccgttatgtccatgagggatgccttcagacctggcgattatccagccccagccacgacaagagacgcttctggaattgcccgacctgtggctttcagtaccggctagagcgcctcacttgggcgggctggatcaatagcccaatcagtcagatagccttgactagcctcgttttgcttttgaccattttcttgcttggtttcattgctgaccctatcattaatttttacattgacccggtggaaacggtgtattatgccgattactgggaggaaaatagtttacttggc

SEQ ID NO: 26545 - DNA, 201 bp, Emericella nidulans
ggtttggctgcaaagccgggtggtcttagcgccctttcctttgatcaaaaaaaccgtccggaaaccagcacaccataagcagtgatttcgcggcccagttttgctggcaagatcgaaagggttgcgggccagggcggtcaggctggcagttgcgctaagcgagactttcccgggcagccaataagcattcaggatcattga

SEQ ID NO: 26546 - DNA, 798 bp, Emericella nidulans
ataatacttccagccgagaagagtaatattgttggtataaagccgacagtcggtctgacgtcgcgatacatggtggtgcctgtcagcgagcacttggatacaattggaccgatggctaggactgtccgtgatgcggccctcgtcctacaagccattgcaggacaagatgcgaacgacaattatacatcaacttcgccgttccaaacaggagttcccgagtatgccgcagcgtgtgatatggctgggttgcaaggaaagcggataggcatccctcgaaatgtcctcgaagcgctctttcgcatgcgccatggcatggccagtccaattatatcctcgttcgagaaggctgttgaaataatcagagacgcaggtgcaactatcatcgacgacgcgaatttcacagcttatgaatcctacctgaaaagtgacgctccatcaaaggtgatagcagcagatatcctaagtggcttcgcaacctatctctccgatttgtctagcaatccaaacaatcttcgtggactgggggacattcgcaacttcacgcagcaaagcgctgaagaggactatccggcgaggaacacgcaacagtgggacagggcgctttttgctggaatcaacaattcatctccagatttctggcccctttaccagcaatctctacgcttcggcgaagaagggggtctgttgggtgcgctggcacggcataatcttgacgctgtagtcctgccttcatccttggcatcagatatacccagtattgttggtacgccagtcattaccgttccatttgattcgttc

SEQ ID NO: 26547 - DNA, 354 bp, Emericella nidulans
  unsure (1)..(354): unsure at all n locations
caggctgatgataaagttcgccgagtacgggcaaccctgacggtggagcatttgcgtgtttcatggaataaaggaacaacaccgtatctatgggcacttgcaagtctggtacgtccacgactcacgcggtacccgccccgtgctatacgcattcctcggccacggcagtcgatttatactgagccgacaaacgcgtggctgtatttcgacggtcctatgagcgcgttgctngaacaaacctgcattgtccttgacattcccgggggcgggtttgtttctatgacacctcggcactctgaagatcgactactggcgtgggccggaaagaccaagctcccgatattgagtcttaac

SEQ ID NO: 26548 - DNA, 336 bp, Emericella nidulans
ctatcggaaacgtcgatccgtgccggtttctctgccttcctcgaacccttggtgcgcgcggcatgtgagtgctccagtgatggcgtagcgttaacggaacggtcggttagaggcgatacttctcgccgtgaatctcttctcacgcttctgccgtcagatgggctagatgatgggcgatggcgctgtgggctttgagaggaccgcaggccaggggtcctgcgcggagacccggtaatcccggactttgacggtgatcttgggacgggcggagggaagcgaggtgtgcgtgttccgttggtaccgctgagaaagtcagcagggccggggccgttgcct

SEQ ID NO: 26549 - DNA, 228 bp, Emericella nidulans
cccacagaggacgacacggtggacgaaactagagcgacatcgaccggtagcagaaggatagttgcaagaaggcttgtgattgcgacaatgcatgtcaaagtcactgatggcgagcggtcgcgaggagactgatacacatagatgaacaccgaagcaaccgcaaacaagaccaccaccacgactgcatagacgacccagattagcgatgtttgcagaagaatcatgctg

SEQ ID NO: 26550 - DNA, 419 bp, Emericella nidulans
agatatagtattagagcagatctctttattgttactggttatgctggggcgggaaagtcatctttcatcaaatacatcacacgggaagaggtgtatgtcggatctaccctgaaatctggtaagaacgactatcttgtgcgagttaaatatggtactaactagtatcaggcacaacaacaactagtcttgttcctgtgaccattggaaatagatactgcttattcatggacatgccaggattcaataccagagacttcaataactgggatgtttttaaaagactcatgacaggcatgtctgtagtacagccatatgtctaattccaaggtatcttgtatatagactctatggagaataattgtaggacacctgcagcagagaaaatccttaattagctgttctatttctgcagtaaggat

SEQ ID NO: 26551 - DNA, 907 bp, Emericella nidulans
gttcagtcaaaaacagatttctatacagtatctcaattgccatgtttacctgaccaaatccgaaacctccgttcaggtacgtctagtccgaaatatatccattagccattaactcatagaattagaaaattgcagatgttctttcgccgccggccatgggtatgggcttattatcactcaactcgaggccatcatttggccgtattccaccatggtctcatcgcccttacctaccgatgtatataggcttcccatacctgaggcctatagggatgccagcgatgtatcacctttgggggtgattttatcgaccgcgaccagttctacccccggattaatgatactaatgccgcataatggaaggatcatatactgggagaccgtgtcttgcgccgcatcattaagtcttccacggcaaaagcaaacagggcttcagggatatgtcccagggatgctttcaggtgaatgtgcgactgatatagtgaacgcggagccttcaggtgttatagtcacattttctactgggcgagttgctcatattaccctcagagattctcaaggaaagccggccgtgaccgtaaacttcttgaagaatccacacagcactggcggaattggatttcttgacggcatcaagaatgttttcggggccggatattggagaaaaaaagttgccgctgtgcgtgcaggtgaatcctttcagcggggtcagcgagatatcataattgcaacttcagcaggtctggtggaagtctgggatacccactggaataatggtagtattctcaaaaaccaatatgatgtcaaagaagacctactagctgcaaccaggaaggatgaagcctctgactatgaagtcaaaatctgggatcttgcagttgtcaccagttcatgtgaggacagcagc

SEQ ID NO: 26552 - DNA, 393 bp, Emericella nidulans
ctagggttaggccatggggtgcagagggtaggaatgacccgtccttggattgataggttccccagtgtcgcggggaattttttggaagagatggattcaatattaggtttccggctatctcatgtaatcgcagacgggccaaactcagaactcaacaagacagaaaattcacagccggctataatggcaacgtcagtgctaatactccggatacttgaaacggagttcggcttcgatacgaaaagtcgggtggatgtgaccctcggacatagcttatgcgagttttccgcactggtggccggtggctatatccatttcagcgatgccttgagattagttcgacgacgggctgagattatgtcgcagtgtacgccacatgccggttgcagatcc

SEQ ID NO: 26553 - DNA, 387 bp, Emericella nidulans
ggcgccggaccttctggcctcgtaacggcaaagacgcttctacggaactttccacccggtactttcagtgctgtcatcttcgaaaagaaacctcgaattggcggcctctgggctgtggattacccatcgacaccctacctcttgaggcccactccgcacttttcgcatgattatgagcttcactgtaggaaacaatatcaaggccgagcactggtaaatccctggatgcgaacaaatctaagccgcttctctgttgcgttttccgacctggcgtgggagacagccttgggcgatgcggttcctctgtttccgtacgcttgggaggtgaggaaatatcttgagaagtatgccgaaacatatatccctaaagagtgctttaagctgggg

SEQ ID NO: 26554 - DNA, 279 bp, Emericella nidulans
aaaccgaactttggtcattctgaggggacatctgggcttacaagccttatcaaggccatcctttcgctggagaagaagacgctgctgccgcatatacatatgcgagagccaaacccaaacagtaggatttcctgtgtgaaagcaagaagagcatcatgattctgacctggcaacccagtacctttcgaaagcgggcgattgatggtcccccaggaggagataccctggccggagggccgaagggagagggtcagtgtgaataatttcggcgtgggagga

SEQ ID NO: 26555 - DNA, 354 bp, Emericella nidulans
gctatgaaccacgtcgctggctcactcaagctctatttagcgcagtaccgcgagatttcttcgttttctcaattcggatcagatcttgatgctgccacgaagcaaactctcatacggtgtgagcatctgacagagctcttaaagcaaaagcagtacgctccaatggctgtgaatgagatggtgcccttgctatatgctggaatcaatggtcttatcgacagaataccaattggccaaatccaaagctgggaagctgacgtcctcgcccatttcaaaagctatgaacctgaggtgctcgcccaaatcgaaaaggatggcaaactaagccatgacctagaagctcgaatcaaggaa

SEQ ID NO: 26556 - DNA, 447 bp, Emericella nidulans
gacctgaaccgctttcgttgcgaatcaaacgcctaccagaacctctcttcgcatggtgtatgccaacgaggatttgtccccttcttctacggctgcattgatcgaattgacccatccacccttaatcctcccttggatcatttccttaacgataaacatcaaccaagagcgataatcctcgagcatttgcccaatgcagaaaggttgaactgtgtgaactattcagatgatctttttcgtggggctgttgatggaattaaagcaatccataatgcctttgtccaccacagagatatctaccccaaagatatcctcatcacgccacatcgggcagtatggacagacttcgatgttgcaaccaccttctccgagatgggtcccttcgagaaagaatactgtgaatatgagaccgcgcttgtagtgagctttagggaatcattggtaaga

SEQ ID NO: 26557 - DNA, 388 bp, Emericella nidulans
  unsure (1)..(388): unsure at all n locations
cgtggcgtgggacgaacctcatggcgcagtcccaatgccatcctacagcgtgtctcatataaagtcttcnagcgcttgtgtcttaaaaatttagtaatgaaggacaatggtgttacgcaatcaagcgcgtctttcgctgcggggtttgtcacaacaacggtctgcagtcctgttgacgtcatcaagacaagggtcatgagtgcttcgcctagtgaagacccgtggtcacaatatcgtcggtcttctccgtgaaatttctcggaaagagggacttgcgtgggcttttcggggttgggtacctagttttattcgcctgggtccgcacacgattgccacatttatcttccttgaggagcacaagaagctttatcggtacctgaagggtatt

SEQ ID NO: 26558 - DNA, 564 bp, Emericella nidulans
ctgtggcttatcggatcttcaaccaatgaggccatagttctcactctgggcttgggtttcaccatctgctcagtggttttcgaatccctgggtaaggaagcttccttggtttcgtcaacgctgaagcccgcgacacctgagcccttcagtggcttctggaaacaggcgagcttcgcatggctggcggggacgttccaccagggctactcaaacgtgtttaccgtcaccgatttgcctgaccttgatccgcaactaagtggtagagatgtcggaaggaagctacaggaggcctgggcccacaaaggtatacagggaactcaaagtcgccatatacgaaaagaaagatctgacgtatgattcaccgtacaattagaggataaatcggcaaaacacgcactgctccgttcctgtctgcgtgcctaccgcactccgtttaactcggcatttattccgcgtctgtgtctgtccgggtttacgttttgccaaccgtttcttgtcaatgcaacagtttcctgggttgggaatacctatgctccaatggactttggcagagccctgataggg

SEQ ID NO: 26559 - DNA, 603 bp, Emericella nidulans
ggggatgttataattagtgactctgtggtacaatacgactttggcaggcagtatcctggtggctttgaaaagaaactgggcgtcagggacacgcttggacgaccaaaccgagctatccgttcaatactggcaagtctccaggcaaggcgatcgtgcaaagaccttcaagataagctgctacagcatctacaagctattcagaaatcaccatctgattggcaattcccctctattgatgacatcctctttgaagcttcataccaacataagcactatggctttacttcacccgcgtgtccttgtcttgatagcatgtctaaagatacctgcaagacagctgtcgaatcaccttgtacttctctaggctgtgatatggaccgggtatgtcgacgtcggcctagcacagaacactacagcccaagagtacatattgggacagttgcatccgctgataccgtgatgaaatcaggcgaacaccgtgattgtttggtccagtcagaaggtgttgttggtttcgagatggagggtgcaggggtgtgggacaacatatcatgcatcattataaaaggggtgtgtgactatgcagatagccacaagaataaa

SEQ ID NO: 26560 - DNA, 610 bp, Emericella nidulans
tcggagaccgtgagatcccgcatcttgaatatgcactattatatgccgccgcggtgtatgatcgtcgagctgatgacggatggatccacgcacgaggggatattcccattcatggtggagaggtgccgcgaaagctaacggagccttatgttgcaagaaaggaatcaactggtttcatctttaatcggctttgggccgctgtcaaacgcgaggcgttgactatccttgcggaaggggtgtctgttccggaagagattgatgcaatgtggagaacaatgtttattcagggcgaagtctcgccttgcatgatgatggatggtgagtatctggccatggcactgctaagcaggttcagaatgattgctaataaggatttgaagcggttggactcgacactgttgccttcatcgaacaacactacatcaaggagcgtggcctctcgagcgaaaagacagtcgactacttgcaagaaaactacctcagcaagggtaaactgggcactaagtgctctttgggaggactttaccctccggccttcccggagaatacacagaccaagcagggcagtcctcacctgttagtcctcgacgttgggcttcgggcagagaca

SEQ ID NO: 26561 - DNA, 213 bp, Emericella nidulans
ttcgcctacgcccatccttcaaacctcttctggaaactcctgcactcctccgggatcacatcaattcgccatccaccctcggatacatatcggctgccggagctgtacaatgtggggaacacgaacatcgtcgagcgtccgactcgagacgcgagcatgctcagcaaagctgagatggatgcgggcgttcccgtgctggaagcgaaagttgca

SEQ ID NO: 26562 - DNA, 225 bp, Emericella nidulans
ccgtccgagaaatctcccgaggatatctagatcgagaccactggtcagtggacgcggggagcgtgtataattgaccgccgtgaccggcatcccgtcgagggggaggaggaaagctcgagcgaccacggtttatggctgagttcgaaagccggaaaccggatctggaggatggacgagtctccagtggaggataactttgggacggttcttatcgagcagctattc

SEQ ID NO: 26563 - DNA, 684 bp, Emericella nidulans
tccctacctgcagttccacgccctagcacgtcccacccgtcgaagaagcaaccgcccagtcgattggttatagagccttcgatgatatctcctcctagccttattaaccctgtgacgctggaacctcatcggtcccatttcgaccaagccttgttcatccctgcaaatgaatgtcctagcccaatgcctagtccgggaccgccgtcaccttcagttgaccgtcatccgcaggtcccgtcaatgagagagcggccttccacatctgcctcagagatgcgtccggagcagtccgtttgggagtctgactccgaaaccgaagattcagatcctagatctctttctcgaaagccgatggataccttgaagaaggtccgtagtcgagtacagttgcgagttgcaaaatctacacctaagctgcagaataatacagcacaaaacaatgcagccctagagaaattcccaacaatgccggatccaccttcccaggagcgttgctcaagtcccttgaagacagcccttcagactcgtccaggcaaggacatcctgcggccaaccgcccatcaaaccctccgcttagtcgcaccatcgactacttctctggttccgcctcgatcgcgctgcaacagtgccaagtcgcagacctatggtatagaccgttcaacggcagctgcagcaatccaggcc

SEQ ID NO: 26564 - DNA, 456 bp, Emericella nidulans
cctcctgccacatattctcagaaacaatccgcaagctcacttcttatgatgggcttcccatcccgtaccatcgagtcttttccttctctctgcgcatgtcattctaatcccacgccgggggggtatttatgctcgcggtgcaacagcaaagtctgcggccttcctgctgagtgtccatcctgcggtcttactttgattttatcaacccaccttgctcggtcttatcatcatttattccctctaatgaattgggttgaagtttcttgggaacgtgcgcaccgcagcacgacatgtttcgcatgcggtattgcctttcctacaatccccccgaaagagcaatggcaggccactcagaacctcgccaagggaatgagtgtaagcagtcgttacgaatgcacagtgtgcgaaaatcatttttgtattgattgtgatctctttgctcatgaggtggtacat

SEQ ID NO: 26565 - DNA, 643 bp, Emericella nidulans
agcgaggtcaagggcaattcgcgcgacaacagaacagctgcccacacgcatatcaagggcctcggcttacgtccagatggtactgcggaagtctccggcgatggctgggtaggacaggccgccgctcgagaggtacgcgacgcaatggctccctgcctgacgcccttttgagctctgtacgagagctgcaaaagaagtaaacggactggctaacgtaaattcacaggcatgcggggtcgtggtagacttaatcaaggctaaaaagatggcgggccgggcggttcttcttgctggtggcccagggactggaaagaccgctcttgcccttgctgtgtctcaggaacttgggacgaaggttcctttctgcccgatcgttggtagtgaaatctactccgctgaggtcaagaaaaccgaagcgcttatggaaaactttcggagagcaattggtatggagtggttgtatgacattttgggagctcaaacgctaacatcttggctaggactccgtgtgcgggaaacgaaagaggtatatgaaggcgaagtcacagagctcacaccccaggaggctgagaatccactggggggctatggtcgcacaataagccatcttattatcggattgaagtctgctaagggcacaaag

SEQ ID NO: 26566 - DNA, 612 bp, Emericella nidulans
cttgcaggaccccccgagaggatactaatctaccatggaggaaccggccgtactatgttccttgggatgctgcggataacgaccatctttctgttcggggtttctgtcttagtggttgctccagccttcatgtcttccgactttccgtggtatctaggcccagctagtaaggacactttcccgcgcaggcgcaatcattttttactaacacacatctcactagttgtcgttggtggtgccttgcctatgctattcgtatcttatacatccgccccctacgtgaactttgtccaccttgccttgcccatttctgttcggcgatcgcgagaacaagctgttcagtatgcaaagaaactccccccaaccgctacgttgtatataaacaccatgaagttcaatactattccgagacagaccgaggtgcgactggccgatctcgtcccggacaagtccaagatccgtcccgtgagttttcgaaaccagaaccctgccccatcgccctggtggaggggaaagactctgcagcagttttacacagcagagaaaagcaagcccggaaaggactcgaggaccttttatccagagctgtgggagcacgtttacaaacagata

SEQ ID NO: 26567 - DNA, 506 bp, Emericella nidulans
atgccgccccggagatctcatacaaagtcacgcaatggttgcgaccagtgtaagaaacgacgtgttaaggtaagttcagagagttgccgtatatcatgtgtgccatctgacgcttgtagtgtgatgagcaaggcccaccgtgctccaattgcaaatcaagagagctggagtgcttctactcgcgaacaccggtgtctcgtagcctatccagtacatccgccagtccaacagcccctggatacagttatagtgcgactccgtatgtgtcccagccctaccaacaagtcacaagtgcatcgccaggggatgatctacgtgcggcagagttacgcaggctagaattaatgcacaagttttctactgaaacatatcagagtttctctaactctccctctgatttccacacttggcaagtcgttgttccacagaaagctctccaccatgatttcctgttaaaaggcaaacaagctgctgcttcattgcatatagcgtcttcattggaccca

SEQ ID NO: 26568 - DNA, 482 bp, Emericella nidulans
tatttgctcaatctaggccgtgaatgcactgtagctcccaaggagaagtcctgctatcgttgcggtgctgtcggtcacatctctcgcgaatgcccccaagccggcgagaacgaggcgccccgctggcggccaggaatgctataagtgtggacgcgtcggccacattgccaggaactgctctcagggtggcagttacggtggtggctttggaggcggctacggtggtcgtcagcagacctgctactcctgcggtggtttcgccacatggcccgtgactgtactcaaggccagaagtgctacaactgtaagctgctctgccaacttcttgctttttgtcctttcgtttccatgcttcggattctgacattgttattacaggtggcgagacaggtcacgtttcgcgcgattgtcccacagaggccaagggtgagcgggtttgctaccagtgcaagcagccgggccacattcaaagcgcgtgccct

SEQ ID NO: 26569 - DNA, 414 bp, Emericella nidulans
cgccacctgctcctaacccttgacgcattcaataccctcttccaccctcgcctcccaatcccaacgcaatacgcccactccgcctcagcattcaacatccgcatatccccctctgcactacaacccgcgttcggcgcctcctataaagccctttctgcctcgcatccaaactacgggcgtgagctcgccctgcgcggggactatgctgggccgcgacagtggtgggaagatgtgatacgcggatgttttgagcgggcgcttgcggcgaacccgactgcaaattcagcaagagggaatagagttcctgatgggttgatccaggaccttctcgagcgctttgcgagtgcaagggggtataaactgtatgatgacgtggtaccttttctgaaggaagtgagggcacaacgaatgaaa

SEQ ID NO: 26570 - DNA, 429 bp, Emericella nidulans
aggaatagattcttctacatccagcgcatgatccccgtgacggccaaacatccaagaacgaaaacgaggttttaccggcaccacgcagcaacagttcaagagttcaacgcgatcttagcattctaacgacaagtccttgatgaagaccgggaactctgtgaaggtgcccagcggagtcttcggacgggtgtctttatgaatggcgagctgcacccggagaatgagaaagggccgataaggttccaggagagtcttaagaatgcttatggagcacgccaaagaagaagagagattggggggcgagattggcccgccgttccaaaaacggccggcaacgacggaagggagaagggaagcgagaaagtgagtttttgtgagaaacttaatagcaagggctgtctgggcgacaaaggccttgcttggtgatta

SEQ ID NO: 26571 - DNA, 426 bp, Emericella nidulans
agcgatgatgtgttcagttctcgggcgtcaattgatgcgatctttcattcctctcagaaggataccagtggtgcagtagacgtcctactcgtcggcttcgaggatggcacagttcacctacgaatctttgattgctttgaaatcggctccgtacgattcacagctcctgagccatgtgctattctccagcatgcatcgcacccactgagctcaacacatgcgcttgttgcatcctccggaaatgatttgcatcttcttacgcttgatctgcggttcattacgagatccggtcggtatctttcgcttcttgcgcataagacaacgcagcttcaaagcctactccggtacatttgtcaggtacagagacagatcgagatggaatggaaaaatgcgcaggagttgccggccaggtatatgcgcagtgtg

SEQ ID NO: 26572 - DNA, 372 bp, Emericella nidulans
attgtggattttgcgatctcgtccatcttcaaccgcccttctcatgggaaactggaaaatgtcctcagccatggatatcggcaggggggcggaagactgccatgcagtatccccaacgtcgcggcacaatttcccaataaaaatgttcaaatgctcaaacaatcaccgtggacggaagttctcgccctgctagggagtaatggcgatgaaatcatgctgaagctcctgctggactgcggactttttatggctgtggacgcgagaaagggcgtttactgtcagataagtggttcgttatccaatgtgcaaacggtgttttgccctggaagctcacaactgatctttcaatctaggacaagcaatatcgagcct

SEQ ID NO: 26573 - DNA, 339 bp, Emericella nidulans
ggcccgggccttgcactgccctttatctccagcagattgcttttccgttttgcaaaagagaaaatatcccagccccggggaaactaatatatcaagggtgtctttactatcattgatatttagtgcgactctctcctccggctaactgctcagacagccattgggcatctcactctctatggcctcctgtctccgacttccttcaccaacgttgagtgggacacgctaaaggataagctcgcgaaaaatgcagaggctgaatgtaatattgctatatcagccattggttagcttatacctactttccccagtgatgccccgcactctcggcagctgctt

SEQ ID NO: 26574 - DNA, 726 bp, Emericella nidulans
gtcacactcacagcgtgcaacttcgagctcgcaccggtcagagacgccaacgacgccgccacgattttatcgacctcgtctgcctggttgggcggcgtaaagaaccacctattcgtagcagacacgtagataaagcccgcgaggacaacatcgaagcaggccaaaaccagcggcctcaatacagccatcctctggaacagcgcagtcgggacctcaatcccatcccgtacagcgtcggaccccgatttgacagggtcatacatgaacacgacataagtgtccagcgctgcgaggatcaatcccgcaatcgtaaacttgttccgccatctgcccgcctctctccccgcaaacgatgtagaagtcgcaattccaacaacggccatatgcagtagatgcggaatcattgcgttacgcgggtaataaaataaggcgtaagtgttcggattatcaagcctgcaaaatcgacactccgtcaatgcccgctccccgaaccgtagataaatcctccgcgcctctttggacacaagctttgaccggagcagcacatctgcatctgtaagcacacccccaggcctcaagcgcgctagtcgcgagaataccgtctccagcgacgtggttatccgcgagcgcgtgagcgtaaagatgcttgggctcggcgcgaatgggttcgaggggaagcttagggtcaggaagacgaggatcgaacagaagaggacatttagggct

SEQ ID NO: 26575 - DNA, 741 bp, Emericella nidulans
ctctcagcctttcattctgctccctttccccatcatgtaccccccagcgctttcccccccctaatctttttgaattgtgcccctctgcttccatatccaggaataatcggcgttccaatactcggtccccacggtcctgtctccacagtgccctgatgaggtcctttcttgttcgtcccgaaaagcccccttttcctcgtccgagcctgtccctccgctccggctattttctcagccgatggttcttcttccacctccgcctgttcagataaacagcccggccgttcagttagcacctgagtccatcgatcccccaccaggtctggtgcactccgaaggcatggtcgccctctctatgtcaagcctgttgaccatacagaggagcaactcgtcctctcttcagtcgagaatgacgacggaatttatgagatgtctccaagtgctattgactatgggttcaagcagccgatacctgcaaacagggttcattcattagacggagaaacggtcgggatatacaaagagatcccaggttttcgtctctatgccgaccctggcagggatgtcccgttctggatatttaaccccgccgttgaactgggcaaaaagcaacaacgaatagcatatcgtctgaaccaaggccctgctattggattttgggttccagcccagggccaggcaatgaacgtgatgtaccattccggcaatggtttcacccttggggtagactccaacaaattt

SEQ ID NO: 26576 - DNA, 303 bp, Emericella nidulans
gctaaatccttccaatcggcggggaccgttccatgggaatgagctcgtctgcttcttgcgagcgtcgaggcataatcaataacggtccgtagtctctcctcgcaggcaatggacattagatttagtatatccacgagaggagcgccctcttggttcaggatggtctggccagtgcgtacgacagacgaaccatcaggtccagtgacctcaataggttgtggacggccgggaactgggtgaaacaagccttctgcgggtatgcgaactccaaggtcgaaaccacgtctctgaagcctctgctcc

SEQ ID NO: 26577 - DNA, 252 bp, Emericella nidulans
agccaagaatatgacttcttcttaccgaacatgcctccagacatcatagtctgagtagccatacgtgctgtttcgaccgattgctggtgttgctgcgcttcgttttgtttcgcgtccgctaactttctggcttctttcttagtgagccctcctttaccgatactaggagctctttcgccgataggagttgaagcaccagacccgggtacatccattgagtctggcctgggagtcccgccttctcccagaatc

SEQ ID NO: 26578 - DNA, 809 bp, Emericella nidulans
ccaacacccgcctcctcgcgacgcccatccctcgacgccctaaacacctccatcgccggcagtctcagtgcaacatcaaccccctcaacagcccgcgccgtctcaccatccctacatccgcgccgcaatcgcgccgccctccgagactattataacctcaagccctccgacgcagcggggctcggccccaatggccgccgctcgcggagcgtcccccgacacaccgatgccggcgacatctcgaacccgtcgaccgtggtagcaggcacagagcttgacagtccagattttgatccgcagcgatacgtgaacaatcttcttgctacgtcatccctggccactatcttaaaagcggagaatacactcgttggtgatatccgtacactagatggggacgcaaggcgctggtttatgacaactattcgaagctcattcgggctgtcgagacgatagggaagatgagacaaagtatggacgagaggggggcaccattaactatgacgaagacgcttgggccagcgatttcatttgtggcagagaccgcggggagtcttatccgggagggggaggtactaagggagcgcatgagggagagtaatccggtgcgtgagagagagagaagggagaaagaaactgtgagatgggtgcttgaagcgccagggaggttggcgaagcttgttgaagatgggaagagggaagaggctgagaaggattgggaggaggtgagaaggttgctggaaaagtgggaaggagttaagggtgtggctgaagtccgtacggcctgtgagaaggccatgcaaaaggaggac

SEQ ID NO: 26579 - DNA, 206 bp, Emericella nidulans
gggatgcggatggcccaaacgcgagggggaaagaaggcatggagagggtggccggggtcgacaaacggctgtcataaggttagccttttcgtccagcaaagtaatgagcgtccatcacgtaccatgagaagtgtccacgccgtgtagtagaggaagattgcagtagcggccaaaagcatggcggatcccacaagttggcccagctg

SEQ ID NO: 26580 - DNA, 225 bp, Emericella nidulans
tgttcgtcatcatacagtaacgccaagatgagaccttctcaaccgatgatggcgcgtctgcgcttgacgacgaagcaggttaatggtggctactacaagggaaaccggacgggttcgatgggttactttgcgaagaacggatcatacgtgattgcttggaagaaggttcgcacatatgttgtgcctgagaatctgaacgagttcaaggtataccatattactgtg

SEQ ID NO: 26581 - DNA, 378 bp, Emericella nidulans
ggaaatacacagtatctgattggctcggtatccaaggtgttttccgatttgatgctgcttaaatctggagttgatttagaaactccagttactcaatttcttccgcaattgcggtctaataagtcaaagatccagtgggagaatatcaccctaggaatgctagctgaccatctggctggtatacctccaaacggtaaaggtcatcttcctgtcatgatgtaatatatgtgctaagatcaggtagctttctacgaattttatttcctcaactccttccatgaaggtctcggattaccacatctcagcgattctgaatatcccgagtgcggagtcctgggcctgaatagtgactgcagcagagagcgtatgtctttctaa

SEQ ID NO: 26582 - DNA, 249 bp, Emericella nidulans
aacaggtgtctgaccataccacaacggcctgagctaacgtttcctacagaaattatcaatagctttctaactaaagagccagtggcaccgataaactctcggccgatctattcacagctctcattcaccctcttcacgctctgtcttgaagcccatacaggaaaaaactactcgcaactactagacgaagccgtttataagcctctgaacctcgtaaactccggcgtatccccaggaactacggagcgg

SEQ ID NO: 26583 - DNA, 699 bp, Emericella nidulans
cagtcgcgatattcgcatcttctcaaaatgaccgaccagttacctgaacccgattctttgcaagtaccggtgggctttagcaccagagacaccatatcgattctgccacctgggttactacagacatcagaagagcttcatgagaccacggaaacacagcagtgccactcagacgacaatcagaatcaggatcccgtatcccaaccttcggttcaaagtgtaccccaaattaacgaggcggcatttatcctagcctttctcggatgggactccgttgatggtactcagggcctggctgggtgtggtgcgtgctttcggcgactaggactctggatgtataagccaaagggcgacggagaggctgctgtcccactcgatgtagccagtgaacatatggagtattgtccatggatcaatgccagagctcaaagtggtacaggaagacccgctgggaagacggataaacttcatagtgggtgggaacttctggcccaggcgctcaaagtgaaatatctgcgacagatccgatcgagcacccctgtcgggagccgagccggatcagaagcgccatctgcagacgaaccggcgattgatgagcaggatgaggatgtaaagagagctaaagaccgagaatggtgggccaggattagacggatgagacaagtgttgaacgttaaatctccgaaaaggaaacagtct

SEQ ID NO: 26584 - DNA, 330 bp, Emericella nidulans
aagaccatactcagcgcccctgaaacaacagtaaacaagaccagacctagggtgatgggcaacatgtgcacaccactcatgagtggcgagtcgtcccggatagcctggaagtatatcgcgatatagaagtccgcgacgagcacactggacagggagaagaacatggtcatggccgcagaccagataaccttgtgcttcaagagggcaaacgggaccattgcctcatcgccacgccaccactggtgcacgaggaagacaccgaaggtggcacctcctccgacaatgaggccgatcacgacggagctgtcccaggggtgctcattgcccccg

SEQ ID NO: 26585 - DNA, 396 bp, Emericella nidulans
gctgatgaaacgcagtatcaagccgcattatttcatcaagtggcagaccaagcgcatggcccgcagcgtacactcatgacctatgtcgcagctgccgtcttttatgctttgcaaatctatttttaccgtgctcgcgagtcttcatttggaagtaggcctatatctattgaactccaaaatgctctcaactcacttgtgtcggctgcataccatgctacgaaagctggacaagtgcagttgcttgagcgttttcaatggtctctcttcattgctgggctggagattaccgatccggtccatcgggagtgggttggaaacaacttgactgaccctgcaatcagggaggcactcgactgtattctacgcatcaaacaacaatcttcaggtggcattact

SEQ ID NO: 26586 - DNA, 320 bp, Emericella nidulans
agtatcctgccggccctggcgttttcacttgatatgtttgagaagacgcatcagagttatggtgtcaatgaggttctcctcgcctcagtcttgggctcctttgtcttttcgctttttgcggctcaacctttggtcattgttggggttactggtgagtctactagacgtaattatgtggatcgtcgctaatacaattaggtccaattactgtcttcaattatactgtctatgacattatcgcgcctcgtggaactccgtacatggagttcatgtgctggattgggatgtaagttacctcctttattatcgtcaagctcgtg

SEQ ID NO: 26587 - DNA, 211 bp, Emericella nidulans
ggtcctaatctgtgcaactctgatgttttcagccctaaacggagtcagtctgccgaaaaccgagccatacagaagatggcaagaccttggcaagcgtgtcattgaacataatgtgcgagtggtggcaaaatacaacactcgcattcagatgggccggttgactcagtgacagaaccttaccgagaaagaaacagagaagtacatcagtgac

SEQ ID NO: 26588 - DNA, 264 bp, Emericella nidulans
catatatccaaactatgccggcggctcaggatcccagtgaatgtttctgatgctccagatctttgcacattcagcttgctttccacctattcggatggccctcttcatgtcggaatcacgacttcgggacggggctgcaagctagcggcacgattgaagagagagatagcagccactctccctcccaaccttggcaatgccatagataggttagggacgattaggagacgtctctgggaggaagattttgctgcgggattgtgt

SEQ ID NO: 26589 - DNA, 582 bp, Emericella nidulans
atcctccctaaggtctttcaagagcgaaaggatgatctacagtacatattctcgaacaaagcaaaaacggttgatgaatcccattccgcactgctttctgcgcagaggatcgaaagggcaaaatccatgctgaaaccgttcgttctacggcgaaagaagcaccaagttattgatttgcctgcaaagatctcgcgcgttgagtactgtgaaatgaacgctgcccagcgggagatatacgaacatgagaagaacgaagtaaagaagctcttggaagacagagcagccggcaaaaagacgggcaacaagtccgcgaacatcctcatgaaactccgtcaagcagccattcacccactccttcaccgacgccactacaacgacaaaattttaaccaagatgtccaaagcttgtctgcaagaagagaaatgggccgaatccgacccaaaactcatctacgaagatttacaaccctacaatgactttgagtgccatcaactctgtgtggaaaaccccaaatcccttggcaaattcgctctcaagaataatgagtggatggattccggaaaggtcgacaaactctgcgaa

SEQ ID NO: 26590 - DNA, 524 bp, Emericella nidulans
ataatggcagaaacactcgggctacacggccttaacttggaccttcctttccccgcagctaccaagcgagtatctgggaatatcaatggaatccacacagatgtcatgaccatcaagttcagtgataaaatcatgattacaatatcacaaaaaggccgacttggccattgggtcagtaattgagctccagataccaaaaccacgctgaccggtcacagctccatgttccactggaaaacaaaaacccaggcacagaaggccagcatagaattccagatcctgcgaatgatggtcttcttccgttgagtaatttgacggctacgtcgattcttgggggtcgtgctccgggacacgaaattgttggtcagctatatgcccgtcagatagcgagtgccattgtcaccaagacaccaaacgagaaccgcttgctggttgtcggactaggattagaaacagccgaagccgaccgagacgtgttcttcgctgtcatagaccttgtccttcagtgcatctaaggagcaaga

SEQ ID NO: 26591 - DNA, 537 bp, Emericella nidulans
tcctctcaaaatgatgaccaagtcgaacaacggatgaaggcaaagaattcgcccaaaaaatacataaaaaaactcggcgtgcgtggcaattttctcttccactagtcatggcatgtgctgatactaatagtatgacagcgcgcaaagctggggccattcgctcatgagaagaaaaagccttcgtggcttttccggatgctagataagggcaacgcaacaagtataataatcaggattgcacctgctggcagactcacaaggcatgtggctctcgaaaataagacacctaacgttattccggtacttgctcagctatgcggacaagacaagtctattcagcgtgcatttctttgcagtgcccatgtgcaccatatttccgacatgccaaatgggggggggttttgtggatatagaaacattcaaatgctggtgtcatatatccaagggtctcgtggtccaaagtacccccatccccctggcgcgttgcccacgttccaacaaaaacaggattaaataaagcgtggggggggcatggga

SEQ ID NO: 26592 - DNA, 535 bp, Emericella nidulans
atgatgcgccctaagccagtgtcgtcgctgcaaaagacctatgacgactgttatttgatgtgctcgacggctgtctacttcgagggtcaggtctgtgatctcagccccgcttcctgacggtcatttactgacgtagtggctctctcagaataatgaagatgaagccttgagatcttggcgatccgccttggaaactatttactaccacaacgcctaccggctccccgcgagttacaccccgagtactgaaaccgaacgggctctgcaagaatccattcgtcaactagaacttcaatgtcgtgagcgggttgacctcctagacgcgcttcgcgagagcagaaaagaacaggataaggataaagataaagacaagggcagggacccgtcgagtttgaggaagttgaggtccccgccgacgctgcggccgcgatataacaccaaccctaatccaggttggataggggatgggactgttccagctgtgggatataccgacctgtcgaaacctcctgccattcccacacggcctttgcct

SEQ ID NO: 26593 - DNA, 494 bp, Emericella nidulans
caaccgcacgatgttccttccactgaagaggacgataaatgggcagtccttacggtacaaccacgcatacccgctggctcacttgcgttctcggagatcccagcaggaatgctagatgatagcggtacgtttgcgggcttatcgtcggagggaatactggaaccaacaggctatgtcagttcctctataacgaggtggtgcatgtgtcttctctcgcattacagtcactgtacgagccggaagacggcgagacccttcaaaaagcagtatatccatcccccggtggcagcgacgagttcatacccttgttcttatgcgagaaacgaatagcacgcaaagatattgaagccctacaaggaagattgactggcttacggcagcacggagagaaaataacgctaaaaattgtgccactgaaggacttgtggaaagagggtatacgagacggaaagactcttgctgcttgggcattgtacacgggtctaaagagagac

SEQ ID NO: 26594 - DNA, 369 bp, Emericella nidulans
attagaggtcctgtggcgccgcctttcaagatgataaagtttcatatagctctccgtcaggaaaaagctgccgagttggaacaagtcactctggatatgtcgactcctggccatcataattatggccgccatttgaaacgtgacgatgttagggcttttgtacgcccttctggtgaaaccatgaaccgagttctggcctggctcgaatcagctgaaataccggcagaatctgtcaggacccatggaaactggatggaggttatactacctgtgtctcgagcggagtcgttgatgaagacaaaattccatatctatactcatcgagatactcacagacgcgccatcagaacccttagttactcggttcca

SEQ ID NO: 26595 - DNA, 399 bp, Emericella nidulans
agtattaaaggaactcgcacaaaatcggacgaagagtagaaactatcatcaacacaggccctcataatgacgcgtctcgtcttcttccctgtgtttgccctaatactgtctcttctatcaatcactgtaataggagcagcagtcccaaatacacgatacacggccaactatagcaatatagacactgaagatgaatggctccattcaacaacaaaacgggacgatgctgttaaagtacctctgcgaattcttcctctcggtgcctcaatcacctgggggctcttgtcttcaagcggaaatggatatcgcaagccgttacgtgacaaactccgcttcgaagggtgggaagtcaatatggtcggcagtaaagacaacggtagtatgaaggataacgtatgc

SEQ ID NO: 26596 - DNA, 384 bp, Emericella nidulans
agtcttctgcacgcattcacggaacagatatatatctggtatccgattctgcatgccgactttaccaatgaattcctcgaggcagtaacatcttgtttccctttctcgttgtcctcatgcctgacgcttctcgtgttggcgattggctgcgtggtgaagtgcgaatctatcgtcgacgctctgcaggcacgcccggaggcagcatacattcaagcggcctcggcgatgctcccatgcgtgcttgcagacagtagcccacgaagtgcacagtgtctgctcctgttctccatataccacctatgctatgcgcagccatgtcaggcccacgatttcgtggtaatggcttcccgtaaaatgcagaattatatgttgaagtgtgtagaa

SEQ ID NO: 26597 - DNA, 525 bp, Emericella nidulans
cctgcgacccaaagtatagagatatattctgtgatactttttttgtatgtgaggaaacctcagtggcgtgctggggttgttggtcagcttccaacggaagaaacagttcttcaggatcttgtggaaagaactgaaaaaaagtgggatttaaactattccggctttcgcgttgaaactcttcctgaccccaatggcaccgacaaaagttactcattacattatagctatgtcgctctcaaatgcattaagccttacaacgcttttgaagtctttctgtagggtactccgcgcgagaagctgcacccctcaatcgagcacgctatgactatcatgtcatcattcagtttgcttgataagtaccgcttcaaaggctcatggcctaatgcgtcgatttattgtcggggcatctttataggcgcggaactccttggtgttggggatgcgggtcgtctgaaaccaataggctacaaagaaaaaggcagtcttcaaaaaccaccaattgtgggacgtatggtgatcgatgag

SEQ ID NO: 26598 - DNA, 952 bp, Emericella nidulans
ctaaacgaaaatcgtattcggcaatctatattcatagcaaagtttttaaaccaccaaaccgtcttcaagatgctcacgcatgctctggttgttgggggatccaggttctgggttaatggaatcgagcctccggcacctgatagtcccggttggcactatctctcagatggcctcgaaggtatgatccatgatcacttaacatagtataacccactaacccgtatcagaggaactctactaccgccgccaaagtgtcctaaacactgtcaccgacctgcaagcccacttccttcgcatctatggtgcgctcggagagcccacgcccccgagcaaacccggcacacttccccttcccaacccgtcaccagcatcccggcaataccaatgccgttgcggcctcggcaactccagcgcctgtgacatcttccaccttggacagatgacgcgtttcttttccctccgcacaaaaaccatcttcatcggctctaccctcctagacccagacttcaacccagatatcgaaaacgcagtcattgaaggggaagtaggaacacgccctaccgacatcacatccgtaatctcgctcctcaaacaatgcccagactatcagattgattctaaccatatggcctgcggtattcgtcgccgctttcttcccgctttggattgtattgagggctttgttggcgacgagagggggctcctaggcgtgaacctgagttactggcgtaaagaaggaaatgatgagagacgcggaggggaaagcaactggccccatttccagggttcctgggcaaaccgagcccatcgtagggctctcctggttgaaatccgcttgtccaggattatggggataccgcttatgtcgccggggagttcagctgcagagtatcgcgaggaggatgcgcggctactttttacagcgaagaagaggaattgggaggcttgagtg

SEQ ID NO: 26599 - DNA, 432 bp, Emericella nidulans
aggcgcagcaattctcagaaggcttggactcaagggacgaatccgattacccaacgcccgtcctttccccagcaaaacggcaacatgccccagaagacgtcgtctcctacgtccacgaaggaatcgaacaccgcagataatcatgcccatgaccgacttgtgttcctatttactacctttattgtacgtcaacttcctccggcggacttgagactgtgctcaagcagaggcttatatatgttgtagggactcagtactactgtcaccacgaagaacggtgaccaattcactggcatactctcctcatccactcttgaacccaacgagtcttccgtgactctcaagatgacgcatcgacatttgaaacaggaacagcagcgagctaatggggtgagcgacgtcgctagtccgtttctcgggtcagcaccagat

SEQ ID NO: 26600 - DNA, 201 bp, Emericella nidulans
ttctatgccatcagacatacagatcccaccagcaattatgggcagtctttgcggctatcggcttagacctcagcgggaagctttacagtgccaacagtttctgaaaataacaagatgacgctaaatggtcatgtagcaaaaggtcgggtgaccgatcttagttttggcggaagaaatttggtatactccaccgccgaagtg

SEQ ID NO: 26601 - DNA, 279 bp, Emericella nidulans
cgccagcaatcgagtaccatgagaggtctaaaagaagccgcgtctgatcctcggctctggctattcgccttcatgcaacatatgcatttagctgcgaatggattcaaaaacttcttccctaccgccgtcgagacgctcggttttaacaccacagtgactctggtccttacatgtcccccatacctaattgcgggagccggttcggtgttctagtcgtggaactcagggcgcatgaacgagcgcacctggcatatcaccatcgccaagtctctaacaatc

SEQ ID NO: 26602 - DNA, 536 bp, Emericella nidulans
ctagctgaagcacaggcagcactctcggttgccacccgaaacgcccacgatcatgtcgagaccacccgtaaacaagccgaagctttcaatgaccaacaagccgatattgaccgacgactcaagaccttgacaggatccaacgctagcgacgaggcggcgaagcgctttgaggccagtatcaagaaacttcgaaggctcgagttatcacagagttatgtcgcgttgctgaaagatgctgaggaattgaggtatggtgctacgaaggctcttaagttggcctgatcgctgagaataaccgtagtaaggaagcgctgcggaatatcaagtctgaggctcgattagcaatcgcatcgtatactcagctgcggaacatcgtggaatcattggataaggcccagccagctgcagagggcgcaagtccacatctggttgactacgtagggcaaatggcgtccaggctaagagaacagatgaaaatggaattcacaaatcggctccggtctactttggagcagatgaattggccgtccaaggaa

SEQ ID NO: 26603 - DNA, 223 bp, Emericella nidulans
agacatatgctaacatatgggctcaatcgttctcctattcgagcgcatttccaaaagataccgaagaagctgtcatttcttggttagcagctcccctgtaaatgaacctaaagtgagtagtctacccattctggttgcggtccatgatcccgggcatgatcgaatgagcatatgaactcgtgcagattatgagaaggaaaacgaggaggagggactgaagatt

SEQ ID NO: 26604 - DNA, 390 bp, Emericella nidulans
tttagtgttcttaatctgctccccgttgggctttatggtgaaactgagttctggctgtcgtctggcaaggtagtcttggtgtttatcttattcggtttcacgttcttcaccatggtgggcgtcaacccccaacgcgatgcgtacggtttccggtactgggtcagtccggggccgctggcggaatggcatactggcggagaccttggtaggtttgaaggcctgctgaatgtgacctgggttggtacctttattgttgttgggccggaatacctgtccatggcggcggcggagacgcgtcatccccgggtttacgtgaagtctgcatacaaggctgtttatttccgcttcggcctcatcttcaacggcagcgctcttgcagctgggattgtg

SEQ ID NO: 26605 - DNA, 347 bp, Emericella nidulans
ggactttgggatactgctggacaggaagattacgaccgacttcgcccattgtcctaccctcaaaccgatgtatttctcatttgcttctccatcgtcagccctccgtctttcgacaacgtcaagtctaaggtatatccccaccctttgcgaaatgctttgtagtatataatacttcagacgatatgttgctgacttcgatgtagtggttcccggaaatcgaacaccacgcgcccaacgttccaatcatcctagttggcaccaagctcgatttgcgagacgaccccgaacagctcgaaagcctccgcatgaggaagcaggagcccgttacttatgagcaggctctggca

SEQ ID NO: 26606 - DNA, 372 bp, Emericella nidulans
tagatttgcacagaattgctatttcagccgctcaccctccttgattgccttcataccttctgcggatcatgtttgaaagaatggttctacactcaagcaagtcgtcgaccgtccaccactactcctcgatatacctgcccatcatgccgtgcgagagttcgcgagactcgtccaaatgccaccgtgacgacactcttagagatggtgctgaccgccaatcctgagcgtgccaagccagctgctgaacgagcagagattgaaaagcgatataaacatggggagtcggttttcccgcctgtaacgtcctcagacatcagctcggcgggttctgacgaagaagaccagaggatcttggaggaggttcgtcagctg

SEQ ID NO: 26607 - DNA, 798 bp, Emericella nidulans
ttggagccaatgtcgtacacgcgacaaatacctgcgttccaggttaacatgcagtcccaactcacgcggagggtttttcgagccattctcaacaacgagccgctatcctcatctaaatgtcaaaaccgatgcatacataccgtccggctatctaggtctcggaaggtggcatcagggccttcttacgtccagcgacgcggattgttcgctttcaatttcaatcccccgactgctccgccgtcgtcgacattgccttccgaggttgggctgaagccaatgcgcgatttgcttgtatcattacggagcaaaagcagacaaccggaggttgatactctagcgaaggctttccaagattttttcgaaacccgtgctggggagccaggagttatcacacaatttcaagcgcagctgatcagtacgacgtggtatcatttgcagtctcttgaggaatctctagattcagaggaatggcagagggttttctccaacgagagcttggaaaacgttctgtatgtgttgtccaaagcggaatgcctacctcaggcgcacggagtgatacggttatttgcccgttctgtgttccaagcgctctgcgataaccccgacatcgggcgagacggactccatcaaggcgcaataatttcctacattgatattcaggccatctacggtgaccccgccgaggcgcggcagactgttgagaaattctggggtagcctgcgtaaagtcagtccttcaccttggctggcggtaataaggggattcgcgctgctgagtgatgataaacagcaaatcaaa

SEQ ID NO: 26608 - DNA, 291 bp, Emericella nidulans
gtgaactcgctcgatgtacaacctgctgtcaattcgttgtttgacgatcttcgggtcgggaccatcttgatgcaggcatacgataaagtcattcctcatagtgtcaactgtaggcatgtcaacaaacctccggcatctgggcaagagatgatgcgctttaaggcagtcgagaataccaattatgctatcgaactaggcaaacatcatggtttctctttggtgggtgtgcagggtgccgatattactgatggtcagcggaccctcacgctagggttggtatggcaattgatg

SEQ ID NO: 26609 - DNA, 366 bp, Emericella nidulans
ataacgattcgccatatctgggcgtccacgttccactcgaatatgggggttgatgctcagcgggaacacattttactctgtcttgaagatctcaaacgtctcttcagttgtctcaatgagcctgtgctctcactcgctaacagctccatcatgtccgaactgtcttgtgaggcaatcgatcaagagatctcaaaattgaactccatggattttttcacgcgaattttcaaccccgactctgaagaccccgttgggcttatcgagacaatcgagcctatcgttgaaccctcggcggttcaattcgaggaagggtctgaggatcgacaaagcctacaacgccgtgaaatgggctctttctggatcgag

SEQ ID NO: 26610 - DNA, 297 bp, Emericella nidulans
ccacctgacgtcgaagccctcggccgctcaacctggaccctccttcacagtctcacagcgacataccccgaaaaggcctcaccaagcgaacagaccgagatgaagtcgttcctcacattgttgtcaaagttatatccatgctgggtctgcgcagacgatttccggaactggatggcggagccaagtggtaagaaccagccgcgactcggcgggagaagtgagtttgggaattggatgtgcgaggcgcataatgaagtgaatcgaaagctggggaagaaggaattcgattgtcgtttt

SEQ ID NO: 26611 - DNA, 279 bp, Emericella nidulans
aaggcgcgaaacatgtctccacgatataccgtcgccgattctgattcagagtcagagcctgaccagtcggcgacaccgccgcacccctccgacaaggaactggagagagctttacgcgaggcagtcgccagaatcttcaagacaggcaagatggaggaattgacggttaaacgcgttcgattggcggctgagaaagctttaaaattacaagaaggcttctttaaatcgaatgacgattggaaagccaggagcgacacgataattaaagatgaagtggta

SEQ ID NO: 26612 - DNA, 240 bp, Emericella nidulans
caggacattcagaattcatcgcactcggctgaatccttaagacacatgttacaatacatacacgatgaatctctcctaaggagcgagcagattgcgttaacacagcaacagaatgccgagaagcataatgagctcgcgttgtctctacagtctaagctgaagtcaatcactaaagatgatattaccgaactcagacagggcgtggaaaatatagattcttccctagtaagtcgatatctt

SEQ ID NO: 26613 - DNA, 549 bp, Emericella nidulans
acgctcaattcgtcttcgtcctgcaataagcttgccgccacaaagctcgtctcgtcgtgcaaatctataggtcgaaatgcggaaagtacaggcggctctgacacttacctcactctggaacgtgttcgttctctttacgccgcgagactggcaatatgtgagcttcgtgaagcggggatacctactccctcagcttgccgttcagtggatcattttcagccacctagaagagggctttggggccggcaccccaggaacagcttcgtaaccgacatcgacaatatgccgaaatcagactttgagccatgtatcagggtgttagagtcacggccccaatggtggacatcttatagcaacagcaagcagaatgcagtaatcatctgtcaagcatcgaggattgagatagacaaggaagacatcctagaaacctataactccatcctccacagctctgctaagctgagcgatggccttcatgaagcgcttagaacagccgctgaggaatccaccaggagtagggcctttttgcaatcaaccgagctgctcagg

SEQ ID NO: 26614 - DNA, 268 bp, Emericella nidulans
aagtgggtggaaattggaaacagcggtatgttccggccggagatgttggaacctatgggtcttcccaaggacatgcgggtgtatggttggggtctcagtcttgagaggccgaccatgatcaagtaagtgcttgttgaaaattaaaacaagtaaacgctttcgactgactctatataggtatggcgtgagcaacattcgagaactgctcggccacaaggttgatctcaacttcatcgagacaaatccggcagtcagattagaaaaggat

SEQ ID NO: 26615 - DNA, 396 bp, Emericella nidulans
  unsure (1)..(396): unsure at all n locations
tcactaaaaggaattatgaatcggtagactttcaacattcacaccatctttcgattctatggatctaatactgccattacccggacaagggtagcttctataaacatattcccacccatactttttaagttcctgacaacctaaacacatgaaattgcgtgatattcctatgaagaccaacacaaatttcatcttggagacttattcctgcgatactactacccgccttagntgtcggcggatctgaatcgcggcttcgacacctttcagaagctggacgatgcagcggatgaacatatagatgcgttgctagataccattgccgctatggaaaaagagactggaaagcgatgcgaagccgatatcatcacttggcgagggatgatgaccaaggtc

SEQ ID NO: 26616 - DNA, 316 bp, Emericella nidulans
tatacctcagtcaccaacatgatagctaggtcacctccgctggctgaagctccttgttgcgatccagccctaaggagggcagtagcgccgccagccaatatctctgccgcagcatcataattgttctgtttaatgtaccgtgcggcaatgacccgtagttgttggtgagcttcgtaataagctccggatgcgatcctgaaggaatacaagcgcgcgttagatgtacgtttttcttaacgtttcaggaccctcggaggcagtctcaactcacttctctcgctgtcgagcaatcgtcttgtcaatccgtgaggtcatt

SEQ ID NO: 26617 - DNA, 666 bp, Emericella nidulans
gttcgtaagaatctggaaagatataagaatgagcagccggtgattgacagcgagaggcagctttctgggaagttattggatagtgaggtgaagggggctctggagcgaaccgggtatatgaccccgcagcatatgattctaatcgataccatcttgaccgcgccaggctcaactgttgaaaaagaatatcagcgtcggattgctgctatcaatgctgtcattgctttctgtgacgtggaagagggatcacctgtcagacgaccaaatgctttgcggaagcgtcctgctgtagatgctttaccatctactccacctgcaaaaaggcaacattgccctttgcctgacagggaaacaaccactctttctcaagcagttgcatctgtctgcgtgaagaatcgagacgaacggccgacaatttgctttctttgccttggaaatcctcgaatgccagaaaataagcgatttaaaaactacaatacccctggatcccttacccgtcactttgtcgacatccatgtcgtgccatatccagaagatatgcgggttagatgcagcatctgccaggaggagttggagagcaaggcagcattactaaaccatgctgagaggatgcatgggactgtctcacgccgcccgttgtccgccctgggcccgatatagattttc

SEQ ID NO: 26618 - DNA, 573 bp, Emericella nidulans
cagtctctcctagagcttcttctccagacaattccgcgatatgttgaccgcccgtctcgtcaggccgtccaacaatgcctccgctctctactcaaagcccccattccaaccgaggatctgaaatacttggtgtcagaattacagaaagaagcctccaaatctagcttggatgcaggttctacattggttcttttagaatggtgctctatcctgctgcagactctgaagagcgacaccgaaaccccgctttcagtcgtgttggatatcattgccctggatgctcgggcgctcgagacatgtctggttgctcatcccaaaccggctgtggaaaagtccgcatatagggtaacaagacgcgccctacgtgcggtgttctccgacgcctggggtgacgatgctatcaaacagtctgttcagcgcctggctagcaatgcgaccaccggacagaaaaatgcgcctttccttggtgttatctctggtgtcagcgcacgcctaccgaataagaaggaagttttagcaggagagaaaaagaccctcgttgcatactatatcaaagaacttgtcgggaccaag

SEQ ID NO: 26619 - DNA, 509 bp, Emericella nidulans
cttgacggcttgacgacgtcgccagtgccgttgccctttgtgcggatctatgtgcgcttcggagatgcgacggagggcttctccaaggttcggcagccgcagacgaagggggctttgaagttgtgctttgtgacgtggtaaaggtagtcggcgggcgtgaggccgcaggcttcagctctatagtcgacgccgatggcttcgaggatctatccaggtcaattagcatgtctggttaaggcgaggagagtgacaggggtcaaacgtcgatcctggcactcaacgaagtgtccaatacgggccttggccatgacggggatggtcacggcctccatgatctccttgatcattgaggggtcggacatgcgggcgacgcctccctgtgcgcggatatcggcggggacacgctcgagggccatgacagcggcggcaccggcctcttcggcaatgcgggccttgagagttgaaagtcagtcattgcgccaattgataatcgtagtattacacacctg

SEQ ID NO: 26620 - DNA, 633 bp, Emericella nidulans
ttgctggccaagacgccttcgagaccatctaggaactacgggggagcgggtgacgttgagagtcaagtgtatgctccaaaggagactcaaaggactcttccgagtgctcttacgacagtatcgacgtgcttccaggtacttgctcatccgaaatcgtgggatcgccgaacggtatggaggcaaggcgttgtccgtccgttcagtctgctgccctcggtatttcttggtctactccttaacatcctggatgctctctcatacgggatgatcctctttccgttgggcgagccgatcttctctcatctaggatcagatggtatatcgatgttctacgtgagtacgatcattgctcagcttgtcttctcctgcgggggctcgatatttcgcgggggaataggaagcgagatgattgaggtcgtcccattcttccaccagatggcgtttacaatactaaaccgcgttgggcaagataatccgaaatcggtgatagccaccacgatcctagcattctcggtcagctccgtccttacaggcctggtatttttcctcatggggacgtgcaagataggctcgcttattgggttcttcccccggcatatccttatcggatgcattgggggtgtaggcttcttc

SEQ ID NO: 26621 - DNA, 480 bp, Emericella nidulans
tctcctcagactttgacccgttcagaaaacagtcaaggttggctcgtaacctttcttcgcgcggcagaaggccttatgctctcgcacaacaacgacgattacctgacaacttgcccccaacgccgtatagctttccagatggaaagcccccttttctctcttctctcgagcgggccccgcccttcccgcgtgccccacgactctcgcatatacgttgttcgcaacgtgcccacccaagaaattactcgcactgcggcgctcatctacatcactgcggcgctctgggactttcaagattcacccggcaaaacacagcgctttctaatctacttaaataaccttgttaagaagcacgagttggacaggtatccagcatgcgagagcttcatatggcatcttcttgaagaaaactgcgatatagatttgaaagattcggaacgtgcgtggtcaactggtgagctgttgacaatccataaacgg

SEQ ID NO: 26622 - DNA, 249 bp, Emericella nidulans
ctcacgtttccgcgctccgcaagcgtcctgggctactgctttttaccacttgtgctgacaagtctcttgggtatacttgtgcctatggacacaatgtttgggtacctccttacaacggcggcagtggggtggtgtacgtattccgcgtctgggatgttctgtgctgtggcgcgtatgagtggtatgaggggtcttgtggcttatcccttggcactgttttatgttgtttttggcatcatggggcttttc

SEQ ID NO: 26623 - DNA, 549 bp, Emericella nidulans
ccatccttgaaaacgagaacatatcggagaagagcggacgggacgttggtaatgtgtgttcatgtcggtggccgccagttcagtagtgttgcacataccttagaaatttttacgcgcgggccagatttcgagtcgggtgaggtgagcttcttctcgagaaaagcgaccaaactttcgacgccaccgtcgcggttggacgccgccttgctttctttccatccacgtacagcaacctgttccgtgggagacgagcgccctccttgccggatgttcgcttgggcgttcgagctggatagggccttttggatttgactgatgctccgatcgagagcggtgtttgctcgggttgcagaggaagcgggacgaccagaacctgaacgggttttttggccacgaattgcgcctgcacctgcgcccatcgccaaatcaccatctcggtcaacctttgtcggaggagcacccctcttgcgaattcccccacgatcaccagtattcgcgcgggtactggtgcgaccgcgagaagatctgccccttttcatgatgatgtag

SEQ ID NO: 26624 - DNA, 988 bp, Emericella nidulans
ccggtcgagatgcccatcccaattatcaccacgggcatcgcggagggcttatctgccattccatattcgtatacggtcctcaaagtcacgccatggatcctcctcattgcagccctgaagtattacttcggcggtgcccgcaatggctccgagaggctgatgcactctaaggtcgtgatggtgacggtatgctactgctcattctatagtagctcaagcactaaactaacgttactaacttggtcagggaggcacctcgggaattggagccactgtcgtctacgaactcgcatcgcgcggcgcccaagttatccttcttacgcaacacgctcaatcggatatatttctcattgactacattgaagatctgagaaaagccacaggcaaccagcttatttatgcagagcaggtggatctctcttctctccattctatacggacctttgcgacgaagtggattgacaatgttcctccccgccgactggacatgctaatcctttgcgcgaacacggcaaaccccacggaaaagataacggtggatggaatagatgaggaatggcaggtcaattaccttgcaaacttccatctactcagcatcctcagcccagcgctccgagtccagccaccccaccgggatgtccgcgtgatcatgacaacgtgttcaagttacatcggtgcgccgaaactcgacttttcgcagctcgacgtgaataccatcccgatccacaaaaaaacggcgggtacaaaaccgctacgcactcaagcatcaaggaaggcagagcccaaacaaaagcgccaatcgcaaattcagaggaaacacatctatggccttagcaagctatccctcatgattttcgcgacgtccttccagaaacacctgaacgcctttaaacggcctgatggccaacccccttcactcgttgtgatcctcgtcgaccctggtctcactcggaccccgggcacccgccgctggctcactgggggctcg

SEQ ID NO: 26625 - DNA, 213 bp, Emericella nidulans
ccaaagccttttgtgttcgggaagtggggtataattgtcaagtttctttgcgcccactttggcggggacaaactcattccgacgcggtatgccgagggcaaggaaggacagatcggtggggagaccgaggagtggctgcggtatcgctattacatgcatttctcggagggcagcttgatgccttttctggtgttcaagttggtcactgatagt

SEQ ID NO: 26626 - DNA, 231 bp, Emericella nidulans
aagttcaagacgaagcttgacgatctcaaaaagcggacccgagttgaagcgtatcgacgaaatcgcaagggcgctgcgggtgggaatttcggcgatgagattgggaggggtggaaggcatgtgcatcagtggggtaggtcgatactggaccccgagacggggatagggacgaagaagtgtgtagattgtggaatggaggttgaggagttggagttctagtgctgtgcagtc

SEQ ID NO: 26627 - DNA, 327 bp, Emericella nidulans
ggattgtcaaatgagatcttttcatgttaattcggcggttcaacaaggtctgcccttacagcttaccgggaaatgaaccttgagaacgagtgctaatgtgttatgcagcaaatatacaacgtcaaagccgttccggacgcaccgctacagggacttgacctcgtccgcgcggaggatgaccatttctcgcccgataagctgcgcgcgacgctagagcggttctataccaccataattattggagtgactgcatttgtgaaacatattgctagattgcgctcctggagggagcctcagcgcacgacatggttttgtgtggtagcttcc

SEQ ID NO: 26628 - DNA, 309 bp, Emericella nidulans
aggaattacgaaatcactgcatctggtgcagaccgcaatagtatggctgctgctagtataaaatatatgagccggcaaaagtggcgggaatatgtcgatggtgtttccgaacaagggttcgacgccagcaggactgccggtataatacgtgactggatagaggcatacctgcaggagtgcactactactatagcttctttggtcgagctgtcaaagtccgagaaggagaaagacacagttgagctgatattgtctcggtggaagcaaatccatcgcctgtgcgagagggcagtagaatcaatggctgcg

SEQ ID NO: 26629 - DNA, 228 bp, Emericella nidulans
ctaccacggcaggaaaagcgattatatgacacatactactcgatccggtcagtcttcccagaaacagattggaaggctgtcgcgtataattgggccatcatcaactcacggagcttctactacgtctcgccaggcaagaacgagccgagtgactggaacgatgcaattggcatggtcccctttgcggattatttcaatcatagagatgatgcagtaagttacttccct

SEQ ID NO: 26630 - DNA, 876 bp, Emericella nidulans
ttgatatgtggatcaatgatcactacaagcttgcgctccgactcgtcaagctgtttctccatactgatgggatcagggaaggttagaggatcccaagtgaagtactttcggtcgtcgagatactcgatatcgagccaaatgatatcataggggatttggtacttgtcaaaattgcggtcgacttccttcacatcttcatcagtgacatagttccagcggcattggtgataagcaatagcaaactgctggggtagttgagtgtaaccagtcaactcgccatacttcttgcttatctcgccaggggtaggccctagaaagacaaatacgtcgagctgtccagcttcggaaaaccaatggctgtgcgtgtcggtttttgatttcacaatgtcaatccaggtttcggcagcgttgagccagaagacaccaacagtggagtccttacggtgggcttgcattaacggaattgcaccgtatagagtcataggactgttaagctcgtattcgaacacatcagagttatacaggcgatagggttcttcgtggttacccgggcctccactacttatgattagtttgggtagcttatgaaatagaagccgagcagcttaccgcgtctccctcagggacagagagtctgcatgctcggggataccgaacacatgagtgtagcctgggaagctaatgtccaccccacacttttcggacccctgggcttcgaatctgagtttccacccaaaggtctcttcccaccaggtgctctcatcttcctgagagccgaacacatcttgttcggaatcggatggggcatcaactttgggccttcagtgctccatgttcatgtatcccttggtgttgaattggacatgtgtctgccca

SEQ ID NO: 26631 - DNA, 246 bp, Emericella nidulans
gaacgcacaggaacgagccaatgtgtcttggatcgaccggtagcaatctgggagctgattgtacgcagtatggtggtgtccaagagcacggaagggccttttcaacgcgaggattccaataccttggttggggtgattgctcgaagcgctggggtctgggacaacgacaaaacggtatgctcgtgctcgggtaagaatgtgtggcaggaacgccaggagcaggtggctcagggaatgctctgaagc

SEQ ID NO: 26632 - DNA, 231 bp, Emericella nidulans
  unsure (1)..(231): unsure at all n locations
cccttcactgacctgacggcactctaccgcatcgcggacatctgcctcatcacctctcgacgcgacgggatgaacctggtcgcagcggaatacgttgcctgccagaaagaccggtttggcgtcctcgtgctgtcggaacttgcaggcgcggcctccttcatgagcaagggaagcatcaccttcaacncgtctagtgcgcagcagcttgcagacgcggttacaaggagcgac

SEQ ID NO: 26633 - DNA, 270 bp, Emericella nidulans
caggagtcatattttacttacaacggacaagaggaatctcctgtagaccatgacgtccactttcgcccaggcattggggcagacgggagtgaaacatacacgccccggacgctgatttatgatctgaagggggcatttggcacccttcgaaaaaataatgccttgtatgagctagctgaggatttagcgcccggacagggcctctggtgagcttccccgcctgaatgcgctttcacctatcggtaggggcaaatgatgctcatctactat

SEQ ID NO: 26634 - DNA, 324 bp, Emericella nidulans
tattggggactggctgttgaagcggtactacctctgccgcaggtcctcgccaaccaccggtctcggtcttgcaagggattccgcttgtccgtggtcgcagcgtggatcctcggcgacattatgaaactgagttacttcttcagcagcgagcaggtaatcccctgggcgtttcgtatgtgtggtatattccagttcatttgcgattctattttgggccttcaattctgggtgtattctcggggcgcgtcgagcgtggctggaaatccacagcaacgccttgagaacgagatcggccttgaagaaaaggacatccgaatgacatga

SEQ ID NO: 26635 - DNA, 213 bp, Emericella nidulans
actttttgtaaaaattcctgagtactgttgtcgtaaagatcaaaagaaatctgataggccaccgcaagtgaccgagcgtcgcccttttcaaccaattggcgaaggatgacggaggccatggagtgttcgttgaggtatacgacgcatttggcaatcgcgaagtaatcgggcgaaggaatctcgttgagcagttcaagaatgagtttcaggatc

SEQ ID NO: 26636 - DNA, 237 bp, Emericella nidulans
ttaggcaaaatcgctgcccagtgttcacatgcaactcttgcctgttacaaatatctcgttgcgaacccatctacctctacgatcctgcgtcgctgggaacggcaaggtcaagcgaagattgcgctacagataaaatcggaggaggaaatgcaattgttgcaggcgcaagccgtcagtcttgggctctgcgctcgggttatacaagatgctggacgcactcagatcgccagcggaagc

SEQ ID NO: 26637 - DNA, 267 bp, Emericella nidulans
aaagaatgttggctagccatggtttctccctgacctcatcagccgacggccaaatcggcaaagggaacaggaatatgacgccgtcgacaccaggaaccccagccgagctcaccatgagggagctcaagaccaaagtgaaccacccaatgccgacatttaatctgagatctgtcgaccggaaaacaatggacaccaaacgagagaatgggtgcctcctttggtcgtcgaactgtccagcaatcgaccgaaacacagaagagtaaactc

SEQ ID NO: 26638 - DNA, 456 bp, Emericella nidulans
gaacgagcccctctctctacagttcctacgttgatgctccccgaaaccggcgagccaattatgatgggacggtccagcctttcatgtcagtaccagcttgctgccaaccgcatgatctcgagggtgcacgtcaaggccacctacaaaccggctcctaacccgttcgaccgagatagggtggagataatgtgcctagggtggaatggacttaaacttcactgccaaggaaagacgtatacgctggccaagggaaagacgttcacgtcggacatcaaggacgctgatatcatgatcgatgtttccgagagccgcgttttggtccaatggccgcgtggtgataggaaggaagacgtgtcgaccgactcggagcaaacctgggaggagacaacgccaacgcgcaagaagcaaactcaccgcagcctgcaggatagtccaggtgctgaacgccagcgcctc

SEQ ID NO: 26639 - DNA, 609 bp, Emericella nidulans
atactgaaatgttccgagcttgatcgcggccggaaatcgacctttatcctccatgccattcagttgatcttgccaaagcttgagactgctattgaggataacctgccagaagctctggacctggccaggttggctgaatctctggtcgaaagtttagatgcaacgccagccaaactgatgccacttagacgaaacggcgatctcatcgatgagaagcttcatcaattgttccagatctgcctccgaggcattatcttatccaatgggggcgttcttctcaaggagacattctacaatatttgttcaatctatgttgcgcgtatcgtctcccctgacactggaaatgcgactatgaggcagcacagtcagcaagtggtcaaatcatccggccgcgctttaatcgaggctatatgtgatgacgcctataccggtcaggaaacgtgccgtgtatcagctgtgttactgctcaactccttggctgcactggataaacaagctgatgctactctagctgagtcgatcgctcagtcaaattacctaagtttgtttctagacagcatccgggtactaccacttgagttaaagaatgccccaacccacggtagaata

SEQ ID NO: 26640 - DNA, 342 bp, Emericella nidulans
attgcacacggaaccggcacaggctccgagatcgcgagttgcaactacgttgcccgtgcatctggcgtaaagaatggcatgtggatgaaaggtgccctacaggcatgcccagatttgcgcgtcttgccctatgattttccggcctacgaggaggcgagccggaagttttatcgtgcaattctcggcattgatggcttggttcagagcgttagcattgatgaagcgcttgtggacattacaactatatgccttgaggcaggagggtcggagggcaagggcgtatctgaaggctcgatttacagagaacaagctaaggctgacgaggtagcggaacagttacgg

SEQ ID NO: 26641 - DNA, 290 bp, Emericella nidulans
gacaagcacacggacattgcctggcccaagtacaagggagttgagaatcgcttctgcccggctggggtgtacgaatatgtggaggattcaagtaaaccgcacggggttcggtttcagatcaacgctcagaagtacgttccttccctgtcgtccttgccttcgagtattgcttgctaacgttattcagctgcattcattgcaaaacatgtgatatcaaggtcccaacccaggacatcaactggcaaaccccccagggcggagaaggtcccaagtactttaagacataacag

SEQ ID NO: 26642 - DNA, 525 bp, Emericella nidulans
tcgctcaattcggcctgcacgacgcgcgataccaccgggcgtactttgtgcgtcttgacaaattcgaccatgtccttgaattctttccgagaacccattgtcgagccgcggacatcaatattctttaacacggcctgcatcaagaatggcatcacgggagagactgtcattccatagatggagaggacaccgccagcctgtgatgtgttagcccgcacagataacaaaagagacattaagaggcttcagaccttgagcagtttgacagacttctcgacggagttaccacccgctccgtcgataacggcgtcaaagttcttctttcccttaggaagcaggccgagcaacttcttctcccagccatcttccttatagttcacaccccccttggcaccgagctcgatagatttgcggattttctcctcgctagagctggtaacatacacgtcggcacctcgcgcaacagcaaaaagcaagctaattagcgccacacctccgccgatacctgtgatcagaacggcagcg

SEQ ID NO: 26643 - DNA, 342 bp, Emericella nidulans
atgcccgcttttccatccaaaacataccgacgggcaaccactgcctcctctacgctaggggaaaagcttggtgaggcatatcgggctagacttccacgacatccatttctgctattcggactaccattcatcatggtcattgtggctggttcctttgttttgaccccggcgactgctttgaggtacgagaggtacgaccgcaaagtgaaacaattaagccaagaggaagcgatggatctcggtctcaaaggacctgatggagaggaaggaatcaaaaggaatccacgcaggaggatcattggcgatgatcgggaagagtactatgtgcgtggcccagtctat

SEQ ID NO: 26644 - DNA, 711 bp, Emericella nidulans
caacaatcgcaaggcaaaatcatctttggaagaaacctccttaaaaaaggccggttaaaggtcgggtggaatccccatggaacctggaagagtctcgccccgccatcaagggctgccggttctggttcatcccgattctcggagcgatcttcaattcagtcagtcgatttcggcggtgatatatacccgtcccttctttccacatcagctggcccgattacttcgattccatttgagagcttgtcgacagatacccaatcgccaatccctgttgactacctttccaaggctgagacatcccctcgaaaagagccatcaccagggcacttggcgaagggtgtaggtgactttcatcaatatccagcgtgggatccatctgctatgcggaatcaccaacaattttcgcacccaacggggccccgaccaccaccacatgctgctggagtagcaatgagctcaagtgccacaggggataagggagcaagataccagcaatggggaagacctggaagctctgcgggtaatgcagggctcagtcatcactcgtcgtcgacggaggattcttcgacaaactctcgcatgtctattgaccaagctagtattcattcctcactttcatcaaatactcgaggcttcagttacatcttaacagacggatcttttcgtacaaccttgccttcacactccaacgatcgaagttattactacccc

SEQ ID NO: 26645 - DNA, 294 bp, Emericella nidulans
ccctgccgagctggcatcccttgctatacacccctctacccgtcaggccccgagctcgcatttatgactggtgtaacggccatcacattcataacaaacgcgcttgtcgtcccacgaacactggacagatcggacagatcgaggcttattttttcctatttggcgggaatccaattcggagctggactgctcatctcaggaatggctgatccggtcaaagtccttcgctttttcgccttcgtcaccgatcccgctcgttttgatccatccttagcactcgtaatccttttcggt

SEQ ID NO: 26646 - DNA, 400 bp, Emericella nidulans
ctacggttgaatttgaaaactcttcgttgggatctagtggacaactatggcgatattccgggtgttcgcatgggtacgtccattccgcagactcaatggtcttttaaggcgggaactccagtacttgatggactaaccatatcttataggccacacggcaaatctctatcaagataacaaattaatcgtttttggcggggaaaatgagcatggtgaatacttatcggacgtgatcatcttcgacgttcctacttccacttggacgcaacctgaagttcgcgggcaggtccctcggggaagagctcgccatgccgccgttatccatgaggacaaattgttcattctaggaggctcggaatccagcggcattcttgacgacatgttctacctggatcttaaa

SEQ ID NO: 26647 - DNA, 407 bp, Emericella nidulans
gcacttgctgacgcctcgaacagtggtggtggctcggccaaacaagctatgtgatcacatgcgtggttgccaaaatatccatcgctttggcacttctccgccttacagtgactaaagtccacaaatatatcctatggggcgttatcgcggtttctgtcatcgtcggtgtcgtattctggttcatgcttatgctacagtgtaagcctgtggattatttctggcatcggctcactaccaccggaacttgtataaacaccgatcatatcctcaatatcgcatatgtgtacagtgtgactgcgaccatctgcgatttcattttgggacttctgccgattgcgctggtttggaaatagcacatgcatcagacaacaaaagccgcgcttgctggtatcctgagcatgggctgc

SEQ ID NO: 26648 - DNA, 456 bp, Emericella nidulans
gttgcgcttgcattatagactacagcgagctcccctgaagctggtggagggtatacggcgcggcgaggccatgtgcctcagctgtcgattagcgatccgagtcatcatgtcaccgaggctattggacacatgtacgatgatgattacgataaacgggaatccagacgtctcagctacatctcatctccgttgagcgaagccatatcgatcgttccccagaaccggacaggtgaacaaccttcacaatcattacgggtgccagacgattccgatcgcggtcatccccgactttctaatggccactctcatccttcgatggttagaacgaagtcctcagatgatagcccgacatcgccaggggccaccgatactgccaccacttcctttcccctcaacgacattgattatgaatctgacccggcagcggtggcgcaagaactgaataacctggctgca

SEQ ID NO: 26649 - DNA, 464 bp, Emericella nidulans
atgtggcagccacggccggtgataattgaccccacgggacgctggtcccctggggctgactctcggttactccggacggcagttgaggggaaaggcagagcccttgggttgttgtgtcccctggggctcagatacatccttcaaagttgttgatgctgaagggttacggaggcgaattccttcgtatcatggagtaccaccagaattggcgactccggtgggaatctatttttcgggctctagcttcagaaggcatcaagagtgtgatgattgaaggtggaggaagggttctaagtgagcttctgaatcccgaatatgccgagtttattgactccctggtggttacactagcacccacatatctgggttctggaggcgtcggggtaagcccagattccaagtctgacgctcaaggcaagcccaacgcggcactgaacccaagagatgtgaaatgggtaccacta

SEQ ID NO: 26650 - DNA, 540 bp, Emericella nidulans
atgaggccgagtcatcatctcccccggatgatgcctctgcagcatgtccgccgcttccaccagacgagacaggctccatttataaacgagtcgctggaagtagcatcgtccttcattcatggcgtacactcagccagccatttgccatgggctctctcaatccctttgactgctttcctgattcgaatgggcgtggccttgcccctgcagatcttcactaaagtccaagctcgtaaagaatccgatttatccccgatacttatggcttggcgacagcattatcagaagaaagcacagaatcagactggtcccaatggcccgatacttgcgagagaggccaaaatcatgaccactaaaaacgtcaagggccagtatgatgctctccgccgccgctggggcctagtccgatggtataggccagccaatatcctccaggtgccgatttggattactgtcatggaaagcctcagggcgatgagcggtgctgataaaagcctggctcagaccctgcttgcactgttttcatcgggggattcggaa

SEQ ID NO: 26651 - DNA, 503 bp, Emericella nidulans
acatttccgacgcttccgggctcggtcaagcagttcatggatgatcaccctgagcacatcgtcgaagggaactcgttgcgtttcctgagcgatgacaatggcaaaacctacaacaaatgccacttcgtatgctccctttgccttgtgacttgtttcatagctgatatgcaaagtggtcgaattttgagatcggcagcctggattggttgagatccaaggagtacctggactactttgactttctcgaccgggcaggcggcttctactatgaaagatggggtgacgcgcctatccattcgattgccgctggcttgctcctcaagaaagaacaactgcacttctgggacgagatttcctactaccacataccctttacccattgtcctcgtgatgaacaactcaggatggacctccgatgtagctgcgacccatcaggaaactttgactggaggggtttctcatgtgagtctcctggcctggctaatgcagcgtcttcattaaca

SEQ ID NO: 26652 - DNA, 896 bp, Emericella nidulans
actatgcccagccgccgagtccaagttcttctgtcagttgatttcgacgccgtctctggcttcctagggactggtgcgtccccgaccaatgggctcgccgatttcagcagtggctactaaacagcccaagtgggcgtaccccgcctgctgcgtctcttccaaaggcatggcatttcctcgtcggtgacctggttcgtccctggtcactcaatggagtcgttccccgagcagactatagccatcgtcgactcgggagcggagattgggtgtcacggttatgctcatgagggtgcaacgcagttatcagaggcccaggagcgagacgttatcgataaatgcgtccagcttgctacagtattgactggaaagaagccgctcgggtggagggcacccctgtatcaactgcgggagcacactgtcagtaggctcgaagagcatggctttctctacggtgcgtcacccttggccattcacggtacccattctaaccccgtctagacacttccttgacccaccatgactcttctccatatttcctgctgacaaaaacaaccccccagccaatcgacttctcaccgtcagtcccagcctcatcgtggatgcatccactcccgccaccagctccccggacagccagtacgctcgttgagattccctgcaactggtacatggaagacatgacccccatgcagtttctccctgcggccgcgaattcgcacggctttgtcagccccgaggcgatcgagaagaactggaaggcccgctttgagtatctctacaatgagactatcgatggcgcccagcaggtctttattttcccgttgattttgcatccggacactagtgggatggcacatgtcattgggatggttgatagggtcattggatggctcaag

SEQ ID NO: 26653 - DNA, 474 bp, Emericella nidulans
tcagtcatcagaagccgaacatacaagcacttctactcagcgcgtgctttggaagacaaatctacagccgatatctgcgaaatggtccacaaattagatgcagagctacaagattggagacgtgagagccagtttgatacttcgttaaagcaaaggggtagcggccaagactttctggttggctttgcttctgctagcctcttcctcctgtacaacaacacactcatgatgattcaccgcataccaacgctaatcaatttcgtctaccaatcacgcgccgaacgcatcccagagcttgatctgaggctgatattgaaccagtcttcctcctcggccattctttgcgtccaggctgcgagagatattctcaatttgataaatcatctaccgtggggggatgttgcgtggatatggtaagctcttgcctcaaatcacattctactttctttgtcactcatttactcaggtcactac

SEQ ID NO: 26654 - DNA, 390 bp, Emericella nidulans
tgcgaccccggaatcccaaaatgcggcccatgcgatcgtaccaatgcacagtgcgcatattatgactctgctcggagacgtacaatatcgaggacgtacatcgtccagctacgtgaaactgcccgcaggctagagaaagagctggaagaggaggaaaaggatttccaacaggcggcagatgctgaattgatcattcgtggagctggccgcattcggttcagagaatacgacgaagcccgatatctcgggccgtcaagtggtatcgcaataactcgcttggtcatggaactggccaagcagaacacctattcgaaaagtatcaaggatgttgttcccgagtctaccgcgcagaagataaaggacgtcttcgacgatgaaagcgcgaagcct

SEQ ID NO: 26655 - DNA, 420 bp, Emericella nidulans
ggcgacgatcgcgatgcactcctccacctgataaagctgtcagcctctaaagcttcctctccacagaatcctcgaattgttcattgcagcgccggagtttggcgaaccggcaccttcattgcacttgaccatctcttacaggaactggagtcaggtcaactattaaaggtcaatgatgaagacgtagagtccggtgtttggggcggtgaacctgatgcgcgacagcgaatgatgatggtgtataacgagatgcagctgatttttatatacgaagtcttgcgcgacaagtgtgacatcatcctagagaagacatatggcatcagccgccagcggtcagttgccaggtccgctaaaatagcgaaactctccgaagaggactatctacctgcaccaaaaccggagttggaggctgctggggac

SEQ ID NO: 26656 - DNA, 435 bp, Emericella nidulans
ggcctctactaccaatccgacttcatcactcgtgatcatgaagaacaactcatcaccctctttcgcacccagctaacctggcccgatcgccccggtcgcatctccgtccactacggctacacgttcgactacaagacctttggcatcgatcctgacattccatacaagccttttcctgactggcttgttccattacttccgaagaccgaaagccgaccgccggatcaagtctgtctgcaatattacccgcccggcgcagggatcccgccgcacgtcgattcccatcgcgggtgggaccagctttatgcgctgtctattggcgcgcccgtattaatgcgcctccggcatggcaagacgggtgaagagagggttgatgttgatcttgaggggcgcagcatgatgtgcttcagcgggccggccagactgtattggacg

SEQ ID NO: 26657 - DNA, 744 bp, Emericella nidulans
caggacccaagcatgaggcgttgtacctcatctcgacgttacgcaagcaaacccactcttgccccccgattgccggccgacaacacgctcgcgcccaatctggctacccaggcgctcgaccttcaatgcagagtgttgcttgaatacctcttcaaggcgctgacgccgcatactctctccacttacaagccccgcgtggaactcacgttgatcgactatatccagcagtaccccaatcctcttccggcccaactcctctgggccacgcgctgcctggcgactcttcactcctccgtggattccacccctcagccaggtacatctgccctcgtcaacagtcgtcgtatgtatcagcaggctatccgacatctcttaatcagcctatactgccctcgctctgcgcgctcggacgaaactttgactgcggccatgctgctctgcgtctacgagatgatcgaccgtaccaaccctgaggcctggatgatccactcccgcgggataaccaacttgctccggatacgtgggcccaaggcgcacaggagcggaattggtcagacacttctgctatgtctccgtccgatcctcgttgcacaggctttgactcgtgcggagccatgcctgctcggggaaccggcatggaggaaactgggcaacgagatgatgcgctcccagaaaggtgcagagcattttctgaacacttggactgagtgctcttttggggagatcgcgatgtgtccgggatta

SEQ ID NO: 26658 - DNA, 350 bp, Emericella nidulans
ttcccgtccacgaagatctggggtgggttcttctaagatcccagttctcattcgaccaaggcgctcatggctttttatgagagcataaaacgcgccgatcccaagatcagtggcgcaaatgtagatttccacgccgcagcgcccatcacctgcttcacctacgtacagagcttaggcattcagacagtcacagttcacctggcctacacaaacccatcagaagagcctaggaattggccagttactggaagaagtcagggttcgcatctctctggcgcttgtggagcacgttcagaacccgcacagtgacttccgccattatcggacagtctgacaatatctgcctggga

SEQ ID NO: 26659 - DNA, 480 bp, Emericella nidulans
tctccagcgtcgcaattaaaattacaatccagcacccatacaactgctaaaatgcccagaagcgagccaactttcttatacaaacttgttccgtcaacttcccccgtgcgggagcccattccagatcgtctcccggtcagcgaactcgatgagatgtctggattcgtgcacttatccacagcacttcaagttccaaacactctgaaattctttttcaaggatgaacctctcgtctatgtgctaaggattccctacgaccgcgtagcaaaagatatccgtttcgaagatcctgagggccgtgtatgcgggccgcgaccagatgagggtttattccctgtaagcctggactaacatcgctcttatcctcgtataccaagaactaacgtagtacagcatctctacaatggactgaagcttgggaaggatgaagtcgagagcttgagcatatggactaacgagggcggttgggacaagccgctt

SEQ ID NO: 26660 - DNA, 642 bp, Emericella nidulans
agcatcatgtctcaaccaggaataatccagccgtcttttgaacaacatcctacaggcttcggcgttggctacccatcgcctcgcatatcgtggaggtttactgccaccgaaagcaccgcttcacaatggcaacagacggcatacgaaatcgaagtggctcgcagcggcagtactgagaaacaccgggtcgaatcaagagaatcagttcttgtgccatggccaagtcaaccgctgcagtctcgagaggttgctagagtccgcgtccgctcgtatggaggtcctgataatgcaccgaccgagtggtctgcctggagcacggtcgagtgtgggctactgaatcgtgaagactggactgcgcgtgcaatcaccagcttattcaagcagaaggagggcccgttgcggccaattcggtttagaaagacgttcacactcccggctgcagcggcgcgggctcggttatacatcaccagtttgggggtgttccaggcattcattaatggggagcgggtgggtgatcactgcatggctcctgggtggacgagctatcacagtcggttgagctacgaggtgttcgatgtcggcccgctgttgaaggaagggaaggataatgcaatcgctgtggaggtttcagagggatggtat

SEQ ID NO: 26661 - DNA, 710 bp, Emericella nidulans
cgcaggccgagtccgatgcaggttgacagtaaaccacccccgagctacaacttcagcggcgggttcaactacgcaccgccaccgggtcgacctgctccgcccatttctggtcctggtcatagacgcggtcatgtttcgtgggatatgtcgctgcatacgaacctgaccggtctccacataagggacaagccgacaccacagcgcgacgcctcaaactggggccagcagaccatctcggaacttcgtagcataggttcccgtccgtcatcgtcataccagcaacaggtccaggagttccgtggtcaacatactcatggtccgccttcgtttagcacgacggcatcgagctcccacgctgcgcgaacgagtccggaagattcgagcagcagcgagggagtccacactccatccacagcatctctggaatatcatccagccatcgtgcagaacaacggctttgtcgagcctcaccatcctcccctatcttctgatccatctcaaacagtacgcccgcccctttatactgagggccagcgatagatcactgatgtggcgtacaggcttgtccacctatatcacagccagagagctaccatataaaacacgaatcgcggcctgacctgaacaatgtctcaagagatcctggaatgggtcgacttgaggctcttgtcgcggttgccacgagcgaaaacaagaacactgcggatatc

SEQ ID NO: 26662 - DNA, 366 bp, Emericella nidulans
gtgtacatcgacgaccccaatccggctaaacgcaaagtcgagtcccatacagggcaagcattttatattgattacccggagcccgaccacatgaaggacctcaaacgcggactgggcctcgtatctacgatacaggataacccaccaatgctgaattggatatactgcgacaaagagacgcatgagctcaaatacgggaatcggacgcagagctgcgagcatgttcctgcgccatgggactggacggataatgagatgacaattatcttggagcggaactgggggttttatgcggtcaaagagaaggatgcggaggggcggtggagttgggctgtttatttagatagggatggggatgatttacag

SEQ ID NO: 26663 - DNA, 963 bp, Emericella nidulans
atcgtcgacgtccacacacatgtctaccccccagcatacatgcagatgctacgaagccgcaaaacagtcccctatgtgcacgatccttccaataatcgagatccccgcctgattattctctcctcagatgatgacgcctccatcccgctcgaccagcgtggtcgcccagtcgattcctcctactgggatatcaatgtgaagctatcattcatgcgtcaacacggtataaactgcagcgttatctccctcgccaatccctggctagactttgtggagccggctgaagcccagatgtgggcggagaggatcaatgacgatctggaaaagacctgtgcgactgtgaacaaggccgcggatccggggaatactttgactctcgaccagaaggaaaccttgttcgcattcggtgcattgccgttgagtgcaccgagttccgaatctgttgttgctgagattaaacggctcaagacgctcgagcatttaaggggcgtgatcatggggacctcagggctgggcaagggattggatgacgcaaggcttgatccggtttggaaggcgctacaggaaacagatatgctaatgtttctgcatccgcattatgggttaccagaagaggcttatggtggacctgagacgacgggtcggtatggccatgtacttccgctggcgttagggttcccacttgagacgacgattgcggtaacgcggatgctgctatcgggtgtctttgatcgctttccgcgattgaaaattctcctggctcattcgggtggcacgcttcctttcctcgctgggcgaattgagagctgtattctccatgagcgcaagtttatctctggcggtggtgatgtgcagggaccacagaggagtgtgtgggatgtgctcaagacaaatatttatttggacgcggtagtatatggcaagcctggcttggaggcggctatgactgcgtcgggctccgat

SEQ ID NO: 26664 - DNA, 228 bp, Emericella nidulans
gcgttcgatggcgatgaccatccgtataaggataacattgtccgtgttggggctccgtcgaacattggggcgttaccggaagtcaaggcggctttccaggaggctaagacctcgcagtaagaggttcccgtggtgactgtttcgtttgattgctcgactagataccagcggcatatactgtattttatgtatcacttttgtatgatatttctagcgcatgggtgggag

SEQ ID NO: 26665 - DNA, 552 bp, Emericella nidulans
ttcatgtctactggcctcatctcgaagaaaaaccgcaatgccgacgattctcatagcctattaggatttagcaagaacatgcccgacaccccttgcaaaaggcctgtcaatctcttcgctgccagtcaaaaggctcaaccagatggaccacttggaaggccggcttggagcaatgctgtggacatgccacctccatcccccttcaacccatcaagcgcacggcctaaacaaggcccatttgcgcgaggcatgggaatatttgggactaacttcaatcgacaaggggcctcgcggcgtggaagcttggctagcattgatggcgatgatggatatgggctacagacacaatctccctctaaccgtcagaacagccagccactcagtgaatcggatttccctccaacaccaacgaaacaatcatttttcccgtctcgaacctaccctcctactgcatcacaaatcgcttctctcgagcgtttgtccgaggcaaggggcaccaattccagccctctacatgacagattccaacatgaatcacctcgtacgcctcaa

SEQ ID NO: 26666 - DNA, 252 bp, Emericella nidulans
tccaacctctggctggcagccaaagtggccttcctggaacgccagaaacagttcgcctggcattctggcatgctggtacccggctccaggatgcaaatctccttcatcaaagatctcgccacgctccgcgacccccgcagcagcttcaccttcctcaactaccttcaccaaaaggatcgcctgatccatttcaccaacctgagcaccttccttccggcccgtatggaatttgaagactacatgcgctggtgc

SEQ ID NO: 26667 - DNA, 231 bp, Emericella nidulans
ttgctatttgtttctgcacagattctatcaatggagcccctccagcggaagtcagagcttgacttccagagttatcgcaagatgcctctcgcgcaacaacggactcagcgcttaaaaccaacgtctcctgaggagctgcacgacctgatctgtgtaggattcggtccagcgtcgttggcgattgcgatcgctttgcacgatgccctcgatccctgtctgaacaagtgcgct

SEQ ID NO: 26668 - DNA, 456 bp, Emericella nidulans
gtcagcatggcatctctcaacctatcggccaatggaccttcgatatcgaagagttatcagtcagtggtcgattatgcaataacggattctgcaaagagttcttcaacattcgccaaatgggtattgttctctgtttcaacgcccctggtgagcgcttttcaacaggacgctagcaataaagaaagcgtactcaaagttcaggatacaggaggtatgacatcttgcgccaaaaaccaagattggcatgatatctaacctggctttctagagggagagttggctgatctcatcgatgaattctccgagggaaaaattcaattcgcttttgtcaaggtcatcgatactaacacaggcctgccgaaaagtgtcctcattgcatggtgtggggaaggtgtgcccgagcggacaaaaggatactttactagccacttgtccacggtgtcaaaattcttacat

SEQ ID NO: 26669 - DNA, 1377 bp, Emericella nidulans
ccgcaagaattacccttacatgaggcattcctgctcgacatgcgaaatcccattaaagaagtctttgcaccgcgagcccgatatgcaatagagcgagcattatcgaacccgtttgactatcttctgtttacttcacaggacaccgaacgcaagatttccgccaagcagcctcccacggcgatcttatatcagttatacctcgagtccggcgctctcgtgaatatgtatgacctgtggacagcattttacgcagtttttgagagcgaacagggtgatagctgcgacgagaggatgactatggcattattttacagagctttatctgagctcagggcactcgggatgctcaaacatagtcggaaaaagttggatcatgttgcaaagtcagcttggaaaggcttatgagttgtttgagatatacaccgtcaaagccgcattatccataataaaaatacattacaaaggggtatcataagtattgacaacaaaattgctcaacaatgtttcccaccattgtcgtctacagaactttactgcaattggtcagatatcgggagttgtatgatatcgtcacggcccagcggacgccttccatcactcaagaccatagcctcgcgtctacgccttcttagagcttgttcttggggattgcgctctcgaagccgtagaccagggactcgtcttgcaccggccgtatcctcgccatccaccatccacacgtcgtggtcatcctcgtcctccttgtcgctgatatcgtcatgatcattttcttccaacatgctacccattaacccgtatttccgaagctgcttcgcgccctctgggtgggatgaaagcgtattaaaaatgttgctcataaccctgtcatcacaccaccacgtcttcataagtatcactacatcctgtcggcgagatggttctgtcaaggcacaaggaaatggataattggcgagccatcgactgataatgccggcctctagtgcagcaggaatgttttcctgaaggagtatattaagcgtttccatgactttttgctcagaaggtggccgtgttctagggaatatcggggagatagtttccgaggttatctccgtatgctcctcgaggaggttgcaaaggcagtcgacaagcgcagtgtatgtccgtacatctctcagtcgagagcacacagatgttcgggaaactataactataagcactgtactgtagatatatgacgtcttgtgcgggtacgtacgtgctcggttagagaccaggaagtaagccgcacgtattgctttgtttcgtcgcccagtgttcctgctggctatgtcttcaagtagtaagtttttcgtgtctcccttcacagagcgttcggcaatgatgcgcagcgcactg

SEQ ID NO: 26670 - DNA, 237 bp, Emericella nidulans
cttcaccccccatctgctacgaaatccatgaatgaggggaaaagtcctcttggccgaagccctcatagaccctatggctctacaggcgcaggaagcaacacctcgatctcagagcaattgcaccggccttcaatttcatctcgagtttctcagcatttcttcgacgatcatacctcaactcctatcacctggcccttacttgtggacaacatgtcccaagctgtggaagcttatcgg

SEQ ID NO: 26671 - DNA, 255 bp, Emericella nidulans
acgggtattctctccccaatcccactcaaaaagtcacatctatctttcaactcccttaacttgacttctgcaaacccagtctcggtaataatccatttttcacctgtcctcttcagctctggcaccccaggaatatccgccgcagtcaacttatgcacattcggatcccctgtctggaagaacgacccaaacgcgcccgcgaagcctctgtagatgagagggttggattgctgaacggagtttattctgttccac

SEQ ID NO: 26672 - DNA, 246 bp, Emericella nidulans
cccgtatatgatcacaagcgcgttgtcacggtccgctacgtgtggtttaatgccgaggacgtcaactggtttaaggctttgcagctgtggactagacgtggacgcagcgggttcatcaaggagagtcttggtacgcatggttacttcaagtgtacctttgacggaaaaatcaacccgcaagattcggttggaatcagtctgtacaagcgtgtgttcccgcgaaaggcgagggctttggaggaggtt

SEQ ID NO: 26673 - DNA, 576 bp, Emericella nidulans
agatacggtcaggataaagcggcttccgagatggtcttctcatatggttttcttgattcagagagaagcgatgctaagcaaatggtcttagacctggatatcccggaagacgatccactgagactggctaaaaccgcattctgcagagaaacgcctggactttgcatttcctcaaaacctacagattccgacggaacccgaacttactgggagagtccgattgtctggtgggcctgtgtgaacgaagaagatgggcttggttttgccgtattgcagaaaaacgatggttcgaaagagctgacggtgacatggaagacgcaagaaataaagactcctaatcacctcaaagatattctaagtgcagaaccattgtgggatatcttccagcttcgcgcagtcgtgctcgttctcgaacggctagaaacccaattctttatgctgcagacaaccgaaaggatggtttcagatcttcaacagcgtgatgatacgcttgcgattttccgccctgaagtgtttaacaccgccatgaaactgcgggaataggagggacggttgctggaaactgccataaatgat

SEQ ID NO: 26674 - DNA, 444 bp, Emericella nidulans
gaactcttgacctccggaaatacaacagtctatgaattcaacccctgggaatttggctgttttgatccgactgtctacggatttgcgccattggaatacttgggttcccgctttatcaatggttccattccacgcaatgaaagttgcgttcgtggttttgataatgctggatttgtcatgggcacttcttccagtctgttcaaccagttcttccttcaactgaacggcactagccttccagatttcttgaaggacgtcatcggtgatgttctcgcagatatcggcgaagatgataatgacattgccgtctactcccctaacccgttttacggctggttaccacaaaactccccctacgccggcgaggaaaacctcgacgtcgtggacggcggggaggatcttcagaacctccctctccacccgttgatccaacctttgcgccac

SEQ ID NO: 26675 - DNA, 448 bp, Emericella nidulans
gttctctgtgccatggacctccctccgctttctctggatcagctctccgcagttatcacagctggtcccacgcccactgatctttatacctcattatcggcctatgaagaacaagcgtgcctcctctcggctacagaccccagcgaaaaggacctactgctcgaattttacactgcgttcttcttttcccaccttctcacggatcagatgtaagttcatgggagcgggcacgatctccgcatggcaaatagttaatgggagccggaatagttgcgaagcccgtgctttaacacggcgaataccacgagaaatatcacgactggatgccatgcaaacctgttcgcttctcttgcgagctgtttggcaaagcaagcacactgaaatttacaaaattctccgagaattaccctggcctgggcggtcgcaacccttagtacaacgttatgag

SEQ ID NO: 26676 - DNA, 381 bp, Emericella nidulans
tgctgctatccctcaagctcggcgctgaaagagcttctgtctgatgcctggaataagcatgagaatgtgatcacgtcgagtcttgagaagggaaaagcccagatcatcgtacaactatcctccacgaactccgatagcatctccagagccgtctccaatatccggctgctgaccatcttggtgtcttcactcccagactgtgggcatgtcctcatggccggctctgactttttggatattcttgcggaaacatatcagacgcatgaatcagaggacattcgcaagtctctggttgccaatgtctatgttggcttaacctcgttattgaagggcgcaaggccaaaccttactcttttgttggatcaattatttggcctaaaa

SEQ ID NO: 26677 - DNA, 345 bp, Emericella nidulans
ggacactctgccaggatggatgctgaaagtccggagagcgagggcaaagaggccgttttcagacgtgcggtatgtggaacagagcccttattggggcgtcgcctgtgatgcaagggactagttctgacagctgagtgtgtagtgtgaccagtgccgtcaaagaaaggtatgcatctgtctaaatagacagtatggcgctgctcatgttcacgacagattcgctgtgacaaacggttaccatgctcgaactgccgcacatccaagattatatgtagctctacaggcgcgggccagaagcctcgggagccgcggaaacgcgtgctaatctctaatgaatagtgagtc

SEQ ID NO: 26678 - DNA, 363 bp, Emericella nidulans
ataactttcacagtcgaatacgcgtgcatctttgggatttctgaacagctagctggactcaagatcggggagcacatcaactcatactcgaaggggctgtgcgtgataaccttccatggaagagagagccgtgtcttctggttcattctcgtgaaacttccgcaaaagtcagaaaatcccaacactcctcggttctcagcagacgatgcagcgaagttctgccgcaaattttcgcctgtccgagtcaccgaacacgtctgtgtaggtgatctttgggcaaccagaacgtttgcatccatgacggcgttagaggaaggcctactgcaaacgtggcatttcagtcgctttgttcttttgggagac

SEQ ID NO: 26679 - DNA, 570 bp, Emericella nidulans
aaatcaaaatttcgagtcattatagttggaggctcagttgctgggttgactttggcacactgcctggctagagcggacatcgaccacatagtattggaaaagcgagctgaaattagtcctcaggaaggtgcctttattggtatttggctcaacggaggccgaatcctcgaccagcttggactctatgatgagctcaagagcgctactgcgcctattcataaaatgcatgtccgttttccagatgagtttgtattcaacagcctactaccatgggacatttatgaaaggtgtgtgtagcccggttcttttgtataaaagtagatgtactgaatgggctatatcgcacggctttggataccttatcatatcggtagatcgacagagggttttagaaattctccatgaccggtatccaatcatgtcccatatccttgtcaataagaaggtgactggaatccgatttatgcagctggagtatcagtcgtggtagaaggcggatttgtataaaacggagaccgtgtagtcggtgctgatggaatccatagtcgggttcggtccgagacgtggcga

SEQ ID NO: 26680 - DNA, 375 bp, Emericella nidulans
gattctgtcggcaacagctttgttgtttccgactctgaagcttacccaggtcgacccatacatgggtttccatcagaaccggatgagaagctccttgaagctatgaagtctccaaaagaccggcttctaatccttcagctagaagaaaaagttagaagcttcattcaaaactccaagtaggttattagctattctctcaggaggtgattgttactccgtctaacatcttttccaagggaacaatctttggaactgccaccttcgaacgcgttcggtcgacttcttgcccataagttgggtgactactatcatcttacccattttgtggacaataatgtcacatcagttcgactccatcgaactccgttttgtcga

SEQ ID NO: 26681 - DNA, 492 bp, Emericella nidulans
ggcatgaacctgtggttctcgtggactatgacagtcccggtttaggtgattgcctgcatcaatgtgctgcagtattgggaggctccgagaaacttccctatggcagcgtacatcacgatattcgccatagtcaccgcaatacccaacttatttcatgtgcggaaatacggcagcgtggaagttgtaatgagtgcacttaaggtcttctcaattacctcttccatgtgcttcctgttcatcatggcatctggtggactgccgtcacaggctggcccacttgtgttccactactggaaaacaccaggggcattcaataatggaatcaaaggcgtctgcaaggctgtgcttcaggccgcatttagctgtccctcaggtatgaagtcctgatagatgcaccgaaaaagtgtcctgctaactaactcagccggctgggtcgtcattacagctggcgagatgaaggatccacgaaggacagtgaaacgctcaaccaac

SEQ ID NO: 26682 - DNA, 306 bp, Emericella nidulans
cctggcaataacgtctgaactgcccttagcgtagacaattttcttccagtacgtcagtcaccaccagtcaacgcttggagtgaacctaccattggcttcccaaaaaactcgaatccttgaagtgcacgcattgcctgtgtacttgcttggatatctttgaaaacaacgtgggcttggccgcgcatcttttcggttttcatggccacaatgtcgagaacggtgccatatgtggaaaaaagtgtataaagggcgagtcggaggtcatattttcgaagcttgtctgggaggttggtacaatataatctt

SEQ ID NO: 26683 - DNA, 357 bp, Emericella nidulans
agatacgcatggttcccgcagttgatggtcttctgtatcctactgggatcgtccggtccagagttcgatttcaatactgtctctatagggtctgtagaagaagtcaacgccaaaagactggcgttcttctctctttgcctctctgccgcaatgtcctgggtgccaggagctgccgactatcacgtatattattcacctgataccgggacgtggaggatatggtccctgacgacggtaggagtaggcttagccatgactatcacgctccttctcggtgttgggctgggaactggaattgcccacaatccccgctggggcgccatttacgacgggacccccggtagcgtggtgatcgcg

SEQ ID NO: 26684 - DNA, 978 bp, Emericella nidulans
acggacaatgactctcgccagcacccgcttcatgttccgaagatctcacgaaggatacgtgcttgcacggagtgcaaacggcataaggtccgatgtgacatgaatgtgggggagacggtgtgtcaacgatgccgtcggatgggactagaatgtgtggtcaacaaaagtctccagacattgctggatgacgaagcagagtaatgccttttctaatccgctgcttatgatgaaatatggtgtcgctgacattttgtgctacgctgcaggtggaaatcaaccattgagcttgccatggccgacttactccgaaaagctcaattacccgacttatcgtattaccaagcggccggaaaatcagcagagacgcccccgaaaaagagaggccgtaaagaatccaccgtgtcaacggaagatacccctccggccacagaaataaatggagcgactgtgtcattcggtgctgcagtacgccccggcgctgagaagccaagtcttcctacgacatccccagagcaacagccacaatatgctattgacagagaagagaatggcgcaacctcacttgtcactgccccgatgggaagtttgtatgaagtgactcagttaagcgatttccgggctacatctccccagcgacagcatgcacatgatcttgttacggattttgtctcgcgaggtgcaatagatctgcaagaagcagaggaattgtttgaccacttcgaccgtgtcctcaaccgttatttatgggatggtatattactcgtacataaggatcttacttctttgcgcaactcatcttcaatgctctctgctgctattttcgccgtgacggcccttcacctccctcataaagaacggactttcgatacctgttataccgagttcgcaagattagcatcagagtcaatgcttgaccggcatcattccttagatgacttgcgcgcattatgtattggggctttctggcttgcggatgtg

SEQ ID NO: 26685 - DNA, 459 bp, Emericella nidulans
gccagaaagctgtgtttcgttactgttggagctacagcgtccttccatctccttttgaaggccatcttggatcctatctttctagtgactttgaatcagcacgggtataccgatcttcttattcagtatggcaaggacggacagcagctctttgacgactttgtcgcaaactatccacctggcgaccccagacgtcatggtatcatcgtgcaaggattcgacttcaaccaagcaggcttggacaatgagatgcgtctagcgaaggccaatgcctcagagaaccgaagcagtggactggtcattagccatgcaggtaatacctacctcatctttttctcactctagtagctgacagctgccgaaggttccggcagtattctagcagcattgagacttggtgtcccgctggtcgtggtgcctaatccgactcttcaggataaccaccaggaagagcttgcc

SEQ ID NO: 26686 - DNA, 576 bp, Emericella nidulans
cccccgctgcagcttgtgctaatggtggggattggtggtggagtccccagcaagagcaatgacattcgattaggcgacgtggttgtcagcaaaccgggacgaaaacatggtggggttatacattatgactatggaaaggcagttcaaggcggacgtttcgagcccacaggcatcctgaatcagccaccgcagtcccttctaacacatatgagccaactgcaagcgaagcaaatgacagaaggcgaggatggtatttccaaaatagtgagcgatgtattgaaacgaaaccctgacatgaacacaaggttctcccctccggcacggaccaccgattacctctttgagccctcctatcatcatgctgataatgattctgattgcgaaacgtgcgataaaaagtacttggttgaacgacagccacgtttgacggagacaatatatgtccattatggcttaatcgcgtctggagaccaggttatgaaagactcagtaacccgagaccgtctagcccaaaaacatggagtgctctgctttgagaaggaggccgcaggcctaatgaacgaactcccaacactt

SEQ ID NO: 26687 - DNA, 849 bp, Emericella nidulans
atgtccggcgagaaacaaccggaacaaacggcctttggctcgtcaagtcaattggttgtgaaacgaaagaaatctgatggtggactcgataatagtgcagctgttgtcaagagctcaggacaagatggaaccctcgtacaagcggtatggagagctctatcgacgcacaaataccgatgaaatatcgtcattgacggtaattgcaggtcccccgtaccagtggtctcaacgcgccgatcatggagctcacaggtgaggctgaatgcgatctacctggaataactatgctaatacaagacttcaggtcattctggtgaggttttcgccgtacgatttgacccaacggctcagcacatcgcatccggttccatggatcgatctatatgtaagtcaagactaggacatgaactcgaataatgactaacttgcatttacaaagtactctggaacacctatgggcaatgcgaaaattacggcattctatctggtcacaaaggcgctattcttgacctgcaatggtcacgagactccaaaaccatattctccgcatcggctgacatgactcttgcaagctgggatatagagtctggccagaggatccggcgctacattggtcatgaagaggtcataaacagtgtcgaaattagcaaaagaggccaagaaatgctggtcagcgctagtgacgatggtacgatggggatatgggaccctcgacagaaagaggcaatcgattacctggaaacggagcttcctattaccgcggtggcacaatctgaagctcgaaatgaggtattcagtggaggcattaaaaacgcaattcacgtatgggacattcgaaagaaggctata

SEQ ID NO: 26688 - DNA, 354 bp, Emericella nidulans
aattgcgagcaatggaagacgcatgttttaagtcattttcgtatgcatgagcccccggacacagctcgatgtccattatgtccagcgcagcgattcagcagcactccccatcagagagcctgggatcttatgctcaagcatgtggatgtggcccactatcaacagggccagactctcgcaggaagtcggcccgatttcgaactaatgcgatatctttataacctgagggtgatcagcgttgaacagttcaaggctatgcagcttgcaccccagccatccagcccggcatatcatcggcggcaggacacggtccgtgcaagtgttggatcgtcggatgagccatactgcgttcca

SEQ ID NO: 26689 - DNA, 324 bp, Emericella nidulans
tctcggaatctggttatctacaatgtgaaccccaatatcactgaagggctcatcagacgagacatggaacatatccacaatctgattgtcatctctgtcaagttcagacatggcaatgcctacatatcaacgaactctgtacacaatgctctctttgcgcgctcttgtttgatgtctcgtcttacctacaaagggatgaagatcggcttttaccctgatgaatgcgccgaaccgctgacaaggatccctgccgggcccaggcgggacgctccagcttcgaagaggcccgcttcgttgccgaacaggttccatcttctctctatt

SEQ ID NO: 26690 - DNA, 795 bp, Emericella nidulans
tagttatacataatcgactacgggccccaaccctacaccttcacccgcggcaaagcgaccttgcattctctgcaccgcgcactatcgtcataccccgacagacacagtctccctgacatcgaatttgtgttgacgacagacgacttcagcaccagaactagtacaaatccatctccgatatgggcttacactaaacgccaagaggacgaagacgctgctatctggctaatgcccgattttggttattggtcgtggccggaggttgacaccgtcggcgagtacaaggacgtccggcgccggatatttgctaaggaagaaggtctgccgttcagtgataaaaagaaacagctcctttggcggggtagtgtgtccgcaaacccagaaatcaggaaagccttgcttgatactgtgggggggaagagctgggcgaatgtgaaggagatcagctgggctgactctcgctttcaaccaaactcgaagtcgaatccatctgataacgaagtactgcctattgaagatcactgcacctacgccttcctcgtacacaccgaaggccgctctttttctggaaggggtaaatacctcctcaactgcaagagcgttttcataacacataaactaacctggctggaagcgcaccattctgcgctcgtctcgtcggggcctgatgcaaactatgttgaagttgatcgggactggtctgatcttgaacgcaaggtggagtttttgctggacaacccacagtcggcggaacggattgcggagaatagcgttaagacgttaagagataggtat

SEQ ID NO: 26691 - DNA, 216 bp, Emericella nidulans
gcaagcacgacgacacaggtatatcagggctcaacaacccgcacaagcggtgaaaccggagtaaatgacactcagcagtcaagatgggaattcaacgtccaccgcgacggcgataagcatgggctctcggagagcgaatgttccttagcttttccaaagctctttacggaactggaacggactgcagagttctgggcatcgaatggtggtattagt

SEQ ID NO: 26692 - DNA, 204 bp, Emericella nidulans
ccctccggtgtcggcgtggggaaggccgcaaatccaaccccgccgactacctttataacgtgggaggctctcctaatcttaacacctttgcccaaggtcttttgtctgtctgttctctatttgcagtcccttgtgaactgtgccgtcaaaatgccgtcttacaatattgttgtctttgggggagatcattgcggtcctgaggtg

SEQ ID NO: 26693 - DNA, 381 bp, Emericella nidulans
ccgacttatgtccgggtcagcggtgacgagagtatacgcggacaagttcgcatcgccgacgatggccgtctaaagacaacctttccagagcgccttgtcatgatatccaaccatcaggtctacaccgactggatctatctttggtggattgcttattcgaacatgatgcatggccacattttcatcatactcaaggagtccctaaaatacatacctatcattggccagggtatgacgttttacggcttcatcttcatggctcgtaaatggctgtctgacaagcccaggctccaacaccgcctagagaagctgaagacccagcacataggctctgattcaggcgccccgaagtatgaccctatgtggcttttgatatttccg

SEQ ID NO: 26694 - DNA, 342 bp, Emericella nidulans
ccgctgtcggcagctgcattgatcaagggaagagacggcaatgataacccacgctggctccaaggcgaccaaagctatgccttctataataaaatcacccaggacgcactcgcagttcaccgtaactctccgggccttctagacccaaacccacggccaagtccggagcggaaactcactagagctagcatactgagcagcgagtatgcctcatccgatgcctccgatgctgacaatgacgttctcaaatgcgatagctgctggggtacaaatttcaaggcgaccaaaggtcggaacggcaagcagcgcttgatatgcgtgcggtgttctcgccccatcagc

SEQ ID NO: 26695 - DNA, 210 bp, Emericella nidulans
tcctacttccagaagtaccttactcctcgacaaccctccgtcacatccttcctagcatccctcgcccaagcatctcatgacctaataccaccagacgacctggaaccactcgttcaaaagattgcgaacgagttcgtctcagaagcctcagcatctgaggtagcaactgccggtctgaacgccatcagagagatttgcgcgcgacacccc

SEQ ID NO: 26696 - DNA, 243 bp, Emericella nidulans
tttccttacccgtctcaggaagacagcaagaaacgaataaaaaatgctatctcagcctttgatcgcataagaatttcccgctccgataaactatggcagagcttactccctaaggaagagcgtgggaaaggcaagtgtctgtcgcggctggacttgcggacaggccctataaagaaagctttgactcctaggatacaaatttccgacgagactggcaaggagggagagacaacaattcaggag

SEQ ID NO: 26697 - DNA, 279 bp, Emericella nidulans
ccaagcagtaatcttgaccctacgaggaagaatccgtcgctatttgaaccggtgcatgtcagtgcatttgatatcacgggcaagggagttgcgaacccagtggctacgttctggtcctccgctgagatgctctcttggctgggagagaaagatgcagcagataagctgatgggctgtgttgagcgagtctgtgaggctggcatccttacagcggatttgggaggaaacgcgaagacacaggatgtagtggacgccgtatgtgcagagattgaccggctc

SEQ ID NO: 26698 - DNA, 693 bp, Emericella nidulans
tattgtacccaggtccatctcggcttcgtaatcaatcacagtctaaatgctaatgctgtcaactagatatcctccatcgcaaccttaggccagacggacaaatggttaaaagacgtgttcttcaacgctctcgccgcatccagttcttcaacgaagacccggccgcgatattcagtaatcttcccaacagccgaggaaatccggcgctcgctcaagggctacggctatggcgggtccatccacatgaaactgcaaagcgccgcgcagaaaaagcagctccagtatttacggccatatctgtgtcattgggcgggcgacgtatcggggcaggcccccaagcgtctacaggacgccggccgtcgtcgcgcagctccacatataaaaacctacatacgattcgcagaccagcatatgcgaagtattgattgggcgctcgtcacctctgcgaacctctcaacgcaagcgtggggagcagctaacgcggctggcgaagtgcgcgtctgcagttgggagatcggggtgctagtgtggccggagttattgactacagagccgcagggacagagaaagcaccaacagcagtcgaggtcggtggctatggtgccgtgtttcaacaaatataaaccagaccgttcgtctaaggtgggcaatgcagcgccgacggctctgatcggatttcgcatgcggtatgat

SEQ ID NO: 26699 - DNA, 300 bp, Emericella nidulans
gcagaattattgtcaggagcaatcgccggccttgtttcccaaacatcttcatatcctttggaagtggtgcgccggcgaatgcaagtcggcggagtcgttggtgatggccgccgtttgggcatggcggaaacagcgcgaataataatgatggaaagaggatttcgcgggttctttataggcttgacgattggttatcttaagatgatacccatgacggctactggtttttttgtttatgaacggctcaaatggtcactagggatttagacctgctctcttcctcttcgagactgcttcatt

SEQ ID NO: 26700 - DNA, 423 bp, Emericella nidulans
acagccagagcataccttgatttggaccatattccaccgctgaataccaggaaccgcaataacggcttgctaccgcaatttactcaattgcagcgccactcaatgcatgccagtttgccaagggacaacgatcctttttacaatggaacggacactctatacagtttcacatatcacccacagaccacgggaagacgagcgagtagctttcagccacaagaaacaccgtctcagatcgcaaacagtcatccgaggctgccgttgacatccgctatgaaaagtagcgggcaacgaaaaggacacagacgacagaactgtgtacgcatctccattcatccaccaatcactttcggtggacctgcgttctccccaatggttgaagaaccagaagacgccgaagaattgaacaatcgccgttccgag

SEQ ID NO: 26701 - DNA, 1992 bp, Emericella nidulans
agaatgtccaattcctcgtttttggacagaccgctgctcaaagtcagtcggccagtcgccgcatgctcaagatgccgaaccgccaagatcagatgcgacgggaaactcccggcttgttcggcttgcgaaagagcaggaaaagcggatacttgctccagcagcgatgaatttccccgaggaaaagaaagaagctatgttggatctctggaggcttactgtgaacggctcgagaaaagggctgcagaacttcgggaacggaaacgattattgaccggtggtgaaggaggtgtcgttcatgaaaactcgataacctcagcctcgtccgtacctgccactcatgcgcatagccaggaggtgtctaacattgacgatcttgttggagaattcggttatctgtgggtggttctctccctatattgaacgctgttctattgacaccgatctagatctgtcagtgccacctcaagagacttccagggcattacatcaaatacttcctttgccaatttgatattagcggtttcatccggtgaacaaatcccaagatcatccccccggccgatacggtctcggtcggaaaccacccggcttatacaccataattttgaacctttgtacgtccaacttcccttctttctcgaaactagtttttgggcttcagtcgattctgtctaccaaaacggcgcacactttgccaaaccattcgacaattgggctgtgcggatggttttggccatggcttacgggtccttatcaaattcacaactggacgtcaaccatcggaacgctctttctcttgttcaagaagcactacagtataccgaagatgtccttcgccctggaaccctagctgggatccaggcaattcttttcctagcgcagtattctcttatcgacccggtccattttcggacttggtaccttgtaggtatggcggccagagttcttgttgatttgggactgcaccaggatcatcatgcggaatatgtactttcttcagagaaacaggatcttcgacgtcgcgttttccattgtgtttactctctggataggtatcgtctcctcattgtcaccgactcgacttgcaacgacagaagcgctaattgactgatacctagggctactagtaccgctctggatagaactctttcgttctctgatgactccgtgaatgttgcttttccatcctctaaactggagaagacgtatatcttctctcacagttcggagccggcttggaacatggtcaaaatcagacgcatattgtcagcagcttatcagcagaaatactttaccacgaccgatccgtcgttccaatccccgacaccgacctgggtactttactcgcaagcgactgaatggttctataacacgccaaagaacatatcccaggttctcgctattaggtatcacttggagtttttgtatacaataactgtcattttagcgccgtcaacccgccaccttccaccatgtgattacaccaaattacttctcttcaatcgttgtattgattatgtccaccaacttcatcaaattctcgagagtcaaattcgcctgcatgtgatggattcgatcgagattcaacgcgtctatcagaccattcgacgcttattcaacatagtcaaccagagttttgacgtcctcatgagccctgtcccagccgcaccccaggttcccgaagattgccccaaaccaccgtcattggagctggaagattgtctgcattgtcatgaacgtgcccttgagtgtttaaatcaagcgggcaatctcctccaatacggggctcgaaggtggaatcaccatgctctgtcacaggaattccaaaagttgtcggcgcctgtccgcagtatattgttgcccccagctgttacatacgctccgactttgggaagttatatgcctgaagagcctgcaattttgcctcccgcggattttctgtacggcggcctcaacctccagcactccagccccgagaaccacaattatgaa

SEQ ID NO: 26702 - DNA, 971 bp, Emericella nidulans
ttctgcattcagtcacttagggtaccatattttgtatttgtggcttgagctcatgtctggcgccagaacaaggatctagtacagaaaatggctataacaattcctgactatgatgccatcgtgattggcgggggcttcagtggtatcagaatgctctggaagttccagcgactgggtttgacagccagatgcttcgacgccgggtcagaaataggaggtacctggtggtgtaatcgctatcctggatgtcgcactgatagagaggcatgggtatacgccctaaggtttctgccagagctgctggaagaatgggactttacagagcgctatcccagccaggaggaaatccagtggtacctgagacttgtcgttgaccgatacgacctacgcaggaacattaaatttagggccatcgtcgtatcagcgcattacggcgattgtgacaatctctggtcaatcaggacgaaggatgggagtatggccacctcgcgatacttcctccctgctacgggcattacgtctactcccaaggagccatcgttccctgggctgcggcgttcaaaggggagatgcactcaacgtcgacctggccagagcatgaggtcaactctgaaaacaaacgaatcggcgtggtcggcacaggttcgtcaggaatccatgtcatcacgaagcttggccccgatgctgggcagctgacaattttccaacgaacgctaaattatgatattccagcacaaaattatcctcttgacgagcaaaaacagaggaagtcaagaagaattttggcgtgacatcggatattgccaaggtaaatttggcgggccacgccgataagcattcgggaagaactgtctccagtgttcgcgattcagaagagatccgacatgtcttcgaagatggttgggcgcggttgttacaatttccaactcggcacatttgatgattcgttcatggatccagacgccaatgct

SEQ ID NO: 26703 - DNA, 408 bp, Emericella nidulans
ggggctttcttgcacccgtccctacgcaacgacccagcccaccctagtggcacgattctcccgcgacacctgcccgcgttcatgcgtcctgggctctaggacatcggcttgacctaccccccagccaccgttatctacgtgatcaatgggcttagccgccagagcggggatgctcacaacctatactttgccggcgcactgttcagtatcgctcactttggctggggccaaccatgttcgctatccttgcccgcattggagattccaaatcacctggtgtccaattgagacctcactcaaggagtggctgcctagacacccgcccaaacgctgctcgtagatgtccccgcctttctttgcatattggtcgctaccctgatcactgtgaccgagggtctttcttgaagc

SEQ ID NO: 26704 - DNA, 321 bp, Emericella nidulans
ctgctttgcgaccggctgggggcgaatccaataacagactacccgaaaaggataaagtggccttcgcgcgagcgtgccatcaaccgcgttctcattctcccagctcttagcccttgcatttgcatttgcccaagaagaatgaagaacgagtaatactcgaaacatctctccagtcaaccccaagttcgctctctctttcaagggaactggctcctcaaaatgcaccattcccaattagcgccactgcctatcgacctgccatttcgcattgtctcaaagacattcggtcagggcgcttatgcttggtacctttcaattctt

SEQ ID NO: 26705 - DNA, 788 bp, Emericella nidulans
cttcagtgtccatttgccgtcgctccaagttccatcaaaatgactacgtttcacttcagtgaccaacagctagatagtgacctagtgacatcaatttcttcacttcttgactctgtcaatgtcccgaatctgctttggggcaattatttattaaccgtatacggagttccaactgttgttgatgtgagtatgctatcctagtatgactggtcttcgaataccactcacactgacagggtgtgtccttcgtcgtgccagatgcgcttatcgaaatatccttctccaccctcgctgaagctggctttcggccctgctctcgaccttacgcctgcccacattcgaattcgcgccagccgccctataaacaccttcatatcgatgacgagcttgcgatatcgttgtaccggaaatctgatgtgctctgggaatttccagaattcgaggctgccctggaccacgacgatttgaatattatgtgcgcgtctgacgtgaggcttcctccagctaccctagggcgcggtcgagggcgatttccacactttagtttcgtccgaattccgagcgcctcgagatattgtgaggctcttattctgttgctttgttggggttacggaactgcctgcgagacttactggatggcgattttgacgtatatgctagagtacgttgatggaacagatattctcgacgaagaaaatatgagagacggatacaaacagttttaccatgccttaaaggtgggtgatccgacgatgtattcaattctggaggacctccgccgtgatttt

SEQ ID NO: 26706 - DNA, 300 bp, Emericella nidulans
aacactacaagagaggaccgtcaaagtaaccttgcgaagattgaaacaatccttggaagcaagtcactatggacattctgctatcatgatgatcctttcgttcgtcgttcaatgtacatccttattcggactgttgtctccggagaacctgaagaactggattggaaaatggttagcgcagccctactgggaaagtcactacacattacacagataggctctgcctctgacttgtcagaagctttactgcatgtgacgtctgcacgcccccagatatggaccgatgactactctgggaag

SEQ ID NO: 26707 - DNA, 742 bp, Emericella nidulans
tggagggaatgagcttggcttgcgccgagaacgaacctgcccttgagcccgtccaacgtacggagtatagctaaacggagagtatggctgtcgagaaccatgatcaggatcaggaccacgaactctgcacaggcacgcatgatgtgggatggagaatggtggtgcggaattttacgccttcgtacgccacttatgccatatttctgagacagaagtgctaacattggcaggtggttctctgtcatcatgggcaccggtatggtgtctaccctcttgaatacgctgccgtacaatgcgcgctggctgtactggatctctatcgtcatatttgctttgaatgttcttcttttcctcatagcatgtatcatctcattcctccgatatatcctctacccggaaatcttcagggccatgatctcgcacccagtgcagtccatgttcatcggcacactaccaatgggcctagcgactatcgtcaacatgttctgctttgtctgcgtgcctgcgtggggtgaatgggccaccagttttgcctggacgatctggatcatcgatgctgtgatctcggtggtatctgcattatcgctaccattcttgctgtatgatcaacgccaacaagtagcgggcatggctaatctattccaggatgtccgggaccgacgagatccagctctcctccatgactgccgtctggctcgtccctatcgtcggctgcgtggtcacggcctcctcgggagctgtg

SEQ ID NO: 26708 - DNA, 653 bp, Emericella nidulans
tacagcaccggtgtcatatcgtccacgctcgtatctatcgactctgatctctcgaaccgcccccttacaactttggataagagtttaattacgtcgtgcacaagtctctttgctctcatcgcaagccccgctggcgggcattttggcagatagacttggtcggaaaagggttattcttgtcgcggacgtcctctttactgtagggtcattcatacaagctgctaccggtgaagtatggggtatgatcattgggagaagtattgttggctttgcggtcggcagtgctagcctggttacacctttgtaagtgcagtgtcataaatcattacacagctaacatcgtcaacaggtatatatcggagctggcaccttcagatgcgcgagggagattggtcactatactgagtctttttatcactggtggtcaggttgtagcatacatcatcggctggctattctcctacgttggtggtgggtggcgctggatggttggcttgggaatgcttccggcagtgttccaactcattattgttgtggctttgcccaagacaccccgatggctggtacaagcaggttacgaggacaaggctcagaggattctgtcagaggttcatcaggacgaccagaccgcgaaacaaacactgcgggatctt

SEQ ID NO: 26709 - DNA, 561 bp, Emericella nidulans
gatgactcattcagatatacctccggccgatggctgattaatgaagagcatcaacttaagcagcgttatgtgaagtttgatattgataatatttgtccttaagccacctccctctttggccctgaaacaacgtgtgtccgcattatcaaactggaaggaaacttcaacaaggctttcttaattacaatgagtgacgggaatgaggttatagcgaagattccttgcgcaaatgatgggttgcggtttttgacgacggctttctgaagtagcgacgttgaagttttgtgcgtcctcaactcccatctgttcacagcatgtctaatatcctgactgtctagtacggccccatttatcgggttcgagttccggaagtgtatgcctggagttcctacaaatccagtcggcgcagaatatattatcatggagaaggcctgcggtaccgagctcgcagaaaggtgggggacaatgaacgctctggaacgctataaaataattgacggaatcgtgaagacagagacggagcttgagggcatgaaattaccagcgtttggaagcctcttt

SEQ ID NO: 26710 - DNA, 318 bp, Emericella nidulans
atgcctgaactggccgaaatctaccgcatcgtgcacttcatccggcagcatctagttggcaagaccctagcaaaggtgtccacgcaacacgatgacattgtctacggcaaggttggcacgagcgccgccgaattccaaaaggcgatggaaggcaagaaagtgataggcacgggtcagcaggggaaatacttctggatcaccatgacctcgccaccccatgtcgtaatgcatttcggcatggcaggttggctaaagattcgcgacgcggacacatactattaccgcacggataagccggaggatcagcagtggccgcca

SEQ ID NO: 26711 - DNA, 357 bp, Emericella nidulans
gcttccctcggaaagaacctcgcagaataaggatctaacctctcatccacaacccgctcgcggtccctcgcagactctgtctgccgcagtaacaaatccgggtcatccgggtcagggctcgtcgcaacaccggcgcagtaggtgagcacatctgagcgagtctgccatgacggaaacagaactttatccttgaagtcttgacatgcggcgggctctattgttcgcgtggcttttgagtctgtctgccggatcgcggtggaggagggatcaaacccggcacgggcgggcgttaccaaggcattgagattttgggttatagagtcatcgattgtggagcgggagaggctcagaaagtct

SEQ ID NO: 26712 - DNA, 861 bp, Emericella nidulans
aaatcagaaaagcccatggagcccttccaagtacgcctgaactgcgtggatcattatcaggcaaatccatcagaattcgatcctcctctaccttaccgtgacggtaataatgagaaaggctacatgcctaaggttcccgtcattaggatattcggtactacagaaactggccaaaagatatgtgtccatgtccatggcgcctttccttatctctacgttcagtatgacggggatctgagccccgattcaggttcgtcatagcttgttcctttgtttttctttcttcaactaatgtctttgctagtgcgctctgcagcaaggagtctacacctgtccatagaccatgcgcttgcagtcagctatcgccgcaatgcacacgacaagaagacagtttttgttgcgcatatcaccttagtaaagggtgtccctttctacggctatcatgtcggataccgattttttttcaagatatacttactgaatcccatatatattacaaggttagcggatctgctgcttcaaggagctgttatgaaacgccctattcaaccatacgagagccacctacagtatgtcccacaatggatgtgcgattacaatctgtttggctgcgcgttcatgaagtgtggcaaggccaaattccgttctcctataccggagtatttggatctccctgatctgtcccatcgctggcatgaccgatcaattccacctggctggatcttagatgagagtgtcctacccaaacagagccattgtcctctggaagccgacgtttgcgttcaagatattctaaacaggctagaaattagcgagcgttcaattcaccatgactttagggagtttttaaatcccctgaca

SEQ ID NO: 26713 - DNA, 524 bp, Emericella nidulans
ctcatccacccgctcttcctctcccgcctctcaaagctcaacatacccaatgcgcacttcacctccccgctgtccagctactggattaactccatccggcatgccggactagaaacagtcacgattcaaggctttgcatgcaaaacaatgggcctgtcgttcgattatcaccgaacgaactgagtgtcaactctctccatggactacgggtgatctatactggagcgttcgagaaacacgctctgtacagagacctgtttctcaacttccatacggagaatctggttgggatgctgggtaataaagagcatgcgcggcagaagagaatgcttagtcgggtttattcaaagtcgtatttacaggaaagcgaggatatgagagtgatctcggcggtgattctatcgactcgactcctaccaatcctgcagcggatcgcggaaaatggagagactgtgaatgtcctgccgctgttccaggctgttggcatggatttcacttcggcttacttgctcggcgtgcagaat

SEQ ID NO: 26714 - DNA, 252 bp, Emericella nidulans
gcgcatcctgaagagtggctcattgaatgtttcccaattcctggacttcctgatatatccggacagagttcaaccggcgttggtggtttccttatcatggtacatggaaagttcgaagaggataattcagggaaagtagaaactcgaagcttcgatcgaacctttattatcgggccgggagcaggtgtaggaggaattagggttatcagcgatgtgctatgtttgcgcgcatatggcggcaatgaagcatgg

SEQ ID NO: 26715 - DNA, 414 bp, Emericella nidulans
tctttagccctgatggactctataaaagcggatcacggcttcaacatggacagtcgcagcgtgcgcaacttgctacagacgatgagtgaactagacacgcaacaacggcgtgacttccttcaatttgttactgggagccccaaactgcctattggaggtaagcttagacacgaagcacgcagttatctgaggactccatttactaaccatgctctaggcttcaagagtcttacgccgatcttcaccgtcgtctgtcgcccgagcgagccgccctacctgcccgacgattaccttcccagtgtcatgacttgtgtaaactacttgaagttacccgactacagcagtctggacgtcctccgggagcgtctatctgtggcgatcaaggaaggacaaggcgcattccacctttcgtaa

SEQ ID NO: 26716 - DNA, 251 bp, Emericella nidulans
gcatggatgtctttccgcaatgtcatgcacttccgccgaactggcactctaccagatgcttctccgaccccacttttgcagcgcagagcaaggccgcgttctcttcgaaccctgcccaagacttcgacgaagaggacgacttccgctcgcgagccggaatggggtcatccgtccgagatcgtgatgaagactatgcgctgcttcaccaaagcgaggttgacgatcttggaaaccccggcggccgcggcgcc

SEQ ID NO: 26717 - DNA, 665 bp, Emericella nidulans
gatcgatcttccccgcatttgatgctattcaccgccgatatcccatgctaaccggcgatgccttctgatagaaactagccacgcttcttcatcttccggcctcaagcaaactgctcgcagcccgaattcgacttttaagacttaccgttccggccgatatctacagtagcggaataatctgcgaggccagcggaattgacgtgcacctgcatttcccttccgaaaaagaagcatctgctgcgaggaccagcctgttcgaaagccatgagttcggacatgaatcaatcatccccaatccagcagaccttgccgaatcattcctccaggccgagccgaaggaggagaaagaggaactacaagcagcattatcgtcgcgatcagaaatcctgcaccgtacctcctcgtccataagtgatgatgaggaagaactgggccttggagatgaaacggtctcgttacctagttttgttgctgcatttctaaagggtgttgcagatcgcttgcaggtccatgtcgacgaagtttcaatacggcttgacgtggaaatgaaacaggatggcccgtctaagcggcaacctgaagagaaacccgatttgatttcaggacttctgatcattcgccaaatcagtgtgggcgcagtggtcacggcctccagctcggatgaa

SEQ ID NO: 26718 - DNA, 852 bp, Emericella nidulans
gagaatcgggttgcaacgtacggagatgcaatttgcgaaacatttgaacttggattagatgattctaaatcaattctaatggaatgccacaagagtcttgcgaccgagcctgttgacattctactagcatcacttctgcacgcttttggccaaactttcagagaccgctctttgccagcgatttataatgaagggcatggaagggaagcctgggattcatcaatcgacatatcccgtacagtcggttggtttactactgtttttccaattttcatacgggaacaaataccggatgatcctgttgagacagtcgtgctcgtcaaggacatccgcaggagtgtctcagataatgggaggcaacgatttgcaagcctcatgtcagcttcaacaaaagacgagaaaagagaattcctatgtccaatggaaatctcattcaactacgtcggccagcatcgtgatctgcaaagacaagacggtttgttccagctcatgaaccaaatggctggcgagactggtcaaggcggaggcgcatcagacttcggtaaggagactcctcgatttggactgttcgaaatatcagcccttgctgtgaacggaaggttgcgcttcatattctctttcagcaaatatatgagacaccaaaagagaatccgggcttggatcgccagttgcggtgatgtgctcagatctcttgggaagcgtctccaaacacatgctaagaggccaacactgagtgatttcccgatgctatccttaacgtaccctgatattgaaagcatgctagcaaagacgttgccgagtcttggtgtcagttccccagagctcattgaggacatttatccctgctctcgc

SEQ ID NO: 26719 - DNA, 489 bp, Emericella nidulans
tcacccgcaaccatgacggacaccggtcccatcttcactgcggtttctagcaacgcaaatcaactatacactttattacattgcatcagctttgctcagaacgccacggtacagataacgccggatggaatccgcttttccgtggaggagggccgagttgtacaagggcttgcgttcctggacaaagctctcttcaccacatataccttccacccgcccactggcgtcaataacgaacatgacaccttcatggacacagaaccagacggagccaattacccttgcttcgtcgtctcactctcagctctactggagactttaaaaatctttggcataggcgactcttcatccgccagcaccagccgagcagccagcgtccagcctccgaccgcctcagcctccaatgcattcacagccccagctctactcctcaaccgctcatgcaccttccaatatctaaccgacggctcccccctaaccggtcaccct

SEQ ID NO: 26720 - DNA, 559 bp, Emericella nidulans
ttgcaccagtcgctgctgatgctggatgggaatctacaaggatggtttatgaagtctttgcatccaaaaccgtagacattgtcggcaagccagttcatttcgcaattctggtctacaggggtccatctcttgcgcgcgcatgctattgagcgatcgcagacccgaggctcttacaatgtgttggtcgacgctaaagccacggacggaagataacgtgacaaagttgaatatcagcaaggagcagatacaactgatttttaatcagcacccgctcgtcaaacgggtgtatgatgagaacgtaccgaagctgagtgaatcgcagttctggtcgcggtttttccagagcagactatttaagaaactgcggggagaacgtatatctgaggcagatgcgacggatgctatattggataaatatctcaaagccgacgagtctgggaatctgccgcgcgacatacacatgccgcacttccttgacttagaaggaaacgaagtgaatcgcagtcaacgccggggtaatagaccaaaaatagacatgcggccgtccgcggtggagaag

SEQ ID NO: 26721 - DNA, 309 bp, Emericella nidulans
gatactttcgctgattttcccgagccatctcagctagccaagcattctttcaaacgatcactcctggatgcggcaccattaaaagagcggacaaagaagcccaagggggaagaggtcaccaccgtgcaactgccagagccccacgaattgccgccgatcgaagatgatggcacaaaaccgccatacagctatgcaacgcttattggaatgtctatactacgcgcccctaatagaagattgaccccggcgcaaatctacagatggatatcagatacgttctcatattacaagaacagtgatccaggctgg

SEQ ID NO: 26722 - DNA, 213 bp, Emericella nidulans
tcagccaagacttccatagtgaaggtttcaacgccactttgatatctagccaggagcccttcaacgccagaacagtctccgaccaagccaatatatggcgtggctttgccaggtattagtaggggtgagggtacgccggcgcaaaaaagaaaattttaataacaggtccgttcgacccagggcccccatgacaaaaaccgcaatttggaccct

SEQ ID NO: 26723 - DNA, 216 bp, Emericella nidulans
ctccggtacgtctctcccttagctcgtaggccgtctcgtccgcttttttggtcagagaaaatgaccaggaacctggactccatcccctacgatgtcttctatcaagtggcctccaagcttgattgtcatgacttcatccatctcagcagagtcaatcgcgcactccatgagttgacaaatagcgactctattgctcggaacacagttagagtatgc

SEQ ID NO: 26724 - DNA, 348 bp, Emericella nidulans
ccagtccacgaacggtctctggagcctggattcattggagaagcatcgtgcgctgctttcagcaaccgactcctatcatgcctcgacgatacatacaccccatctacgacgggcttatccaactaccatcgcctgaatacgcgggagcgagtgccaatgcaccaaggtgcagagttacctcaacgcatgcctgttaaggcttattgctggaatgtcgcctcgacggtttattgggaactaccacccgcttttccttgaagtcacatttatgaaggaaatcgatgcagtctatagaagagaactgatcccatcaatgttatggctgtgcaaaatttacccactcatggc

SEQ ID NO: 26725 - DNA, 354 bp, Emericella nidulans
tcccctcctccccgcaatcagctatcactttaataagacactatggctccgtctctatgcttcaaatgccagaaagaaagggccgtcattatccgtcccaaaaaccggcacaagctctgccgtgaatgtttcctagaggtattcgaaaccgaagtccacgaaacgatcacgtcaaactccctcttccaccccggcgagcgcatcgccatcggcgcaagtggcggaaaagacagcactgtgctggcttcggtgctcaaaactctgaacgagcgatatgagtacggattagatctttgtcttctctccatagacgaaggaattcggggttaccgcgatgacagccttgagaccgtc

SEQ ID NO: 26726 - DNA, 228 bp, Emericella nidulans
ttagctgatgctattctcgcgaactcgatcacacctttccttcagagtttagcgagtccctcggatgcgtcgaaagactttaacaattcatttattggcataacgatcgaacgcttcatattatacccacctcgcaatttcaccgacgacgttaagtctaaactgttatatgctgccagacttcgacaccaggcactggtggtggacatgccatttgaagtggcaacc

SEQ ID NO: 26727 - DNA, 753 bp, Emericella nidulans
cttgttcagtttagcaccggtcataaccatgagcgcagaaagacctcaggatcgtcctcaacaacagcttcacaccagtcgagcggatcgttccagcctgcttctgctgatcaaactcgcgtggcaaacagcaataaatttggctctgcctcatcgtcgcccatcaaacccaaccgggttggaacacattctcctgataaatcaggtccaggtccacaccgtcatgggagtgctccgtcaacaaggacacggtcacaaactattggttcacaggatggcgagctctcttcatccctagccagagaaacctacgtccctggtcaccacaaacgccgaagccaattgtttgacgtctcgccttcttcatcagacaatgaggatcctcgagcgaaagctttactaaaagtgcaacgacgccgccagagctcaaggcgactttcgcagatcaattttgctgatggtccgttcttcaggcccttggacatcctcatttgtgaggatcatccaatctcgcgcttagtcatggagcgtctttttgagaaacttcgttgccgcactatcacagttgccaatggggcagaagcagtacgctatgcgctcagcgaggttcaattcgatatcatcatgacagagtttaagctcccgcaagttaacggggccgacgtagcgcggatggtcagagaaacccgtagtgccaatcgacatacgccaatcatcgcggttaccagttatctcaaagatctcccagaaaca

SEQ ID NO: 26728 - DNA, 312 bp, Emericella nidulans
  unsure (1)..(312): unsure at all n locations
ttgttgcacaaggatatattcaactggaaattatacgatgcgataagctccatgaaggacgattgggacaatatctcctcagatcaacaaccacggaatatcagtgattcaccaactaccagtgaagaatgtaaacaaagatgctctctgatcacagactgtcttcaattttcgttctcgcatgaagggtgccggacctctaaaaaagttgtcgggggtgttcctcggccaggatttcattctggctgggtggccacgcgaataaaggcgctcataaaaaatgcagggagatgttcaaaggacnagtacatc

SEQ ID NO: 26729 - DNA, 800 bp, Emericella nidulans
gtcgagggaagctttcatagcagtgaaccagactcctctatctggtcaagtatgatgcagagattcgaaggggttaagcagtccgtcggttcacctgaatggatagagctcgaccagctcaagaactacataattcccgattggacgaaatttctcccagaaacagtgcagaaattacaacgagaactttctatggccccgggttctctggcggacgaaatctggagagaggctcacgttcccgacctgcatccgaaatactccgaaaggcctcggtccgcgttgggaatagcctctgcgatgatgagctggagttcaggcgcaagcggaagaagcatgcggtgcatgcgctgtcggcctacttgaatatccttgagtaggacatacatccagatgatgttcccatcatctctatgtacggctccggagtcggcctgcgcgcgcttgtcgctggtactggctcgtatctggccacacaagaggctggcctctgggactgtgtgacttacactgctggtgttagtggcagttgctggcttcaggtcctctatcattcttccattaccgggtgcaattttactagactcgtggctcacctgaagaacaggctaggggtccatatggcatttccgccggctgcacttaaattgctcacgcatgctccaaccaataagtacctcctcagtggtctggtccagaagctgaaaggtgatcctggtgcggactttggtctggtcgacatttacggcatgctgttagcagcaagattgcttgtacccaagggggagctaggagcctcc

SEQ ID NO: 26730 - DNA, 438 bp, Emericella nidulans
ctgtgcttatcagccgagtgcatctataaacggcgatggctccctcgacctgcctcaatcgttggcaaatcttcgcggcctacctccgatactctcacagcagccaacggaatcgcccccgttccaaatcaatctgcacggtcaacagacgatgatgcgaagctgatcttcggtactgtatttgcgcttcggaatatggtgcgaaagctgggaggagaggacgacaagtgagttctgtggttggtattcttgaaggcagccagacgttgacaaatttttgattttagcttcgtgacataccgcaccagccagtataaactgcactattacgagactctaacgaacatcaaattcgtgatgatcacagacgtcaaaagcccaagtatgcgcgttgctttgcagcagatttatatcaatctctacgtggaatatggtacg

SEQ ID NO: 26731 - DNA, 288 bp, Emericella nidulans
tccagggtcaaccaaaatgccacgggagacattcccccgcaactcacccagttttgctccgtctacgcgagtgcctccgatggctcttcccacaatatttacatatacggcggatatgacggccttggcgcccttaaccagccctcagacgatgtctatgtcctttctgtcccgtcctttgagtggatccagctctacgacggaaatggaaccgctaacgggcgcaaggaacacaaatgcgtcaagccgtatccagacaagatgctggtccttggaggcattcatata

SEQ ID NO: 26732 - DNA, 327 bp, Emericella nidulans
gtcgaggtagcggacacgctatcagagggagatgagccgattgaaccaccagaaattactttggacattgcgcgccatgttgttctttcggatgttccacgcgttacaacgcatttaccgactcgtttcgtctccgggcgtatctcagcttctgatcctctaccaccttacgaatcggaagcattccgacagcagtcggatcccacgccgtcctatctgtctcgagttcccgaggccgagaggcctggctggattcgtaaccttatggagcagctgaaccacggcgtgatccccattcctcgatttcgggccggtgatgaagaggac

SEQ ID NO: 26733 - DNA, 611 bp, Emericella nidulans
caaagtcttttgatacctgaagctacagattggagactcgggagtacctgggcatcaattaatgtgcagaataatgcacctgaatgggttgaggttctctcgatttactcttcaaatgttggcatttcaacttgctcgccctgagtggaaaatactgacaaactacttagttctccttagaaatggagactcctctgcgccttgcaccacatcagacccgtccactagctttccgatttgctactggcaatccatcggcttttgctgtcccaattgagatccgctacagagctttccaacatgcaacaatgtggaatcagactttcatggtaaaatttgctaataggtctatatctgaacctcagagaattacgtatatgcacccagcaggcatcgtctcttatgccattcttcgtccgcctcccttgcatccttcttgtgctctcaatcaaaccaacacttttttgcctttgataataggtcttcacggagcaggccttgaggcggatgatgtacaagtgcgcaggatgatggatgccgcgtacggcatctgcgcgtggatgctatttccaagcggtgttacttcttggagcggacatgactggcgtgag

SEQ ID NO: 26734 - DNA, 669 bp, Emericella nidulans
gcagacgagcttcccgcgctgaagaatggctcgacgtgggttagccggttccggaacatcgtcgactacctacggcaatactcaaatggcgcctgggatctggaccgagatctgagcgctcttgaaaaagccgatagcgttgcgtataatctcccttgaggtacctggaagcgagaaaggtcacacgactgacgatcaggcaacagcttctcctccttcgtggaatcccacgcccaagccctcctcgacctctccctctacgttaccagccaaaactactacaacagcacctccccggcgtatggtgcgattctccagtggccgaaccaatggatcctacccccgcagctgcacgccacggccaaagctcgaactgagccgctcggactgtcttcattagacttggaagcaacagaggaacaacggaaacgagatcactcggccgccgtggcagctggtcgcatccctcagaacctcatttctcggccccgtgaaacggttaccaacctgctaggaaagacgccacagcagcatcaattccggctggaagctttgaccggggagttatttgtgccgctggaggaactgcttgatgacaagacacatctcttggggacgacgccatcaagcttagattgcctctcagtaggctatctgagccttgccctt

SEQ ID NO: 26735 - DNA, 394 bp, Emericella nidulans
ctgatggagctgccaacagagctacacttgcacatctcatcgtacctttcatatccagatgcactggctctgaaacatacctgccgccatttctactcgctggtgtacacaggcgtccatctgaaagtcaattggctggtggagcgcttcgaacacaaactggaatgtcctatggagaagtgctctttccgaacagacgaagccttctgtaactggcggatccgaaagatcatggagcgcaggcgccggcatctagaatgcccccggtctcaaggtgggatgtctagtcattgaaggtagaacctgtcagatggatttggttccgacgtggctgaagaggcaggggagggtaaagatgctcaagcggctgggaaccaaggtcggttctgttcca

SEQ ID NO: 26736 - DNA, 204 bp, Emericella nidulans
atgctcccctccacgttcgcgccgacgctgtcccgcagagacacaaataaatccatagggcatgaagccggagccggatctatccctcctccattgataagtggtgggggatctctcggtccgcagagtgcggcggcgatctaccagcatattcaggacatggctacgaagcgaatatctacactcgactacctcagaaaagcg

SEQ ID NO: 26737 - DNA, 327 bp, Emericella nidulans
acttgtctactttcaatttttaatgcatttttacctaattcaaatgcaaaacctaatgttaatactagaaaaaatactaacattattactaaaccatatatcccatttgtatatgcacttaccacatacggatatactaataatatttctaaatcaaatagtagaaataataaggcaaatataaagaaagatatgctaaattgtgttctattttgtcctaaaaaggaatgaaaaccacattcaaatgcactatctttctcttgatatggatatgaggtggaaaatattaaattaacagctagcaagattattgctaatactggtatt

SEQ ID NO: 26738 - DNA, 300 bp, Emericella nidulans
tgccgggaggggcaagctcgaactgtaccaaatatacatagaccaagcgacgcaatgatacttgatgacacggacaccactctgtatattcataacctagagcaggaactggccgaaaccgaaattcttgatggtgccttcacaatcctaccaggaatagaggataggctgtccttgacaaacatactggtggcaaatgatagcaagcgcccgtgcactgatgtggtgctctacagagaaccggaatcgctttctattcccaaggataaggatcaggtgcgacgagctttgatagaaaca

SEQ ID NO: 26739 - DNA, 468 bp, Emericella nidulans
gctgacattgcgcgccgcggcaaaaagcttcacgctgaaggggcagacatcctagttgaccgacacaatacttcccgcgctgtcgagattatccgcggtgtgacaggaggtaaacttcggtacgccattgatattgtcgggaaagaaacggccacattgctacaatcaacactggacccgagcattagcgaaaatagatcccacgcgcatctactcgggctgacgggtctaccgcctggtagtgaccgcgatgagcggatcagataccacactgtcccaatcaagctcttccattctagtcctgaagtaggcgagtcgatggtttcctggctcgagagactgatcgagtccgggacgctggaattgcctgagatcattagggcagaggggggtctagagggggtcaatgaggcgctggagatgctcaaacggggagatgcgagtgggaagaggatcgtgatgagttta

SEQ ID NO: 26740 - DNA, 264 bp, Emericella nidulans
tttctcccctctctcgctatctcttccccgtactccgctcacacccctcgtccgactccgctccccattatggacctcgaacgacacgagttcagctccgatcagtccatacgccgaagaagaaacttcgctcggaagcggctacggaacaaaacggcactctctgcgcgtctctcgctagatcaccgtttgcgcggcagtgttggcgtcgtctcagacgatctggccaacgacctcttccagcccccagatccaactggtgag

SEQ ID NO: 26741 - DNA, 741 bp, Emericella nidulans
  unsure (1)..(741): unsure at all n locations
ccaaacatgaccgagaacgcgtccatgaatggcgctgcgacaccactttcctcgaggttgagcaatttggctctgacggaatactctgctattccgactcctacttcggagaaggaagaatacaaaggacccgacagtccacccgcgtgggatatccctgatgctttcttacttcccaatggctacccggatgtgcgacatgtccctgctgcctacccaaatcgttctaccgctaacaatcgttatctgcagtatcttaaactgattttgacttcccgcgtctacgagatcactaccgagtcccctctccaccatgcagtcaatctcagtaaccgaatggaatgtcgagtgcttctcaagcgggaagacctgctacctgtattcagcttcaaactccgcggagcatacaacaagatggctcatttgaccgacgagcagcgatggaaaggcgtgattgcttgctcagcaggtaagcaactcaaacaagcggggctctacagatcaggctctgatacatctatactgtataggcaatcatgctcagggtgtcgcgtactctgcncgcaagctcaaaattcccgctaccattgtcatgcctccggcaccccagcgatcaaacacttgaatgtcgctcgccttggcggtagtgttgtccttcatggaaacgatttcgacgctgccaaagaagaagctcaccgccgggaaaagcagcacggtcttacaagcattccccccttcgat

SEQ ID NO: 26742 - DNA, 663 bp, Emericella nidulans
gcaaaattatcgccttcaattgttaggagccttctgaggtccgaactcttctttgcgccagtattgacatcatctatcaatgtcaagcttccgatacgagactgtatgagcatggtccggccaacaaggaaaattcccacatcggcggtatgaagactgagtgtagcaagtctgacaccatcattattcaggattaaagcaatactcttcaagtcggctttgatgcggatcttcccctcttgctgcggttgttgttcggcagactcggtatcctcaatagtgagtgctgcctgagtatcttgattcggttgctgtgggtttgtaaatgtgagaaggatgaagtccaacagtgttaggagcgtttttctcgtgacaacaaggttgatggttgatacagagatatcaaggttcatcgccactccctcatacgttgagtggaattctggagactcaggcttcactcgaacaaatctcaaatagaacaggtccttgttctcatccgcatcgaaacccgtggatgagatgatctttttaaattcaggaaccgggttcgcctctatgtagtcatccacactgagagacttaagaatcacttcggctaccatgtcaaaaggtcgcatatagaagtctaatgcaaagccctcagcaacaagctcaaccaac

SEQ ID NO: 26743 - DNA, 819 bp, Emericella nidulans
agcacgacttttgagaccactcaatcagaacctgtatcaggcacgaaacatacaaccttactatccccaccaccagccttaccttttcaagaactgccattgctacactcaggcggtgcaaggccacggcctagaaggcccagacacaaaccagattggacaaagtggctgaggataatgggatgcaaatacagcatctctattataaagagaaacctcacgggatccatatctgaatatgggcctgacaagctcttgactacgtggctcttttttgctatagccagtccacttgctatggctcagcttcaagaaattttaggctcgatgcaataaaataacaatatcctccctattccaaaactggattttgttgataatatgttgaatgccctttgcatattacagggttctagtttaattgcttctatttgaacaaggctacacctaattgatcttgttgagttgtataagcaaaaaaggatgcaataccagcaagacagccagcaagcatttactgatcctgagactatagtatatattacttctaagaggttcttgctgctagaacaggatgatccagaattcaggcactaatataaaatcctacaatgtaaactatataatagcaggaactggcatatacttgccctagagtttggtaaatcaatagtctattttcttccaagcagaggagagtttgagatctcaaatactatgtatgtatatcccccaaagatccttctataaagagctgacccctttactagtgtccaacaagtactagaatgccactttgacaattttctggaagtcctg

SEQ ID NO: 26744 - DNA, 228 bp, Emericella nidulans
tacaataaatctacaatcactaatttgtgctgctgtaagattaccaaagccggagttccgtctgaccgcgtggttgtgggagttgccagctacggccgctccttcgccatggccgaggttggttgctacggccctgagtgcctgtacacgggctcacgcgccaactccgacgctaccaaaggaccatgcacgggtacaacaggctatctggctaacgccgagattaac

SEQ ID NO: 26745 - DNA, 354 bp, Emericella nidulans
tagctggacgagtcggtcttcagtcagtatatcaaccgcgcaagatggtacgggtatgatgtacacgaaagtattcgaattgacgacaagatgctcgaaactggagtcgagtatattatcccaccacccaccgggattggccctggctcgtgtatcggatttctcgatggtactgagcttcgaagcctgctaaaggcgaaaaaaaaaatgccacagccacacccacccagttcccgatatggacggcgccattccagcgaggagatcgaactaattaagcttagctttcgagggcgaggaaagtggactgaggaccggcagcatggaggggatctgatacttcatttcgtgtat

SEQ ID NO: 26746 - DNA, 972 bp, Emericella nidulans
ttatcaaccggcgtggtgtcgatctttaccttcttattatttctatctggatatgcgcttcagcagcaatctgttcgaaccatccagcatgtcattcgacctccggagcatccaaaagtatacaaacgaagtcaagaccctcagtctaatttcgacctcggggcagaactagaagaaacgcctcaagtgcagactaagataacacctggagcggaaggcaactatgcctacctgcaactcctgtccgatcctgatccctccaacatctgctccgccatcctattcttcaaacaactgtctacgaatgaaagcgcgatccacgaccgcctcttcatgtacccatcatattgggataccatgactctttccaaaccagtttcagtagctctatctcttctcagagccgccagtctcaaatacgacatatggctcttacctatagacatgtcggctgctacatcggctggctacacggcgacagatacaaaactacttcgcttaggccagatccagttcatgcagtatgacggcgtgctctaccttcagacacctggactacttctcgactcagccaagttggactccatgcttctctctcgtcctcttcctctacggcatgacaagagcagggtcgaatcatacaacaatgaggcgtggatccctatgcctctgcgcgcggagcgagacgcaaatcttcctcccgtgtaccttgttaccgtgaacagtatcgagaatggcaacattgaagcccgcggtcacatccccaatctggcattggaaggattcgggcggattgtcactggaccttggggcgttttggctgagtcggatactagccctgaccctgcgaagcagcctgggtatgtatggtttgaacgagataacgaaggtaacgcgaaatgggaaaagaatccattgtttggctcctggagagcacaacaacatgagatatgcgaggggctggactttgat

SEQ ID NO: 26747 - DNA, 348 bp, Emericella nidulans
tactcctccttgacaccacccctccagttcttctcggcgttctggagggaggccttgtcggtcttgggctggccctggctgagaaagctgttggcagccttaaagggacgctggaggtcaccagtcgctggcttcccgaagacgtggatcttaaccagattcgattcgaaagcgcccttcagcgggatgatcgactggatcagaagagggttggtgtacttgaagtacagatgcatgacggccatcatgccaacgcccatgaactggctcttaatgagctggcggaactggcccttatcgtactccatgttggtagttgtgacaggacgaggctcctcgccgcttcca

SEQ ID NO: 26748 - DNA, 306 bp, Emericella nidulans
aaaaaaattgaagttagattaaattttcaaattgatcaaaaaaaagaatatattttactattaattaaagaatttttaggtggtaatattggctatagaaaaagtcaagatacatattactatggatctactagttttggttcagctaaaaatgttattaattattttgattactttcatttattatctagtaaacatgttaactatttaaaatgaagaaaagcatatttaataattcaaaataaagaccatttaaacaatgatggacttgaaaaaattataaaattaaaaagtacaatgaacaga

SEQ ID NO: 26749 - DNA, 835 bp, Emericella nidulans
ttatattttaattataccaggttttggtataattagtacagttattgctgctggatcaggaaaaaatgtattcggatatttaggtatggtttatgccatgatgtctattggtgtgttaggtttcttagtttgaagtcaccacatgtatactgttggtttagacgttgatacaagagcatatttcacagctgctactttaattattgctgttcctactggaattaaaatatttagttgattagctacatgttatggtggttcattacatttaacacctactatgttatttgcattaggttttgtagttctattcactattggaggatcaagtggtgtagttttagctaatgcatctattgatgtagcattccatgatacatattacgttgtagctcattgccactacgtattatctatgggagctgtatttgctttatttagtggatgatatttctgaatacctacattattagggttatcttatgatcaatttgcagctaaagtccactggtgaatcttgtttattggtgttaatttaactttcttcctttttcatttcttaggtctacaaggaatgcctaggggaataattgattatcctgatgctttctatggttgaaacttactaagtagtataggttcaattattagtgttgtagcaacatgatacttcttaacaattatatacaaacaattaacagaaggtaaagcagtttcaagatatccttgattaacacctcaattattcagtgatacattccaagtgttattcactagaaataatagttcattagaatgatgtttaacaagtccacctaaacctcatgcttttgct

SEQ ID NO: 26750 - DNA, 509 bp, Emericella nidulans
cctttgatatagcagcctttgagaaagcaagctctggtccatggcgacagttcatcacctgtagccgtcagggcgtccaactcctctttgaagtctttgggaagacgtgccgcagccagacccggctcattcagcgtgtagtgaacccatcctaagcaaacctgcgcctggaatatctcctgtttcgacccatctgccttgtcaatcgtggaaaggagcgatggtattaattctgataaatcggtaggggacgaggacggagggcttgcggttgacggagttttgtggaagtgagagacgatctgatactctgctctagctacatcaaggaagcctatcctcgccagcgttagaatgcgaactcggccaaaagggatgacaggtatttacaagtcttgtgaggtgcatgtttgttgaccttccggattaattcaggaacctcatcccatttattttgacttcgagcattatccagggcaaccacatagcgatggcccttttcagactct

SEQ ID NO: 26751 - DNA, 387 bp, Emericella nidulans
ttgttgttcaaacagaaatctgaccctgcctctactaagaccatggccgtcatcaccttgacgcggatcttccatcttacgtaccaatatcctacccttgttcgcgaaataacgacgccatcgcttcccggattcattacaactaccttaaacctcatctctgtcaagccgacatctgagcctacccgaagcttgaaacccaataccccattcttggaggttgttcttcgctcctatgcggaactcattgcccggcaccctaccatcttccgcccgttcactgcacagatccacagtctgcttcaaaccatagttggctcaacctcagcattatattcccggtcagtggtagatgtcgcggagcaactctttattgctcttcaccat

SEQ ID NO: 26752 - DNA, 258 bp, Emericella nidulans
acaccgccggctcagaaactacctgcgttgtatgtagtcgactcgattgtgaagaatgtaggcactccctacactctgttcctcgggaggaacatgtatcagactttcatgaacgcatacacgctggtcgactcacaaacccgcaggaagctggacgagatgctgaagacttggaaagaaccagttccagggtctttggatacgaggccggtttttccgccggatatcactcgcagcatcgaaaacgctttgattaaa

SEQ ID NO: 26753 - DNA, 312 bp, Emericella nidulans
gaaaacggattggttacgcaatctcggttcatcctcttggattctcccctggtgtttttcacagccctcactgcactgtctttcacttgctttaccaatcagcaggaattggggccatcacacgccttccgcgggccctggtggttttggctggttgccactggattcagtttgggtgccactttgagtgtcaagtgggttggtctgtttacagtcgcctgggtgggttctttgactattcttcaattgtgggtggtgcttggtgatacaaataatgttactcccgtatgtcagcctttatccctgggactt

SEQ ID NO: 26754 - DNA, 255 bp, Emericella nidulans
agtcctgtagttgtaattatgcctacaggtaatagcaagagtatgctgttcatattgcctgtatatacagccccagggggatgcatgatcatggtagtacccctgctattgctgtgcgcagacctgatgatatactatcaggccctgggcatcttgtatatattatgggagagccgccagccccctgataaggcagtgattgtgcttataatacctgagtcaaccaagaacctggatttctatatattcctaaac

SEQ ID NO: 26755 - DNA, 423 bp, Emericella nidulans
gtgaccctcaaacccgtcaaaaaggcgtctcaacgcgctgttctcgaacccggattctccccactcgactgggcagccctaacctcaaacccaaaccacaaactacgcggcgcgaatctcccgggaactctaataaaggtcacaccgtcgatgctgaaagcgcagaatggccggaaagggacagatgcgtggacatcatatcagggaaaagtctataatatctcaccgtatttgccgtttcatcctggcggaaagggggagctgttaagaggagccgggaaggattcaggaaagctgtttctggagattcatccgtgggtcaattgggatgcgattctgggggagtgtttggttggtattttggtttcagagaatgaagctgtggcggaaaatcgacttgatgcaatggactgagctgataat

SEQ ID NO: 26756 - DNA, 370 bp, Emericella nidulans
aacattttcaagccccccccccccttgaccgattaccgtatcttttgtatcgagcttgtcgccaaagcgggatctagggggtatcttacgaacgtcaaggccttaaagggtgaaactgatgtgccggaaggtgctcctgaattcatctcccaacgtcaattctggctgaaccgtatcgttgcccccggtatctattcgctcatgcacttaccccgtattgaataagaacggacacaacatcgtccgcatgttcttcctccatctccaaatgttgtacaactggttctcgactttcctaacttggttttctcttggtaagtcatgcagctgcctactcacttgttgcgaaattctgacattggctacagcg

SEQ ID NO: 26757 - DNA, 237 bp, Emericella nidulans
tccttattagactccgctatggcgccctcttcgccggccgtcaaacggtcgctttcatcattctctgaacagcagactgttcccgacactaagcgaatcaagcgccattaccatcaccaccatcgtctacgtgaaccggttaccccatgcttgccggagcctgctatcgccgatgatgcctacgtcgaccgggccatgggacgcgttatagggcaatcgctacgaaactgcgggttc

SEQ ID NO: 26758 - DNA, 696 bp, Emericella nidulans
attgttgctgatccggatggcgataccgtcgctggagaaaaccacgagccggcacatcttgaagtgcccgttcatccggcatttcctagtcggccttataccatcctagagatatctagcacatgctctgcggctggcaagtcccaggtattatattatctagctgctctggcagtgctaccgtccagattcaacggaatcccgctcaatggatccaattccgccgtagtctttattgacactgacggccgtttcgatgctgagcgtctacgcactgtcgcccgcgggattgttctggacaaacttgaaaacacaagtgatgctgatactgaaaaccacggagctgttgaagctatgacttttgcgtctctacagcacatccacgtttttcggccgcagtcgtctttggcattactcgctacattgcaatccctggacgcatatctgcttgacctttcccgtcatgcttcaggtaaccgggcccttcgggctataatgatcgacagtgcaactgccttcctctggcaagacaagctgcaagatgagatcgcgcgcactgaggatattggccggtcagcggcggaaatagaacgcgagcgtctccagagagagaaattttacctcgcagatatatacgcggacttggtcacaagtttgaaacagctgcagagcacatttgattgcgatgtcatatat

SEQ ID NO: 26759 - DNA, 243 bp, Emericella nidulans
gatatccgcaaccaaccacacggcgctagcttccaggcatggggaagaaaatgcaaggaagcactaaaagaccacccaatctatggtagtcgaattgaggtaactacgaaacacaactacaagatcgactacaaatacgtctggacctgtgtggactgctgccagaactacggacgtcactccaagagcatcgaccctggaagacatagatgcggcatgtgtaagggtctactgcagcagatt

SEQ ID NO: 26760 - DNA, 210 bp, Emericella nidulans
gcagtgatttttggaaaggaacctatccattgtccctcagccgaagagtgctactgtaaggtgtttggactgtgtgatctgacttgtccgagcctgggtgcgtgcaatgaccgttaccaacttccgccgtattcaaccctccctaagggctggccctatatcggctggaatggacagaaacaagatcccagcaaaggcgggcttccggag

SEQ ID NO: 26761 - DNA, 741 bp, Emericella nidulans
gtactttactttgaagatttagcggagaaatctacagcgaatggagtgcccctaaggatctgcttttccagtcgacattatccatatatcgctattcgacgggggattcggcatacactagaagatcagccgggccatgctaaagatatggaaacctacgtcagtagccgcctgcaaattggggagccagcgcttagagaggaactgcaaccccaacttctctcgaaagctgctggcgtcttcatgtgggttgtcttggttgttgatattctcaacagagaataccgaaggggaggactggctctgaggaaacgactcgcagaaataccaggtgatttaagcgaattgttcagagacatcctgagacgtgataatgagaatatggaagatcttctgctttgcattctctggattctatacgcaaaccgacccttgcaaccaaaggagttctaccatgccctgtggtctggcttgactttgaagggtttagtcgatccttaaatcccagatgtcagttttcgagatgacagtgatgctatatataacaaatgtgtcatcagctcctcgaaaggccttgctgagataacaaaatctcagaagccaacaattcaatttatccatgaatctgtccgagactttcttatcaaggaaaacggtttgcgtgaattgtggcctggccttggaacagactttgaaagccaaaggcatgagacactgaaataatcttgcagcttatacatg

SEQ ID NO: 26762 - DNA, 309 bp, Emericella nidulans
gtacactggacccggctacatgtggccggattacatagcttttttcgtttgtggaagtcgacgagtgcagaactggaagactacgacaaaatcgtggagctggttcgtatactcatcgagtcagttgttggaggtgcggcccgaacgaaagacgtacaggatgtggaggaagacttgatggagtttgaatacagccgacttcgagacctacaaatggaattactggaacttacttacgaggacgcttgggggcaacatctacgacaggtgcgcgaagagttacagcacgaggccgcccaattcgtcaag

SEQ ID NO: 26763 - DNA, 491 bp, Emericella nidulans
ctgtcttctctaagcgacgaaatcctgctccatattctttctttcctgccaataccggcacttctgacttgtcaaaggtctgaacgtctcccagcgttgccgtcgtggaagtttaactcacactgtgctctagtctgtctcgccggttctatgctcttaccctagattctgagctttggaagcggcaatatttttcaaaatgggtacggcctcgagcaagacgattagcaagttcccgacgcacttctttccctccatcaaaccttgaatattctccgagggtctcgacatggctggaccatggtcacctgaataaggaggagggagctacaaattggaagcgacagtatcagctcaggcataactggtccaaaggcacttgccgagtgaccgaggtccagatatcgcagccccctaagccgccaatgttggtcacactctgtgcaggctatatttttacagcggattcgcacgagggactccgagtgtgg

SEQ ID NO: 26764 - DNA, 373 bp, Emericella nidulans
  unsure (1)..(373): unsure at all n locations
aagaactgtgtagaagttgctgtagggttttacgatggcgtactcagcatatacaaattggatatgatgagtctgcgattgagtatgcgattctctggcactagatgcattcaaggtgccataacagccatggccgcttcatacccatancctcatggtcgtttcaaagcacatgatgctgtcgctatataaattaccgctcgaaacccatgcttcgagctgggaagacgagacgcatcttattgcctccttaaaggcgggtagcatactcgcgccaatgtcgctttctgttcgccttgcgggaccagatataatcgcctcaatagtctacagtctcctccacattggctgcagctggtcactaggtatccag

SEQ ID NO: 26765 - DNA, 429 bp, Emericella nidulans
tcacaatcgcctctatataaaaaagtcgctctcactctccaaactattcaatatacggagctattatgggagatgcttgcacgacgccgtggcgagaaggtccgttggcgtgttgtcgtctttattgaggtcgtcaaggcgatctgtcgacttttcctactacgccttacgaactcgcgcccccttgtcagcccaccgctacctgagcgtgaaatagatcccaggtcattagaagaagatgacagcgattggaacggaatggagtccccggtcagcgaacggctctcggatttaagttggaacatgcctcgtactgggctttcactaccttctttgcccgacgtcaacgatgtttcgaattatcttatatccaaggtcttgacggcagatgacatcaaacccccaaaagcgcttttgcacagagtcaca

SEQ ID NO: 26766 - DNA, 555 bp, Emericella nidulans
agtctggacacaccccaacctaagctccttccgcacaggactgttcacccatgccgaaagatagtcttctcaattctctctcatgatcaaggtggttatactgaacgtcatttggctggtccaaataaccaatctccctatgagcacacctgcacctggtttgacgccgaggtaatccatcaagcgcataagccatcacagaagagtgccataaatggaaagatgaaccccacagatatgaggccacagcattttggccccaatgaccctctgctgcttccaaggaataatgcactacagcgcaaccgcactcgaatatatgaagcaaaacggcataatattatctggcactacctagatgacgttgcggctgactctcaagaggcagaggatatcgcacgtgagacaggcagaggacgggacactgtgggcgggaagcaggttcgggagatggaaatcggggactctataatgatatgggcacgagcacgatttccaggatggcgaaattatgtggatgatgtctcggtgcaggtgttttgggctgtatagtct

SEQ ID NO: 26767 - DNA, 249 bp, Emericella nidulans
gtcggaactggctatggaggctataactggttccgagaaagagcaaacgagcgcgctcgagggaaacggttactgcggcgtaactctggaataagggggaaggatggttctcgcacgatatatgtaccatacaaggactctttgacctccaaggtcaaaatataccccacgaaacctacaactttcgacgcacaccgaaggctgtttttgaacccgccagcatccgctcggacgggcgatgaagattca

SEQ ID NO: 26768 - DNA, 579 bp, Emericella nidulans
cctgactacccggaacttcggtatggtacgcccgggaagagtctgctcttggaccatgctggacaagggggattcctctattctctaagctctactttgctcccatgggagactgaccagcattcgtgcaatgccttgggcatgaaccgcgtgggttctgacataccaaacggcacgtttagactattatggccagtttttctgcgaatatgcttgagccatttcgtggaaactctatcaagctctctacaggggaggcctgttgtcgccgagggaggaatgtctatttttgagcattcgctctctttcgctgaagccgagtcgaccatcagccaatccttaggtttagggccctttagctcacctaaaccaagcacgggcggagacggcggtggtgagagctcacgctcatcgcttcatatgcttacaaaatcgcaaatactggaccgaatgaatgtcactccagagttgctgctgattgctctgatctcttgttgtcattgcctgtcctccaatgtgctcgatgttcttggcaagcaaagcagataccgccttgttaacaccactttctggggtctg

SEQ ID NO: 26769 - DNA, 464 bp, Emericella nidulans
gttaacaagaaattgctcgaggctcttaaaggaggaagcgtctcgtcgcaagtgctgcggccatttgtttctgcgttcaggtcattgatggagagttgtttgtcagctgatttcgttcgctctttagctctgtttatcacacatgcactacacaagcccaaagagtccagcggattgcagaagaagaaaagtatgcgatttaggacgaattcagggcggcagggtttcccatctaacaaaggcccgagtatgtctacaagtcaggttgctactgaaatgctacgaatgctctgttcacttgtctgcgacacccgtgacctggcgctaataaagaaattcgccagaaccgttacaaataaggtacgtggacatggggttagacttcatattatctaactatttcatagtggcttctctatctcatgtgtgaagacgagccagaaatcgttgttctagcaagtagg

SEQ ID NO: 26770 - DNA, 354 bp, Emericella nidulans
gaaatcttctcagaccgtcccgatgatttctccaacctcttccaccggatcctttcgatgagcattgatcaatcgctccctaccttttcccgcctgtcgatattgtcgtttatgattagcgcttttcaatcgcttgagaacactctgattcggaaggaatgcgctccccttgtttccatatccatctggcataacctccatagtgatgaggcaagagagagcgttctcgcgaatgcaccaaatctcagaaaagcatggagggctgctctgaaacgctacgacgctggggacgaagcgaccaaggcaaaaatgaggtttgagcgttcttggctctataccatgctcctggatttc

SEQ ID NO: 26771 - DNA, 240 bp, Emericella nidulans
gctcccaagtttttcgcctatgttgatcgctccggccgccctctctggtccgtgctgattaccatcctgttcggtgttcttggatacgtcaacgtcagctcgtctggtgaggaagtttttgcctggcttcaggctttgtccggtctagccgctctcttcacctggggttccatctgcttggcacacatccgtttccgcagagcgtgggcttacaatggccgctctctcgacgagatcctt

SEQ ID NO: 26772 - DNA, 300 bp, Emericella nidulans
agctggatatgcttccatcttggacggccaagttcattgtcacggagagacgccgggattcctacacctcaagaccctttctgtttggctctgttgaacctttccgctgctatatgtcgatccgccgatgagctgtacggccggcatcacgagtcgctgttgcaaatgtggaggattgccaagtcaatttgggacgatttgcgggtctttgactccaagatgcagcgcgccctgggtttcgggcttgataaacgccctcagccaggcagcgtaggagttcaacaaacaatgtgtattacc

SEQ ID NO: 26773 - DNA, 270 bp, Emericella nidulans
aacattatccacgccgtggatgagggcttatctgccgctgaggcgcttgccagaccgcgattgcatgatcagttgatcccgaaccaggtcgcgtttgagtatgcgtacgataactcgactgttgcattcatggccgcacgcgggcataatgttacgtggatggcgcctggaactagtacggcgcaggcgattagggtcttgccaaatgggacgtttgaagcggcaggggagccgagacaattggatgctgggggcttcgcggtctaaatt

SEQ ID NO: 26774 - DNA, 793 bp, Emericella nidulans
ccacccccccccggagccaaaggatttctcccagcttataggcaacaactccatcttggtctgggtagccggcaaaactttgacagacgtactgacatctcatccgctggcggggactcattgctgctggcatattccgtttctaatatggctctcaccaaagagcaatcttctcttattgtcacagccatcctgaggctccggaaattccagttgggcagtcgagctccccctacagtgcgctggttgatatatcctctggattggggataatgcttgatcgcgactctcggaagcatccagttgcacatcacattgctaggtggatcgttatgtctctatcaccagcatgtcttgacaaggaagaatcaatcttgagccagctcgaaggccttatacaggccgtagagacttttttccacccgtcaaattcgggcagctggactaagaccttagctcagctggtgtactaccttaccgacttcttcgtaatgcgctggaacagagaacagagtggcgagatggaggtcccacaggagcgaagactgacagagcctttaaaacgtcgcttcgtgctctgttgcgcgacgtgatattcatgggtatctattctaaaagcgccaccgctatgagcttctcgttgtcgaccttacagggcctagcattcttggaaccgcatctaatccttccaggagctttgcagcgaatctacccatctctgcaaggcctggtagaagttcaccgtaccacttcgtcactccgagctctccagatcctcgcgcggataatagca

SEQ ID NO: 26775 - DNA, 471 bp, Emericella nidulans
tcaagtacaactaaggatggaaatcctgggcaaacagtcgcatgggtgggagctttacctgacagggggaagctggagcagagtgccgagattggtccggaacccctgacgggagtgttcaacttggttaagggaggtcgatttggctataacgtctcggaagtcagctaccaacctcccctatctgcctgctacacaaagtatacccgcacgcttaccaaacttcgagccacagtgcgcaatgagctagattgccaggtttgctactcgctgattctcgacccattgacgacgccctgcggtcatactttctgtcgtagatgcgtcgctatggctttatctcatagtaatttatgccccatatgtcggcggaagctgaatatgccttcatctgtcaggtcggagcgaaacaacaaaagcctatcggatatcattgagactcttcatcctgatgaggtggcatctcgacga

SEQ ID NO: 26776 - DNA, 687 bp, Emericella nidulans
ggctgtatcacttgcaagtacgatcctggccatctatatcgccgaaaacaagagtactaagccatgcttagaatccgacatgtgaaatgcgacgaggtcaagcccttctgcaaccaatgccaaaaatccggccgcaaatgcgacgggtacgataacgcctcgcaaactcaacttcgcgcgcgcattgccgagcgtcagaagccacttaatcgagacactcttggggcggaccatcgactcgttctacggcaaggaacgagaacagagaggcgctatatcgacttcttctacacgcggacctcgcatgcgtttgcaggattctatgatagcaagctctggtcgtaccttataccacagtttgcggagcacgagcccagcgtgagacatgctatgactgctatcggcgcgctccatgaacggttccagcttagtgcagtagctgggagcgcggttctgacggtaaatgggtcagcgccgacagagcagttcgtgctggaggagtataacaagtcaatccagactctggtcaagtctctcactgcacacagtcaaggagggagtatcaatttggcgttgacgacatgttgtctgtttatctgcctggagatgttacgagaaaaccggaaagaagcactagatcatatagaggcaggactacgaattatccacaagcatgagcaattaaca

SEQ ID NO: 26777 - DNA, 437 bp, Emericella nidulans
attgaagtcagtccggaccttctctactccgactcgcttcatggcatgaccgcctgcgcagactttatagcctactctgtcttgacggtgatctaccgcgcccaaacacagacacaaggacaaccccgcccatccgcactggccatatcctcccagtgctatgaagccgcctgtctagccctccacagtcacctcaaagcgataacatacttcagagatcggaaggctcacaaacaggcagaatatgtgaattcgtatgtcctcgaaactcccgactttctattgagcaagctaactgggcttgatgctgaaggatattgctctacccgtccttcaccccattcatcattgtctttacgcacgcaatcacaacatcttcgaccaccgatcttcgtcttctgcaagagactgtccacagtctcgacctaatcaagggt

SEQ ID NO: 26778 - DNA, 728 bp, Emericella nidulans
aaggaagcgcaggctgcaaacgccgccgagcacctcatgacagtccggccagccctgcgcgcgtacccctaggccgtgatctggtcacttacaatacccatgtccataatcatgaaaggctacgacactgctctgatcggcagtttttatgcgcaccctgagttcaaagtatcagtttggaaaggaatacgcacacggccatgaggttcctgggggagtggcaatctgccctgggtgctgggggaaacgcggactgcattatcggggcatttttgaatgggtatcttgttaatcgttatgggatcaagaaggtttttataggcggcttgctttttatgtgtggttttatatttgtatcttttcttggaaagtcggtcagggcgcaggtcgctggccaggttctctgtggtaagctccatgtccttccaaacttcaaaaacgattatgccaaccatggtactgtaagtataccttggggcatctttgcgactatagggcctgcgtactcttcggaacctttccccatggccctccgcccgtacctgactgcctacacaaacatgtgccttgcaatcggacagtttatcctcatgggcgtcatgcaaaccctcgttaatcggccagacgagtggtcctatcgcattccctacgccgtgccatggatttggccggcactgttatgcgtgattgcaatctccatgcccgagtcgccgtggtggcaggtccgg

SEQ ID NO: 26779 - DNA, 553 bp, Emericella nidulans
gaagccctggcggagcattatgcaataagcaaaacgcctcttgcaaggggtttaaaggtcataaataccgacagggctacagtgccgatgcggtgggtgcgctttcatgggctatatgatggggggctaattcctctagggaaaacatatccgtcgaaggcggtattctgagtgtcacatccaggatactagtcgtggatcttttgtccagtatatccctcctcagtcgtccccgatgtcaagctgctgacccgttcagagctacttgacccagagagggtgactggattggttgtactccatgctgacaagtaggccttgcctcccggttgtcttgggccagctgacttctggtagaattgtcgcgacgtcgactgaagcatttatcattcgaatctatcgcaatgccaacaaaagtggctttctgaaagccttctccgactcgccggaaccttttactacgggattcgcgcccttagccaactctttgcgtaaccttttcctacggaaagcttcattatggccgcggttccacgttactgttgctgaatcg

SEQ ID NO: 26780 - DNA, 336 bp, Emericella nidulans
ctagcagaatatatccccgccgtgacacgcccacctcctgtctgggcgaaaacacgcgcctcggcgtgtgaaatctgcgagcgcgactggatcccgctgtcctatcatcatctaatacccagagcggtgcatgacaaggtcataaagaaggggtggcatgatgagtggatgctaaatagtgttgcgtggttgtgccgcgcttgccatagctttgtgcatcggatggcgattaatgaggagctggcaagggagtggtttactgttgataggatcttagagagagaggacgtgcaagactgggcgaggtgggtagggagggtgaggtggaaggctaga

SEQ ID NO: 26781 - DNA, 644 bp, Emericella nidulans
  unsure (1)..(644): unsure at all n locations
tggacgcctcaggatttctacgacaacgttcatgtccctcggaatacgcctgaactttcagcacctgttaaatgcgacttgacggaatgtgagctatttccattccagcggcgtgcggtgcggtggcttctaaatagagagggaaaagagctcaattccaacggtcaggtggttccattagagaatcgttcgaaaatcggcttgcccgattcattccagcagatatcngatgcggatggaaaggtctgttttgctagccacttatacatggtagtacgcgtgaccctctctggttggtatcatgttacgcaacatctcaaggctggagtctaggctcaggagctgggtctggcacagactgtagagatgattagtttcatgtgtctgaaccgccggatactgcgccctgaagacacctttgcggagcccggaagcaatggtctgcagaccatcgtggagcgactctaattataacaccgccggtaatactgggacagtggaaacaggagatcgagctgcatgccccgaaactccaggttttccattacactggaatacaacggcatccaacattgtcagatcaggagccagtcgaacttatggctgacaatgatgttgtgctcacgacatacaaggagctggcc

SEQ ID NO: 26782 - DNA, 765 bp, Emericella nidulans
tagtggcttctggaccaagtccgggctcaatttcattcgcactctccttctccctatgctcctccaaagatcgtcctctcgagcgacgggcatgcgcagggtttcccgcgcattgagcagctcctttccaaccagtccataacaaccctagaaggcctcgcagagcattatgactggccgtatgtctgctcagaagtcgaagaaggcggcatgagtcggacacagagggtacgcgatattttatccgcattcagcacagagattcttccggaagagtttcgagttgaacccgtcgagtctgattctgagccagaagatacggaatgtaattgcttgtcgccgaagaaaaagagatcaccggagcaatgcgtggtgcagggagatatggaagcaaccatcttccagctcgccgtacacgacgacaacgtcttcacgagtctctgtaaagctatgccgcagggggcctgtgcggcgatttacttcgataaaatgctcgcgagatcgaggagcattctctccgagttcgatacgtattgccaaacactaggaggaccttatgaaactgaagataaaggcaaagcgttgagtatggctgcagtcgtccataccctaaggtccaacattctcaaaatccacaaaaatatccacgttcgcgcccctcacggcctccagggcgctgctaaagcactcatagccatcctcgaagacatttccacacgcaataaagacgctttagccggcaatccgtacggctgcgtctcgttt

SEQ ID NO: 26783 - DNA, 261 bp, Emericella nidulans
  unsure (1)..(261): unsure at all n locations
tctgcatcagcaacggaattctccactgcgtttaacaattacattagtgacggacccaatagtcctcacgctgagataattcgcactgtctctaccttctctggggctatcgccgatgtccttagtaacaccaagggtttaactcgctttgcagtgancgacaagagcgccgatcaactattaagcgctgctcgcaagtccgcccaggccactgttcgtttcttccgtgggctccaatctttccgtctcgagggcttagaa

SEQ ID NO: 26784 - DNA, 219 bp, Emericella nidulans
agggccatttttgttgaccagaacccagacggaagtgatttcaaaggcgagcgcctcaccgtgcagtttgtcaggggaccccggcgcatggaaaattttccagttcccacggaccgtccaaatctccctcgttcgcgacgtactattttccgtatgataatttccggtctcccggaaacaagctggcaggttagaagccctctcaatgtccttctcttc

SEQ ID NO: 26785 - DNA, 243 bp, Emericella nidulans
agcgcggttcttcttgcctccctagaacgttcgaagaagaaatggctgagcgacggtatcctcgagcgctattggaccaagccgaaaaagacgaaaagggagcagcttgaaggcaaaaatcctcccaaggagtcgatgtctaaagtcgggccgtgtaacattgtcgtcgggcctcatctttttgatgcgatgctgtatacagtcaaagaccccaacgcgccgccaccagttcaatacaccccg

SEQ ID NO: 26786 - DNA, 484 bp, Emericella nidulans
ctcttcgtttcttccaatcaacctcctaatgagatttatggcgggtgcgctcttcgtggaattgggctcagtgacggccggtatcttgcaaatcttggtatggcatgttcttcggccattagggcctcttgctcatgaaaatagggtctatattgctcgcgttcatagctattcttgtttcattggttctgatatggcgctcggaccggaaacaagcggcggttggccgaaggtatgaggatcgaccgacccagaggaatgcgggaagctcacagacatggacagagaaatgcagctcttcttgctgggatacattatcatcgagatttgcgagatcttctccgtgggcggctttcccctcagaaatgatgtccgaaaggttcgttccccgctgtttattaaaattcaacggtctaatatccttgtagggcttttcggctgctcacgtcgctgcgatcactatgacatgttgatcctcctcttg

SEQ ID NO: 26787 - DNA, 357 bp, Emericella nidulans
ctgcctcggcctttgaaagtggaagctggtcagtacatcaacctctggatgccgtcagtcagtctatcatcatggatgcagacacacccttttatagtggcatcatggtctagtaatcagcaggatactgttgagctcctcctccagccacgccatggcttgaccgctgaccttgttcgctacgcgcccacgggaagtgaaagctcggtttccttcctagccttgttcaccagcccccatggaatgattgacgatgtcagtcattatgaaagcatcttagtggtcaccagtggatttgggatcgcagcggcgattccataccttaagatcatgatatatggttataatacctgcacc

SEQ ID NO: 26788 - DNA, 363 bp, Emericella nidulans
atggcagcccccacacctcagctcccgacccggttcccctgctggtgtcgggccatatattcatggggaggagaggcgaaaagcgatctggggtttatagagggtgacttgattgaatgcctgaatgcgggggacggacaatggtggatgggccgcttacgaagggaccggcgtatggtgggactgtttccgtccaatttcgttcaacttctaggagaggattttgtaccagttactcgggcgactagtcctatgctcccagcagctgcctccccaatcacaaacccaacgtccgctcccaagaagcaaaagacagttttcagaaagccgttccaggcccataaggaagctcttgcgccgtct

SEQ ID NO: 26789 - DNA, 711 bp, Emericella nidulans
aatgccatgatgggctctgtggaagagcggccttcacaagaattcttcggcagctcaagtgccgcgagtttcatgcgccagatcaagactgcggtggacaagagagtctcctctccaagtcaacgtactccagagattgccgcagagagccgtccccgctcgagtttaatttcgcctcagaaggaaaggcaaagcgctattcatgactacgtgcttccccctcggaaaatcgcagacaatctcatgaacgtgtattggcattatgtctttcctctgtacccactcgtcgatagcattcgtctcagggaggaatactcacggatatggacaggagaacccttgcaatccgacgaaaacatgttaatgtgtaccttcaatgtcatcttcgctcttgcctgccaacttgctgatttcattgtaccagaagagcgtgaagcctcagcggctgcattcttctcacgtgccaaagaccttttgcatttcaacctgtgggactcggggtcggctgccctaatccagtgcctgctactgatggcacagtatcttcagagcaccaattcagcccatcagtgctggattgttaccggtctagctgtccgaaatgcccagagtatgggcttgcatttaccacagaccattgcttgtctccacagcccacaagaacagcagttggcgcgaaagatctggcacggttgcgttctcatggacagg

SEQ ID NO: 26790 - DNA, 572 bp, Emericella nidulans
ttatgggttggttttgggcagattcgcagccgcaacttccggcgcgcaatcacccagcatcctctgatgcatctcctccggcaagtaaaacgaacagcagagagattttcaagtgctgactgttgatgatcatagccagcatgtcccatgcatgcatctcctcccaaatccgagacttcaagcgcttgtcccgtgcgatcgtcggattcgcccttcttcgtacctccgaaatcttctgctcaaccacctactgcgcctgatacaaaacagtcgaccctgtccaagcttaacccgttgaactacatgtttgcgtctctctcgcaagagcgcgctccaaatcaaaccgtggacctaggtgtggaacggaaagtctcgtctatgcccagaggtgattcagaagggaactgggagtatccctccccacagcagatgtataataatatgctgcgaaaagggtatcagacaccccacaggatgcagtagcggccatggttgcagcccataactttttaaaagaccccccttggagtgagtgtgtcgattggaggaggatcttttcgaaaggttgaggg

SEQ ID NO: 26791 - DNA, 578 bp, Emericella nidulans
atggaggccttcacttttgcggtttccgcccaagtggattttccgatatatgtcaagatgtatgcctaagggaggacataaagagcatgtgaaagttcgctactaatagaaatcacagtggttcactagaagggaaacagaagcagatcccactctcagttcttctcaagcaacctgaattgcgacatatcggctctgtgcagaatcccctgtccgatctattcgtgactgcgcaattatggtcggagtccaagcccctgggggttccattgcagacttcttacaaagccttcaagactgttagagcctggaatgagtggctacagttaccgatctccatcaaagatgcccctttgagatgtcaactcgctattacgatctgggacctgtcgccgtttggtggggaaggagcgaacggccattacatcccatttggtgggacgacgatacggctgtttgacgatgatggcaaattaaaaacggggaagcaaaagtgcaaggtataccggcacaaggccgcagatgggttctcggcgacgacgacgccatcaactccatcgaaaaggcgaaggggcaac

SEQ ID NO: 26792 - DNA, 249 bp, Emericella nidulans
tataagagtggctcacgtagtgatcgtttcagcttcgcgacaacaccgtctgcaaagaaaccgtctgctggatttgccaccggcgcaagaaatgtggccactcccgagttttagagaccgagaagtacgtatgcctccacgggaggcgagaagacgttcttctccagcttctatgcttggacgctcaggcagcgcgcggagcctcggacgaagaatacgaattcgcgttctcatacgaacccgccgagc

SEQ ID NO: 26793 - DNA, 258 bp, Emericella nidulans
ggccctggcccaatgactggccttgtcagccaggattttccgtcacttcagcctgtcaaagcgggggacgaggattatgcccagatattccaagctacgctggacctcacacaactttacggaaacgtccacgatcttctttactctggaatgcgaacgagtaatcagatgatgttaatgggggattacgtgaaatatgtagacgattttcgacttgcaatattgcggtggaagtcgcgttggggctcgcttaaatgt

SEQ ID NO: 26794 - DNA, 1350 bp, Emericella nidulans
caaagactattatcctactcaaaataatggttcaccccagagcttaaaacccagcaggttactgtaaaccaagcacaaaggagatggcagagcagctgtactaccctaggttgtagctactctattaccatcaatctctttaataatatgcgtctgaaacggcgcgaatagataagaactattaagaaagtcaagaccacctattaaaaagagttcctagacaaggcccaggaaggctacctctggaaagcagtaacttatatgcacccctgagacccctacataaatatccctatattaaaaatcaggacaagggaaggcactgaaaataataagaaagccaaggccttcctagaagccttctttcccaagatggctgaagctgaagaagagagatcataacacccctataagattacctgggagccaatcacggagctagagatatacagattgcttaaggctgccaaaggaacaacagccccaggagagataagatcctgaccttgatatagaaatacctatagatatacctcttaacaaatatcacctacctctttacaaaattaattgagctgggtcactacccagtgcagtagaagcaggcatggattgtggtcctaaggaaacctagtaaactagactatgcagtacccggagcataccaacctatctctttgctaaatatactaggcaagctactagaagcagtcatggtttagagactaatattctgggccaatacctacaagctactccctaatacacaatttaaggcagaccagggtataacacagaacaggtacttcttatactagggaataccattgattaagcatggctttgatccaaagtggtgatacttattgcattcgaccttaaaggagcttttaatggggtgaaggaagcaagccttaatgcccgcctgtaggccaaagggatcctgatagtagccagaaagtagatcagcagcttcatggagaaccagtataccagtattacctttgataactttcagacagaggttgcccctctaggaaatgcaggccttgctcaagggtccccattgtctcctatcttgtttagatttttcaactctgacccggttaaccagccagtaaattaccatggggttcttctgcatttattaataactacttctgatagtaagcagggccgacggccgaagacaatattaagaagatctaagaggaagatatcccctgtatagaatcatgggcctggaagactagattattatttgctgcagagaaaacagaacttatatacctaactaggtccaaaaagcaacatgaaacagggcagattactataattagaaagataatt

SEQ ID NO: 26795 - DNA, 216 bp, Emericella nidulans
acccatgggttcgatctcatactatgactccagcagccagaacttgcgcccagtgcgacattcctcgcaaccgcccctgtcagctttccaataaacgggcttcttagcttcgctcatttttgcgtggcctgccacgtgttgggactgcatccaggtcaatttcgagatgctcttacagggacgacgggacactctcagggaataatcgttgcactg

SEQ ID NO: 26796 - DNA, 677 bp, Emericella nidulans
acgcatatactagactttgggcgggtaaacaagtctgttggcgcatgatcatctcactgggtcaggtcgccgaatatcctcgcttcagagtcgatggccccatcgcacagcgtgggaggcaaacatgaactcttttctccccagccaccgatcatgaatgagaactgggctaaatgctacggaccaaggttcatcaccgatgaatccggccggactcggttaataacacgcatgtgtccgactctaggggctccaccggtcatggatgcagaaatgacaccgaccacgagcgcaccgaattttgtcgcttgtatcatgaatgctgggtatcacgttgagctcgcaaccgcagggtctccagcaggccatgaagagcttgttgcatcgatgccaaaagctcgaggcatcacttgcaacgtgatctatgccaacccgagagctatttcgtggcaaatccctctccttcgccggcttcaagcagaggggtatcccattggaggactctgcattggtgccggtgtcttaagcccgaggtcgccaaagagtatattgagacgctcgggctgaagcacattgctttcaaaccttcgtccgtggactcaatccttcatcaagttcttgacattgcgaaaatgaaccattcaactccggttttgctccatggacgggcggaaggg

SEQ ID NO: 26797 - DNA, 663 bp, Emericella nidulans
ctgcacgatactacccaggatagcgaggcaaagttgagacgattctatgcgtcttgttggtccgtcgatgctgaagagccgactaaagattcgattggtgtaaagctcaccacgggtcccgttgtactctcttcccaagttgtacttaattttgtctctctgatatcgagggccaaaggtcattaggttcgtccacatgttctcaacatggcctcccttgatgttggtatcattgttgcctgggaggcgctattaaggtcacttctaagcccgggactagggggggacctttctcgcttgttgcacatctcgaacacctttgaacccgtcccaggtatggaaccgcttcgcgttggcgatctactgaagacaacattacgcattaccgcggtaacaataaagccactgggaaaactggtcgaggttaccgtggtgattaaacgggaagaggcatccatcatgaaaatcacgtctgaattcctcatacaaggtcaatttccccatcatcatcagagcttcccatcctcagaggccaatgagtgggctctacctttggactccccgaaagcagtggttttactacgaagcagaccgtggttcaagccagatgcaaagtgtccagagcttcttgacaagactctcctattcaggatcacgtctcaa

SEQ ID NO: 26798 - DNA, 366 bp, Emericella nidulans
aatataaacggttataagttaatggtagactacttagctaccacctaagatgtgtcgattcgaattcgactagccgtaaagggttagtagtttaataggtaaagcgcttttttgtcaaggaagtttatgccggttcaagtccggcctaacccgagattactcgtttaattaattgaaatgtaaacgtattaattctaaaaatcaactaattaagggaaagtttccatgggtagggtaagatatttgctaaatattgtgcgtttgcacatagatgttcgaatcatctctttcccgaaagagtatagtttaatggtaaaactgtaagcttcaaccttatatttcttagttcaaatctaagtactcttg

SEQ ID NO: 26799 - DNA, 1635 bp, Emericella nidulans
atttttttataaaaactgcgaattgtaggttctttaacttaaccggtaaagtgtgttcttgataaggatatgttcagtgttcgagtcactgaagaatcaaaatactaaaataattaaaaagagagttggctgagtggtaaggcgactagcttgagtctagttaagttaaaactttcatatgttcgaatcatatactctctgaataaataaaaatataaacaggttagagccaggtggttaggcgtcttgtttgggtcaagaaattgttatgttcgaatcataataacctgaatataaaaagtataaattgaatatctattcaataaaggtgatatatatcatatataacttgagaaatcaaggctagtatataaagaaactattatggataattagctatatattaaagaaataaatgactagataaatctaggattctaagaaaaatcaagtaataaacgaagtgaattgaaatatcttagtaactttaggaaaagaaatcaaacgagattaatatttagtgtaaactaaatattaaaagcctaataacaaaacttgttaagtaaaatggattcaaatctgtttgaataaaggggaaccttcctctaaggctaaatataatatataagcgatagtgaaaagtaccgtgaggtaaaatttgaaatagtagttttataagcagctcaaataaaatttaaataaaaaataagagcgtaccttttgcataatgggtcagcaagttaattttagatgcaagtaaagataaccaatttaaattataaaaagttatgattaaaaaggttattttaacttagataaaccaattatgaaaaaatgagttagtatctaaaattagacccgaaggctagtgatcttaccatggtcagggttataaaagcccgaacgggttatcgttgtatagatatccgaagaattgtggtaagttagtgaaagacaaaactgactagtatagctggttttccgcgaaacctatatgagtaggtaatttaattaacatcttagcaggtacagaactgtgatctcggataatatcaattgattttatcaacatcggggggttgtagtgactttactggagagtatttgcactcggaatggcaaagatgaatgttgaataatcggacatagtgcgataaggttgtatgtcaaaagggaaacagcccagaacaagagttaaggttccaaaattattgttgagtgaaattaaggatgtttattattaatacaatcaggaaataggcttagaagcggccattttttgaagacctcgtaacagagcactgattaaattttagtaataaacaccaaaaatttaacggatctaaacaatataccgaaaccttgtacacatattataataattatatatattaattaatatatattgtatatgtggggtagcggaacattggataaatattatttattattacttctaagatataataagtataaatattattttaataataataatttatcaatataatccaagagagaatgctgacatgagtaacgaaaaaggaataacctcgccttaagcttatggtattgtattaaattttcggtgtctaaaaatattaatcaaaaggtaattttgatgatatttatata

SEQ ID NO: 26800 - DNA, 395 bp, Emericella nidulans
accgtacctagatactatcacaagtaagcaagtagagaatacaaaggcgtttgagtgaacaatcattaaggaactcggcaaattgactaccgtaacttcgggataaggagggccattattataatatttaacgtatatatgtctgtaaaaagatatatatatgatataattaaatatataataagaggaaacataaaataatgttgtacgactgtttaataaaaacacagcactctgcaaagattaaatatcaaagtattgagtgtgatgtctgcccaatgtcggcagggtaacgaatcttccttggtatataactaaggttttgaaggacaccccaataaatggcggccttatctatgagggtcctaaggtagcgaaataccttgcccgttaaa

SEQ ID NO: 26801 - DNA, 600 bp, Emericella nidulans
aatggtgccctgtatcacagccaggttcaagtgaaagagctcggctgttgggcagccgacctgagctgtatcttcttcgtaacgcctatgcttattattgcctggtatatcacacaagcagtcatcgatgaagcatacgctgttgagctcgtgaactttatattgggagttcagaatgcggacggtggctggcccacatatagcggcgaaagcactacgcttatggggacgattcttacctatgtcgcattaagattgatgggactgccggcggatgaagatcacttggtcaaggcgcgcctctatcttctcaagatgggtggcgccgtttatctctctggctgggccaagttctggctggctatgttgggcttgtataaatgggaaggcactgacccctatcctgttgagatgtggctacttcctgaatggtttccaatcagtccctggaaatggtacatcattccgcgacaggtttatctggcgatgagctacttgtccgcgaaacgattcactatgcccaccaacccactacttgacgagatccggaaggagatctttgtgcagccatatgagaggatagacttcctcgcctatcgc

SEQ ID NO: 26802 - DNA, 288 bp, Emericella nidulans
atggcgcagaagctgccttgacaagtatatccaaacgggcagcacgcgtttccgcacgtaggcaggtcatcatccagccgtgtggtcttgatgacattgttcggatgaagagtggcgttttgtttcgttacgtcgcaggtgatgggctgttcataggaacagtcctggccttctgggcagcagatgaccgagcttccaccatccaaggcaatgcacgtcgacgaagaggagcaacagaagttttccgacacaccgacaacactacatttccgcgaggaatcaggacag

SEQ ID NO: 26803 - DNA, 406 bp, Emericella nidulans
ggtgattggttccactgtagaacgtgccaatcgccccctgatagacggtttttcgccctttgacgttggagtccacgttctttaatagtggactcttgttccaaactggaacaacactcaaccctatctcggtctattcttttgatttataagggattttgccgatttcggcctattggttaaaaaatgagctgatttaacaaaaatttaacgcgaattttaacaaaatattaacgcttacaatttccattcgccattcaggctgcgcaactgttgggaagggcgatcggtgcgggcctcttcgctattacgccagctggcgaaagggggatgtgctgcaaggcgattaagttgggtaacgccagggttttcccagtcacgacgttgtaaaacgacggccagtgag

SEQ ID NO: 26804 - DNA, 838 bp, Emericella nidulans
gggacaagtacatatctcgttggaacaggcagatcccgtatcctagttgatactggtcaggtacgtcgtgactgtttaccgaccttgcatggagggcgacgtggctcacactccctgtctgctccagggaatgccctcgtggatccgtgatatcgccaaagtcctcgaagagagggatatagacatctcctatgtactccttacacactggcatggcgatcatacaggtggtgtgccggacctgatagcgtacaatccagcgctatcctctcgcatatacaaaaaccgacccgatgccggacaaaaggatattctcgacggccaggtctttcgcgttgaaggcgccactctccgcgccgttcatacccccggccacgctgccgaccatatgtgctttctctttgaagaagagaacgccctcttcacaggcgacaatgtgctcggccatggatactcggtggtggaagacttgggacaatacatgaatagcatggtacagatggctaacctgaaccttccattgggctacccagcgcacggggcagtgatcgatgaccttccggataaaatgcgagagtacatcaagcacagagagttccgcgtgcagcaggtttacgcgatactcgaggagagccgagcagctgggcaggggcgggggcggggtggcttgacgctacacgaaatcatcctagcaatgtatggggagattacagacgaggttgagaaagctcttgcgccgttcttgagccaggttctgtggaagctagctgaggatcgaaaagtcgggtttgagccggggagtgctgcaaaaaggcgatggtacgtcaggtcgcgccgg

SEQ ID NO: 26805 - DNA, 1722 bp, Emericella nidulans
tctgacgctcagaagcctgttgaggagacccctgtggccgctcctgctgcttctgccaccgagactcctgctgctactgaggcccctgttgccaccgaggcccccgccaccgaagctcccaaggagaccaccgctgagggcaccgagggagctgtggaggctgcccccgctgctaccgaggaggccaaggctgatgctccagctgaggagaccaaggaagaggctaaggaggttgtccctgcctctgagggcacccttggctacaaggctcctggtctggtcaagagccttcgcttctccaagcgtttcttctacttcagcgatgaggctgttgaggctaagcagctctccgcctaccgcagcaacgagaagcccgctgttgccaaccccattgttgcctgggccagccaaaccggcaagggactgctcttcttcaccaagcgccctgaggacaaggctactcctgctggtatcatcagcttggccgacatctctgacgtgaccaaggaaggctccaacgagttcctcttcaagctcaacggccacaagcacaccttccaggcctctaccacagccgagcgtgacagctggatcgctgccctcgaggccaagtccaccgaagccaaggccgagaaggataccatcacctctagcgagggttacaaggctgagcttgagaagctgagcaagcctgctgctgttgctgccaagcctgccgagaccaaggaggaggctaaggagggagaggacaagaaggaggaagagactcctgctgctggtgccgctacttcttctcgtaccgcctccgctgaagagaccaaggacaaggacgctaagagccgctctcgttcccgcaagaggacttctattttcggcactctccttggtaagaaggatgaggctgaggaaaagaaggaggaaaagaaggaggaggagcgaagcctgccgagaccaccgagactcctgccgccgaggcctccgctgtcactgagcctgccgctactgagggtatgtatattctggcgacctttgtacgacaaccttgggactaacaaagatacagcccctgctgctgctaccgagactaccgacaagaaggaggaggagaagaaggaagagaaaaaggaggagactgaggccgctcccgcgccgaagtcgaagcgctcttctctgtttggtaacttcttccagaaggtcaccagcccctctcaagagaagacggagaaggaagctgctgctcctgccgaacctgctcctgtcgctagcaccgctccccagctcgacaaccctgttgaggaggctgctaagcccatcgagcctgagagcgtgactgccgctcccgaggttgaggctgctaaggacactcctgctgaatctcccgccgagactcctgccgctaccaccaaggacaagcgccgcacgtccttctttggcagctttggcaagaagaaggctgactctggtgacgaggccgctgagggtgaggctaagcccaagaacaagctcggaggccttttccgcaagcccagcaaggctgtgaagtccgaggctaaggaggccaaggagaccaccgagactggtgaggctgctgagcctaaaaccgaggccgttgctgaggccacccctgctgaggagtcttccaagcccgctgatgctcccgccaccgaggaggccaagcctgtcgtctcctccactgccgcccccgtccaggccgctgcttga

SEQ ID NO: 26806 - DNA, 1638 bp, Emericella nidulans
ttccgccaagtcagttcagcttgtgccctcctgggtctgattctcggtgcttctgccaccaaggccactggccctggccccgaggcttgcggcaacttgacgcagctgcttgggtcaaagacggtcgtgtctaacaccctgagcatcaactacatcgactcgacccaatcctactacaacaccgagcagagcaagtacaagccctcatgcatagtctaccccgtctccaccgacgatgtctctatcgcaatcaaggcaatccgacgttccgattcccgcttcgctattaaggccggcggccacaaccctaacgatttctactcttccgtcgataaaggcgtgctgatcgacctgtctcgcatggctgagcggttctacgacgaagagtcgaccctcgcaacctaccagcccggcggcgactttggcgatatctatgattacttttctcagtggaaccgcaccgtcgtcggcgcccgtctcgccggcgtcggaaccggcctcgccctttctggcggcctctcctacctctccagccagtacggcctcgcctgtgactccttccgcgagctcgaggtcgtcctcccgtccggcgagattgtcacagcgtccgagtcgacgaatccagatctgttctacggcctgcgcggcggtggcggcaacgcctacggcgtcgtcaccaagtacaccgtgcagtcatacccggccaacaccttctacgctggcaacatcatctacctcttccagcagaacaccgccgtgctggacgcgattaccaacttcatccagtacaacgacgatcccaaagccgccatcatcgggacctacgagaaactgcccacgccagggttcgagcacaacctcgacgaggcaatcatcatgttcctggtgtatgatggcccagacgcaggcgacgtcttcaagaacttcaccgacatcccgcacctggccaataccctcaagcaaactgactacaacggggtcgtgaacctgccaatcccgggcagcgccgaactcatcaagggccggaataccttccgcgtgtcggtccacagtggcgatgagaagggcaaagaaagcctcaacaagctgtacgagaaatgggtcgcctggggcaacgagaacaagggcaagtacctcctgacctcgatggacatccagccgattccgagatcgctcaccgacgcatcaaattccaactttggcggtaacgccatgcagatgcctgatgggccatggttctgggtgaatttcctcctgacggcgtcgtcactgctgagcgaggaggaactcgaggaggcgaatcagagctacaaggagatggtcgagtcggtgcccccaacagagggcttgccgctgttcctgaatgatgcgagccacgatcaggatccgctgaccacttttgctggttatcagaagctcaaggagatcaaggcgaagtacgatcccgatgggttcttcaaaccgatgccttctccggtccgccgcaacgcaagctttcgtgcccaccacagcggaagcaatgcggcgacacctgcatcccttcaacgcaagactgctgcgcggcctccgagcactgtcttccaggggattactgctatcgccactccggctccgtccgctgttgtccagaaggtctag

SEQ ID NO: 26807 - DNA, 1074 bp, Emericella nidulans
acccgggggaccgtggattctttcccggcgcgtgtcgctctgtggactctatacactgtcgtccagggtctgttcggtaccggtatttgggttcttgctcacgagcgtggacaccaggcgttctttacttccaaggagctcaacgacactgttgggtggatcctgcattcagctctgctggtcccctatttctcgtggaagatctctcacggcaagcaccacaaggccaccggtaacctggctcgtgacatggtcttcgtccccaagacccgcgaggtgtacgcctcccgcatcaagaagaccatctacgacctgaacgaggtgatggaggagacccccttggccactgccacccactccatcctgcagcagctgttcggctggcccttgtacctgctcaccaacgttaccggtcacgacaaccacgagcgccacgctgaaggccgcggcaagggcaagcgtaacggctacttcaccggcgtcaaccacttcaaccccaacagccctctgttcgaggccaaggacgccaagctcatcattctgagtgatatcggcctcgccatcaccgccagcatcctgtacctgatcggctccaagttcggctggatgaacttgctcgtctggtacggtatcccctacctctgggtgaaccactggcttgttgccatcacctacctccagcacaccgaccccactctcccccactaccagcccgagtcctggaccttcgcccgcggtgccgctgccaccattgaccgcgagttcggcttcatcggccgtcacattctccacggcatcatcgagacccacgtcctccaccactacgtcagcaccatccccttctaccacgccgacgaggccagcgaggctatcaagaaggtcatgggctcgcactaccgcagcgaggcacacaccggtcctctgggcttcctcaaggctctctggaccagcgcccgtgtctgccactgggtcgagcccaccgaaggcaccaagggcgagaacgctggtgtcttgttcttccgcaacaccaacggcatcggtgttcctcccattaagctgaccaagcctaactaa

SEQ ID NO: 26808 - DNA, 2319 bp, Emericella nidulans
aagctttccgtcctatccgttctcctggtcagcgtcgcccaggccgcggccgctccatggagaccgcgcgagcctagagccgccggatcgaagcgcttgacattcaacgaaactgtgattagtgcggcgctgtcgccttcttcgatctcggtgcaatggatcgcgactgagaacgacggggattatgtgtaccaggaggaggatggaagcatcaagattgagagcattgtcaccaaccgatcgcagacaatcgttccagccgagaagatacctgccgatgcatacagctattggattagcccggacctgtccgcggtgctgtgggccacgaattatactaagcagtaccgccactcgttcttcgccgattactacatccaggacgtcgagacgttggagacggtgccgcttgtggaggatatggttggagatattcaatatgcggaatggagcccaagcggcgattccatcgcgttcgttcgcggcaacaacttatggacttggtctgacgggactgtcacggctatcaccaaagacggtgggccggacatgttccatggcgtgcctgactggatctatgaggaggagattctgggggaccggtttgcgctctggttctcgcccgattccgagctcctggcattcttgactttcaacgagactggcgtacccaccttcaccgtccagtactttatggacaaccaggaaattgcgcctccatatccccgcgagctcgacatcagataccccaaagtgtccgaaacaaatccgacggtcaagttaaatatccttcagctcagcgacaacaccgtatcgaccattccaatcgatgtgtttgacccgagcgagttgatcgttggggaagtcgcctgggtgactgatacgcacactgagctggccgtcaaggcttttaaccgtgtgcaggatgaatcgaaggtcgtcatcgtagagaccgcttctggcgagaccaagatcgcgcacgagcgtgacgggaccgacggttggttggataacttgctttcaatctcatacgttggtcctttggctttgggctcgggggatgcatcatccgcttattatgtcgatctttcggaccactccggctggacacacttgtatctcttctcaacttcaggcggcgatcctatccccttgacggagggagagtgggaggttacgtccatcgtgagcattgaccaggagcgggagctgttttactatctctcaacccagcatcatagcacggagcgacacctttactcggtgtcgtatcggacctttgagattacgccgctcgtggacgataccgttgaagcctactggagcgtttcgttttctgcaaaggccggatattacattctaacgtacgcgggtcccagtgtgccgtaccaggagctgtactctgtgaaccaaacagccccactgcgtactctcaccagcaacgcagccctgatcgagaagctggaggaatacgcgttgcccaacattagctatttcgaactggagattccaagtggtgagaagctcaatgtgatgcaacggttgcccgtcgggttttccccggataagaaatatcccgtactattcactccatacggcggtccaggagctcaggaagtcagcaagagatggcagtcactggatttcaacgcgtacattgcatccgaccccgagcttgagtatgtgacctggacggtcgacaaccgcggaaccggctaccggggccgcgagtttcgctctctggtggctaagcagctcggaaagctcgaggcagaggatcaggtctacgctgcaaagcaggccgccaaacttgactgggttgactccgagcatatcgccatctggggttggagttacggcggttatctcactgggaaggtcctggaaaccgacagcggtgccttctcgcttggtttactgaccgcgcctgtttcagactggcggttatacgactcgatgtatactgaacgatacatgaagacactttcgacaaacgcggagggctataacacgaccgcgatccgtcacacggacggcttcaagaacgttgaaggcgggttcctaatccagcacggcaccggcgatgacaacgtccatttccagaacgcggcggcgctgggggatacactgatcggaaacggggtgacgccggagaaaatgcaggtgcagtggtttacagactcggatcatagcatccgttataacggagggaacgtgtttctgtacagacagctggcgcaaaggctgtacaaagagaagaaccgagcgaagaaggagcagcaccagtggagcaagaggagccaggactgggttgtttag

SEQ ID NO: 26809 - DNA, 645 bp, Emericella nidulans
gcagtcaccaacggtctgactttctgttttgccgcctacgctaccggtctccgccttgggcgccgcactctcaagaagctcggccttgacgaggatttcaccggtgttgaggagcccgatggagagttctccctcactgaggctgccgagaccgaggagggtactcgccgccccttcaaggccttcctcgacgttggtcttgcccgtacctccactggtgcccgtgtcttcggtgccatgaagggtgcctctgacggtggtatcttcattcctcactccgagagccgtttccccggttacgacatcgaggctgaggagctcgacgccgagactctccgcagctacatcttcggtggtcacgttgccgagtacatggagggcctcgctgatgacgatgaggagcgtttccgcggccagttccacaagtacaccgagaacgagattgacgccggtgacattgaggagctctacgccgaagcccacaaggccatccgtgccgaccccttcaagaaggacgagtccgagggccccaagaagactaaggaggagtggaaggctgagagcaagaagtaccgcaagaccaagctctcccatgaggagaagaaggctcgtgttgaggctaagatccgtgagcttgctgcttaa

SEQ ID NO: 26810 - DNA, 1473 bp, Emericella nidulans
catttctgtggtcctgaccagcttcacggctatgagcagcgcctgacttcagatatctaccccggtgattatggctggtcagtcaactgggacgagccggatgtgcgtctcgattactaccataacatgtcctcggtcatggatgccggccccgttgtgcgcaccaaccagctcgactttgacgaggaggtcatctataagtccaagcagtacctctacgaccatgtgcgccaacgcaccgaccagcccttctgcttgactgtctccatgacccaccctcatgatccttatgctatgactaaggagttctgggacctgtacgaggatgttgagatcccgctgcccaagcacgcagccatccctcatgaccagcaggaccctcactcccagcgcatcctcaagtgcatcgacctgtggggtaaggagctgccagaggagcgcatcaagagaacgcgccgcgcttactacgcggcctgcacgtacgttgacaccaatgtcggcaagctcctcaaggtgctcgacgagaccggtttgcgcgacgacaccatcatcgtcttcactggcgatcacggtgacatgcttggcgaacgcggtctttggtataagatggcctggttcgagaactcggctcgcgtgcctttcatcgtcaacgcccccaaccggtttgctccggcccgcatctcgcagaacgtctcgaccatggatatcctgccgacctttgccgaactagttggtgcgccgctagtcaaggaacttcccctggacggagtctccttggtaccgtacctgaccggtgaagacggcgtgaagaccgacaccgtgctgggcgagtacatgggtgagggcactcaatcccccgtcgtgatgatccgccgcggccgctggaagttcgtctactccctcatcgacccgcctatgctcttcgacgtccagaacgacccgctggaaaaggtcaatctcgttgccggcctccctgacccgtcaatggcagccgcagcggacgccaaagcagcagcagccactgctttcaacaaagctgcacccgcaacgctcccaacccctgctgaatctccgcgcgcaacaccccttgcccaccgcaatgcggctcaggactaccccttcccgagcccaacacccccgcgcacccctagcccaggcaagccatccaatgtcaccgtccccgagaccacggacccatccaagctcctcgcctacttcacggaggaggttcactctctctgggatttggagagcattcggcaggatgtcttgcgctcgcagcgccgccggcgcctcgtctactctgcgctaatcaagggcacccctcacttctgggactgggagtaccgcgttgaccctagcacccaatatgtccgcaaccagggcaagggcgtgctagatgatgtggaattcatctcgcgctggccgagagtcctgcaacaggctgctcaggctcagggcgtgaaggtttaa

SEQ ID NO: 26811 - DNA, 795 bp, Emericella nidulans
gtctgggaaactgccgatggtgagaccaacgtgatgatcgagacagagctatctaaggtctacgagaagattgatcttacgctgctgaaccggctcctgcgtttgattatggaccataatctggcggattatattacctcgaagaacaatgtacagctgagctacaaggatatgaatcataccaacagctatggtttgatccgtggtctccagttctctggcttcgtgttccagttctacggattgatgatcgatttgctcctccttggcttgcaaagagcaagcgaaatggctggtcctccccagagcccgaacgacttcctccagttcagagaccgagcaactgagacgagacacccgattcggttgtatactcgttacattgacaagatatgggtcttcttccgtttcaatgcagacgaatcgcgcgacttgattcaacgcttcctgaccgagaatcctgacccgaactttgagaatgtcatcggttacaagaacaagaagtgctggccgcgagactgtcggatgcgtttgatgcgccatgatgtcaacttgggccgtgctgtcttctgggatttgaagaatcgtctccctcgctccattaccaccattgaatgggacgacacctttgccagcgtttacagcaaagataaccctaatcttctgttttccatgtccggctttgaggttcggatccttcccaagtgccgcaatcttaatgaagagttctcggtgaaagatagcgtgtggtcgttggtggacaactccacgaaagagcgtacagcacacctctaa

SEQ ID NO: 26812 - DNA, 2325 bp, Emericella nidulans
gtgattgagctatgggctgacattggcttgttcagtcattgccaagatcactcgcaaattctcctcgtgagctgcagagccgttatcggcctattgcttattttcggtgtctggtcttatctgggtgccattgagctggatgcgggcagaacggcctggcatatgttcaagcagaatggttcccattgtgctttgcccgcaaatctcgttctagactggtatcttgcctcgctaccggcgggaatacgaagtatagatctcgaagccacgggcaaacgcggtattcgctacccgggtcctgctgcccccgatgaagccggggtagagaccgttacgttcactgctcccctcacccaagggtttgggtacgggatcatcatcgggctcgggttcgcctttgccctggtcatgatcttcatcacctggtccctaaagagctggacggagtgtcaagtctggcctggtggcctctgctgtcgtgagcagttggacctgggcagctactctgctgcaatcttcgccgtggcctaccagtacggcacctcggggccgttcttctatgcatcgggcgccaccgttcagatcatcttgtttgcaacgctcgccattgaactcaagagacgcgcgcctaacgcacacacattcctggaagccatccgtgcccgttacggtaccgtcgtacatctcgtcttcatcgttttctgcctgatgaccaacatcctcgttacggccatgctgctcactggcggcgcagcggtgctcaactctatgactggcgtcccagttgttgcagcctgcttcctcctcccaatcggtgtggttctgtacacccttttcggaggcattaaagcaacattcatcaccgactatatgcacactgttgtcattgtcgtgatcatcttcatcttcgctttctctgcctacgccagcaacgaccgtcttggctcccccggcaaagtctatgacctcctcgtccaagctgctctgcgcaatccggtttcagggaacgctgaaggtagctacctcaccatgcgctccaaagatggcggtatcttctgggtcatcaacctcgtcggtaacttcggcactgtcttcctggacaacggctactacaacaaggccatcgccgcgcacccagtccacgctttccctggatatgtcatcggcggtctctgctggttcgctattccctggctctgcgcgacaacgatgggtctctctgcacttgcgctagagggaacgcgccgcattgcctccgttgacgtaacagccggcctcgtccttccctttgcatctgtcgaactcctcggatatagtggcgcagtatgcacaacccttatgatctttatggccgtgacctctgccttctcggcccagctcatcgccgtgtcctcgatcctcacctacgatatctaccaagcctacatcaaccctgccgcaaagggcaaacgcctcgtctgggtctcgcacctctcctgcgtagtcttcgcaatcgcgatggctgcctttgcgacaggtcttcactacgctggtatcggtatgggctatctctaccttctcatgggcgtcatcatctcctcagccgtgttcccgggcgccatgaccctcgtctggaaggggcagaactggatcgcggcagccgcctctccagttttgggcctcgcaatgtccctggttgcgtggcttgttacaacaaagacagagtatggcgtcttcaccgtcgaaaccacaggagcaaactaccccatgctagcgggcaacgtcgccgcccttctcagccctgtcgtcttctcgccagtcttgacatacctcttcggccctcagaattacgactacgaatccatgcgcgccatccgcaaagtcgatgactcggatgtcgccgcggcggcgcacgtcgacctcgagctcattcccggcgcttccaatacaaactcgtccccttcacagcaacagcaagaggaagaggaaataagaaaactcaacaaagccgcatttatttcccgctgtctcacagttggcatggtaatttgtttcttgatcctctggcctatacccatgtatggcagcgggtacgtcttcagcaagaagttcttcacaggctgggttgttgtgggcatcatctggctctttgggactgcgttcggggtgattctattcccgctctgggagggtaggagcagtatcaaaagggttggtaagcttatgctgctcgatgcgatgggaaggcagtggaaaagcagtgctctggtaggccagggagacgaagagagtgaagagtctgggtctggtgctgttacaccgagcgagaagattgttgcaaaatga

SEQ ID NO: 26813 - DNA, 1452 bp, Emericella nidulans
cctccccgaaagcagtggatcgataagaaaaacgccactacttatcaactcttccatcgttctcagaatgatccccttatccacgaccccgatgcgcaagaccgtattcttcatcctgtttatggcccagctgcccaagcgccaagtacatcctcagcaagtacatcttcagcaggtcgtgctaagcacttaagcgatcttgccagtgaatttgggaatgattccattcgcaagaacgagggtgaggcagccaactatggcatttacttcgatgactcgaagtatgactatatgcaacatatgcgagagttgggtactggaggcggtgcctcgtacttcgtcgaagcgaccaacaaggacaaaggcaagaccaagtccttgaagctggaagatgcccttgcgcagacttcactaaataacgatgacacacgaagtaactggggtaatcgtagttctgtgggctctgcatatggagcatactctactgcttctacatactcacgaaaaccgacctaccaggaccagcaagacgtgccggactccattgcgggatttaagccggacatggatcctcgacttcgagaggtgcttgaggcgcttgaggatgaagaatacgtcgacgaaaaggatgatgatgatttctttggtgagctgactgccgaagggcaggagatggaccctggtgactgggaggatactttgttcgaccacgacgaggacgaaggttgggaatccgatgcaacagagaaagcacctgtccagccaagtacctcatccttgaaacaggagtcgaacgtcgcacccggagaactcccagagcacgatgccccggcacctgatatgaatcctgacgaccaagattggatgcgcgaattcgccaagttcaagaaagctggaaaaacaaaaaccacgcccgcggctccccctagcattgtcccatctgaacagcgcacgacccttgcctctacagtctttacagcaggcggaacaccaatccgtcggaaaaagcgcaagggccgcctcaccaacccctccgcctactccatgacgtcttcctctttagcccgtacagaaggccaccgccttctagacgaccgattcgagcgcctcgaagcgctatacgccctcgacgaggaggaggagtacgatgactcaatgtccatggttagcggcatgactggaatgaccgacatgtcgaccgcctcctcacaagcacctagtctcattgacgcaaatggcaacgcagtcgcacctcgccacgactttaacaacatcatggacgattttctggacgggtgggataataacaccagtgcacaggccaagagaaagggcgcaaagaacaagcgtggcaagaacggcaatgaagcgattggcatccggatgttggatgagattcggcagggtctgggtcctgcgagagtaccgggccgggtgtctggcaaggtttga

SEQ ID NO: 26814 - DNA, 1227 bp, Emericella nidulans
catgctatttttctccttctcgcagccggctttgccgtcgctgccccggcctacaacaagcaatcgcatgctgtaacaaacatccaggttggcccgcgacctttctggctggtcgaccagatggacgacagcccgctcaagaagaagctcgaatcctgcaccgagaagcccatccgcgattcctcctctttctccatctcccatcgcggcggcccactccaatttcccgaacacagtcgcgaggggctctatgcgggggcgcgcatgggtgcaggcttgctggagtgcgacgtcgcatttactagcgaccgccagctcgtctgccggcactcgcagtgcgatctacacaccactaccaatatcctgctgatccccgaactcgccgcgaaatgcaccaccccattccaacccgcgacagcagactccgaggcaacggcgaaatgctgcacctccgacattacgcacgaggaattcctctccctatgcgccaaaatggatacgtcaaaccctaatgccaccacgccggaggaataccagtacggtggtcctgactggcgaacatcgacctacgacaactgcgccacgaccatcgaccacaagacctacatccaaatcaccgacagtcttggcttgcagtttacgcctgagcttaaaactcccgaggtcgagatgcccttccagggcaactatacgcaagaaatgtacgcacagcagctcatcgacgagtacaagcaggcgggcatcagcccaaagcgcgtgtggccccagtccttcctcgaagacgacatcttctactggatcaaggccgaacctagcttcggcaagcaggctgtgtacctcgacccccgtgttgacacgcaagctggctacgaggcggccgtttccagcatgaacaagctctacaagcagggcgttcgaattctggcaccgccgatttttgcactgctcaatggcaccgccagcggcgagatcgtgccctcgtcatatgcaaaggctgcgaagaaggccggtttcgatctcatcacttggtcgcttgagcgctcggggccgctcaagcaggctgccgcagaaggcgagtactatgtctcaactattgcggatgtgatcaagggtgatggcgacatgtaccgcatcgtcgacgcgctggcgcggaaggtcggcgtcatgagtattttctccgactggccagcaacggtgacctactacgccaactgcttcggcctatga

SEQ ID NO: 26815 - DNA, 2013 bp, Emericella nidulans
tatgccgtccgccggttatgtgtctatcctgggcacctccaggtatgcctgccgaccggccgattccccccaaacttccaaccgccaccaaacatgcccaacatcaatttctccgctccgcgccagaacgtgcgggatgcgatgatgcagctacagccccctactagggatgaaatagtcaggactatattcgtcggagggatcacagagggcttgggcggtgacgaaggtgttgaaagaatcctgcggtcagcggggaatctaagacgctggatccgtgccacggatgccgatgacaagccgtgcaagttcggtttcgcagagtacgaggaccctgagagtctaggtacagctgtggaagtgctaaaggacgtgcaagtccctgtgaaaaggcagacgccgtccgactcagaggttaaagaagaacgtgaagtggaaaagagcacacttttggttgttgttgatgagagctcgcttacgtacttggaacagtacgaagcttccagaggcagtcaagatccggccgagcgccagtctaagctggatgccgcaaaaaaggcgctggaaggtgtgctacatgacctttttcatcctacatcgcctactcagagagagaatgcttcggccgttgatcgggaaggagacacctcgatgaaggatgccgagggccaggacggtacgtccgctgaagttgtcaccataccaattactgtcgaggatgaattgtccgatatcccacccgacatgcgagaaacagttgccaaagagattgccgcctttcgcgacagaagtaatcgccgagatatcgaacgtctgaagagagaggaagaaattgagtctctggagagagctcgcaattctggtggcagagtcaatcgtctcgcctccccgcctgcttcagcaccaagtgggcctgctgccggagcaaatgggattcccctgggtgggcgagaccgcgggatgcccaatgcaccatctggtccaaagggattcggcgttcaaattccaaaggactaccagaagggtgtttcattcgttaacgggggttcggtgaacggcgctcctacagtttatattgatcatgaagatgagaatacggacgccgacgatgaggaacttgaacgacgacgccaggccaagcgcgaagcggaactcgaaaagcaattcctcgatcaggagcggcgctggcttaaccgcgagaggagtcgaactgccgccttggagcgtgagaagaagcgagatcaggaggaagaggacagagctcaagaagtgcgcgatgaagcagacaagcggctgagtgagtggaacgacgatgttgaggctagccggaaatctagcgagtactacgccgaccggggtgcttggctgcgtagtcgagcagccttccgagcgcgcgagatcagcatggacgaggcggaccgtgcagcagaagagcgggaacgagcacgatctatccagcagagagaacaggctcgcggtatggcggacgacttccttgcgcgccaggcggaagagctggaaaccaggatggaagccccgcgggagccacagcgcttcaagctttcccttggagctgccgcccagaaggcccaggccgccaccagccgccgcactgttgccgaagtcgaaggattattggaggacgaagaagagcctcaagctacggccagacgacctcttattccgatcaaattcgacagcgcacgcgaagcggctggacttaccgaggaagagagagcccaagccgcgcgacaactcgctgcagagatccccacggacaaagacggactatggaagtgggaaatcaagtgggagtttgtggacgagtctgttgtcagcgagcagctcaagccattcgtggagaagaagatcgtggagtatctgggtgttcaggagcagatgctggtggatgtagtagaagagcatgttcgcaagcgtggaaatcctcaggagcttgtggaacagctggaagaggcaagttcattcattcgggctcatttcttcagcaactaa

SEQ ID NO: 26816 - DNA, 792 bp, Emericella nidulans
gtcaacttcactatcgaggagctccgctccctcatggaccgcaaggccaacatccgtaacatgtcggtcattgctcacgtcgatcacggaaagtccactctcagtgactctctcgtctcgcgtgccggtatcattgctggtgccaaggctggtgatgcccgtttcatggacacccgtcctgatgaacaggagcgtggtatcaccatcaagtctactgccatctctctttacgccaagttcgccgatgaggaggatatcaaggaaatcccccaggccgtcgacggtaacgagttcttgatcaacttgatcgattcccccggtcacgttgatttctcttctgaagtcactgctgccctccgtgtcactgacggtgcccttgtcgtcgtcgactgtgtctctggtgtttgcgtccagactgagactgtgctccgtcaggccctgactgagcgtatcaagcccgtccttatcatcaacaaggtcgaccgctctctgctcgaactccaggtcgagaaggaggacctctaccagtctttcctccgtaccgttgagtccgtcaacgtcatcatcgctacctatgaggacaaggccctcggcaacgtccaggtctaccccgaaaagggtaccgttgctttcggttccggtcttcacggctgggctttcaccgtccgccagttcgccgtcaagttcgccaagaagttcggtgttgaccgcaagaagatgcttgagcgtctgtggggtgacaactacttcaaccccaagaccaagaagtggacaagaccagcccgaggttga

SEQ ID NO: 26817 - DNA, 2283 bp, Emericella nidulans
gctttggctgatgtggttgttgagaaccaagagcccgctgctttaacattctctgaagcagccgtgccggagatcagggctcgctttgagtcgctgtcatcccgaggagctaaaggactcaaggctcagggctttgatgcttcagtaactgagcacgaatacttcctcaacatgagataccaaggaagcgatacatcccttatgatcgcattgactggggatgtggcagacgctggcaacgctttcactgccagacacactcaggagttcggtttctcgcagacacgtgatatcttagttgatgacgttcgtgtcagaagtgtgggaaagtcccgtgtactgaacatttccagcccgttcgaggaactcaagaagtacagctctgacggcttgactccgtgccctactcctgttttctcgcggcagatcttcttcgaaaagtacggctggacacagacccctgtgtatgagcttaagtcattgagcgctggtgtacacatcacaggcccggccatggtcatcgacaagactcagactatcgtcgtcgatcacctgagtaaggccatcatccttcctgaacacgtcatcctcgaagttgaacgcgcagaacagcaaactgttgacacacagactgtcgaccctgtgcagctcagtgtctttggtcatcgcttcatgacggtggccgagcaaatgggacacacaatggagaagacctccatttcggtcaacatcaaggaacgccttgactactcgtgcgccattttctcggctgacggaggtcatcgtccaaacgcgcctcatattcctagccatcttggctccatgagcactgcaatcgcataccaggctcagaaatacaaggctgacttgaagccaggcgatgtcctcatcagcaaccatccccgggctggaggcacccatctgcctgatatcaccactatcaccccagttttcgacgacgaagacaaagagatcatcttctttgtcgcaaaccgcggtcatcatgcagacattggtggtatcgtaccgggctccatgcctcctaacagtaccgagctttggcaggagggtgcagccatcgagtctttcaagatgatcaaagagggtgtcttcgacgaggctggtcttatcaagcatctctacgaggaaccagcgtcattccccggctgcagtggtacccgaactttggctgaaaacattgccgacttgaaggccgccgttgcgtccaaccaaaaaggtatcgagctgatccgggctctggtcaaagagttcacctggccagtggtgcagctgtacatgtacgcaattcaagaaaacgctgcgcaggccgtgcgtgatctcctgaagcaattcgccgccaagtacgaaggtggtgttcttgaggctaccgagtataatgacgacggaatcccgttcaagctcaaggtgaccattgataaggacactggtgatgccgtctttgactttaccggcaccggacctgagcactctggcaacctgaacgcccctccaacctgctcatactccgtcattatgtactgtcttcgctgcatgatctcgaccgacattccgcttaaccaaggctgcctcaaacccattaaagtcgtctgccccgacaacaccatcctctccccctcccccactgccgcaacagttggctgcacaaccgaaacctcccagaaagttgcggacctcgtcctgcgcgctttcaacgccgccgccgcgtctcagggcacaatgaacaatctctccttcggctgcggaggcactgatcctgtcaccggcgaagttaagaagggcttcgggtactacgagaccatctgcggtggtgcgggtgccggactaggctggcaagatccagagatcttcgaaaagcgataccctgtcatcctgcaccagttctcaattcgacatggaagcggcggtaacggccgtggcgcggtggagatggctgtatccgtctcagtgctttctgatcgacgtgtcacggcaccgtatgggctcgagggtggcagtgatggtgaacggggtcagaatatctgggtccgcaaggatcctgttacgggcgccacacggatggtctcgctgggacctaggaagacttccatgtttggagctggggatcggatcatcattctaacgccgggcggtggtggatacggcgctccagttaaggatggtgagggggtaaaggagacagtcttcgtaaagccgcaagactcgaggtcgttcttgacaaatgggtcgttgggcgtgaggcatagcattgctaccgggaattag

SEQ ID NO: 26818 - DNA, 1230 bp, Emericella nidulans
gccaaacaaggtggctatcggcttggagccgacgtcggcggcaccttcacagacgtctatgccttcacaccagacaaccaagtcgcgcgcgccaaagttccaactacagtcgaagaccaaagcatcggcatcaagaacgggatccgcaaggtccaacaggccctcaaggaccgcttcccatgggacggcaagttccagttcatccaccacggcacaacggtcgccacaaacgccgtccttgaaggcaagggcgcgcgaacggggctcatcgttacgaccggccacaaggatatcctggcagtgcgcaggtcgcagatccctggtggcctgggtgcttggctgcattatacgccaccggacccgatcgtgccgctggagcgagtgatacaatgccaggagcgcatgagcgttgacgggaagagcattgtgagagtggacgtagacgcgctgagagatgacctgaagaagtggactggtgacgagaaaccggacgctgtggcaatctcgttgctcaactcgcattgtaataacgagcatgaggttctggtggcggggattgtgaaggaagtgctaggtgacggtgtgacgatcatttcgtcgagcgatgtgcttcgtgaggtgggcgagtatgagcgcacactgacaacgtgcaccaatgccctcgtcaagcccgtggtgcagacctatctcagtaacctgcaagatttgctcgccgaggacggaaacacgatccgtattcttaagtctgatggtggcttgacgagcttggggctggcaggggagctccctgtgaacatcctcatgtctgggcctgctggaggtgtgcaaggcgttgcagacgtcgtcacgcaaaacacgccatataagaacctgatcaccttcgacatgggcggcacgtcaacggacgtcgccattatccaccagggcaagcctcagcttcgccgcgagaccgtcgtgggctcccttactgtgcgctcgccagccgtcgacattcgaacagtgggcgcaggaggaggatctattgccaagtacatgagcatcaccgagaccatgagagtaggtccggagagtgcgggcgccactccagggcctgcctgctacaataagggaggaaaagagcccactgtgtcggacgccaatctggtgctgggttacctgccggaaaacctttctggaggtgaattcaagctggacacggaatctgcaatgctgctgtcgggagattgctga

SEQ ID NO: 26819 - DNA, 1152 bp, Emericella nidulans
gaggaccgcctcgtcgacactgaccccgaggtcgctaagatcatgcacattgacgctatcgagctgctctgccagtcccgtgcccttaaggcattcaacctcgacgccgataagtggggtgtcaacgttcagtgccttagtggcagcccggccaatttgcaggtctaccaggctctcatgcgcccccatgaccgtctcatgggtctcgaccttccccacggtggtcacctgagccacggttatcagactccttccaggaaaccttccctttaccgcgttaacctcgagaccggtattattgactacgacacccttgaagccaacgctgagctgtaccgccccaagattttggttgccggtacctctgcctactgccgtctgatcgactatgcccgcatgcgcaagatcgctgacaaggttggcgcctaccttgttgttgacatggccaccatctcctacgccgatgtagtcaccactaccactcacaagtctctccgcggtccccgtggtgccatgattttcttccgcaaggcgtccgcagcactgaccccaagactggacatcatgtatgacctcgagggtcccatcaacttctccgtcttccctggtcaccagggtggtccccacaaccacaccatcactgctctctctgtcgccctcaagtacgccgctaccaccgagttcaagcagtaccaggagcaggtgatcaagaacgccaaggcccttgagaacgaattcacagccattggccacaagctcgtctccgacggtaccgacagccacatggtactcgtggatctccgccccaagtctctcgacggtgcccgtgtcgaagccgtcctcgagcagatcaacattgcttgcaacaagaactccatccctggtgacaagtctgctctcactccctgcggtatccgcattggtgctcccgccatgaccagtcgtggtctgggcgaggaggacttgaagcgcatcggtcgctacattgaccaggccatcaacatctgcaagttcgtgcaggccgcacttcgcacggatgccaacaagctcaaggacttcaaggccaaggttgcttccggcaccgtccctgagatcaacgacctgcgcaaggagatcgctgcgtgggccagcaccttacctctgcctgtctaa

SEQ ID NO: 26820 - DNA, 1947 bp, Emericella nidulans
atgaaccaccatggtggagggagtgtttcggttgatttcgggatctacgtcttgtggtcggtgattcttgccgctatctcttgtcttttgacgttactcaccaagacggtcgtcccgtcatcggtatcgctgactacgttggacgagaacctgggtgccaacggctccagacaagccaccgaagctgatggctcgcccgcgtcggtgtccggctcgtctccatatccgccgctgccgctgcgtcctgacatggtctactattcggctgctggtagcggtgtcgccgaggtaaaggttatcaatagcggctttgtcctgcacggttaccttggctttaagacgctagttatcaagacattggctctaatcttcagtgtggcctccggtctcagtctcggaaaggagggcccgtacgtccatatcgcgacttgcgttggaaacatagcctgccggctgtttagtaagtacaatctcaacgatggcaaacgacgtgaggtcctcagtgccagtgctgccagtggtgtggccgtagcatttggagcaccgatcggcggtgttctatttagcctcgaggaagtcagctactactttccgccaaagaccctcttccggacattcttctgctgtattgccgctgctctatcgctcaagttcttcaacccgtacggcactggcaaaatagttttgttcgaagtccggtatcttggcgattgggagatctttgagctggccattttcatgtttttgggtgttcttgggggcgcagcaggtgctctcttcatcaaggcttcaagcatatgggctaagtcgttccgtcgcatccccgtcatcaagcgctggccactctttgaggttggcctcgtagcattggtgactggactgatcagcttctggaacccttacacgaaactgccggtaacagagctgctgttccaattagccagtccgtgcgagcactcaacttcagacggactgtgcccccatccggaaggtattggcgaggttatccgcgcacttaccatagcattcgtgatcaaaagctttttgacaatcgtcacattcggcattaaggtccctgccggtatttatgtcccctcaatggtagtcggtggtcttatgggccgcattgttggccatgtgacccagtatctggcgctgcagtaccccaacttcttcctcttcggatcctcgtgcgccgctggtacaggcatggaatcttgtgtaacacctggagtttacgccatggttgctgcaggtgcgaccatgtgtggagtcacgcgcttatccgtcacccttgctgttatcttgttcgagttaacccgcagcctggaccacgtcttgccattttcgttggctgttctatgcgcaaagtggactgccgacgccattgagccgcatagtatctatgacttcctaactgaaatgaattcctaccccttcctcgacaacaaactccagactgtctccgacgccgtgctcggcgacatagtgcgcccaatccgccgcagccgactcattgatattactgagacaccgctcgtcccggcacgcgagctccgctccaagctccagcatctccttatggcaggcgagctagatagtggtcttccgatcctccgcgacggtgtcttaatagggcttatcccggcgccggacctggagtatgccctcgataaccttgaagatgaggatcgaacatcttgtctcatggctactgatacctcgtctgttgtatccgacacggacgatgaggatacgctgcaagtggatttcacgaagtatatagatccggcgccccttgccctggacatccactcccccatagatcttgtttaccaatgcttcgtcaaacttggcttgcgctatctctgcgttttgcatgatgggcagtatgcgggacttgtacacaaaaaggcttttgtgaagtttatgaaagagcagcactag

SEQ ID NO: 26821 - DNA, 603 bp, Emericella nidulans
aagctcctcctctccactcttttcctggccgcgctcgcgcgcgcccaggacaacaacaacgacaactcgctcggtgacaacatcggcgatattgttgacaacgtcacctcgggtgccgaggatgtcggcaccgccatctcgaccgactttgcgtccgccaccgactccctcaccaacctcccgaccgacgtctcttcctgggctgaatctgtcgcttccgacgcctcctcgtgggcgaccgatgcctcgacggacgctgagtctgcctggagctctgccacctctgtcggtgagagtctcttctctacggcgacatcagacgtctcgtcggctctcgacagtatctcgtcgtccgtcagtgatgcgctcacttcggcgaccgacagtgtgacgaccactgtggagacaaccactaccggcagtgatggctcggccaccacgaccactacggaaatcaccacttctgcgacggacgatgcgagcgccacgcagagcggcgatgagtctgagccgaccgattccgacgatgtcgccgcctacgcgaccccattcatgggcgttgccggaatcatgggcgtcatgggcgttgttgctgccctgtaa

SEQ ID NO: 26822 - DNA, 981 bp, Emericella nidulans
aacgaaaccctactccaagatcttgtcatgtaccgcaagagcaaagacaagggtgttgtaatgggagccagaggtcttctaagtctctaccgagatgtcaatccggagatgctcaagcgacgagaccgcggtaaagacgcctccatcagcctccaacacggcgaaaagaaggagaaacggttcgccgcccaagaggccggtggaattgaaggcattgagcttttagagcaatggaaggaggaggagcgcaagaggaagcgagctgaaaaaggcctagcaaccgacgacgaagacgaagagaacgaagacgaagacgaaaatgactggactgcctggaatgtggaagatgacgaggacagtgacgactctggtggctggatcgacgtccagagcgatgtcgaaatcgacctcagcgattccgaagacgacgagcgccccgcaaagaaggcaaagcaagctgatgataaggaaaacagcgctgactccaaccctcaggctccagaaaccaagcctgaccctaggaagcccagccttgcaacatcccgcatcctcacccccgccgacctcgccaaactccaagaactccggcaacaagccgccatcaatgccctcgtcccaggccctaagcgccgcggtgcaacctccgagagccgacacaaggaagaccctctcacagcagccgaaatcgaaggtcttgctgccctgtctgctgggaagaagacacgcgaggaacggattgcgcatgctaaggaggggaaaacagatcggtccgagcataagagtgtgactgcgaagcgcaaggaaaggaaagaagagcaaggcaagagtacgaccaacaaggaaaaggcccgcaagaaaaacttccttatgaccctgggcaaagcaaagtctaagggaaagcgtagtttggtcgagactagagctgttttgagggctcatcatgagcgggcgaagaggggtggcagaaggggtaacaggtaa

SEQ ID NO: 26823 - DNA, 1716 bp, Emericella nidulans
gataaggtgctcgtcatcgactctggccgcatgctattccaaggccctgcacactacgcccgacaatacttcgtcaaccttggcttctactgccctgagcagtcgacaacggccgacttcctgacatcgctttgcgaccctaacgcccgaaggccgcgacgatcgacaccgaagactcccgaggaacttgaggctgctttccggcagagcgagtactacaagcttattcagaacgaagttcaggcctacgaggatcagctccacgacacgaactgtgccgatacccaacgctttcagaagactgtccaatcgtctaagagtaagactgtctcgaagaagtccccttatactgtctctatcgcccgccaggtggctgcttgcgtgcgtcgcgagttctggcttctctggggtgacaagacttctctctacaccaagtactttataatcatctcgaacgccttcattgtctcttccctattctatggcgaggcgatgaacaccaatggtgccttccctcgtggtggcgctcttttcttctcgattctcttccttggttggctgcagttgactgaactgatgcctgcggtttccggacgtgctattgtcgcgcgacacaaagactatgctttctatcgaccgtccgccgttgcaattgcccgcgtggttgtcgacttcccggctatcctctgcatgtgtataccgtttaccatcgtcgtctatttccttgctggtctcgatgctacggcttccaagttctggatttacttcctgttcgtgtataccacaaccttctgcatcacgtctatgtatcgcatgttcgccgcgctgtccccgactattgacgatgccgtccggttttctggtattgctttgaacgttctggtcttgttcgtcggttatgtcattccgaagcaaggtctcattgatggctcgatttggttcggatggctgttctatgtcaacccgctatcgtacagttatgagtctgtcttgtccaatgagttctctgaccgagtcatggcctgcgatccttctatgctggtcccgcaaggtcctggcgttagccccgagtaccagggttgcgctctcaccggatccaagctcggctcaaccgacgttgcaggaagcgattacttgagtacaacattccagttcacgcgtcaccacctctggcgcaactttggtgttgtcatcgcttttactgttttgtacctgctggtcactgtcatcgccacggagactctgtcttttgtcggtggcggtgacggtgccctggttttcaagcgttccagtaatgctaaacaaatcaaagctgccacggaaaagcccaacgacgaagaaaacggccagggcgatgcagtgacgcagtctggaggcaacaatgaagccgctttcaatcgtatttcttctagtgagcgcgtcttcacctgggacaacgtcgaattcacggttccttatggaaatgggactcgaaagctgctcaacggtgtcagtggttatgcgaagcccggactaatgattgcgttgatgggcgcctcgggagctggaaaaacgactcttcttaacaccttggctcagcgccagactactggcgtaatttcaggcgatatgttcgtggacggccgccctctcagcactgattttcagcggggcactggtttttgtgaacagatggacttgcacgacgcaactgctacgatccgccgaggctcttga

SEQ ID NO: 26824 - DNA, 1461 bp, Emericella nidulans
gttgacgaactgcaacaaaaaatcgaggcaatggaggcagaagaggagtcgcttcaaatgtcgatgaaaaagggaaagaaagatgtcaccaagaccaatcgtctagccgatcttgcgcactttatcgagcgtcacaagtggcacgtaaataaactggaactgttgctacgatcacttcagaatggcaacattgaaacaagtcaggtggtggaccttaaggagagcatcaaatactacgttgaggacggtaaccaaattgactacgctggtgaagatgagacgctgtacgacgatctgaacatgggcgacgatgccgaagcacaatttggaataggcggtgacaacgaccgggtgtcgtcgcaagacactcagtcaatgcaagacgaagaggttgaagccaaaccgaagcccaaagcagaagccagcgccactagccaccgcagaccttgggctcaaatgaaatccccgcttccagtccttgcaacactgcatccgtccagctcaagcagctcggcgtctggcatgaagcctgccccccctcccacgcgtctgcccggtgaaacactcaagtatgcttctgccgctgctgccgctgctgcaagcgacaagaatggtgttggaattgcccctctaccgcctccgccaggtgctagccccgccttcccatctgcagtgcccgcctccaaagcttcctctactgcctcacctgttgttacgctagcacagcctgtgccaaaagcaacacctgcagctgcgatagtcgcagaggagggacgctcgcgaacgccagctttcagccccaaggtttctgctgccgtcagcgcatcaaatacggtgccaagcacgcctgcgatggacaaggcagaaaccgccagtacgaaaccacccgctgccgctaatggagagtcgaataaagagaaccaagcaggagaagagtctatctaccaccttccacccggtctgcaggatttaatccattcgttcgaagtaaccaaaaatcgtgcatcggcaaatccctcaagccagccaccttcagtgcagcgcctactcactgcatctgcagccaattgcccagaaccaggggactcagagaagcctcgtcactacaagccccagaacccgtacaatacgcctctttattacccccaggagccactggccatcttggacgatcccaggctgtacgagacagggcggatcgatacagatactttgttctacttgttttattaccgccaaggatcataccagcaatacttggcagcaaaggcgctcaagggccagagctggagatttcacaaacagtaccagacgtggttccaacggcatgaggagcctaagacgattactgaggagtttgaacaaggcacctatcgcttttttgactacgagagtacttggatgaatcgtcgcaaggcggacttcaagtttatttacaagtacttggaggacgaactgtga

SEQ ID NO: 26825 - DNA, 1398 bp, Emericella nidulans
gcgaatcgtatctcacgcatgtttacgggcactggtcgatccaccccaaaggagccagagtcgtcgcgcgaactatcagatagtagttccgatggcggaaaacccactactaatggcagcgggaaacagtcccggccaacatcaaggccttcatcaaaacctccgtcaagggctccctcgcggcaaacttccaccaaagaagttcccaagagtgaaaagaacgaaaagaacgagaagaccgacaggaaggccaaacctgccgggaaagaccagaaggagggttcgactgtccagaagcgttttgagattcttccggacaactctcatcgccaccatctgaagagtacccgacggcaggagaagctgactgatcttcttcgtgatatgcttggtggacggaagaaggacgaccatgcggaggatcagcaactctctctcatgtcaacatggattgaccaattcaaaagcgagcgggataaattagcggccgacaagaagggtggccccaacgccactgcatcgctcgttgataagtacggcaaatgccaggagattgttggtcgtggtgctttcggtattgtgaggatatctcacaaggtagaccctaaagactccaagagcgaacaactttacgctgtcaaagaattccgccgccgtccgcaggaaacaagcaagaagtaccagaagcgactgacttctgaattctgcatttcatcgtccttgcgccaccctaacataattcacacactcgacctcctgcaggatgctaagggcgactattgcgaagttatggagtattgcgctggcggtgatctctacactcttgtgctggctgcaggaaagctagaggttgccgaggctgactgtcttttcaaacaacttatgcgcggtgttgagtatatgcacgagatgggtgttgctcatcgcgatcttaagccggagaaccttctgttgaccactcacggagcccttaagattacagacttcggaaatggcgagtgctttcgtatggcatgggaaaaagaagcccatatgactgccggactctgtggctcggctccttacattgctcctgaagagtatgtcgaaaaggagtttgacccaagagcagttgatatttgggcttgcggtgtcatctacatggccatgaggacaggacgtcatctgtggaaattggctcgcaaagaagaggacgagttttacagacggtacttggagggtcgcaagcatgaggatggttatgcaccaattgaaacgttgcatcgggctcgttgccgcaacgttgtttattccatcctcgacccaaatccttctcgccgcatcaactcgtcccaaatcctgaaatccgaatggcttcgcgagattaaactgtgccaagcgggtgaggaaggcttctaa

SEQ ID NO: 26826 - DNA, 495 bp, Emericella nidulans
atgttcaccaaggctctcgttgctgctactctggccaccctcaccgcggccctcccccagcccaccgttgtccgtcgtgagggcggcgatgccggcgtcaccatcgtcaacaacatggactccgacgtctacgcgtggtccgttacggacggtgttagcaaaatgcacaccctcagctctggaggcggctcgtacaccgagaacttccaggcgaaccccaacggcggcggtgtctcgatcaagctgtccacccaccaggaccagaccgatgtcctgcagttcgagtacaccaagtccggagagactatcttctgggacatgtcttgcattgacatggaccgtgccgcttccaccttcaccaagaacggcttcgatgtctctcccagccagacctccggtgactgccccgctgtcaactgtcacgccggggacacctcttgcgctgaggcctacctccagcccaaggacgaccacgctaccacgggtgcccattga

SEQ ID NO: 26827 - DNA, 693 bp, Emericella nidulans
atcttctaccgtaagggcatccgcaggacggacaagaaaggcaaccaggagatgtacgatctggaaggtcccatcaatgcgtccgtcttccccggccaccaaggcggccctcataaccacacaatcaccgcgctggctgtggcactccagcaggcgcagtcgactgaattcaagacctaccaggagaccgttctggccaacgccaagtctctagccgaacgcctcggtggttcgaccagcagtggtggcctgggctacaacatcgtttccggcggcacggacaaccacctcgtcttggttgatctcaagaaccgtggtgttgatggagcgcgcgttgagcgcgtgctagagctctgtggcgtggccagcaataagaacactgtccccggagaccggtcggcgctgaaacccggtggtctgcgtctcggtacgccggcgatgaccactcgcggtttccaaccggaggacttccgccgggtcgctgatatcgtcgaccgcgcggtcaccattacgcagaagctagacaaatcggcaaaggagagcgcagcttccaagggtgtcaagaaccctaacacggtcaaggcgtttttggagtatgtaggcaacggtgaggaaatctcggagattgtgcagctgcgacaggaggtggaggattgggccggtacctttaatcttccgtgggcgaaggagtag

SEQ ID NO: 26828 - DNA, 1005 bp, Emericella nidulans
gcgggcaaatacgaagatcattaccccagcagcgcagcagccacgacgaggctgtacctcagcgcccaaagtatcaccaagcgggtcagcaaccccttcgagaaaaacccaaacctctcccgccgccagaagctagacctctacctcgtgcgacccatgcccacctcacaatctggtctctggatcctgcgcgggtgggaaaagttgcacggcgtcgtctccccgcgctacgcgaccagcgcactgaccggctggatgctctggctcgcaatcctcatcctctccctcgtcagcggcacctaccttggcttcgcatatctcctgctcatgccaatcaccggaactgcagcctctctcctcctaggcggccaggcccggaacctcctcgcatccgagaacccaggcaccgaagaccgcctcgttgtcgtcaccgacagcctcaacggcggcagctggagcgcctattacggccccaaagacccaatcaacgccctcctcaaccggccccttctccgccccacgcgcccctctcatccgcatctcctcccttggatcatccgcctctgcgtgagcactcagtggatcctcctgattgtcacgtccgcactgcagggctgggacgccgccgtcgtcacagcctggaccgccttctgtgccctcttcgtaacgtacatataccctcccagagcgcgcggcggccgactggctgcgtttcaactgcgggttggccatctcgcggatcgcacagcgttcacgacgcggcgccctctgctctctgcgctggcatatatcaaccccgaccgcgaccagacggcctggatggacccgattctggccaaggcggaggagcgtacgcagtgggagaaggcgatgtttgaactcatcgctacgggccagacggatgagaaatgggccaaggagtactggatgcacctggtggtagagggggtggagatggggaagaagctggagcaagcggttaaacaggagctggcgaggccgtag

SEQ ID NO: 26829 - DNA, 621 bp, Emericella nidulans
catctccccaacattctccttgcctcggccttgacgcttgccccggccgtctacggttacggcgtcgcaactgttgacatcgcctaccacgaagcctgccacaatggcgaagcccctaacaacagcgttgacgaccctgagtccaccgtcgtgaccaaggacacctgcacccaggtgcgtgccaagcactcctttgacatcgacgcgtattccttctccgtcacgccggttaccaaggacacgacgtacgtgtgccacgctgttggtatctacacgaacgatgagtgcgtgggcctcccgatttctgttatccctctcttccccgagaataatgaggcgaagacaccgtgcatcagtgacggttacttcgacaagaacgtctctctgaagctgtactgtgaggatggtaaggacgatgaccacgaggagcatggccatgggcctgagcatgataaggacaaccatgaggatgtcgatgataatgaccataatgacacccatgaggcttatgataaggatggagctgagtatggagctgaggatgcggatcaccgtgaaatgcagactcctgaggctaagccaaagggtattgagggtatccttgacggtgtgaacttgtaa

SEQ ID NO: 26830 - DNA, 714 bp, Emericella nidulans
tctgcccaaaccagcaacgaccacttcaagctggagaatctctttagcgtcaagggcaaggttgcccttgttacaggcggcggctccggaatcggcctgatggccacgcaggcgctcgcaaagaacggcgcaaaggtctatatcaccggccgcacaagcgagaaactcaaccgtgtcgcggagctatatagcaagaacatcgacgggcagataattccgcttacggcagacgtgacggataagagctcgatcgagaaattggtcgaggagatctcgagcaatgaaaaggccttggatatcctgatcaacaacgcgggcgttagcagcgcaacgcaggatacggacaagcaaacaccggaggacttgcgcaaagcactcttcgaggacgcaagcagttccatggaggagtgggataagacttaccgcacgaacgttgtgcagtgtttctacacgacgactgccttcctccctctgctccagaaggccactgatgcccagcggggctggtcctcgactgtcatcaatatctcatctatttctggtattgtcaaggcctcgcagcaccattttgcttacaatgcaagcaaggcggctaccatccacctgaccaagatgttggcgcacgaggttgcgagctcgggactgaagattcgtatcaacaacatcgcttctggtgtctttcccagtgagatgacagcgagcgagagcgactag

SEQ ID NO: 26831 - DNA, 2127 bp, Emericella nidulans
ccgcacactaatctcatcttccgcacctggttcgaaaatgaggcggaccgatggaaagccgtctggattggaaacggaggcgacaagccaatatacctccgcaaatcgatccaactgtcttctgctaaacgcgtcgagaaagtagtcatcttcgcttcagggctgggtcacttcaatctcttcgttaacggaaagcctgcctcgacgcacgttctcgaccccggatggacaaactaccaccggaccgtgcaattcgtcggctacaacgtaacgccgcagtggagcgagaaggagaatgtgatcggagcacatgtcggtaacggtttctacgcgggcgatcaaggggaccggttcttctggccaatgtacgaggacaacacgtacgttcggtacgggaatgagctgtgtttcttcgcggagatccatgtgcactatgacgacggttcccatgaaacgatcatttctgacccaagctggaaggtgcgcaagagcgcgacgacgctggccaatatatatgcctctgaagatcatgaccggcgggggtatccatttgggtgggatacaccaggctatgatgatagcacctgggcctctgctaagccgttgactgggcctagaggcaaacttcgataccagagtcagccgccagttatcctacacaatctcttcaccccagttaagcacaagcagctccggcccggggtgacaatgttcgatttgggccagaattccagtatcatgccgcgtgttgaggtcagtgggcctgctggctcagagatcatcatccggtactcagagacggtcgacgatgtgggttcagtgtttatgcccgatcctttgttcaaagagttcgagtatggcgtgtattccaaactcatactatcagggactggggtcgaaatctggacaccagacttctcttttacaagcgcacggtatattcagattgaaggtgcgtcgctcgacgagaccgacaacctcccaacaatccattctgtcagtgctcgacacatctcgtcggctgcaaggcagcttggatacgtcaaaacagataggaaggacgtgaatgacctaataaatgcctgttactggacgttctcctcaaacatcttcagctaccacacagactgcccacaaatcgagaagttcggctggctcgaggtaacttcactccttgcaccggcgactcagtacgttcgagatatggaagctgtttactccaaaatcctggacgatatcatcgatacccaggaatcaaacggtcttgtgcccacaatggcaccagaaatcagatacatgtgtggtccgctccacgacacgatcacttggggctgcgcaattgcatttcttccggaactgatcaagcgatactatggctcaacggaagtattcggcaagatatatcagccttgcattcggtacatggagtacatgaaaacaaaagagcgacaaggaggtctaattgagcacggactcggcgattggggccgcgatattgcgttcgggaaccaccaggcgaacattgagacagcagtgtactaccgatgtctacgcaacgttgccttaatggccaaagaactgggccaagcagacgatgaagcgaaattcaccgcgtgggcggaacggatttatgctgtgtataacaagcacctcctgatcaatgacaaagcttctcgcccatacgccttctacacctcactcgacaatccaggtacctacgattgcacgatggtcgcgcaagctgtcgctctgcaattcggtctcgttcctgtagagcaccgggcagaggtgataaaagccttcctgtccgcctgcgaggcgtcaggaaatcgcatcgaggccggcgaaataggcctaaagtacctttggaacacactcgcagaaccggatgtcgaccgcccagatattgtgctggccatggcgcggcaggaagagcatcccagttatatgcggtttctccgacggggcgaaacgacgcttcttgagttctggcaagatggtgccgctcaaagtgccatgatatgctgggaacaatatatgaatggttctatgaagctgcaaacattcaggcacggcgaggagttccagtcaatgaagctcacggtagcagccattatcctcgactga

SEQ ID NO: 26832 - DNA, 1074 bp, Emericella nidulans
tcttcccgccaggtcacctttgctgctgcccagctgggcccgatccaacgaagcgactcacgcgagagtcttctgtcgcgcatgacatctctgctagacgaggccgtatcgcaaagtccaccagcccaagtggttgttttccccgagctggccttcacgaccttcttcccgcgctacttcttcccggacgagcaagagctgcacagctacttcgagcccgaatcatccagcagcccgatcgatcagtctccaaacgtgaagccgctcttcgaccatgccaagaagcttggggtcgatgtctacgtgggatatgcagaggcttggaaggacggcgaaacaagagaattctacaactcggccgtttactactctggacgatcaggcacggtgctggccaagtaccgcaaggtccacctcccgggagtcgtcgagccgtttcctgaacccggcgcaacgcagcagctggaaaaacgatacttcaagaacggcgacggcttccaggcattccgggtcccgggactagtgcgagacgctctgaaggcgacaccgaacgcacccccggcacccgacggccagggcgactccatcttcggcatgctcatctgcaacgaccgccggtggccagaggcatggcgtgcgtacggtctccagggcgcagaggtcgttttatgcggatacaacacgacagcctatgcgccccagcttcttggaagcgacctgtatgaatcaaagccactcagtcgggaagaagcggaaaaagaagtcctgttccacaatcgactcagtctgacggcgaacagctacatgaatgcatatttcagcgtcaacgtggccaaggccggcgaagaggacggccatccacttattgcggggacgtgcattgtcgaccccaagggatatgtggtcgccgaggcccgcaccaagggggacgagattgtgagcgcgacgctggatctcagaaaatgccgagctggcaagaccaagacatttgacttaggccgtcatcggcgattagacgcatacggactgttgctggagagagccggcgtggaagagccacccttgttgtcgtga

SEQ ID NO: 26833 - DNA, 1716 bp, Emericella nidulans
ccaaagggcatgcacaacccgctgcccgcatcactgggcacgggctttcttggctccctccgctttggctcaggcatcctcatcgcgcgtcttcctgaaagtaatgatacagaccgtccagatggtggtagtggatggtcgcccccctccgcgataagcaccttcggtcttggcttcggcggacaagtaggcttcgaactcaccgatttcgtcttcgtactcaacgacaccgactcggaacgcggaaattgccggacgctcagcaccaatggcgggggaaagatgatgagctttgccaaaacaaagggactctttgggggtgttagtatcgagtctggggttctcgttgagaggcgctcggcaaatacgaagttttatggaaagaaggttacggcaggtgtgattttggagggcgatgttgatgtgccgggaggggagcggcaggctgtggaggagctgatgagcgttttgggagagctttttgccgcggatgccaacatcaacggtgagggtgaggatggtgatgggcagcgaggtggagatgtcgtggagggagcctgcgggcaggaccctgcgcttttgagatcctacgcgacaatggcagatcgcgaactcaacatcctctccctcgatggcggcggcgtgcgcggcttgtcaacgctgcacatcctcaagagcatcatggaagcaatcgatcgcgagcatccgccgaaaccgtgcgactttttcgatatgattggtggaacagggtctggcgggttgctggcgctcatgcttggccggctgaagatggatatcgaccagtgcatcatcggatacacgcgactctgcaagcacgtcttcggtcgcaagaagcggctctctttgaccggaatgagtccgatgtcaatgtcgaaacgtaaggcaaagcatgatggcaagaaactggcgaccgcgctgaagagtattctccgcgaactggggcacgaggatcgggatatactcttgcaggatgtggatttgagtgtcgcgtgtatgtcgcttcgttcttcaaggttctacgataccggattgaagctaatgatgatgtccatgtgcagcttcgtctgcgttaccgacgcctcaacccagaaactggtacccctttccacttacccgagcaaatactgcccgaacgagctctacaagtcggcaaaaatctgggaggccggtgtagcgacgtttgccaatccggccctcttcgagcccatcgctctgggtcccgcgcgccgccgctacatcgactcctcttcgcaagcaaataaccccatccgcgaggtctggatcgaagcgaaaaacgtctggcgccttacaacccttgagtcgcagctgcggtgtcttgtctctatcggtacgggacagcatacaatcaatcgagggtcaggccgcaagacaagcggcgtcggcggagtgtttggattcgcgaaaagcgctgaagttgtagtcgatcccgaggtcgaaacgaacaagttcatccaggaacacagcgagcttgatgacgagggccggctattccgtttcgatgtgccgaatggcctcgcggaaattggtcttgacgccgtggatgagatagagacgattgtggatgcgacgcaggattacctggccaaggagctggtctacaagcaggttagacgctgtgggaaggcattggctaggccgggggatagtgaggtctcttttccaattcggcggtga

SEQ ID NO: 26834 - DNA, 1440 bp, Emericella nidulans
acgacccgaacgacagttcctaatgcctcgcaacgcgctctatccactgcggctgttcgttgcctgaccctagacaacatcaattcgaacgtcaaggctgccaagtatgctgttcgtggagaactcgccgttaaggaggaggaataccgtgtgaggctggctcagggagacaagacactgccgtttgacagcgttattttcgccaacatcggcaatcctcagcagctcgaccaaaagcccatcactttcttccgtcaagtcctcagtcttatggaaaaccctctactgttaagcaacaaagatgcccttcgtacgtctttcggctatcaggatgatgttatcgagcgggccgagaagcttctggccgaagtccagagtgttggtgcatacagtcacagccaaggtgctcccctgattcgcgagagtgtggccaagttcattgaagaacgtgatggcttccccgccgaccctcagtcgctttaccttactggtggtgcctcttccggtgtaaacaccattctgaacgtcatttgtaatgggccaaatgctggtgtcctagttccgattccccagtatcctctgtacacagccactttatccctcttgaatgctcagtgtgttccttaccacttagaagagcagaaggcttggggtaccgacatcggtacaatcaagaagtcattggaacaggccaaggctgcaggcactgacgttcgcgccattgttgttatcaaccctggcaacccgacgggcgcttctttgagtccagctgatatcaagagcgtccttgacatcgccgcggaagagaagctcgtcgtaattgcggacgaggtataccagacaaatgtgtttatcggagaattcacatcgttcaaaaagaggctccgggagctgcagcaagaagtacctggtaaatacgacaatgtcgagcttgtttcccttcacagtacttccaagggtatggttggtgaatgtggccatcgcggaggttacttcgaactggttggatttgatcccttggttgctgcccaggtctacaagttcatcagcatcatgctctgccctcctgtcatcgggcaatgtttggttgaactgatggtgaaccctccaaaggagggcgagcccagccatgagttgtatcagaaggagtacaacggcatccgggaaggactgcgccagcgcgccggtgccatgtaccttttccctactatctcactgcctcccaaggctattgaagccgctgccgctgagaaccgcgccgcagacgaattctactgcctccgtctccttgacgccactggtgtttgcgtcgtccctggctccggcttcggtcagaaggagaacacgctccacttccgcactactttcctcgcaccaggcacggactgggtggagcgtatcgtgaagttccattccgagttcatggccaaatacaaatag

SEQ ID NO: 26835 - DNA, 1341 bp, Emericella nidulans
tcacacgcgcagttgatatcatgtggcgatgggtggtcggaatcggcgtcgtgcccggcgtcatcgcagacattctttcgcttctttatccccgagagtccgcgctttctgctggaaatcgaagacgatccggtgcaggccgagttcgatgccacgacactgttcagcgacccggcgcctctgtcgagcctcgggtcgccagagattgccgttgaggagggatatcggtatcccggttcggcgtcgactgctctcactagtatgactactgccacggcgaaccaattcaacgatatcaacctcattgccccatggaatgaaatcatacttgctgctcctgcgctccccgcaacagccacaacgatgggcacgggcaagggcacgagtacagctgccggtcccgacacatccggcaccggtgctggagccctaacgattcgctccatgtccattgacgacttcacagaccggaccccttcccagtaccacgatagcctccctgaaggcacgttcctcaccccggcaacgctcaacagccactggcgcctcaccaaggtcgacataacgcaatacttctggcatgagggcaactggcgcaccctgctcgccacgtcgctctcctggctgctcctcgattttggcttctacggtataggtctctcctcgccccagtttctcgcgaagacctgggacagtctcaaactctccggtcccgccccgccctggatgacagacgacaccggcgcaactgatatatacgacatgttccgcgacacgagcatccactgcctgatcatcctcaatattggcagtttcgtcggcggggtcctgatgctgctgactatccacaaactcgaacgcgtctcgctgcagaaatacggctttctagcgctagcagcccactttatcgcgcttggaaccatgttcatcaccgtgcacaaggagggccccgtcgcggtgacgctctacattatcgggcagatcttgttcaatttcgggcccaacacgacaacttacatgatccctgctgagatcttcccaacacgataccgcgcaacgtgccacgggatcagcgcgggcgcgggaaagctcggctcgatattgattcagctgctctcggcgtattataaattcggcacggggcccggcaatgagcagacggtccgccatggtgcgtgtatggttattggggcggcggtgacgcatttctggatcccgccgacgcagagaaagagcagtgatgggagggcgaagctttggggaggcaaggcggagacgctagaaacgctcgggcttgggagaagagggtggaagagtcggtttgccggtgtgagaagataa

SEQ ID NO: 26836 - DNA, 840 bp, Emericella nidulans
tctcgtgtgccgtactatctcccgcgttctagccagctgcctccatttggagagatcaagttggaagatggtctgatcaaggatggactgtgggacgtctacaaccagttccacatgggcatctgtgcggagaacacggcaaagaagtatgagatttcgagggagatgcaggatgagtatgccattgcgtcatacgagcgggcacagaaggcctgggctgagaacaagttcgccgaggagattgcgccagtgaccgttaagagcaagaagggcgacactgtcgttgagcgtgacgagggttatgaaaacctgcgggctgataagctgaggactctcaagcctgcgttcctgagggacggcacgggtaccgtgactgctgggaacgcttcaactatgaacgacggtgcatccgccctcgttctggcgaacaaggagctcgcccgcgagttcggtgccggaaagcgcgccctcgcccgcattgtctcctccgccgatgcggctattgacccagtggacttccccgtcgcgcccgcgaaggccgtccccatcgctctcgagagggcgggtatcaccaaggaccaggtcgctgtatgggaattcaacgaggccttcgctgccgtcatcgaggccaacaaaaagattctcggtctggaaggtgcccgtgtcaacgagctcggaggtgccatttctctcggccatgcccttggtagctcaggctcccgtattctgacgacgcttctgcaccagctgcaggctggcgagtatggtgttgctgccatctgcaatggtggcggcgctgcaactgcggttgttgtgcaaaaattggaccgagtggattaa

SEQ ID NO: 26837 - DNA, 960 bp, Emericella nidulans
cattccaactacccctccgattcggagactgcggaactaagagactctactgagtcgggctatgtcagtggtggctcaagtgaagagtatctaccagagattgtcttcaccaaacctcatcttcagttcctcaaccgacaacttcaattccttgaaccccaaggtcagctcttccacattttcagttcaagacaacgacgcctaacccctcttgcagatgtcctcagatggtgtgtcacttggctacctcacctgtatcagaccaccgcctttggtcttactggtcttgtgatcatggatatgctttccaaactgtccatccctcgccctcaaatggtcaacctcatcttcctcgacactctgcaccacttccccgagacattgaaacttgtcgacaatgtccgcaagaggtacccgctacagcacatccatgtctacaagccccagggtgttgagaccgaagaggagtttgctaagaagcacggtgaacgcctgtgggaaaaggatgaccagctgtacgactggattgccaaggtcgagcctgctcaacgtgcctaccgtgagctcaacgttcacgcagtcctcaccggacgccgccgcagccaaggaggcaagcgtggagacctggacattattgaggtggacgaagccggcctcattaagatcaaccctctcgccaactggacctttgaccaggtcaagcagtatgtcaaggagaatgatatcccctacaacgagttactcgacaagggctacaagagcgttggtgactatcactctacatcccccgtcaaggagaacgaagacgaacgatcaggccgctggaagggccaggcgaaaaccgagtgtggtatccacaaccctcggtcaaagtacgcccagtacttgatggatatggaacgcaagcgacaggaggaagctttgtctcaagcgttgcagaacaagcttaccaccgcttaa

SEQ ID NO: 26838 - DNA, 2622 bp, Emericella nidulans
gactccgaagattcgacgtatttgtgtcgaagaaggtgcaaggcctcgctggcactgttctgcatacttatctctctgcaaaaggctgccctcggcatgttttgctttggagcagaaactgcattggccaagtggaccaaagatctcgtggaagaaattggcttgcctcgtcgcctggtgcaagatatcgacgtcctgagtcccgaggaacgacttctgctcctgcagcacctatctctgacagatgcaccaagtgacctaaccaagtcgatttgcgcgtacctccagcagcagctcatagaagggacatctctcgtacaacttaagcaggtcaacacagtctcatatcttgaagggtctgcatctccggagacattagtgaattctcgcgtgaaatggtaccgagaacaaggctgcagctatccttcgccctcggtatgcctgtctctcttccgtgaggtcgaggcgaccttccctcagatcctcaaggagcgccgcgaagccgatcttgctcagatctcgcgtggtttgtgccagttgatgcaaggtaaacaagtcgacgcttatactgatatcttggcccttgcgctgttttgcgctgcgcgaaaaggagcccttgatgaaatctatcaggaggtgactgatcggaacccattgttcaatgctcattccgatcaggccgctgccttcgccgaatcctttgctcttggatctcgctgcgagtcctattttgacatctcacccagcgctttcggaaaattactgtctgatcggttccgcaagagctacaaggacggagaccttccggactggatcaacggcgctccagagatggctacatcgtatgccggcgcccagatcgatgtcaatcctgatgataaagtcaagccaatgcgcggatatcagcggttcaccttcctcagtgtctttgccttcccggccttgatcgatatcattctccttaccctcattggacgtggactgtacctctcagccttcatgacttacgaagagcaaaatagcgccaccactgccttgatgatttcgctactgttgtctggaggcattggtacctggattgcttgcggtggcccctactacctcatttcgatggcttttgctgcaacgaacatgttcgtcttcatcaggcttattgccggtctagcattcactatcgccggtggcctcattggatttgttgtggtgtcaggcgtgaatggcccacgggctggaattgtcttttacctctatcttgtcgccttgaccacctacttctccggatttgcctgtctcgcgagcttcagctatcccggctctactttcctgtctgggcgcaaaatcattttcgcatgcatccccattctgttcatctcgcccattgttaccacctttaccggccacgactctgcgatctacattgcggtcatctatgttttcatcggagctctgatattgggtctgcgaagtgtcgcttcaaaatgggtaacctggtaccaaaaactgaggaaaacagatgacacagaaatccggaaatggtacgtcgaaacatatggaaacggagatgagaaggtatttggaggtctcagcgacccagccgtgttgaagctgtcgagggaggcactcctgaaagatgtaacagcagagcgtaaccgctggttcttcagcaggcctacgacaaaaagcacccttgttcttgagctcgcccgggactgggaagccacgaacttcctcctcgagtggtattgcagatacgcagatgttcccagaccgattccctatagctcggggtggaacacgcagaccaaggttgcactagagtctctcaaggctgcccaacggggtatccgcttgcacaacgcttttatccattggcgtcaatcaagcagggaaatcggctgtggaatgctctacttcatcgtcgcccttctggacaagtgggtggaacttctcagcggtggccaccttatcggtctctcagcgtccttgacgacggcttaccgaatggcagtcggtttttcccttgttggaagccataccccggtgcctctcaaaaccgctaaagatattcgagactcgcagaagcgagacgtgaggttcaagagaaaggtctactggaagacacttggcaagtatcttatgtggcattcatggggccttgctttctcaacagcccttgtatggacgttccagtcgcacatggaggcaatggtcatgttcctctcgtacgttgcggcgtacaccggcttgctctggtaccagtacacgaaaatatttactggccctcatgcgctgaagccgctgttggttggctctctcgtcggcctaccgcttggtatcgcgctgaaggtctgccttccgcacttcatgtactcgcaagtggtcggcctaggagccgccacatggacagtcgcattcctctcgctcataccggccaagatgggaatgcctaagcgcgtcgactccccggtagagcttggcaagacgttccacgcttacaccgcaccctgggacgatcccgactggagccagcaggagctgcaaacattttacgaaagcatttctctcattccctcggacgctcgtctcaagcttgtgccggctagtcaccaggatcagaggtga

SEQ ID NO: 26839 - DNA, 1323 bp, Emericella nidulans
gcttgccccagcacttcaaaggacatgctctcagtcagcgacacggaattgaagagcatggtcttgaaggtccaggagcgttccaggatcccggaagcctggggacagaaacttgacaatattctggaagatgatccgaagccccagttgaaggtccttcataacctacttaatgaaggtgagaaaatcccataccatttacctggtctccaagagcttgcggccttcgttcagcgctgcgataagtgggttgaggaagcaaccaactacattacgcggaagcagcagaaccgaaggaagaacgagaaagcttggcgcaagactacttccaaggcctcgcagctggaagaacgtgaccgtgaagttcgcagggtagaaaacatctacgcccttcttgcagaggctgataaactgtcattcgactgtccacagatggcggctctggaagagaaaacccgcgagatcgagaaattccgcctggacgttagcgctgcgctcgcgaatccgcatacccggtcaatacaggaagtcgaagagctcgtggaaaactcccggaatttcaacgtggatctaccggaagtggaggacctggaacacattgtcagacaaatgaagtggaacgaggatgcaggtcgcagacgtggccaatatctgactctcaaggactgccaggagcttatcttagctggtgaacagctgggactctcggaagcgaatgaacaccttgcgcatttcaaagacctgtgtcgtcatggtgaggcttgggaagcgaaacgtaaggaattaatgtcggtcgaggcggtccactaccaacagctggaagccttgtcggcgcaggcaaaccgagttcctgtctccccagagacactcgcagctgtagatgcaatattgaccaaacaacgtgaagctcagaaacggatccaaagtttgtatgagaggagcaaggacccggattacaagaaacggcctctttacaaggaagtacgagaattaatggagtcgctggaagagctaaatagtcggccaactggcgcaattgacctggagcgtgaacagaaacggcatgaagactggatgaggaaggggaaaaagctgtttgggaaggctaatgctcctctgcatatcctaaaatcgcacatggagtatgttgagaagagaaatttctactgtttcgacctcgaagatcgttttcggcctcctgtcgagccagcgtcaagggacaatagccctgacggccagggaggggatgtgcagcagtactacgggcagtctagagcgacggggatggtttctgtatttgcaggcatcctgaagctggaatga

SEQ ID NO: 26840 - DNA, 1164 bp, Emericella nidulans
atatttaagctaagaatcttcaggtcgttactggagccaccgggctcccttggctgccacgtcgtcgccaaactatcaactctcccagacgtacaaaagatctactgcttcgtccgcgccaactccaccctcgatgcttacggccgcctcttgggctccctccgcaccagacgcgtctatgatactctatccacctccgcaaagaacaagttaatagccctcccttcgaacctcgccctcgcaactctaggcctcgacacaatgacctacaataccctcacctccaccatcacggacataatccactgcgcctggtcagtaaatttcaccctgcacctctccagcttcgaaaaggacaatatcgccggcatccaacaccttgcaaacctctgtctaagagctcaacggcccgcaccagcaactctaaacttctgctcctctatcagcgccgttgtccgctcgcccgaaccctccatacctgaatccttacctttaagcctcgcacacgcccaagccatgggatacgcccagtcaaagcttgtggccgaacatctctgcgtcaaagcatatcagcaaacgggcctctgcactcgcgtgctccgcatcggacaggtcgttgccgatacagagaacggtatctggaataccaccgaggcaatcccgctcatgatccagtcagcgacgacaatcggcgccctgcctaaactagacgagtttcatcgctggcttcccgtgaatactgtagccggcgttgttgtcgatatcgccctctcagagtccgatgtagacggaccaaaggacgcgcaagccatttacaacattatctccccgtaccccttccactggacaaacgaactgcttccctgtctgcgggatgcgggcctggttttcgaagagctcgacacccgcacctggctcaagaggctgcgcgaatcaaatccggatccccaggctaatccgccgattaagctggttgatttctggacggggaaatatgatcacgacttcccaccgcgggttgtaggctgggagacggggaagacgaaggctgtctcgaggacgtttggccaggcaaagaagttgcagcgtgatattgtgcagaagatgatgagttacttttttggtgttgatgggtgggggaaggggaaggtgcaagctacttga

SEQ ID NO: 26841 - DNA, 1257 bp, Emericella nidulans
gtccagatcgacactagcctacgcagggtctatgctacgctggaagctgtgagagattcttgctcacacgcctcgggggagttgatgggcagcggcaagaagagggctaagatcttggtggaaaccctggaaagtcgttacaacgatgcgttggcgacaaaggaaacattggagcaaaaggcccaagccggcgtgcgtttgatggaatcttttttgacggagttggaatctcgccgtgacgccgttcgggatcgcggtgtttacggagctttggacgatggctggaaggcagtcgactcgacgctggttcaagcaagggaggtgatggacgagggtatcgaacgggctcgccaagtcaaggacgccctccgcgagaatatcgaccatgctattatgctcgccaaagagaagcgcttgatcagctactcggatctaccggcaccatggcggataaacccgcatatcctctctggatatcgattccactcgtctaaagtggagtgcctaacttcggttttcaccttctccaatgagcttgtcaacatctggtcgcacctgatcggcctcatcatcgtcctctctatcgccttctacttctatccactgaaccctaattttcacctaagcacgaattccgacacgctcgtcgctgcggttttctttttcgccgcctgcaaatgcctggtctgcagcaccttatggcacacaatgaacagcatcgccgatcaaccactgatggagcgcttcgcttgtgtggattacactggcatctccctccttgtcgccgcgtccattgtaaccaccgagtacacagcgttctactgcgaacccacatcccgctgggtctacattctccttactatgtccttaggaatcggcggcgtcatcctcccctggcacccaaccttcaatcgcgctgattgggcctgggttcgcgtcgccttctacgtcactttggcccttaccggatttgccccccttgcccaactcacctacgcgcgtggcttctcgtggtgtctgtatttctacgctcccgtcatgaagagtattctcgtctacttcgtgggtgcctgcgtctatgcctctcaaatcccggaacgctggaagccaggtctattcgattacatcggcggcagccacaacatctggcaccttgctgttcttggcggcatcctattccactaccttgccatgcaggacctcttcgccaacgctttccagcgcgcaaagggtgaatgccctaacctcacctcttga

SEQ ID NO: 26842 - DNA, 1200 bp, Emericella nidulans
gcgaacccggtcaccgaaatcgacgtcgacctcaacactcaagaagtccttctcgcagcgtcacagcacgacaccgcaaagctccgacggctcctccgtgccaacgatgcggccggaaccccgccaatgtcaaggaccctgagacagacaaatggggaccgacaaacccacgggcaggagagcacagttgaggccgccgtccagaccgtgaaacttcttttgcaggagggcgctatctggaacgacctggatttaaacaatgagactcccggttgtattgcgaggaggctgggactgactgagctatatgacatggtcgtggatgcgggagttagggcagagctgctgttgaacaggttggatgggtatgagcaattgtcggatgaagaaatggaagaagatggggaacaagagcaagagcaacaggacgccgccgtcgccgccgacgcaagcattacaaacacagcagaggacgagtccgtcccgcagctagttgataccacagctgcagcacctccacaaacagcagatgcggacgccagtgtcacaagctcccgctacctgaactcagacctcacattccagcaagaccgacttctcgaccaggaccaaaacggcgtaatgatggcctgggagtcggacatcatggccaagtccgcaaagcaactcctcccgacaccaggtctccgcgtcctcaacgtcggacacggaatgggcatcgtcgacggcttcatccaagagcagtcgccgtcagcacaccatattattgaagcgcatccagccgttgtcgcagaaatgaagcggaaaggctggcacgaaaagccgggagtcgtgattcatgagggcaagtggcaggatatacttccgggcctcgtagctgaaggcgtgatgtttgacgcgatctactacgacaccttcgcagagtcttatgcggatttccgagagttcttcacggagcaggtgatcggagtgttggagcaagagggaaaatggagcttcttcaatggcatgggcgcagaccgacaaatcagctacgatgtttatcaaaaggtcgtagagatggatctcttcgaggcgggattcgatgtcgagtgggaggagatcgatgtgccgaagctcgaaggcgagtggaacggtgtccgtccgccgtactggagtatagacaagtatcggttgccgctgtgcaagtacatggattga

SEQ ID NO: 26843 - DNA, 1185 bp, Emericella nidulans
gagaggaagcgtattgtggtcaaggactggcttcacagtcttttgatttacaatctctgtgacttcaacgagtttgacctggttcgcgagctgatggtggttcgcttgaaccaggggcatgttatgagccgagagcttcgcacgtatgttctcgactcagcgagcaaggctcaccactatgatttgacatcctttatctggaggagaatagtggaactaaagaacgctgccccaccacgtggcatctgcgagcaggttctcgaggtggctgcgcgccatggagatacgcagctcaagaacgctgtagtcaatatgctcgaacacaatgagctggaacttggatataaagatttcttgagcttggtcaggggacaccttgcggccggcgatctgtattccgcgttagaaatatgtacggggactgcccgcggtgcgcgaatgaggtgtttcaagtcgatccgagtccattgtcgcgagaataacatccacccgcgagatatctggaacacgatcaaggcgttgaaggcatcgggaaaagttatccagctcgaatatgccgccttagtaatcgaactgtgcgagaaggccgcggcccgggatccgttcgttgttgacgacggagtcaacatctacaagggaatctacgccctctgcggtcggaacccgactctgccgatgttcaactctctgctcgccatgtgccgagccggcaacaacgtccagtctgccgtatttttcgtgaaggaaatggcgaaactcggcctggtcccgaacggggagacctttgagcatctgctatttctttgcttgaaaaccggcaacttcaagtccgcctatctctatttggatgacctatacaaacgcgggttcaaagtccgaatccgcctacgtaatgagatgctgcgtctgtgtgcggaatcggacgacgagtatgctgccaagctattggaacacaaggaacacccgcagcttggaaaaaccgctgcacagagagaacggtacaagagacagagggcgaaatacaaggagaggagaaaggagaagagaaaggcgacgagcattgcgaaggcgggtgaggaggaaggctgggaagactacgagcccagtctcagcacgccagaggatctggtggccaagaccgagaaggtcaagacggcggtggagcagaagcctacagagacttga

SEQ ID NO: 26844 - DNA, 855 bp, Emericella nidulans
gatagtccgcttgcttccccagccaaggcacgacaggccgccatccaagccaaagactgggcatatgtgaactcctggttaaaccgccgttacgcgccaaatcccgttcccgaattcgagaaaaatgaagatacactacgtacattactagccctagcagcggcgaacgaggcagcagacgaagaggcagcgatgctccaccatgcgcgtgagcagacaatcgagggcttcaaggctcgagaggcgatggaggtcaagcaaaagatggaaatcttggatgtgatagagaactgtctcgatgaagctgggaatcgggacctcgacgatttggctgaaacagtcgctgttctgggcacgctgggcacgagcacagaggacgtcggtcagtcgatagttgagctcaccaaagaagaatttgaaatccaggagcagatacagagggtcgagaggttgcacaactatctcaagcgggaactagacactttacacgaacaactccaagaactcaagtcgaatcctgcgtacgagattggcaatcttcctgcgcttacggctgaatggacaagaggcaccaaggtacttagcgccaaagttaacgagtataaggacagatcagcagcattggagcgcaatagcaacaagggtgccactctcgaggaagtcatattggaagaggaagatgtcggcaggttagtggactcggtcaggtcattagaagctatgatcgagacatttcacaatcttcccaaagacataaccggtgctcgagccgagtatatgaagctggaggctgagttcaaccgcctcatccaaacgcgcaactcgatattcgagaacttgtcggacagacgttaa

SEQ ID NO: 26845 - DNA, 1098 bp, Emericella nidulans
aagtggaatgcctctactgcagcgtttctgctcagctgcttagcagttgcttttcccattgatgcttccggcgttgctgaaccagaagccatgattgaagtcatcgtctgggtggatgagcatgggcaaacactttcagtcgagaccatgcagcccactgcaactgttgccaatactcccactgcccttcctcctatccccgcaatcccagccctagaagcaccgcacaatctcgagcctgtcatcgcagccaacaccgacatcaaagcaaacaataaacccagcctcgacaaagagtactcaagctcgatgcacccgaagcaaaacatccaatctttcggcatctcctactctccctacaatgccgacaatacctgcaagtcccaggagcaggtaaatatggacattgacagattaacccactacgccttcgtccgcatctacggtgccgactgtgaccaagccaaaaaggtaatcaccgccgcccgccgccataacctccaagtcttagcaggcgtttacgacctccacaacctctacggaaacctcaagaccatcatcgacgctgcaagaccagatctctccaccctccacaccatctcaatcggcaatgaactcctcagccgcggtcagaattctgccggggaagtcactgccgccgtcgaaaacgcccgcgcctacctccgcacattaggctacactggccccgtcgtcacaattgacacattctccaaggtcctcgagcaccctgaactctgctatgtgtccgactactgcgccgccaactgtcacgccttctttgatgcaacacaatcccctgaaactgcaggctcctacgtcgctgacgtctcgcgccgtctttccgaggtgtctaacggaaaacgcacgcttatcactgagtccggctggccgcataaagggcaaagcaacgggaaagctgtgccgtctaaggagaaccagcagaaggccattgagagcctgcgtaagacgttctgggataaccatagtgatcttgtactatttagtgcgtttgatgatatgtggaaggtcgacaatcaatggacctttggggcggaaaaatattggggcattgaatag

SEQ ID NO: 26846 - DNA, 1029 bp, Emericella nidulans
gcccatctgggaggaatcgcccagcgcgggccgggattcctgatggtagaggcgaccgcggtcgagccagaaggccgtattacaccgcaagaccttggtctatggaaagactcgcaaatagagcctttgaagggggtcatcgagtttgcgcacagtcaaaatcaaattattggagtccagatagcccacgcaggccggaaagccagcactgttccaccgtggttgtcttccggtgacactgcgactgagaaggtgggcggctggccagatcgggtcaagggtccatccaacgtaccgtttacgtcgcgattccctgtccctaagcaaatgactagggatgatatcgagaatctgaagactgcttgggtagctgcagtcaagcgggctgtccgcgctggggccgatttcatcgagatacacaatgcacatggttacctcctcatgtctttcttgtcgcctgccgtcaatacgagaactgacgagtacggcggcagcttcgagaatcgcatccgtctcagcatggagattgcgaagctcaccagagaagcggtgcctgatcacttgccggtcttcttgcgggtgtcggctactgattggctggaggagtcccgccctgatctgccaagctggcgcttagaggacacggtcaaatttgcgaaagccctggcagagagcggctacatcgatgttcttgatgttagcagcggtgggacccatgcagaccagcatattcatgccaagccaggattccaagcgccctttgccgctgcagtcaagaaagcagtgggagataagttgctcgtgggcactgtcggaatgatcgacagcgctcacctcgcgaactcattgctggagaaagagggactggatcttactttggtcggccgtggcttccagaagaatcccgggctggtttgggcgtttgccgaggagctgggtgttgaaatcggaatggcaaaccaaattcgatggggatttgcgtctcgtggtggtggaccgtatctgagaaagaggtcaggaaagatataa

SEQ ID NO: 26847 - DNA, 1314 bp, Emericella nidulans
ccacctctgcccttcaacgaatggctgcttcgcaagaactacacccgcgcctacttccgtcccaacttccagcctcccaagaccgaattcaaatccctcgaggagattaacgttcctgtccttcctcccatgacggttctggaacgtggtatggtaatttctccggccaacaaggaagatgccatgccttgcccaccgatcatcgacgtggatgtcgccgctgatcacgatattgacgagacggataagctgttgtttgggttggccacttctgcagaccgcttggaccgcttgcttccttctctgctatactcttatggaaacaccaaggccggtatcattgttctcgttccgaactccgacgacgacatcgctaagcaggagacatatttccgcaaccgcggtcttgatttgactttgatcaagtctcctctcgagttcactgctcgttacttcggtcttgtcagggccttctctgaacacatccgaacgaagcgtccccaaaccaagtgggttagcttcattgatgacgacacgttcttcctctccttgcctactatcgctcacgaattgaaccttttcgacgttaacaagaagcattatattggtgccctgtccgaggcaagctggcaggttgacacattcggccacattgcttttggaggagctggcgtgttcgtgtccaagcctttgctcgataccctcgactactactacgatgaatgccagtcatggggtgagcagcccggtgaccagaagcttggccagtgcattcagcgatttggcgatactcctctgaccctctggccgtctttgtaccagatggacatgaagggcgaggttgatggtgtttggtataccaaggacgtcgttaagatgacctctgcttctgctgcggctggccgccgctctgtcctccgccgctgggttttcgaccaggaggaaatcgtgaacaacgccaccggaaagtcaatccgaaccttctgggtcttcaccaacggatactcgcttgtcaagtacacctacgatgagaacacacctgacgatgccatcaactttgaccacgccgaaaagacctgggaagaagaccctcgcggctatgaagcgcgcctagggccccttcgccctcgcgaccaggagggtgttaccaaggacaggtggctccttcgggaatctttcgtggttggcgataatgttcatcaatggtatgtgcgtgaggaagatgagggccacagtgtgattgagattgtgtggctcggtcctaagggtggcggtggtgctggtgttagggattttgcggtcaacatccactaa

SEQ ID NO: 26848 - DNA, 531 bp, Emericella nidulans
acgtcatccgcgacggcattcaccgcggagtcgctcggtaaaatccgcccggcctttgccaaggacggatccatccacgctggtaacgcgtcgcaaatctctgatggcgctgccgctgtcctgcttatgaagcgctcgaccgctgaacgtcttggccagaagatcatcggcaagttcgtctgcgctagcgttgtcggcgtcaagccgctgcttatgggcattggtccctggaaggctatccctgttgcacttcagaaggcgggcatcacgaaggacgatgtcgacatctttgagatcaacgaggccttcgcgtcgcagtgtgtgtggtgcatcaatgaacttgggctacctgaggagaagatcaaccctaagggtggtgctattgcctttggtcacccgcttggatgcacgggagcacgtcagatcagcacgttgctcacggagctgaagcgcacagacaagaaggttggcgttactagtatgtgtgttggaactggtatgggtatggctgccgtctgggttagggagtaa

SEQ ID NO: 26849 - DNA, 726 bp, Emericella nidulans
actttatctcttcattgtcccgccttccacttcgactattacacctcccctgaacatatcaaggaattccaggccatgtacttcctgagttccttcttcaaccaattcggccctaactcggtcactttcctggttgccgcagaagtattcccgacgcccatccgtgccaccgcgcatggaatgatcgccgctgcgggaaaactcggtgctctccttgcatccgttctctacaactacatcgacacacagacaaagttttacgttgtcccctggttcgggttggcaggtctcgttctcacctttttcttcctccctgacaccaccgggcttgacttgaaggaacaagagcgccgctggaagtacatccgggaaggtcgcgaacaggactatcacggcccggccgtccaccccaagcacctgtctctctgggaacgcgtccgtggtaccggcaagtactatgatgcggagctcgactacaagcagaaggtcgaagagtaccgcgctgaatgggaagccgccatgtctgccaggatctccgagaaggacaaggacggtgaggaagacgccgacgaagagctcttgtccggccacgtcaacaactatttctatcgcacaagcccaatgttccgtggaatggaagcaaaacccggcaagggtgacgactttgctcttactcatactgcgcggtcagatgattccacacagaactccgttcaagaaaaatag

SEQ ID NO: 26850 - DNA, 801 bp, Emericella nidulans
atgcgcggtggtactatccgctcgattattggagagttgctcggtcgtcgcgagggtattgcttacggcaagggtggttctatgcacatgttcgcccccaacttctatggcggtaacggtattgtcggtgcccaggttcctgttggtgccggtcttgcctttgctcagcagtacaacgaggagaagtccaccagtgtggttctgtacggtgatggtgcttccaaccagggtcaggtctttgaggctttcaacatggccaagctctggaaccttcccgttcttttcggttgcgagaacaacaagtacggtatgggtacctccgccgctcgttcctctgccttgaccgactactacaagcgtggtcagtacatccctggtatcaaggttaacggtatggatgttctcgccaccaaggctgccgtcaagtacggtaaggactatgccatctctggcaacggtcctctggtctacgagtacgtcacctaccgctacggtggtcactccatgtccgaccccggtaccacctaccgtagccgtgaggagatccagcgcatgcgcagcacccaggatcctatccagggtctcaagcagaagatccttgactggggcgtcatgagcgaggaggaccttaagggtctcgacaagagcgcccgtgctcacgtcgacgaggaggttgccattgccgagaagatgcctctgcccgagaacaactctcgcatcctgttcgaagacatctacgtccgcggcagcgagcctcgatggatgaggggtcgcactgttgacgagactttctactactag

SEQ ID NO: 26851 - DNA, 2301 bp, Emericella nidulans
tgccccgcgaaacccttctcgactgtctcccattggctgtgtggcgagctctggatagaaggtgctgtgctcgcagccgagactgttgaatcccctgcctggttggtatctggaagctctacttatcctggccgcacgggaagagtgcagtcgacaggcgacatggtgcaattaagagaggatggcagtctgatctttgttggtcggaaagagaatgttgtaggggttcagggacacgcagttgatatcgcggatcttgaggcccatctcaagaaacatctcccgccgacgattctcgccgctgctgccgtatcccaggcaccatctgaggaacctgagcttgttgttcttgtagagcagccttccgaggaagccagcgtcaacctcctttcaaagcagcatgtcataacccccagtgcgtctacctcgcagaattcgccggtcattagtgccgccatctccgtcaacctagccttagctttaaagaagctcgacaaattcatccgcgacaatttgcccgcatacatggtcccgtcaacctacgttgttattaacaagatccccacaagtacaaagacaggccagatcgaccacggcctcctcaacgagctctcttcagccattccccgccaaataatttcccagctccgtgtaggctttgagtccgcctggaagaatctcaaccagaaaaccgacctaacagctaacgaaagtattctacgggctgcgtggtccgccattttgaaaatcgagggcgagcgcatcgacattgatgataacttcttccgcctaggaggtgactccgttctggcaatgaagcttgtttcaagccttcgtgaacagggacatactttaacagtcgcggacgttttccagcatatgcgccttggcgatgctgctaagcggttgaaggtgggccaagggccaaagtcgaagaagatgcaagcgcagacatacatgcctttctcgactctgcctgccatccaagacctggagcgcttcttgtctgggaatgttcgtccgaaaatgttagatccgacttgggctattcaggatatttgccccgtcacagattcgcaggctctcgatatcaaaggaacagtcgacgcaccgcgcacttcaatacagtataccatgctcatctttgacagcggaatagatagtgagagattaactcacgatatcttacgcaccattttcatcgaacaagagtcctctttcctccaggttatcctgcaaaccctcgaagcgcctatcaccaggcatcaaacagaaaagaaagatctcaaacgatacatcacaaacctctgcgcagctgacattgagacacctcttaatttgggcgcccccttcctcagctttttccacatccaaggcgccgctgggtctcacgccctggtcctccgcctctcccatgcccaatacgacggtgtttccctcccgcgtcttctccgcgacctcgaaaccctttactctgggcgcccaatttccctatctacaatccagcccttcccttcctatgtttcccagattatgggtaacaagtccgccgaatcgaaggcaattgcctactggcgaaacctactccaagattccacactctccgttcttcagggcaaatcaactgacaaagccgaaaaaggtatcttcctctccagcccagcaaacaccacagcacagccgttcgaatctcttggatacacaacagcaactctcctcacagcagcttgggccgtccttctctcccgcactattaagcaaaaggacgtaaccttcggcggcataacctccggccgaatcctcgacgctgagaacattctcttggacaacccagaggagatagtggggccaacgtaccagttcacgcctattcgtgttcccttcggtgctcgcgagtcatggacgccaacctctctgtgccacttcattcaatcccagagtgcggaatcggccgcgtacgactttttgggattccgtcgcattgcagagcactgtacatcctggttgtcgtcatccactggaggattgttctttgactctctagttcatcaccaagaccatgaggacttcgacactatgccgtttgctggctgtgaatgtgaagtcgacattgtgaatccgcatggtgactctcctgatccggtcaaggttgtttcgctcgtaaaggatcagaagttgcattttggaatcgtgggacgtgaatcagatagggagtttgtcgagagcacgttagctgagttggtcggtgtggtggaggaattggttgctgagcctgaagggctcattagactggatggttga

SEQ ID NO: 26852 - DNA, 1206 bp, Emericella nidulans
actttccagccaggctcttcgaagagactctcgaaaagagcacatggtgataagcttgggctgcctggccgcaacctcctcagccccccttactcaattaagaatgcggctggagctcttagccagaacactattcaaaccaacattggccacgcaggaggttacgttgaatacgacacccataatctctatggaaccacacgtacgcaggtgccggagcacatgttgggcattggttcgagacatctttactatggactcgacctagcactaacgctatataggctcggtgacaatctcagcacttggaagttgtaccgcgcctcgatcgcccaggtcctggccttcgcctcgatgttccagattcccatggtaggagctgatgtctgcggcttcggttcaaacaccacagaagagctctgtgcgcgctgggcatcacttggagccttctacaccttctaccgtaaccataacgagattggcaacatcccccaggagtactactactgggaatcggtaactgaatccgcgaccaaggccatcaacatccggtaccagctcctcgactacgtttacactgccttccaccgccagagcaaaaccggtgagcccttcctgcagcccttattctacctgtacccagaggacaaaaataccttcgcaatcgacctgcagtttttctacggcgacgccattcttatctcccccgtcaccgagaaaaactcgacatccgtcaatgcatattttcccaaggatatcttctacgattggtacaccggcgccgtaatccagggtcagggcgcgaatatcattctgtccaatatcaacatcacccatatccccattcacatccgtggcggcaatatcgtccccatccgctcctctggtgcgatgacaaccaccgagctccgcaaaaagggcttccagcttatcattgcttctggcatcgatgggacagcttctggaagcctgtatttagacgatggagactcgctcgagcagactgacactgccaacattgagttcgagtaccgcagtggtgttctctacatcaaggggcaatttatccacgatgtccctgttaagattgagagtgttattttgcttggtcagacaacgactgccggggctgggcggcacaaccagaagcaggtcattgaaaccaacttggagcttacggcgcctacgagggtaaaactagcttag

SEQ ID NO: 26853 - DNA, 447 bp, Emericella nidulans
cccaagaacaagggaaagggcggtaaaaaccgtcgtcgtggaaagaacgaaaacgacaacgagaagcgcgaacttgtgttcaaggaggaaggtcaggagtatgcgcaggtcgtgaagatgcttggcaacggccgtctcgaggccctctgctttgacggcgaaaagcgactcgcacacatccgtggcaagctgaggaagaaggtctggatcaaccagggcgatatcattcttctttcgctgcgtgactaccaggacgaaaaaggcgatgtcatcatgaaatataccgccgacgaggccaggagcttgaaggcctacggcgagctgcctgagcatgccaagatcaacgaaactgacacctacggtcatgagggtttcgaggacaacgtcgagttcgacgaagaccgcgacagcgaagacgagaaggaggtcgatatcgacgaactataa

SEQ ID NO: 26854 - DNA, 714 bp, Emericella nidulans
gacgtcaaccctcttactctcggtattgatactaccggtggtgttatgaccaagctcatgggccgcaacactgtcattcctactcgcaagtcgcagatcttctcgactgccgctgacaaccagcctactgttctcatccaagtctacgaaggagagcgttctcttaccaaagctaacaacctccttggcaagttcgaacttaccggcattcctcccgctcctcgcggtgttcctcaaattgaggtttccttcgacttggacgccaacggtatcctgaaggtcggcgctagcgacaagggcactggcaaggccgaatctatcaccatcaccaacgacaagggtcgtcttacccaggaagagattgaccgcatggttgccgaggccgaggagttcgctgaggaagaccgtgctatcaaggccaagattgaggcccgtaacagcctggagaactatgccttcagcctcaagaaccaagttaacgatgagaacggccttggtggccagattgatgaggacgacaagcagaccattctggatgctgtcaaggaagtgaacgactggcttgaggagaacggtgcctcggccactactgaggactttgaggagcagaaggaacagctgtcaaacgtggcgtaccctatcaccagcaagctgtacggctctgctcctcctaccgaggaggacgatgacgagtatggccatgatgaattgtaa

SEQ ID NO: 26855 - DNA, 837 bp, Emericella nidulans
tttggtggcggtggggatgaggctattgaggaccagatgacgttttttctggatatcgttgcctcggacgggcagtccatcgatgcgcaagaaggcgctgctacctgtgtcaccgcagctctccaagaatggggttttatggcgacggagattgacgaccttgaaagtgagagcgaagagtatattcagatattcatggatcaattgagcagtggcgatccgagcgtacagattgcggctggcgagaatatcgccttactatacgaaaggagctacaccccccaggagcactggaccgatgagggcgaggaggacagcaatggcgaggacagccttgatagtgaatcagaagaacaagtctaccacactggacctaagcgtgtcaaacgctacagtccttatcacgacactcccgaactcgaacgccaactgcagtctctcgcaacagtgcatagcaagcgcatcaacaagcgcgacaaaagagaccttcacaagaactttgcgtctattcgcgctactgtcgcagatccgcgctgcggcccgatgcacagcgaccacggcagcaaactcaccgtcaagatcggcagacaagggatcatgcatatcgatcgctggtggaaatggattcgcctcaactctctacgccgtatactgcagggtggttttgctgtccactatttcgagggtaaccgtgccgtccttgataatcttcccgtaatgatggttcgccggcagacgggagaccgtcgcacttcccctaccggtagaaaggaagataagattcgccagaatcagcgccgggcaaagctcgagtttgccgatgacgactactactga

SEQ ID NO: 26856 - DNA, 693 bp, Emericella nidulans
gacgagatcgccgccgcaaagccagaggacggatcacaggttcttttccagcaggcttatctcaacagcaatgacactgcgacgcagcaggtcttcgatgacgccgaacgactgggtgccaaagctatcgtctggacgatcgacagtccagcagacgggaacagacaccgcgcgaaccgatacggcgtgggttcctcagactcggactacacactatcgacttgggaattttatgcgaagctgcaaaatatgaccacgctacctattgttctcaagggcattcaacatgtcgaggacgtcaaacttgctattaaacacggtgtccctgccattatcctatctaaccatggaggtcgccaactcgatagctccccgtcctcgctagaggttgcgctggaggtgtatcaggaagacccggatctcttcaaccagattgaaatctacgcggacggtggcatccgctatggcgcagatgtgctgaagctgctctctctgggagtcaaggctgttgggcttggaaggagcttcatgtacgccaatgcttacggcgctgagggggtcaggcacgcgatccagctcctgaagcatgaaatcgccatcgatgctgctaacctgggtgttcctgacttcaagaacattgacgcttcctatgtgagacaccatcctaagcaatttgattctgtctcctactaa

SEQ ID NO: 26857 - DNA, 800 bp, Emericella nidulans
gacatccgacaagaacgccaaatccttcggaaacgccttcgataaggccgtctacgactcggccttctacgacaccggcgatcactccagtgtaatcagcgttgactaggaaggcactacgccatgtccagagtaagggcggtcgcaaggcccaagacctaaaaggtaaacagagcgagcagtacattcgcgatctctcccctgaagataaaccgcttgatctcctcgcccccgacgccctcgccaacatctccaccacaaaacctagcgtgcgcttccttaacacaggaccgggttctcgccgcaaacacgctgccaaggtcggtcctgacggccgtctgcttctaggcggtgatgacgacgccgaggacatcgatatggctggcggagacggcgataacggcgagacggaatcaacgcgtatgtacaggccgttgctggacctgatgccatccgccgcggccagcgcggaaagatcaagatggcacaggcgcagaagaaaaagtcccagcgggacgacgagatggatgttgatgatggcaatgaaaacagtgccaacacaaaccgacaatcttcctctcaagctgggaggggaggtccaggtcgtggcagtagtcgcggaggcagcaatcctcctggtcgtcggggtctgggaatgcccaagacccacggtcccagtgggatccagaagcgtcggaatccgcgcggaggacggagcgggcgaggtggcattcgtgttggaagagaaagagggcggaggtaacggatttaatggaatggtcattgattatgccatatga

SEQ ID NO: 26858 - DNA, 292 bp, Emericella nidulans
atgccgttcggaatcaacccgttctcgaaaaacgataagcacgaataccccggcgtggttgtgcctctttccagtgcgcccgcgaattcgaagacgagcccagatccagagaagaaagtaggccctcaagacactgacgctggaagtctcgacatgtcatcctctgcagagaatggtgtggggtcgatgcacagccaccagcagagtcagaacggccatctgaccctggagatcctgcgcgctgaagtggagaatgatttggttgcttctggccaggactctgcctatgatc

SEQ ID NO: 26859 - DNA, 532 bp, Emericella nidulans
cgttaccgctgggactcggccggcacatgtgggatattcgagcaattgatctcatagatccctcttccaaccgggtacttactactcatcctattccacatcaaatcagattgaaattcaattagccaccgagctaacggactggctcaaccagaaattctccgcaggcggtatcagtttcccttggacgctgtgttttgccaaagtgtcgatcctattcttatacaagcgcattttccctctgcgccgggagattgtcgcctcgtggatcggaatcgtcgccgacgccgtcatgtacacgttctgcatcggcatggccatcggaagtgtcgtgaactgcgccgggcttgaagatacagacgatgcctactgccgcttcatcgcggggccgatggtgattatcgtctcggtaatcaatgtcgtcaccgacgtttatgtgctcatcctgccggttccgcgtcttcttaagctgcaagtgacgaggaggaggaagatcggccttcttttagtttttgcaagcgggttggggtga

SEQ ID NO: 26860 - DNA, 285 bp, Emericella nidulans
atgaccgcaaatgaggttaagtttttcaaccagacccgaaaacgctaccataaggtattgcgtaatgagtctaccacggttgacacaacggttgagcatttacttcctcgtcccattctggagacggaatcggtcaatctcacaaaggcaaataccaactggcacacggtatatacgactattaagcgcaactgggcctgcctcaagggactgcgcaatcgtaagcggatctgggaagatgttgcggagattatcagacgcatccagaaatatgatgagcagtaa

SEQ ID NO: 26861 - DNA, 918 bp, Emericella nidulans
atgactcctgaggacaaagtggaggataaattcggaacaactaatcacgatctgggtgcaggcttggtgagcacggagtcacctagagagacgccaccaacagcctcaataaacacgaccggtcaagcgaagacaggggagaagctagagccaaacacacaggaatctgtggcaactcccatggactcgactcccgcatcgcgtccccaaagagtcgtcggtacacttgtcgacttggacagtccagtggaatctgagaatgcggctgcaatgagtccagcgttacaagaattagaaggactggacttcacgcaatccctcgaaccagaaatctctcaatcgtcgactctagcagtcgctaagagaagacttgacttgggaaggttctcacatccgaaacaacaaatgacgagtgatttggacgttcttgaagctactactgataccgaggatgaggagtcagtcgatgagtacaggcgtgaaattgatattgtctgccagcttttacaacaaacacatttgtctaagacatttttgtgcaagctgactgaatgtaaagatgttctagaggctaggctccgacagcgttgcgagccaaagctgggaaagcctcagaatcagcagtctttgacacttccagatcctgaatctgaaaaggctgagattgctgcacctgtgaaggcatgcaagcgtgccgctcctgggccgaaagagcctcattttgtccgtcctgttgttaacgataacacaccgactcccggcgacattacaccaacacctagggttagtattccgtcgtcgccatctcgcttgaatgtgagcgtgctgcaattcacgccgaattcgtgttctgaacagaaatcctttcccgatgctaccaccaaatctatcagccttgagcccattgctgatgaggtt

SEQ ID NO: 26862 - DNA, 330 bp, Emericella nidulans
atggtggctgttggaataagtgtggctgcggcccaaggtgggagagagcgtgagcctgtacgggccctcctggaccagtcgttcccgctcctggaggcatttgtcccatcatcggaccgccttgggaaacctgcgggccaggtccagacacgccagggtgtacttgctgcatcattgcacctggatgagcattcgggtgttgaccaggagccaatgcgtgacccggaggaagacccgggtggccggccatgcctggatgggcagcgaatggctgcgccatcatcatcgccgggctacgaagtcaccgatatcggggaccccacagcctga

SEQ ID NO: 26863 - DNA, 564 bp, Emericella nidulans
acgagcccttccccgaactcgcctcgtggttcatcgtacttgcattcatcacatggtccgctgtatgtcctatccttaactctattcctctacttccatactaagaatccgtccaggcgatcgcctccagcgcgcgtgacctagtcctctgcgccgtccttacgtgtcttgccatcggctccacgatcgcctgctgcctcttcgcgtacgggacgggcgttggaacgggaatgaaagctgcggcgtacttctggataatcagctcgatcctggcgtggtggcgggttacggtgtacctgatcgaggaggcgtatgggcagcaccggcttctgaagtactttccaatcttccggacgagactcgagggacgacgcccgttgcttgcaccgggctttggtgagccgggtgtcaagcggggtatgccggggctcacttgaattgattttctggattccatggatcgtgacgggaacgaggtgatgggaatggagtgtagtggcgtatctactatattacctgagtccagccctaaagctgtatttgaatgtcgcccagactgccccg

SEQ ID NO: 26864 - DNA, 404 bp, Emericella nidulans
atgtctcaaagtgtgcgggacaatcaatgggcggaatacaagaacgaaatcacctccctatatcggaagtatgctctgcatgatgttatgcaacaattgagtgagaaacatgggttccacggaaggtacatgaccacacgtgtgctatatatccaagtccaagtaactgatacctttcagcaaaaacgattacgttaagaggctgagattgtggggagttaagaagaatgtcaagaagaaccacgcggcaggtacctggaactacattgaccagcaactcaagaaacgttccttggcagggaaaaaaagcaatgtttctgtcaatggaaagcattactcgaatagaagagcccaaaaagagattttgcggaatgtgacacagagagatatcttcaagcgggcat

SEQ ID NO: 26865 - DNA, 279 bp, Emericella nidulans
atgaacaaggaagctgaagagcctgagaaagagaagaggcccgagggcgactatcccacaccggtatcaatggactcggactcgatggatacacaggacgggacatcgtctctggatacggaaaagctgaagaagaaagagaagaaggacaagaaggaacagagggaaaaagagggcaaaaaagacaaatcctcgaaggacagcaagaaggacaagaaacgagaactctcatcggccgagagctcaaaacgaaagcccaaaaagagcaaaacgacttga

SEQ ID NO: 26866 - DNA, 839 bp, Emericella nidulans
tctcctgccattgacaggaggacagccggagcggctaccctaccactatgtcgcgtatttcctgctcactgcgtcaaacatcctcttccttggtctctggctgttctcaggacacatgagcagtgactgtatcagaccgcagatatcatactgtaggtatcgccaatatatagacagaagcaaggctgatgtagtcctcactggtagcacccgccaaagacgacggtgccatagcctacgtgaagaagcgcctcatgcgggatattgagcataatccattcacgggggaacctcgccctgagcttgatgctgcctggagacatatacttgagcgtaggcccagacttggttatctgatatgaagtttcgtttgtactgaggctatgtccagcgatgaccaccaagatcagtgcagaagaactcgcccacctccctgacacaagcatcccttttgcagacggctctgggtatatcgctgagttggctgtctatcatgagttgcactgcgtggtgcgtatccaccccaggccgtttttgcgtatttcactctgtgcggcattgatactgagtttaaatttctgggtagaaacgagtgcgccgctatctccacctatcgcactacatgcccaacatcaccgccgacgaactcgttcgtgaaaacacccacatcgaccactgcctcgagtactggcgcgaggcagccatgtgccggggtgacacgacgctcgcgacattccggtggaaggacggacttccctacagcagggtctatagtgatcacgagtgtgtggattgggaggccttggatgactgggcaagggggaggatggtggatatga

SEQ ID NO: 26867 - DNA, 672 bp, Emericella nidulans
atggccgcccgcccagtgatcgaatattacttctccttcatctcgctatggtcctatatcggcagtcggcgtttccagcgactggttcaggaaacaaatgcccatgtcatccacaaaccaattgacctcatgtacatcttctcgatatccgggggcctccctgtgaaacaacggtcggcgcaacgccaggcctaccggttacttgagatggagcggtggcgacgtattcacggcattccaatagtgcagaatccaaagtactacccggccgacccatcgctcgctcatcgtgtgctactggcggccatcgaggaatccggcaatgacagtctggctgtgcaggaatttgcgcggcttggtttggaggcggtttgggcgagagagttggatattgcaaacgaagctacgattgtgcagctggccaaagaggctggactgagtggtgatcggttgctacagagggcgaaaactgagcctctgctggcagatcaggagacagccttgacgaaggaagcagagatcaggcagtatttcggcgccccattgtactcttttcgaggagagccgttctggggccaggaccggctggatatgttggatgatgctataaagagcgggagggatccatcgttgtaccgagtctgccatagccacggactgctctctaattaa

SEQ ID NO: 26868 - DNA, 1199 bp, Emericella nidulans
atgcatatcctccagtatctaaccgggatcctcgtggtctctaccacgggtctcgcctcagtatccatgccggcctttgctgatttggatacctgttctcctgatttgggtcaggaagaggtttctctcattgagatagcaggcgtagcgcaagaggacattcatttgctcgtagcccggcaactcgacctagacaacatcgccgacagcatcacggggcttctccagccattgttgcagctgataagctcggagtcgcttgcgaacattaacactattatcacgcaggcagcttcacttcttggtgatgggggcgcagaggatgtgaggaacctggtcaacgtgattgcaggactgctggactcggatacggtgaaggatcttattgatcagttggaaccgttgctgccggtatagatatccctttacaaaacagtgattaggaccggtctaactcgatgaggtagaccctactagacctgctcaactcggatctcatcgacaagctcaagactctacttgacaatgccagtctcttgctcaccgagaaattcgcgacgaacgtccgtgatctggtcaacagcattgcacccgtaagcctcccctacaaagaaatgtaccatgtctgacatgtatagatcctcgactatctgatgcagctcatatcctacttcatcgatctgatctttggaggaggcggcggcactgggggagggagcaacacctcgacggacacctcgccaacagctacgcaaaccaggggttccggctcaggagccgcaagtgaggcaacctcgacaggcagctctgggtctggcctcgacttcggtcttggtctggggtcgtccggctctagtgacggagatggatctggtagcgatgagtcaacagggtcatcgggttccggctcaagctcatcatcttcgtctgatggcagtagctcgtcctcatcttcggatgataacagtggctcaggactcagctgggggtcctcttcggactcgtccgatgggagtgactcggccagtgactccagtgattccggtgattctggctctggctcttcgtctgactcgaacaccgactccggtactgcgacaggccctgatgatccagggttcacgggtgcagcgagcaggccagggcagttgggggtgacgggggctattggtgcgatgatcgcgatattcgtactttag

SEQ ID NO: 26869 - DNA, 540 bp, Emericella nidulans
tctctcttcagaactatcccgacccctggagaattcgctcctctcttccgtcttcttgacgactacgacgtccaccgctccacgcgcggccaaactgtcgtgcagtccttcgcacctcgcttcgatgttcgtgaatccaatgaggcctaccaccttgacggtgaactccctggcattccacagagcaacattgaaatcgagttcaccgaccctcaaaccctggtgatcaagggccggtcggagcgcgagtaccactccaacgacgagaacaaggctgagcaggccgagaccgagaagccagttcagggtgaaagcagcgaggttgcaaagaccggcgagaagcagatttccaccaagaaggccgctaacaagccgcgctactgggtcagcgaacgctccgtcggcgagttccagcgcaccttcaccttcccgactcgtgtcaatcaggacgatgtcaaggccagcttgaaggacggcatcttgtccgtgatcgttcccaaggccgtggctccctctgcaaagaagatcaccattcagtaa

SEQ ID NO: 26870 - DNA, 339 bp, Emericella nidulans
atggcgtccatctacattgatgaagacgctggtagggacgaccagactgctaacggttccgagtccgccccttacaagactctccttcacgcctttctgcagcatgatccttctgagggcactcaatacctgactcgcaagtccttgactgagcccaccggtgaaggagctgacccagagtcgaagctggagtggaagccagcgaccaagtcagcgatcaagaaggcaacgaacctgcttgaacagcggaagaagaaggccgcaaaggaacaacagttggccattcgtgaaaaggaggaggcggagaagcgccgacttgtccttgaggaggcgaacagg

SEQ ID NO: 26871 - DNA, 1919 bp, Emericella nidulans
aaacgcccggcccaatcactgagcaaatatctccacaggagaaagagccgagttccatggaagctaccccagaaatcgttcctaagaggattgaattaaccgaagcccaggaacccgcttcgactcaggcagaggtgaatcaagaggttctcacagagactggactctccaagaaagccaagaagaaaaagaagaaggcggccaagtccattgaacggagtcaagacgctgctgtcgagtcagccaccgctttagatcagactttgaaggacacgcaggagtctatcgtggacaaagaaccaggcgctctcgaaacaggagccgtggtcgtctctgaagataagccagttgaagagccagctgtgttaacggaagatgtttcttctgggcgtggagttgctgacctctctgagcctgtcgaaaccgggtccgtagcagaacagccagctgaagtcctgcagcggcgcaccccagacctagaagagcaaaacagataccctaccgctgacggtgcggttcgtcccattgaagctgaagctgagactgcccacgagtccaacgagccgaaacaagaagagaaagatgagctcccgcagccacagacagaggatatcccgctctctcgtaaagccagtaagaagaagaagaaaaataagcgcaagagcactgctgaagcagaacctctgcctgaagcagctagtgcatctttgcctgaaacgtcagagcaagctgggcttggtcctgaagcatctgtcttaggcgatgaaaagtccaattcagaagcgcaggaagtgaatttccgcgacgacatcgacatcttaacggatgccgttgagggcgaaagggggcccaatcctaagcccgaaacaaagcccaaagacgctaccaccccactcgaaacaagcggtcaagtaccaccgcccgacgacaacaaacaagtacccgaagcaggtaccgaacaacaggcaaccgacgcccaagccgtcgatactcaggtggcgattaaagacgaaacagttccaagtcacctagtggagatttcagaaaccaatgacggccaaccacatgtgcctgaaaaagcgactatcgagctcgacgctggggggcccgcgtcaactgggaagaagagcaagaagaagaacaaaaagaagcagggcgtatcttcagtattcgaagaggccttgtcctccgaagttgctggtgcccccggaaccgattttcaagacccaacaccggtcatagaaagctcccctgatgtcgttgttgagactgacgagcttgttggttctgaaggaattccagtagtagcaactcaagatcctgttgaggagacgtcgcgcgacgtagagcttccggccgaagccgatggtgctctccccgaagacctggctgacttcgaggctgccccagtgacagatgttcagagaaaggctgagaagaagcgccaatcccttgcgcctgatgtgccggaaccagagacgcaaacctgcgagtttgatacggagaaaaagttgcttgatgtccctgcccaggatgatcagcagacacccgagacccccgaaccagaggttgagcagacggatgcgataacgccagctctggagagcccggtagatgagattaaagaacttcctgtgcaagccgatgagcaagtcgcagaaaaggatggtgagcagattgacgacgaagcacccgcaattcatgtccccactgtggtgggcgagccaataactacagaggccgttgagcccgaactagaactttcacaggacagagctacggacctcgccattgagggactcgacacaaccaaggcacagtcgactctagaattgcaagaggataagactgccgagaaagagacccctgatgtggcagagcagccaactgaacctgctcgtcaggacgtcgccacttga

SEQ ID NO: 26872 - DNA, 857 bp, Emericella nidulans
attaaatcctgaagtagacgtcgaagatgccctgcggacggtcgcacccgagtttgaacatcaccagtatcctcacccggttgagccactggaaccagagcccgactcggaaagtccggactcctcgcgacgatttgagtggaatgaagcttctacgtcgaatcctcctgacgggatggtgtcgctgcctacggcaagtgccgaatcagggtacctcggtatgactttcggctacattttgagaagcaagttaacgcagagcaggccatagctccgggacaaggctcctgcagacgatatcggacctattcccagagaatgtcaccctagatcaacagcaggacgactcgcccgcacgggtcagccagacgggaagtccttcgctgttgctacatttcgccaataccgctgttttggacaacctgattgatgcatacttcctttggtacaaccgctcatacccgatcctgcatgagagcacgttccgcgaaaagtaccgcaaccgccagcggattccctcccgctccagctggcacttgatattctacctcgtccttgcaatcggacactgggtgtccactggcgggatggagctgggtcaggatagctactacatgggcggcccgctcacggatgtcgatgcgcatgctggagtcagggagccttgcaagccgtcaggcatttctactatggtgtgtccgatcttcaatgcaggtgggggctgactttccgggcattactctcgaaggagaccgacaaccctggttcactacatgggttccgatggatggctttgataagtttacccgaaccgcccaggcaaaaatttttctttaaaggcgcgaaagctttggggg

SEQ ID NO: 26873 - DNA, 921 bp, Emericella nidulans
gcgccgacaaggtcaagatctctgagcaggagggtgaatttgaggcccagctgagcatgactgatctcgcccatacttccggtgacatggacgacgatttagctgaggctccagatgaagccgacatacacgtccttgatatgaggcatatcgggcttcaagttgggtcttttttaattcctttcaccacgacgcgtgagtaggcattcgcatgtataattctcttcgagtcgggacaatacgacatttcgccaggcaagctgacttccgttatggcaatctctagcaatggttctctattcatcgccgcgcctatgttgtgtagccctgccgagaagccccctacgcatgagatccaccatgtcaccggaaacatcggacgtggtggaatggcactgctaatcccaccggccgcacctcggattcgagaaagcactgtcgactcatggaatttgtgtaatcatgactcttgggatggagagtacgttgactacttcgacaatacttcattacatctctcctataccggctacaacgtccctcttgatgtcggggcgcgcggggcgcaagactgggaaatatacatgctggagtctgttgtaagtgtgcacgaacggggtgaatgggtggcagacctagacatccttgaggcattacaaagctctcttctttttcgaatacccgacagccatgagcagccttcgccaggtgagaagcacttctgtaaacatagccacgaccggaaggagcgtgagagctcatccggcccaaatctactggtcgcgctccagaactgggccgagtatctagcaagaccggagctgccatcgatagtggtagcaagtttgaattggcaggcacaacttgcagcaacggcgattactattgcgcagggtggtgctgcttacgttgttaaggagg

SEQ ID NO: 26874 - DNA, 252 bp, Emericella nidulans
atgacaaggggaaatccctccatctctaacagcaacattcacattatgatgttgcagctcgaggaccggcgtcgccgtgaacacccaaatgacggactcgtctcgcacctcttttcaaggctcgccgccatgcttgcaattgaccaggcaaccgagctgtccagacaacatcaattagctcctcccgacgctgctgaggttgaagccaatgcgctcaagcgtgcagctgcattagaatcgtgcaagctctag

SEQ ID NO: 26875 - DNA, 318 bp, Emericella nidulans
atgcccccttttattcggtccaaacgccagtcctctgagcacaataccacttccaatcgccatgctaccactgcggtgaccacgccctccgccagcacctctctaacaccggcctccgactcttctttaacacccgttccgaccgaccttgacaatgattccagtaatgaagataagaaggttgtttcagattccgatgttacagactctgaggaggtcgactgggaagatgccattcataccgccgctcccgccaccagcttcgtctctccccatgagaacttagagttgacattagaccgcaatgaggtgcactag

SEQ ID NO: 26876 - DNA, 401 bp, Emericella nidulans
gggccatcctttcgagccctacttttacgctctcgactcccgcaccaagcgtcggctcgaagaaagccagccccagctccgcggcccggggggcatcgacgaagagcaagacctggtctgtcaaatcctcagactcattcgggacttccccgatcccatcccgcgagatattctgtcgcccgacacacgtctctccctcggccagctcggcgtgcgcgcaggtgcagtcgcaaacattgcccttagtgctgcagccaacgctgtcactgaggacgtcgatacatccgacaagaattttgaatttgagcgcgaccaagcctttgacaacataacccagcgcgccatccttgcaaaagaggcccttgcagccgtccagcaaatgagcactcgattgcgccaga

SEQ ID NO: 26877 - DNA, 333 bp, Emericella nidulans
atgctgggaacaggcctggaaattctgtcatcccttcagccaggtaagcttgctgtgctggttgcggctgcagcggctgctgctgctgctgtgcagaacttttccattggttccatggttttcagttgttttgttgggtaccgcgatgcttgtttcagtcatgcttttgatcattgccaaagtaccctgcaatcttctgagatccttgggtggcttggttcgacgctatgtacggatgtagaggtcgagaaggaggaggcacccagggggtccatgcttgctgatagggccagcgggacgcttgatagcttgtttgattcggccgatacctaa

SEQ ID NO: 26878 - DNA, 213 bp, Emericella nidulans
atgctgtcgaatacctctactatatggcaatggatgtacttactgatcatgaacgccttggcctacggcactccgtcgctccttgcacagaccaacaattggggtgcctttatcttctttgccccatggtgcttcgttgctctcgcttatgcctacctcatggtccccgagacatatggactcagtgttgaagcaatggataaagtcttttaa

SEQ ID NO: 26879 - DNA, 435 bp, Emericella nidulans
cgtttctccgctgctgctgttgctctcttcgccggtctgaccgttgctctccctggtggtgacatcgagaccatctaccagaccgaggaggttaccatcacctcctgcgctcccaccgtcaccgactgccctggcagtaccaccagcacccccgctgcggtcgagacccccgttgttgttcccaccggcacttcccccgtcgaggtctccagctccgttgttccccccgctgtcccgacctccagcgtccctcagccgcccgctcccgtgcagccttccacctccgtcatcgctgtgaccacctgcattcccaccgtcacttactcgaccgtcactatcacccccacggttgctcccaccacctccaagcccgtcatccccggtgtccccaccaacgtcgctcccactgacgtccccagcggcactgctacgtaa

SEQ ID NO: 26880 - DNA, 579 bp, Emericella nidulans
atgccgctctacaaccggtaccgcgttttcgacacgcagggaaaagatgtcaccgagttcgcatgggacgcagcagtggggacggtttttgccgcgggatatctgatgagcgagtatattttcacgtctgatccagcggtccgcccgcctatacatccttgcggaattgtgacggatcagggcgtgcaggactggacggccgctgacgcggatctctctagagctgtccttgtgagtctgggagcgtcgacaaagacggctcgttcgatggcgtataatctttttcagagaccgagcgggactggaccgctaggtctattacagttcacatcttcacctgggccgattggcgaagctgcgagagcgctaaatgacgcaaacggaaagagcaaatttgcggtgggaaatttggggtacccagacgttgggttggcggcgaagtggcttgcagatatcgagccattgcctaggaaggtcatcattgcggactttggtagtagggacggaattttgaagagtgtggtcgaagacataaagaaaatggagtcattacagggcggtgatattgtgataattgcg

SEQ ID NO: 26881 - DNA, 609 bp, Emericella nidulans
atgcacaacccttcaaaaagcttggccaatgaggaaacaacagacgaagacgcaaacgcagacgaagagcatcagtacactttaacaaagacaaaacacacccccacatcagcccccagaaaagtgccccagcagtcccgcaggctaggcgttatcggaggaaggaggaaacaagcaacaccagaaccagagccagagccagagccaagtagcaaaccattccgatctcaatccccagaaccgcacccgccaccaaaaaagagaaagccactaggtaggatcggcgttattggcgggcacaactccaagcaaaaagccgtacaagatcacagctctgaagcgccaagctcctcgcgaacggagagcgtactgccaccggcagagacggcccaaaggcagagcaataccgaggacgaggcggagaagaaagaaagacccgcttctaggtctccatcgctccgtgaagctaaggaaccgaacctgaaaacacctgcaaagccggaacgcgaggagacggaggaagaaaaagcggacaggaaacgggaggagttgaagagacagctcgaggcgaagagtaaggcccctgcaaagaagaagcgaaggttttag

SEQ ID NO: 26882 - DNA, 441 bp, Emericella nidulans
atgtccaccactccatcagacgccccgaccccaactccagctacctcacagccggcgcctccggttgacggcaataccgtcgcgcctgatgttgagaagctccacgtctctccggagggcgagtctacacctacccctgcgcctgcctctgagtccgcatccgcacctccaaaagaatccctagttcaagaagagccggccgcaactcctgctccccagcaggagatagagacaattgacagtctgaacctcccctcctccgctgccgatggcctcatccaaaaacccttcgtccgccccgttaacacagcaaagccacctccgcccgccaaattgacaccagaacaacaagccaagtatgagagcgtgcttaatccgtttctgatggacaacttgtccaccacagccgcgaagatgcccaactgcaccatacagacatga

SEQ ID NO: 26883 - DNA, 348 bp, Emericella nidulans
gggtcccgttgacaatgtgaaagtgtttcactcgggcaatgagttcatcgaccagcttgtttcgggaaacagcatggggtgcaacgcctgtaagaatcagcacttatcttgtcatatgtctcaacagaggcgcttaccacaggtttaactctacgtgcgggtggatgggtgaaaccaggagaagcgggagagactgctgggtaaattagctgtggagtatcaacagtgaaagcaactaacagcaaccaaggtgaagagacagaggatgcgagcatgtatcacactctccttgagttgtcgactcattcaaaagctgaaatagaggaccccgagggacatgtgcacttg

SEQ ID NO: 26884 - DNA, 242 bp, Emericella nidulans
atgtctgctaagcagcccaccgtgtgcgccacgcccgtcaatggctcgacgccctcgggctctgacattgagagcctgaggtccaagggtgccagtgaggacatggcgcgggtacccagcggggccacagcgcctccccctatggctccggcattggcaagccagcagagccaacggatggagtcagttcttggtgatgcaatcctgcgcttccttcggatccgcaaagacaagaagccgga

SEQ ID NO: 26885 - DNA, 236 bp, Emericella nidulans
tcgaccattgagacttctctgaccaatgcgcaactccgccgccgccaccatgcggcctggtaccggacgcgccttgtccaccccgtcattggcgttgagtttccagccctatcgcacgcttcgtacgctcttcaccacacagccaaggaggcagagcactgggcttcaccaacatgcatcgtcgaaaccggtacgaccaccaacgacgtgtatctggcccgctcgcgggaaaaggc

SEQ ID NO: 26886 - DNA, 490 bp, Emericella nidulans
atgcccgacgccgccaactcgttctacgcgctatgggacaatccatccctgaccctggccatcattataggcctcaccagctacatggcactagtcaatcgtcttcgataccgtcgcaaggccaaaatagaggcgccgttcgtgcacgcgcatggcgttggtaggagactactctccagcatgacggtcaaggaagcgcatgcgattctggcccagttgcaggaactggagttcccgtatgcgtttgcaaaggctcgtcgaatggctctcctcaaggtgatacccgcagcatgctgacggataaccataactgatgcaaacaggctggaggaatcccgacgatgtcgaagctgttcgccgtgacaggccagaacaacagacgcaatgcaggcaagcgcgctgtcgacacggagatcctcctcggcgaggcgcaatcccagcctcgagattcggaccgttatgcaacggccgtggcgagaatgaattatct

SEQ ID NO: 26887 - DNA, 327 bp, Emericella nidulans
atggtaaagaaaacggtgccggccctgcaggatggcgtcacagctactgtatcggggcatctgcagcgcttagatgcctccagggctaggcactcgaccgtcggtcatggggtagaccgaactcccaccaatcctagactccccaagacacaagtcgggttggctcggggcacctcgattatccaacctacaactaagtctcatcttgatgttcagctcgcggttagactcccactgactgtcatggcgtaccagttcaattttcagcctctaccagtaccagatctgcacagggttatacggggtacggataatgccaacccctaa

SEQ ID NO: 26888 - DNA, 435 bp, Emericella nidulans
aatacctctatgtcggcggaaacaccaccaccaacgagattgccatctgtaagccctccatttgtccctcttcgactctctaatcctctccaatttccgtctgacaaagtcaaaacagtccactcgacccctgacactggcgctgtctccttcacctccaagtcctccactcccactggcttccagaacctctacgtcgtcgagaagactgttctccccgtcgggctgacccggccccactctggcgctctgcccgagggcgccagcatgctggactttggcgtcaacgaggagggctacttcacccatgcggacaaggactacttcgccattgaaggctatggcgacaacccccagaagaccatctactggtacggagcgcacagctccacgtacagagccgttaacctttgggttaaggagttcaaggaataa

SEQ ID NO: 26889 - DNA, 300 bp, Emericella nidulans
atgatattcaggcatatcatcactccaacagttgatcatctatctacctccctgcgccaagagatcgcaactctcaggccacaccagcacctaaatgccattttcaaagaagccaattgtgtacgcacacacacacacacacacacacacacacacacacacacacacaatatggatttgtccaatatgaaatctggatacacgataaagtggtgtggggatgacggagtcgccggacagtcaccttcattagaagatgaggaagtgagacgcgtcggtaacaagcgaggaatgtcgtga

SEQ ID NO: 26890 - DNA, 1026 bp, Emericella nidulans
atgtcaccttcttcccaaactttcaacaacctctacctgattgtctcgcacggattctgctcggcgcgagggtaccatggcaacgacgataaacagcttctcgcagtcatcaaccagtccctccgcttcgacaactgggccagagtcgctctattcgcttcagacgagactggcaatgtgcatttgtgcccaacactctgcaacgatgttgatgcgcgcgaggacattcggcgtgttatggatcggctcggcaacgagatgaataagtatggagagacattgatgcaaatgcgtgcggcggcgcaaagagcggatctagaacgtcaagagcaagagcaccggcggcgagagcagcagcatcagggacagcagcagcgctcggtgctgtcaggaccgaacgcgcagaacgggcaggatgcacagtcgggggagaatgaagcgccaggacagacaggagaatcaggagagaacggtcaggccggccaaatgagtcaggcccctcaagcgagtcaggacggtcagaatgatgaggtcgagcaagcggaacaggccggacaagacgcagcgcaagggcagggcgaggaaccgcaaggacgaaggcagacactccgtcaccggattagacgggttcggtgggcatccccgctcagctggggctcccggacaccgccgccgacgccgcaagacgtgcgagaccagcgcagtagccagcgggatagccagcacctacgggagaatggcgaggagcaggtggcggcgagtacgcgcacgagtgccggtgcgagggccagtacgactggaaccccagacacggcaaccctccaagcagtgagcgaggaggaaggtgctctgtatcgtgctattgaacgagcgcttgacgaactatacgatatctgcccggttggcccactgctacatgacgacgatggtgacgtgcccatgcaggacgggaatgccgtcaatggcaacgctggcatgaatggtgatgagtctataggtgactgtgtcgggaatggagagttatag

SEQ ID NO: 26891 - DNA, 282 bp, Emericella nidulans
accaaccctatgatgaatcatttacccctgcgccaagcaaacccgaagaagagactcgactcgataattccgatagtgtgccgcaggtccaagaccatggcggattaacgcacacagccgaggatgacgttgtgacggtatacactgacgacatgcaagttctggcttctgacagggtatccgctctagactcggcggatgcaatggccagccctcaaccttcgaacagaaacgcgactactgtcaacgatattgaattggctaagacagagggtaaccttg

SEQ ID NO: 26892 - DNA, 655 bp, Emericella nidulans
atggcccccaaaggcaatggtggtaactggtctaaccggacactgctctccaccggcgtccagaatcccaaagggtctgttcactttgccaagttcattcacgacaagattcccgactacgtcgtcgtggcgaatccggacacagaccctgcttttggcgtctggtctggcactggaatgtatgacaaggctggcgctatccggtttgccgatctcgacggcgatgggcgcgacgattatatccgtgttagcattaacggagcggtcgatgcctggctaaataaaggagttaatagcctagttcgcctccctggacttgctcctggtcttaaaggagtcaccccggagaaagttcagtttgcagatgttaatggtatgtatcacccccttctccgcccctcctctttttctcttccacaatttctgtgtgtgttagatgcgtatatgtaccgagtgactgactgagttctttcaggcgatggcaaggcagactacctggtggtttgggagggaggcgccgtcgaggcgtacctcaacacaggacagctcgcacccagcgggaaaggagatggtcggaactggagagagaagatggtcattgcgccgggcattaacggcgtcctcggtgataaaattcggtttgcagacattgacg

SEQ ID NO: 26893 - DNA, 507 bp, Emericella nidulans
atggtagtggagcgctatggccgtcgactgcgcttcctggcgtctggccaggcctcgacgctgcagcagctgcagaacgagatcgaggacgtggtgaccccattcatagattacgatcaccggaatgcctccctcgaagccgagcgctgctcaaagcagtttgtcaggcgaacggcttcggtcacgacgcttgcggctgaggcagtgctttcggtatcacacagcatctgcatgaccctcatcgaggcactgggttacactgaatatgatgccgtcgttgaccagatccagggcctcatggattatctggcctggacgacttggaaagattgtagaggctgcggtgaccacgagatctgcatgatccccatgtggccgatgggcactgtcgacgactacaaccacccgcagtgccgtgttatctcacagcttgacggacatggcccccgatactggggcagtcgtccccctcgaccgaagcccggtcccttgcgctctgaactgtag

SEQ ID NO: 26894 - DNA, 1074 bp, Emericella nidulans
atgaaggcttctgtgatcactgccctaacctgggccgcctgcaccatggccggccctatcggcctccgcgatgttgccggcgaggactgtacttgcgagatcgagaccgtcacgatcaccgtccctgctcctactgaggtcggcaccatcggtggccctaccaaccctcctggcacggctacctggtccgagcctgctgagcccaaccccaacacaaacactggcactgctaccggtactgttactgctactgccactgccactgcaactgagacatggaccaacaccgtgaccgccacaggcactgccaccggccctgcgactgtccctcctacatctgctcccaccccctgcgatgatgaggagtgtcatggtaccggccacctcatccaggacctcggccctcaggtcaaccgtgctctgactgttactggcgccgatggcgagaggttcctcgtccaggtcaacgaggacgtctataacctcctctccggcagggtctccctcagcgattccattggtgagatcgttggcgatgccgccacgattggtgatctcattgccgacctcggccccatcatcgactgcatcctgaccatcgtcggcgaagacagccacatcctccttgtccgcctcgcccccgaagtcgccgatctccttcgcggcactggcgtcaccctcggccttgacgccatcaacaaccccatcggcggcctcctcggcagtctcaccggtggcctcctcactcgcgacgaggcccagcccttgacggtcactggccagagcggacatgacctgcctgttgctctagatggcgtcgttggtaacactctccgtgagaacaacgtttctggtccaattggaaccgttattgccgcggccatctctgtgacccagctgttgcagcacccgctcgcgcaggactctgaggacctgatcgtcgttatcggccgtgacactggtgctctgcttatcagacttgctcctggtgtcgctaggctgctcgacggtcttcttcctggcattgctacccctgtcggtaggatcattgccgtcattggtgacagcttgtaa

SEQ ID NO: 26895 - DNA, 306 bp, Emericella nidulans
atggtggatgacacattcttcgacctgctttgccacatttgcattcctacgctggaggtgcttgaattcggatggccaagtgaagacccgacaatatactttggtatagagagcttgctcggagcgcttgagctcggccttccgaacctatatgccgtgggcttcgccgaggtgttcacagaaaatagcatgttggatgacgacgcggtcgacgactttctgctcaaccgtgcaaaaacgagaaaagcgcttgaaaactctaacaaacccactctgaacatccagccgggcgtctattatgtctaa

SEQ ID NO: 26896 - DNA, 330 bp, Emericella nidulans
atgtctggcaagccacagaataccagcagcatgacgcccgcagaacaactggcctactatcgaccggatcagggacaatgggtgtcgacgccgcagaagggacaccttgggaccgatacaaatacgcaaataaaggatgatgctgacgtcgatgcggacgacgacttgcataaagctctgaacatggatccggctacatctcggcgggcgggactcggtgctaaagcgcgggagctagatgtagatgaagatgcagagggtgaggatgagtttgaaggagggtacacgattacaggagtggaggatgagggggagcagctgaattcctga

SEQ ID NO: 26897 - DNA, 363 bp, Emericella nidulans
atgcaaccctcccagaacacccgcggctcgaaagccaggtaccagcgactcgacgtcgccgaccccgaccaagcagacatggatccttcgagcctagaagacagaattaccattgagcacgatgattcttctgcatctgctccccaggcgggcggcgggctgaatttcagccaccgccagcccaggtctacgaacaggtcaaatgtgtttggtggaaggatgaacagagagggggatcttgaagaggagccgggtatggatgaagaggatgagaacgagcatacgggaatgggaacaggggctggggcagggcgcgagaggggggactatgactttgctagtgaggattttgatgatctttag

SEQ ID NO: 26898 - DNA, 434 bp, Emericella nidulans
atggttggcggtgatgaagcggtatttgaacgtgttaaaccgctgtttgaactgctcggtaaaaatatcaccctcgtgggcggtaacggcgatggtcaaacctgcaaagtggcaaatcagattatcgtggcgctcaatattgaagcggtttctgaagccctgctatttgcttcaaaagccgatgcggacccggtacgtgtcggccaggcgctgatgggcggctttgcttcctcacgtattctggaagttcatggcgagcgtatgattaaacgcacctttaatccgggcttcaaaatcgctctgcaccagaaagatctcaacctggcactgcaaagtgcgaaagcacttgcgctgaacctgccaaacactgcgacctgccaggagttatttaatacctgtgcggcaaacggtggcagccagttggatcactctgc

SEQ ID NO: 26899 - DNA, 201 bp, Emericella nidulans
atggctgccacattctcttacgctcaagccgcgaaaggcatcgcttcaacgcagccgtccaaaacgccgtccgagtctaccacacccatccccaggttggacgagcaggccacggaactgcaaaccggcgttgatgctgcatcctcgaagacagacgccgtcgctgatgtcgacagcgaacccgtcaacaatgagaaagaa

SEQ ID NO: 26900 - DNA, 269 bp, Emericella nidulans
ttgagaatggaactcagaatgacgacaagatcgaacatatttcgtatatcaatgacgaagaaaagtatcgggctgactttcagaaggcagatgaggggagagcaaaggcgaaaacggccgaggtacgttataaaccacagatgggcttattcaagaactcgtcgatatcgtcagggtcagaaagctgatttgcgcgtcaggcaattgacatcttctgcggctttcaggccaaggctgaagatgtcatccggaaagcgaagggtcagtga

SEQ ID NO: 26901 - DNA, 348 bp, Emericella nidulans
atgcatcgcccccttgacgttcactcgaacaatgtccagtccaaaatctcttcctctatgttcaagctggtccgccacccagggcgggatcacctcatcattttcggcggagaggaggaggatgggtggtactcgttcagaccagtgccggtttcctggagagcttccctggccctgattctgttgatggttaggctttttgtgctgagcgagttgttcgagattgagtgcgacatttcagtgtttccacgagaacggatgcaaattcccgatggggttgcccattctgcgggtagagggcgtaatggcatttttttattcctagagttggatgctctcgggacctag

SEQ ID NO: 26902 - DNA, 270 bp, Emericella nidulans
atgaaagatggctccatggcaacgggtcaggtatcgttccacacccccaagctggttaagaaggttttcgttgcacagcccacccccgccatcgtgaaccgtttgaataaaaccaaggttgcgaagtaccccgatctgcgagcggagaaggaggactacaagaaaatgcttcaaagagaggagagaaagatccgcgagagaaaaagaacagggagaagcaggagaagagggagcgggacagttgaaatggcaaaaggaccatgcatatga

SEQ ID NO: 26903 - DNA, 211 bp, Emericella nidulans
atgcctacagcaaaagcaattgtcgcccgcgagccccggttcacagcgctgaactgggcgctcgaggatgtctgcgtctctaatgagcccggcgacgacgaggtccttgtcgagatggtcgcttctggcgtctgccataccgatatcgtactctctgcggtgccgtcagggcagctaggaattgggtatccaaaagtgataggccacgagg

SEQ ID NO: 26904 - DNA, 324 bp, Emericella nidulans
atggaagagatggagaaagaacgcagagcgcgcgaggaggaagaaaaagcacaagctgagcgtgcgcaacggacagaaacttacttcagggatccaaaggtcgaatcggaaatcgacaacgcgttcgtccgtgactctgtagaggaggaggaggagaaggccaaagattcgactctagaaaaagatgaattcaaggctgctgagaaggacagcccagcaacgggaaaatacatgcttgagaagggacacgatgaggacaaatctgctgcccagaaacagggagccaagggcaatgtccgtatcgatgaggaaacggagaattag

SEQ ID NO: 26905 - DNA, 639 bp, Emericella nidulans
atggccactccccccgcctcaataacgttctacgacattgctatgcgcactccatcgctatcctgctctccgaacccctcaaagacccggctcgccctgaacttcgcgtccgtcccctacaaaaccacctttgttccgctcccctccatcccctccgtccgccaatctctcggcgtccccgccggccgtcagtttgccgacggaagcgacttctacaccctccctgtaattgtggacgaagtgacgggctcaaaaattggggactcgttcgatatcgcaatttacctgcatgagaggtacgcggatgcgaatgggggcaagggagagtcgttcccgatattgaagaatggggagaaattggattttaggactcccaatacggctatgcttgttcccttatctgctatgagcgaggttgcgagacaggacaagtatttggagtatgcgaccttcaatacccacgttgatgcggcgttcaccttgcatgttctgctaacggtccacggattacccttcccgcccgacacggcggaagctaccagagcccagttctgtaagcgtgctggtgtgcccccgagggatgccgacactgtctttgggaagcttgcgagaagcctaagaagtgctcaggagacctag

SEQ ID NO: 26906 - DNA, 207 bp, Emericella nidulans
gctgggatgaggaggtcaactcacacgactgcgtccacaagcgtccacaagaggatctgcctgggatggcactgagcgccgctcgacacgggctcagcgctgacggcaaggaaaagggcgcactcatggtgcacgaaagcttcagactgaagataaacagtcaccagcagctagaaaagactcatttcaaaggcgagagtgaagaag

SEQ ID NO: 26907 - DNA, 270 bp, Emericella nidulans
atgactgaggaacaaagagcagaattacgtctggggcccagtataatacccttgctacggagtgtcgacctaccaaactttcacatatgccccaaccttccgccaaaccggctgattgtagtgcttatccaatacaagatccccttttcgcaactgcttttcccggtaccgaatgccgccttggacccccattggccgatgaaacccttcagcgctgcgttaagttgccaggtccaagtgttggagaatgtctctgaaacggcctcgtaa

SEQ ID NO: 26908 - DNA, 655 bp, Emericella nidulans
gtggtatttcgacgccgtttcaactacctctcagaacgagtcactaactgtcatgttcgaaaacatgggtccagaaggcctcggcgccccgtacccaggtggcccactggccgttcagatctcagggtcgttcagcaacggcacggcgtttacaataattaccgcggcaaccaagggtgcagtccttgagtggggcggcggaggtgtcagaggagagtggagaggagccggtagctcgtttgctggaaaagaccaccgcgaatataccgtctccatcgctaatccgggcataggagtctatggtacaatgacactgcgatcggtatgctttttaaccaggccagtattggagccagtttaacccaaagtgtctgaaggtctctccccctcgctatccctgcgacgtcaaagaacgtcgtgcatctgagcagctcatcccaaacatgtacttggccaacagtcagcccgatgccatcgtcgaggttgactttaatatcaacgaaagcacattgaagttcagcgggattgggtaccacgatctatcatggggttccgcgccgcttgaatcatcggtgcactcctggtattggggccatggccgtctgggccgttattctttggtctggttcgacgttatgggccgtgacggcaagga

SEQ ID NO: 26909 - DNA, 229 bp, Emericella nidulans
caaattcgctgtcggtgatagcctggctgctgatgccatgttgctcgctataatacctcgagacacgcggaagaattttgggctcggccgctcggagttgcgaatagagtcctacggtggacgggagcgcacaaaacgcaatctccaccacgagtccctgcccgtttgggaggtcaacgcaatcttccactatactataagtccccagactacaatcctctatatctga

SEQ ID NO: 26910 - DNA, 288 bp, Emericella nidulans
ctcgaggacgtcgaccgcctagttccaactgcattcctggatgtgccgggcttcaactgcgtgcagacctcgtggactgggtttgagctttacgggtttggaatggggatctttgttgggccatacgattcaggccgtgaggtcgccgcatgtgggtgtcatcaacggtgggcaggtggtgcttccggtgttaccagatggggggatggaggttattgttggtgttgaggagagttgtctcgacagactgttgaaggaccctttgcttacgcgattcggtattgcgag

SEQ ID NO: 26911 - DNA, 228 bp, Emericella nidulans
atggtgccaaaccacgtggtgcagcaagcggcggtagctgcgatggcagctgcgatgtatgcgtatgagtatgaaagtgagggtgggggtgaggaggaggataagagtgagggtgaggaagaggtcctggggccaactggggcggggggccaactgcattggctgcggcggtgcaggggcaaggccggcgtcgactcgtggagggttggggagagcagggctggctga

SEQ ID NO: 26912 - DNA, 464 bp, Emericella nidulans
gccaaccaggaaacatcccaagaactcagtttgccggcgaacgagaagtcttctctgaaaccgaccgacatacctggaactggttatgagcgccattcgcgatacgaggatgccgtctcttctggggatgaccccgataagcagcgttcagaagcacctcaagtcgactactctgaagctttgaaccggaacgcgactaaccgctcacggcaccgcagacgtagagccacaacattgggctcaaaacgtgattttacaactgacgaggttatggacaagcagacagctgaggacctcctcaaccaggtccaaggccacctcatcctctggccttatgattggtacgtggtctatcatcattgttctattcagaagtgtacttacggagaatataggctcgagaaggaagaacagggtggaaactggctttacacccttgaccaaatttctcctctggaaatata

SEQ ID NO: 26913 - DNA, 384 bp, Emericella nidulans
atgcaaccactgctgaacttcctcatcatccttatcttctcgcaattaacagcaagctttgccccctgcgtcgaccaatgcataaacaataacaacagcccctcatggtgccagggcgacgaactaggccgcaaaggcacccaatgtctctgccgccatctcgagtctacatcgttgattgagtgcatacgaaactgcagtcccagcgaccagtgggactttgcaggggggttgccccagcattgtcgtgacgggctgtttcccgatgcgcgggaaggggagggggatggtagcggcgcggacagccttattctgggttcgggcccatctctgcgggtactttgtggcttgggagctgtggctttcaccttcgtcttctcatga

SEQ ID NO: 26914 - DNA, 295 bp, Emericella nidulans
atgagatactctcttgttgcatctgctggcatcctgggctgcgcccttgcccttcctgctcctcagatctctcctttccccggttccggcggcagcgagggtggtgagggcggcgatgcccctacgcctaccggtgccgttccatctggcttccctggtggtgacttcggcggcttcccggtgccttctggcggtgccactcccagaggcttaccccgctttcacggtttccctggccgttccaacggacagggtcctttttccgtctggcttccccagctttccgggctttctt

SEQ ID NO: 26915 - DNA, 342 bp, Emericella nidulans
atgcagacgcaacacatctcgtcctctccagaagttgatactacgaacttgatggagatcttgaagaaggcccggcccgtccgagccgccatgatgcagctgaaactccttttagtggccattggtgtcagtgctaatgttttttcggagaaaatccttgctggaaataacattgacctcagtgatgcgccgctcctgagttcgggtcaactgatcccgttcattgttgggctagctggactggtgtcgactagttggtcggtgacgattggagagcggttagcacttgctcataaaaagaggagagagcgggctgtgcctctgaatgagatcatgacgtaa

SEQ ID NO: 26916 - DNA, 435 bp, Emericella nidulans
tgacaaatggccaacaatactctaataccaaaatgggtgctgcccctcttgttaattctaggccagaaccggccgcccagaatgggcgccttgaggattcgcaggctgccattaatcccctcgagagaataccagcgcctcatgagttagggaatggagcagagcccatagtacctggaagcgatgagaacatgcagcgcccacagaccaagtcgaaacgccataccgtctcattcaatgtgccgccgccaacaccccctccgctctcggaatggaagactgcgccaaccgtgagacttagtccctccgactttgaattacaaccctcggacgtggacaggaataaggcgtggtgggaagcggggtctcgcgaccgccggcaaagcagagcacttccaaaggactaccagaagcctccagtgcagaaaccaaaat

SEQ ID NO: 26917 - DNA, 487 bp, Emericella nidulans
atgcctatcctttacagcctcgtcgaccgtctttcagacgttctcatcgcagccgtcaatcccgccaaacgggcccgcaaccgcgactacgatcgtgaatcaagtctctcaccagcaccaaaactccaccatcgccggcgtgagtatgactacgacgatcctgacgacgaccatgagcccctctcatactacggccgtgggctgagtccacagttcggtgaggaggttgcaacccctattgccgaggaaggtgacctttctggcattggttatagcaacagcagtaacaacgacaagggcgttcgatactgtcgcactccgcgccacggtaaaagcgttcactggggcggtataagtaatgagtttctggacggtgtgcccgaggcctctgcgccgggactaagtgagtacccgcagagaagaacgaaaaagagccaaaactatgtttatggtgctgattatggtgctgaacgtcagagttcaagcc

SEQ ID NO: 26918 - DNA, 354 bp, Emericella nidulans
atgtcttgccgtgacgcctttgactacgccttcttttgtcagtcgctaggcggacaatttgtcaatgtttatagatatggcgaactacgatcgtgcagcgagcactgggagaatttctggctgtgtatgaagacgcggacgttccgggagactgagaagaagaagatcatccgggatcattatcggaagaaagccattaaatataagacaggcccgagtagtgaggatgtttgggatgtgaggacggagccggtcaaggggtgtttccagggggattttgcggcactggagagggagatacaagctgaagaggaggctcaggcgcgcgcaaggcatgcggctaatactgtctga

SEQ ID NO: 26919 - DNA, 1225 bp, Emericella nidulans
tgtaagctccaactctagctccgaaccgtctgaattcactgccaatccctccgttggcggtggcggcgacacctacaccgactccgcgcgctttcgcatctacggcgcaacgggcactgacgcggagaacgcactacaaatgctcgagtccgcatacacctgctttgtgactgacctcggctggcgctcttcaggcctctcctacgactccaactctgatacagcggagatatggtacaaggagaatgtgtactctgttgcctctctcgacggcaacgctgccggcgtcatgggctctgactatacaacgggctacagctacgtacaggtcgtaaacacgttcctcgcagatccgtccgttacggtgcacgagtacggccatgcactcacctaccacgttcgcaactgggtagaccagactatgactggcgcgtggtgggagccactggcgaactggttcgctgatacctggatgacgtctgacctgtgcgcgagcgccagagagcaatataaccaggaggccggaagctcggtcatcgagttgcaaaaggtcattggcgacagctaccaggttatcgttgatggctcgacagatacgggcaactactaccagtcctggccgctgttcacatacatgaccaacaatcccgataatttcacaggcctcggtaccgactctgttctccagctgaacaagcaatatgatgtcggtagcaatgaaacgccgctccacaccctgcagcgcctggttggtgccacgcctatcgcaaaggttattgggcggtactgggcgcatatggcgtacgtcgatatcagtgatgctgccaatgaggtcttcctgcagcaacgggagagtctgacatatgacaacctcgagttatccagcgatgggacctacactgtcaaatcggaccgccagccacagtattttggagccaacatcaagcacgtcacgctctctggctcggggagtgtgagtatgactgtttcctccaaggcagcattcactgcgacccttgctatccgtagcacgaatagcgggtcggttcggtatgttgatctggagaacggaaagggtgaggtcatcgttggtgagagcgaggaggcgagtctggttgtggtgaatacccctgaagaactcatccagtataacccctttgagttgtctagtgaggtacaggctggtttggactatacagtgcaggttaccggcgcgagcttctga

SEQ ID NO: 26920 - DNA, 240 bp, Emericella nidulans
atgcactcgatgccagtggtattcgctgcccagaacccctctgctgtcaaggagctccacgcaaccatccaatgtggggtgcgcccaaaaggtgctggtgctaacaagaaagtgtggagctattcagacgccctcgccaacgtcccagccaacgcgaccacctacttcagctccaccagccttggaaatttgctgaacacaaccggcagctgggagttcttctggacctatactggctga

SEQ ID NO: 26921 - DNA, 1137 bp, Emericella nidulans
ttgagtgccgagtacgccaacactcaagatcgcatggatgccatccttaagaacaaggacaccctcaagtccatccagcgaaacgtctggcgcgcccacaagacagctatggacgagggtctcgacgactggagcgagcaggccatgatgcggcacgtcttcaaagcaagcgagaacgtcacagaccaaatctggacggattcagactatgacgtcttctgggatgaactgcaccataactcgaaccttggtcttgacggaagtagagagtctttgggggaaactcactggctctgtatcgatggaggcttcaaccgcctctctgacgccttcctcccgcatgtccagagcagactcactctcaatcgccagatcagaaagctagaaccaatcccaggtcctcataatactacgaagacccgcctctcctggtaccccagcacgcagaaccgtacctacgagtccagagactacgactacacaatcatggctgtccccttcaccatgacacgcttcatggacctcccatccttctcctctgtgctctctcgcgcaatcagcgaggcaggcctacgcttcaaatctgcctgcaaggtcgcccttctcttccgcgaacgcttttgggagaaaggcccacgtcctatttttggtggatactcaaagcctcctagcctccctgttggagccctctattaccctgtctatggccataatgagtctcggccaggactgataatgcactaccgcggcggagactggagcgaccggttcgttagctttagcgacgaagaacacgtccaaacagttcttgacgccatcgtctcgattcacggcgagcaggcaagagatctctatacaggggactacgagcgtctctgctggctacaggatgaacatacggcgacggcgtggtgtcggccggatgtggagcagcatcggctgtatatccctgcttatcatcagacggagcataatacgatctttgtgggagaacacaccgcgccgacacatgcttgggttagttcgagtctgcagagtgctgtgcgcggagtcgtgcagctgcttctggagctagggctcgtagatgaggcgaaagaggtcaataagaggtggatggggagatggatcaaattgtaa

SEQ ID NO: 26922 - DNA, 338 bp, Emericella nidulans
acttcagcatgagcttcgacagcgccagggtgtctctatgactcaaagagtgcacatccagatgaacaggttggggcccctctcgcagctggtttccagatgcagttcaacgatattcagaacgaaaatgtgtgtattagtatcaggctcgctggccatctcgagtgggctgagatatcattcatgcagagagacgcgtcgttcatctcttgagtacatagtacagaccgtcacgagccgcctacagactatacatagcgagatcggccagcgcgtggtatacagtctcctctggcaggcgggatatcctgcacacactccctacgctggaagcatta

SEQ ID NO: 26923 - DNA, 229 bp, Emericella nidulans
atgccgttcaccatctgttcccttctaccgtccgattacgtcgaggctttcacggtagccgacctagcgttcgcctcattaaataccctgctctacaatacataccctctgtcgccagagtcaactgagaaactcacagcagcgcggctacgggacatcgaggcaatgccgagggcgaacatgttcaaagctgttgacacggagacgggaaaaatatcggggtcgcgcg

SEQ ID NO: 26924 - DNA, 486 bp, Emericella nidulans
atggaaccggtcaaagaaatggtaagtgaatgaggcgtctttatagtaaaaaggacttaagaaggatgtatagcattcaaggaccacaaggtcagatggtattacacgcccaacgacaaggtagtcttggacctgcccatcgctgatggcaacgtcttcttcttctttccccctgttgacacccccgccggcactgtggcaaagcgcaataagctgcagaacaagtcgacgcggtggatcttcgatccccagaacaccccaactaacagctgggtcgagccggccgaggagtttgacacctacagcggggagttctcgcgcatagacgaccgctttacgacccgcaagtacaaccactattggcaggcagtgattgacgggacaaagccgtacgacttcgccaagtgtggtagccctgctggcggcctgttcgacagcctgggacatttcacctgggatggcgccgtgcgcgagactttcgggcag

SEQ ID NO: 26925 - DNA, 279 bp, Emericella nidulans
atgggcgtagttcgacgttcaccggatcccctacgtgtcccgagccattactttgaacccggtggcgcggcggcccagacaacgggcagtacgacctcgagcacttcgagtgcggcgtctacgccagctccacgacgggagagtcgtggtgtgctggagagggagacttcgaagttgtcgggtcgaagggagagtgggaatgtgcttcgtcaggcgttcgataagtttggtaagggaggcaaggaagatagagggaagggaaaggactcggcaaagtaa

SEQ ID NO: 26926 - DNA, 258 bp, Emericella nidulans
atggagcgtatcaacgccgttgcgacggacgcagagaaagagcgtcaagttgaggtggaaaaggtgaagcagcatgcgcgcgaggtgttacaggctacagggaaaaggctgcgtgtcaatctggatagtataccgggtggcgagcaagcggtgaaacgtctattagggccgacgattcgggcattggacacagccttgatgcggtataaagaggctttggctgaggagatgaaaaatatagaacctagcaatacttga

SEQ ID NO: 26927 - DNA, 302 bp, Emericella nidulans
cacaactccgaagatcgaggatatcttccttcccatcgcggagcacgtccgcgactactacctggagatccgaaataacgaagagcacatcaagcttgtgccggcctactgggcaatgtcaatactcccatacccggaaagcgaaccgcctgcgatcccaccgcgcaatgagaccccttctgcctctatttccagtatgggtgtgctggacaaggtcatccggcaccagtacggaagctttagtgtggaaaatccatgggtgaccggggaggagctaggcacgggactcggactgttcttgg

SEQ ID NO: 26928 - DNA, 1261 bp, Emericella nidulans
atggtccatatcactgtcaaaggcttagaggtggaaaaagacacggctggttcgagcagcacgagctttgatctgccggctgagaccacgctcgccgaccttgttcgtcagatacgtgagcgaggatatacggcccccgaggagctcgctcgagaaagagacgacgggcgtcgtggccgtagttataagccgtatgccaagtacttgctcaaccatcctactgagtccctagtagtttcgggggactgtccgtcaaattacgatgaacgacgcatcaatgtacacgatacctttctccattttctcagccttcagtccccgagcaaggctctctcggcaaggctggaaggtgaccagaagattctggttgacgatcgactcgaactgatctttcatcgcaccctacgcatgcccgacgatgacaagatccatcccctcccggattcacgcggtcaatttcctctttttaacgttgaggcttttgcctctcaactgccagaacggatcacgaagcgcggtggcatcttctttcctatgtggcagcgagaggctctctggattcagttcagtcacagcgggggcaatactcattatgccattcgggtcaacatcggccacatcaacgttgtcagtggtctcgatatctacgaggtctctgacaaacaggattacctcgtcgtccccggccaacagtggctcgacggtattgctgtaagccctggtgtcgtgcgccagtttgttgctatgccttgtctgtctcacccgtccttgcgtctgcattgctaatataggaggcagtgggctctggatacaccgtcgagggccaagtcagcggcaaagagaaatttggcggaatccagatcgaggtcgttccttcttatgaacgagacactcacacgttcagatgctcaaccgagcaaggacgcgtcaagtatgcggccgagcatgatacccctggcgactatgcgctgaaagacggcgacaaagtgtccatggcgctaaagccatctacatatagagggcaggctagactttgtgatttccttgacgatggcgaaagttttgaagaaaccgagaacctctgcctgaaggtctggccccaagatgagccatatcatgaggctgatactgaaagaagcagagtgtttacaccatgccagctatcctggcggccacaagctccaatccagttccctcaaaaggcatggtcagattcaggggttcagcgaggagaaacagaaatccgggcttggtggctttg

SEQ ID NO: 26929 - DNA, 231 bp, Emericella nidulans
atgggcgcggaacaaaaggacgccaacgaccaaggcgaggaagaccgcaacatgcaggcccaagaggacaaccagacccagccagagaacgacccagcacaccacacagatcaccggaaggaacccggacgccacaagaacgagaaagccgccaacaccgggacagaagaggacacccgaacacaggccaacaaagcgccggaagcagaaccgcccagtaccgcaagctga

SEQ ID NO: 26930 - DNA, 1221 bp, Emericella nidulans
gagtttaacacctccaaggaggtcaccgttgctcccactttcgaggatatgcacctgaaggaaagccttctccgtggtatctacgcatacggatacgagtccccatcagctgttcagtcccgcgcgatcgtccagatctgcaaaggtcgcgatacaatcgctcaagcgcagtccggtaccggtaaaacggcgactttctcgatcagcgctctgcaagtcattgatacagttgttcgcgaaactcaagcacttgttctctctcccacccgtgaacttgcgactcagattcagtcggtcatcatggcccttggtgactacatgaacgttcaatgtcacgcttgtattggaggcacaaatatcggtgaagacattcgcaagctcgattacggtcaacacgttgtttctggcacacccggccgtgtcgccgatatgatccggagacgtcacctgcgcacgcgtcatatcaagatgttggtccttgatgaagctgacgaactcctcaaccgcggatttcgagaacagatttacgatgtctaccgttatctccccccagccacgcaagttgttgtcgtatccgctacgctcccctacgatgtgcttgatatgacgaccaaattcatgacagaccccgtccgtgtcctcgtcaagcgtgatgaattgacgctcgaaggcatcaagcaatacttcatcgctgtcgagaaggaagaatggaagttcgatactctatgcgacttgtacgatactttaactatcacacaagccgtcatcttctgcaacacccgtagaaaggtcgactggctcacggacaagatgcgcgaagccaacttcacagtatcaagcatgcatggagagatgccacaaaaggaacgagacagcatcatgcaggacttccgtcagggtaactcgcgagtgcttatctccactgacgtttgggcgcgtggtatagatgtccagcaagtttctcttgtcatcaactacgatctccccaccaaccgtgaaaactacatccaccgcatcggtcgaagcggtcgattcggtcgcaagggtgttgctataaactttgttacgagtgatgacgtgcgtatcctacgcgatattgaattatactactctacgcaaattgacgagatgcctatgaatggtgagtgccgccccatgacctctccgcgcgataaggactatggaactgacaaacatacagttgccgacctcctctcttaa

SEQ ID NO: 26931 - DNA, 659 bp, Emericella nidulans
tctcgcgcccggccgcgatcaaggagcccgccaaggcgcggtgctacgaggaaatcagcagaaagtgtattgaagcggccgagcagtcggttgacatcttcaagcgcatggtcaaagaacagaccctctcaagccggatcctgttcgattgccactgcatcggcgaggcgatgtggatcttgattcttgccgtgcagaagctgggcctcgaaaagcatcggcaaatgctccagctctgcctcgagaccgtccgcgggatggaacagtttgggtggtgtgagaaggtggcaccggagctggaggccagagtgcacgagagtgggatcatgcagccgcagtctcgacgagaaatgcagcacacccagcaaagcggacaccgaagcctggacttccacagtcaggcgaatggagctgaagcgaatgctggaggaggcattctccctgaatctcgagctgattctttagaggacacaactctgtatgttcttccccgttctaatacttgtgggtgcagatggctaacagatctggattacagtaattttgacatttccgagtttggccttctggagacattcgatatggatatggacaatggttccgggctgatggatatgcttgcagacgcaacgctctcagcgtcacaactcggcttttag

SEQ ID NO: 26932 - DNA, 303 bp, Emericella nidulans
ccagaataccttatgatcctctcccggcggtaaatgttgctaattagggccgttcatcacgcgggtggccaatgggggccccgggaggcaatcttggctcagggcgctaaagtagcgtctctccagctgcacttcatcacacgctttggcgttgttattcgacgaactccccgcaccattctgcaacttcgacaacagcagcacgcggaaagcgtcatcgattggctcatcgttcgcgatcctagcacactcacgatgtgcaacgactcgacatccagctcccggtgcgatccctggccggtc

SEQ ID NO: 26933 - DNA, 342 bp, Emericella nidulans
atggccttctgcgtcctgtgttgttgggttggccgtgcctcggccggctccttgcgcggtcttgtcttttgggcgctggtccgtgggtcgggtcgcctgtgggcctgccgcgttcagtcgcctctcgtgggcctgccttcgctccctgcgctcgcgtggcttgccttgggcgggtggcgtgttcccgcgtgcggatccctgtggcgggcccttcttgggctcgttgtttccccgcgcgccctcttgcttcgtggggccttcggcgatgtgcggcgccctcggcgtccttcctggcccccggtgcttgggggggggtcgcccgcctactacccgggcttttag

SEQ ID NO: 26934 - DNA, 617 bp, Emericella nidulans
atgggggtgatctatcgctgcacctacaacgacgaggccacgtggcagcatcttaaacaatggatcgtcgatgagaaccgggaaagcatagcaacgtcaaaggcacccacacttatcgataacctcgacatagtcttcttcgaggaccgggcgcgcttcgacggggcctcgcgcgacgaactacgggttcatttcaaggagtggcgagcagaccagtttaccaggctgggacctgcggatctggaggtgatgcgaggtactcggctcggcgaattggtgcctcggattaccatggtgcatcccgaattgatgggttcgaggtttcaacagtttatcgaggttgatgaggagtcgctacacagtatgcgcgaggggttcgacgagcccgttagaccgtacgggaccggacatgttgatttggtgtacgctgattggccgcatgacctagaggactctgatgaggatgaaagccaggaggagtatgaagattatgaggtctttgagcccattgatgggtgtacagaggagaatgtggggtggatgaaggtggtggctactgggctgggccgcccttcttcttcttgtcgtatggcatcgaatggtggcaagaaagttat

SEQ ID NO: 26935 - DNA, 213 bp, Emericella nidulans
atgcgccccgccctcgtggcttgggcgcttggcctcacccccccgtctctgtcggtggctggccttctgcctctggttccggtggtctcccttgggtctgtgtcccgtttgtggggtgccttgtgttttgggcgtgtcccccccctgtggggtttttccgggccggtcctctttgcgggcccccctttggtttggcccgtctctcggggttaa

SEQ ID NO: 26936 - DNA, 875 bp, Emericella nidulans
atgaaatccagaaagctattgtcactggtccccctcgtgggtgtatcccacgccctcaatgcaacgtccctcacaagtcaatacctcggtgctgatgccccttggtacacttcccgaatcccgctattcgaaacctcggtctcgtcaattgaggaagtctactattaccgctggtccatcttccgtgcacaccagcgcgatctaggatcccttgggtatatatccaccgagttcatcaatgacgtctcgtggcagacttccccatgggggattttgattgatgcagccaacttccatctccgggaaggacgctggtgtcgagaccgtcggttcaaggaggattacgctgatactctctttggaccgaatacatacccctatcagttctcagaggtcttggccgatggcgtctgggcgggctacctggtggacggagtgattgacgatgccgtacaacgtttagaggctatggtcagtgtctacgaggggtggagcgacgaaaatgcaacgggtggcgttggcggctacgatgagagcaaagggctctactggatccagcccttggatgatgcgacagagtacacgatctctagcatcgacgcgagcggtgggtatgatgggttttttgggggcgaggcgttcaggccgagcatcaacgcctaccagttcgccaacgcgaaagcgatctcaaatctcgcagcctcgtcgggcaacgaggatctcgcggacgagtacaacgccaaagcagaaactatcaagtcccttgtccagcaatatctatggaacactaccttcaaccacttcatcgaccggttctacgtcaacaatgagaacgtcacatactgggatccgatccggggacgagagctagtcgg

SEQ ID NO: 26937 - DNA, 321 bp, Emericella nidulans
atgtctccagctctgcttgatatcgaagttcagggtgaggttcctccatgcctcttccccagatcgtctctctcgccaaatgataagacaagcgaactgggtactcaagaactggtcctcacggaaaagttggatttcgtccaccagttcctgcaggaaagccagatcacccttccaaccgccctgcaaacagcatgggctctgacgcttcgctgtttcgtgtcttgcgatatcctctcgttcggctatcatgccagcaatcttgacggccatgaagaactggctctcgtcggccgagtcgacaacaccgagaccattgcg

SEQ ID NO: 26938 - DNA, 767 bp, Emericella nidulans
atggatattaatcaggtgctatccagtcgaatctcgaagagccagctcttcccgctcgcccaccctccgccgaaatccaagtccgcaccgaacaagtcgccgcgtctccgtctttcctcacggctggtcttgcagatccagcaatcgtcccaatcccgtgcgatcccgattctggagctctaccagccgtccacatttgggaaatcgattgcgctgccagatgggagcaggaaggtgcatgggcgggatatgtatgtgactcagagcgagatgtatacgcacctcaaacggccaagaaagagagatgcggtggatgggtacggaactgggtatggacatgggtatggaaatgcgtatgggcatacgacgaaaccgcgctcggggtctggagggtcacgctcagtgtctgggtcagcgtatagctcggcagccagcagtcgtcccaagtcgagatccagcggggccagttcaggcgatgagggtcagggcgagtgcaaggccaagttcagggctagacggaagagcggaaacgatgccgacggcgaacaagacgatgtcgtcgcgatgatacatacctcacccaagtcaacggccgcagacgcacaactcttctttccccagaacaaccagacctgggaaacgacctcgtccaggcccgggtattatcgattccagagcgatgggagctcggtagtattcgaatgggagaaacgccctccctcgcgctcgcatccttctagtgccgcggagaatgatgacggtgagag

SEQ ID NO: 26939 - DNA, 279 bp, Emericella nidulans
atgtccgactacccggcgaatacggcatatgcgcagcgacatatctacaccaatccgtggttgcgtaaaaagacatctctgagccagagccagacacttactgttgatgccgatcttgatgccgacgccgatgccgacgccgatgcagacgcagaatctgaatctgaagagcagtctgtctctgggacatctgcatccaagggagacaaggtgggggaggacctcgacttcgatgatgtgaacacaggcgaggctgatgatgactttgggtcaaggtag

SEQ ID NO: 26940 - DNA, 360 bp, Emericella nidulans
atggatcaggacgagctagacctttccgaccacactgcaaggtccaacagattcgagaaataccattttaaaccacccgcatcgctaaatccaggacacggccaagtcagcaacattcaaaatagcagcagtgacggcctccaagaatcctattactctggaaacattcagggcagcgatccacgagcgagcaacatgcaaggccaccgccaacctcagactacggcccagggacggtatttctcagcatctccagctgaggagattgatgactttgatgatgaatacgacccagagagtctagatatcggagctggcggaaatggaagtggtatgagggagtggagtgagagggattaa

SEQ ID NO: 26941 - DNA, 402 bp, Emericella nidulans
atgtctgtccacctcgttgaaggcctcatgccccagagctctcttagagaccggagccgcatcgctgaactcgtggactcaggcccattatttgctctggttaccgaagttagcgccagagaggctatgcgagaccgcctgctctctacaacgggaagaatcatatcccttcatacgctcgctcaggacacgttgtacctcgagaaacccgctaaggcactccgttgtctgtgtccaccaaaattcaaagacagctttagacatacgatgcgtcgccaatggagcatagtcgggagcgggcgaccacttgagattcagaaatccgagcatgtgtttgcaacaattgagccgactgcaaatgcattctccctttgcatgatgcagctttggcttttgcactga

SEQ ID NO: 26942 - DNA, 459 bp, Emericella nidulans
atggctgccggaaccgcaacattctccttcctgcgtcaagtctcggctgcaatctccatcgtaatcggcacagttatctaccaaaatatgctcgtcgacaaagcctccaccatcgcagccgcggtgggcccagacacggcgcaatctcttcagaattccttcgccgcaaacaaccacgaccttattcgctctttggccgatgatcaaaaacgcgtcgtcctttctgcattcacttttgccctctctcggatttgggtcttttatacagctatcgcgggcgttgggttgatcgttagtgtttttgtcaggcctgtcgtgctgagcaagacgcatacggttgcgaaaacgggtttagcggagcaggaacgcgccaggaaggagattctggaagcgcaggctaaggcacgggctagtaataataataataaggaggtgcctgagggcaaggagaaggtctag

SEQ ID NO: 26943 - DNA, 402 bp, Emericella nidulans
atgcaaccccagtctagcgtgccggggctcgtctcctccctcacattccagaccctgcctcctgtaattcgctcctcgcgcaacagtctcggcttcccgccgaactcacatcccgaggaaaaccttgtccttgtgctcgtctcgaactactggcctggcggggcctactcaagagcactgcgtgacggtacgcgggcgctgttcgaggaaattgacgcgttggccaggagcgaagggctggacgagcggtttaggtatatgaattatgcggccgagtggcaggatgttgtttctggatatggcgaggaaagtgtagaagagctttggcgggtttcaaggaggtatgatccaaggggtatcttccaggagagggtgcctggggggtttaaattgcccaggtag

SEQ ID NO: 26944 - DNA, 342 bp, Emericella nidulans
atggccatccctgaagagtctgacgagagggaagactttctttctggccttcgaaacacggagcctcaggcaccgacagcatcgcactccagctcatccaaaaacaatccgcaggagaaagacagacagaatgagggcgtccgcgatgtcgaagaccagtctaacgatggcgactcagcacccgactaccaggcgttcaaactcactgccaccggccggctaatcttctgcgcgttggcggtcctcaccctcatggtcgccctggatgggacgagtatctctgttgcattgccggtattctccttccaagatgctattgtagcctttcttattaagaaatga

SEQ ID NO: 26945 - DNA, 370 bp, Emericella nidulans
atggctcattcacctgcaccaagctatttgtccctgaccgttgcgatcgtcctcgcagtttggctcttctcttcgaaaaggattaagcaaacccgactcagcacaaccgccgctcttgtgtcatataggctgccattcggtacgtgcatttgccaaacccccagattgacaaattgacgctctaagtgcaaaagggattgactgcgccgtccgtgccgtctaccagctcttgaactataactttgttgaatggacgcaaaatgtgctcgaagagaatggacgaaccgtcgaattgcacctggctggtgctagattggtgctgacggacgactgcgagaatgtcaaggcaataatgttcagccaggttgcc

SEQ ID NO: 26946 - DNA, 480 bp, Emericella nidulans
atggctcttcctcttctactgaaagcggagcatcatttgccccttccaagcgcaaaaagcctggtgaaagagactgtctgtctgcttgatagcgatcccattaacatcaaaaatgactctctggtcgacgagcttatcgaaaagtgcgagggagacggaatcagcaaacatgacatgtctctcgggccaagtgacaagatcgagtggatagctggtggtcttcccaaatcgacagagatctactattccatcgtctcctgggaaaagggttgcgagggcccgaatcaaaatccggtaaccccaatggtgggtcttacctgcaaggatataacaaagaagcactttgaattgggttgcattagacccggtaatgttggtgttggtggcacaactgttgttgggtgcttgcgttatcaatcatacatgggaggttaccctctgggggaactccatgagggagcgatgccggacgctagataa

SEQ ID NO: 26947 - DNA, 1050 bp, Emericella nidulans
atgtcttccaacccggaaattgatgtcctagtaatcggcagcggcaatgcgggcctctgttccgcgatctcagcagccgaatctggagcaggtcgagtccttcttatcgactcctgccccgagcactgggcaggaggaaactcctactttacagctggagctttcagaactgtccatgccggcctaactgacatccttccgctcgtggacaatgtcgaccaggagaaagcatctaaaaccgacgttgagccgtacacaccggcagatttcttgggtgacattacgcggatttgtgtcggacggtcagatccccatctctcaaaaacgcttgtgggggatagcaacgatgcggtcaagtggctagcagagcatggagtgcgcttccagttgagttttaatcgccaggcgtacgagattgatgggcggttcagattctggggcgggatgtgtttgaagacgcagaatggggggaagggtctaattgaggatgaacgacacgcggccgagaagctaggcgttgaaattttgttcaacacagcagcgaaacggcttattcttgatccctctactggtggtatccgctctgtgattgtgcaaaatacttctacctctatatcttctggctccactcctggattggagctcggcgaacgagaaatctttaccaaatctgtcatcctcgccgctggcggcttcgaagcgaacccccggatgagggcacagtttctcggtcccggctgggattttgcacatgtccgcggcacaccgtacaacaacggcgtatgtctcgagatggccatccgcgatgcatccgcaaagcaagcggggaattggtccgggtgtcactctgtcgcatgggatgcgaatgcaccagctgactccggggaccgggaaatctcgaacgaatttacgaaatcggggtatccgttgggacttatgattaatgccgagggaaagcgatttgttgatgagggcgtcgacatgaggaactatacatatgcggtatttgggaaggcgattctggcacagccgggccatgttgcgtttcag

SEQ ID NO: 26948 - DNA, 1024 bp, Emericella nidulans
atgtctgccacccaggttgtcaagtctcacggtccattccaagggcttcccacctatccccagacacctgagctctccgatctgtgtgcagtggtgactggcgcaaatggtctatccggttacaatatggtgcgggtgttgtcagcagccccagagagatggagcaagatatactgcctgtctcgtcgagcggctccgagcaacttcttcactgacctgggtgatggtgcggcgagggttgagcatatccctgtcgatttcctgtctgaaacggcggagattgcgagtcggctgagagaggatattcccaaagtgtatgtcaattatccataaacttcaagttgttgcgccaactctctcaccatgctcagagactacgtctttttcttttcgtacatgcagccagaacaggaaggtaatgttctaggcatgtggtcggatgcggaggccctgaccaaggtgaactgtacgaagcctctttcctgcgttttcaaatgcaaaatcgtactgagattacagctactatgctcaataacttccttggtgctctccaagaagcaaacctgcacccaaaacgcttcctcatccaaacaggcgcaaagcactacggcttccacatcggcccctcaacaaacccatccttcgagacagaccgtcgagtttcgcttgagcaaaacttctactatcttcaagaagatgcgctggcagcatactgcgccggtacaggggtcggctggaatgttgtccgcccctcctacatcataggcgccgtgcgcgacggagccctaaaccatatgattggcctggcgatctacgcagctatccaagcgcacttaaaccagccactctacttccctggcgactacatagcctgggaccgcgaggtctgccagagcacggccttgttgaatgcatattttgaggaatgggctgttttgaccccagatgcggaaaatcaggcattcaatatccaggatggcatgcccttcaggtggggacggatatggccgaacattgcccaatg

SEQ ID NO: 26949 - DNA, 627 bp, Emericella nidulans
cactattacaagtgtttgaccaccaccattgaccgtccggctacggctaccagcactgcctacgtgaccggtgctcctactaccgaaactgtgaccgtcacctacactgagaatggcggtacctctactactgttgtcacggccactgcccagcccccggcgactactagtgctgccaccgaagttattactgtcactgttaccgagaacggtgccacgtcgacgagtgttgtcaccgccactggcactggcactatccagacccccacggctactggcgctgcctctgagtatgagactatcacctacactgcgactgagggtactgtgaccagtgtcgttacaaccaccgtccacaagacctctactcgcacccagactgtctacgcagtgcgtatccactttcctcttgctgttaaaatgaaggtgcaatgttgactataaatctagactcccactggcgcagacgccgttggctctggagctgacacaaccctcacctccaccaccactgagatctacactgtcactcctgtcgcctctgaaaccgctggttagagactctggttctggctccagctccggctctggctcgggctcggggtctggagactcgagctatgagag

SEQ ID NO: 26950 - DNA, 210 bp, Emericella nidulans
atggtaaagataccgcgactcgaggcgaaacttttagccgctgggacgaattatttggcctatgagcgatggccatactcgatcatattcgcgtacaccgtccttcgtcctcgaagccgaaacgttgatacgggctccatcccgcagcctccgcaggtgccagctgccaactgccaacctctcgcgtgcacgctagagcggctaaactag

SEQ ID NO: 26951 - DNA, 760 bp, Emericella nidulans
acagcctgtttgctcggctcgaccaggcacgagacgaatgctgcgcgatgttccgctccaatgaggacgaggatagtagcgccgcagtctcgggtctgggactcattgtgacccgtatgatggaatcagtcctaaaaggccactcaacatgcaaggaaatgcctgatctaaatatcggcgaggtatacgcgacgtatacgaatgctctggtaagtatcactgcctcaatcaaccaactaaccccaatcaagccaaggctttttaaagctcggtaccatctcagctgacttctggatattgcttttcagcaactcgaagcccgaaaccacccaagcaagaacctcctcctggacatcaacctccttcgcgaagaactcgagacgatcatagcaaatatcgtcgaacagctcaagctcatcaccggcctccgagacgatagctcaggtcaagcggcagatgaaggcctgctcttcattgataccgagaatataaacttcgaactcctattcacctcttcctcgccttctccttctccttccacattaaacggcaccgcctcgaacaacgaagatatcgcccaaatcgacctcccgtcccgagccatcctccaagcgatccacgccgagctacatgaacaagaagaagttttcacagaattgattaagcgagcaaacatcctcgagcgccagatcgtgcagcgcgtcgatatcatccaagaagaccacgggaaagcaattctagttttcacgatcgtctcggt

SEQ ID NO: 26952 - DNA, 258 bp, Emericella nidulans
atggcagtgaaattcagcaacagcccacactcgggtgccaggacacgtccagtccggccccgcgacactacaaccatcaaccagaacaatggccctcaaaggagcacatacactggagcagacaatgacggcaacggcttgaaggctgacccattgtgccttcaggtggatattcccggaagaccatgccggacctctatggtcattaggttgcccgtgaggaggaagatcatgaagtacgcgaatgtgggatcataa

SEQ ID NO: 26953 - DNA, 281 bp, Emericella nidulans
aagaagaatcgatgcaagactctcccgcgcaaagcccgcatttccgggccgccagctcctcaatgattcccctaaagggcaaccgacgcaaaacgaggcagtcaatgcccgcctggaattcctcaaagtgcgcggactcagtctggcaagtgagatgctacacgacggggtcatcgataagtctgtcacaccggggaagttcaagcgcattgggacggccctgatcatgaatgcgagttccatatctccttccagggatgccatcaccggcattgccgaag

SEQ ID NO: 26954 - DNA, 692 bp, Emericella nidulans
actggtgaggccaaaaggcctgttcgccaacttgtcggccaaatcaaacctcttgccctttcgagtacattcagtgtcagtgccgaggttcgtgcgcagctgttttccaacttcatggataccttcttcgcttccagttctagtatcaacggcaagaatgacagtctgtattttctgatggcccgcttccccactcttgccggtgaatcagagccgttggatcgatctgttatcgcgctcgcaaccacgttcctggcgaaaacaaaggatgataggtggctggggcgtgagggcctggaaatatataacactgcgctcaattccatgcaatacgcactgcagcgaggctcctcgccatctcccaacatgctctacgcaacaatcatctttcacacgtacgaagtaagtctctggaccaagtaggcaatacctagttaccaacacaatttccagaccatgaatggtggggatgcctcctcgcgaaactgtttcacccacatccaaggagcagccgctatcatgacacaaaccaacttcaaaactcaggacgtagacagtctcaccaaagcaatgctaacaagacaaaagtgggctacagtaagttgcttggcctagctttataaacccatgactaattttaaccaggcacacttcatgatcaataccgagtacggctctaatgcggaccgggg

SEQ ID NO: 26955 - DNA, 325 bp, Emericella nidulans
gtccatttgacctcgcaaagcagattggtgtccagcgtggcggagacgaacatgaagctgctattcaacggatcttgaaagctgcgaagtcagctaggaagaaggctgctattttctgtatgttgcgtcccgttctcggttttccaaaatatatattcttaccattgcaggtaccgacggcgcggacgcgcagaaccgtgctcaacagggattcgacatggtttctatcgtcactgacgtcggtgttctgggtagtgggatgttgcgggagcttaatgtagccagtggaaaggctgagggtggaaagcctcgcgacggatattaa

SEQ ID NO: 26956 - DNA, 525 bp, Emericella nidulans
atgaacacaaggcttgcggcggagaccgccgagaccgacatggactgcaccagggttgctctgtcgattgtcgagcagttggagaggagccaggagcaacggcctaggtccaccgctcctacctacacgcatggcggcttgacagcgaccgaggcgtgccagcggctgttgaccatcctcatgtgcccctgttccgatcaggctgaggtggcgctcctggtagcatccggatgcatttcgctgatggacgtgattcatagctctgccggttttgccagtgaatcgctaggccacgatgggtcggtgtcgtcttgcaacagcccgcccatttcctctgaacaagatcccctcatacggtcatggtcacaaccgcagtcaatttcgcgcagctgcagcttggccagcgacagccgaagtcaggtcggcgatctctccaagattgccaaggttattgtgcagtttacagagaggtactgccaggacgcgaagggtgcgcttgaggcgcgctgggagcataccacttgg

SEQ ID NO: 26957 - DNA, 395 bp, Emericella nidulans
atgggtcgcattctatctttgctgctgctcgcttccttcgtgtcggccttggagcaagaccccctagtcagtgaggccaccagcgccctcgcaggaaaccccgtcttccccggttggtacgcagaccctgaagcacgcatcttcaacgaccagtactggatttatcctacttactcagcagcctacgaggaacaaaccttcttcgacgcgttctcatcgccggatctcctgacctggaccaagcatccagccatccttaacttctcgggcattccatggtccaccaaccgggcagcctgggcgccatccgtggctcgtcgccgacgcccaggccccgcaaactctattaccgggtcaggtatcgctgacaccgatgctgagtatgactacttcat

SEQ ID NO: 26958 - DNA, 297 bp, Emericella nidulans
atgctaaacataattggccttggagctggatggtgggcgatctctgcttggtcgggggctcatgaggcctaccaattcaaggctgacgactggaagctcatggaagatttgatgaagctcgttctgtttgtgcagatgttgttcagtgtgtgcactatcatcatggactggctggacgttctaagggtccttcgcaggcgtagccgaaggcgaagtcaaaatcaaccgcagtggattttcaacgttagtgaaaacagaatgccaatgccacaaaagcctcctgcggctctagtctga

SEQ ID NO: 26959 - DNA, 228 bp, Emericella nidulans
atgtcagattgccgctcttctacagggcactgcgagagcaacagtgactgccagtcacccacatctgacagaacctgctcgatccttcatcgtcccctccgcccggatcttgagctggagcacatcctgcagacagcacagccgctggccatcggatccgccctaacggcgctctccagcttcgctccattgccagcgatctgctctgatgtctcagagttgttctaa

SEQ ID NO: 26960 - DNA, 843 bp, Emericella nidulans
cctaaaaacgattcaaagaccgtcacaatcgatgtggaggagttcactaagactcgtgacagtctccagtctctcacttttgagctgtcgcgcgcatacatcaaccacaccagtgcggtgcttggtcaggataacgcaaatgtagatatctcggcgatcaccaacaccctcgccgccagtcttcgggacactggcgtactcgctgcagccggcactggttccggcgccgagtctggcgagaagaagaagcgtaaccgcaccttgaccccattcttcctgtacatgcatcacaaccgggcacgcattgctgaagagctgggccccgatgcgaacgcaaaggatgtctcaaacgaaggtaccagacgctgggccgaaatgcccgactcgcaaaaggaggtctggaagaaactctatgcggacaatcttgcggcgtaccgcgagaaggttgctgcttataaggcgggtcttccttttgatcgggatgacaatgataaggcagccgaccaactacacctagacgtcgccgccgccgaagcatcggatgaggaggaggaagaagaagaggatgagcatggagaggaagaagaggaagaggaggaggagtcgcctgagcctgctaaggaacccactcccccgcctcccaagcgtcgccgtagcgagggtaagccatccaaggatgtctcctctcctgtcgttgagaagaagggccgaaacgagtcgccggagaagaagaggcgcggggcggctaagaaggacaaggaggagccgcgcaagtctcttggaggggagtcgaagcgctcgaagaagaagcgcaagagcgacgtcggtggcgatgacgagtaa

SEQ ID NO: 26961 - DNA, 489 bp, Emericella nidulans
atgtttagtcccttgactctggccatcctggcaatctgcatcgcagtgtcttcctctgtacgctctctacaacttcccggcatactaattgggaccgaatccctaactactgcctcccacagctcaccgtcggctgctacccggaagactaccagatcgtacagaatgacctcttcgacggcctctattccctcaaaaatgaccagatcagcaaccttcagcccggtacctgcgagcgcgttgtctgcaacagcaatgccgccgtttactggtgcaacgacgtacgttcccacactgttgttctcttattctggcagatcagaaaagttgaccctggtatacttatctgtgcagaatgaagatagacatgcggaggtcaaatccaagcaggtcggggatgctgcgtggaaaatcatccatgattgtggaataagcgcccatacccttatctacgccgctggcgttggtggtttacccgaccaagattag

SEQ ID NO: 26962 - DNA, 357 bp, Emericella nidulans
atggcgagtgtcgccgacattgaccgcgagccattctcaccatacagccctgaaggccaaggatggcaagggaagctgggtcgcgccatgattagcgtcggtagaaactactggcttggagaagaggaagatggaaacggggattgggtgaatatgagccatcgattccgccccagcgggcatggtagcgaacttccaggcgcccttgaacgggagcgaaggcggcgatcaggaactggaccgcctaagccttctcaagccgccgttcaagcggcctctttgcagcaaccggcgcgggatccgctcccaagcccagggctgactgtcaaggtgcaggattgggatgaggctaggtag

SEQ ID NO: 26963 - DNA, 459 bp, Emericella nidulans
atggccttcttcatgtgtatctgcctactcaactttttcactggatccctcgcctccccggtctcacctccaaccacctctccagctacccccctcttcgcttttgacctctcctgcaccgacctctccaccttcaacgacgccataatgccgctcctcaacctgactcccccaagcggaacccccgaggccatgatcccgctcgtagaccagcgtctctcagctattggctctttcgtatcaagctaccaaaccatgatgaatactttcaatatgaacaactgtgtcggtagcgaatatgcaggccttcaagttcgccagacagatccgcttgacaccctcgtgcaggccatctgtgctattctcgagggaactgatacgagcggattgccgcaacaggttatcgatttgatcgaccaggtggaggcagcactgggctgttcggcggagaccgtctaa

SEQ ID NO: 26964 - DNA, 357 bp, Emericella nidulans
atgagtgaggcggatgatggtgtctccagcgttggtaaccttagcgatgaaggcgatgctagtcttgtcggctttggtgaaggcgcgagtaccatgagcggaccgatttcacattccggcgtcaatcgggcgtcgccaagtgggcggccgacgagctccgttgggagtcccaggcagagccgtgcgaatcccccggcttcttattcaccacacctgggatctgctactccagagcctgctcaggatgcccgtatggttgacggaatgacctacgatgctgatgtggtcgacaccaccgcgcggactccgaggctcgctactccgggcttcgagagcgcttccagcgagcatcattaa

SEQ ID NO: 26965 - DNA, 1818 bp, Emericella nidulans
atgaaagaagagctgaacatgtcttctattaatccccaagaggattccaggcccaatcctgaccaggagctggtccctatgtctaaagaaccttccacgtctactaccacgagcgctaggagtgaaggggcagaagctaggatgactgaggaggagaatgacgggaagaaagagacggagaagagaacggaaagctcaccggacgtgccaaaaaactctgaagatgaagtgaaagaggaccggagagtaaatctcggggtaagatactataatttccagggctttatgaatcgaactgtgggggacgactgggattatacgattgaagtctgcatcggccggcccaaccttctggaagagattcgtgaagaactcaggaggagagaagcaatcgagaagaagacatattccggcaatcacaggcctctgatggccgaatctccggaaaaaattggtgaaaaccgcaagttgcaccgggtgcgcataagatcgccaacagtgctcagtcatctcgaacgtctaacccgcaagctgggtaacggttctattttgaatgaggaggacaacttggtgtttatgtaccccttttacatcttaggagtctatcttgacgacatgcgtgaaatcctagctgacatggagagaggagtgctggcgtctggctctatcccccccagcgagcctgagcccaaaggcctgtctccatcagtgtcgccgtcgcccattgaccagatgaagtgcttcgttcagttcgtggaaagttcgatcctacccatccataccgctctccgacagctggacgcccaaaccagtagaagattgtcttatgcggaaatctcattgctgcttgagccgggtgagctaatctacgtcgccccctcgctcatgacgacgaagatgctggatcgatcagcagtccagactgttttccgatgtttgacccgaatcccagccgatcatccgatcagcatcgacgacagcggctggctgtcctccgacataggacgtcttctggcggatgtatactgcctggaccatgatggtgaagaatacaccgtctgttggcgcaaattggagatggaatatttcgacggggagaaagacattaccgctttgcccttctatcccttgaaatttcatccaaattacgagcgattcctatcaaaccgtgctcggcagggaacagcattccgagcgctcgtggaggacgaaaacttgcaccactactacgcaggttggacgctcattactggtctctttgaacggaccgagtcagacggaaagtccacggagtccaagccggaggattcagagtatgtcgatagcgaggtctttctggacacccaggaagcacgacgacatatggacgactggtcctctctccgtgagcctttcacaacgaagggaagccttgccatcaacgacggcgcgaagttctgtctatggcatatgactgaaaagaagactgtggcagagaagctgaacaggatactcacgcgcgaagaccttgtctactggcgagcaagggagcgatatctcctcgacaacaaatgggtgatcgacgaccgggtctttataaaagaggaatggacggacgaagatctagcgctgctttccaaaagagtctacggatactcgttacgggacaggaagttcttgcgggtggatgttgacaaattccgaccacacacgcttaagaccaaagcccatttggacaagatcgggaacaaagaaggcccccgcatgataaatataactgcgggcaagtcccaattttgcagagctggaaagtcctggaccgatactaggccactttga

SEQ ID NO: 26966 - DNA, 513 bp, Emericella nidulans
  unsure (1)..(513): unsure at all n locations
tcacatcgccgtctggccaagcgggtatattcccaaggactgccaggatttgggatccgngtaggggtataatgcgagtgattttgaggtttatgaggttacatacgatgatgtacggttattcttcaaacacaactctcataaagttatatcggttgctgacatatgtgtagtgcgccgacccctggctcttctgccggcacagggatgtcgaggtagacatcgcgacggccgcagagacgttctcgaagctgcctgtgaaagtacgagactgggtatgccgtcctcattccaagccccttgctcactcctcccacaaaatataaagaaaaaaggctaacagataacaattgcaggtccgccagatcctcctcatgcccggcgcgaattcagccttcgccatcaacggcaacgtcgccttctttggcacaaccggcagcaacgtcgatgtgatgatccacgagtccgcgcacggtctggacggattcgcagcgtttggtgagaatttaagct

SEQ ID NO: 26967 - DNA, 347 bp, Emericella nidulans
attcgagacccggtacaacgagctcgggagccatgaaacggaacagccgttatttgacgcgcaactgggtgagtcaccgggtaaagaggtgcttttgtatcacttgaagggcctgcatcagacgcttgagagaaggtatgtccagtctgaaccctgtcggcgttgctgatagacggagtaggcattgatcttgctctgtatgagatgaggagcggctttgagtatcgtgcttgttcggtgctggctgagtgtttgcgtgtcattgttgatcagaccagtcggtgcttggttgtggatgagattcttgaggtgatgggcttagagggcaaattaccctcgcagccacg

SEQ ID NO: 26968 - DNA, 530 bp, Emericella nidulans
atggaaatcactgcttacttttgtggcgcgctgctgctgctactctggtatcgggtatgtgctcgacagagtgtcgacaagactcaagtacagctaaggcagaacatcattcttgtcgagccctcaatctatatcctcaaactcatccgcagacttgagtacatttggcatggccctgaaatactgcgccaggcacaggtaggtctctgctttaccccggaccagcagcgtagaggctaagcgcatgtttaggtaaaaaatacgccatatgccatacctacaccggaagcgtatcaagtgcacttctcgtctgcaacgcacatcaagcagctgatccaggcaccagatacgcatttatcactccatgctctagcaaaggatgtatgtttcaaccttacctatcagattataacacccacattacatccactaacagcagccagatgtttcagcccacacacaccatggacggactcgcagttgacgattgcatgagcgccaacggcaccattcaccagcgcgccctttaa

SEQ ID NO: 26969 - DNA, 351 bp, Emericella nidulans
atgcaattgccttacctgatccgacgttgtgacttggatgttgccttggatgttgctctgcccctgcatatcgacgacagcaaactacggaccgacctagaggcactgccatcagaggatcccgctgctcctatccaccatacttacttctgctacaaccatgcgttactattcacagagctttgggactgcttgttgggtcacggcgcccaaaaacctccggacgacgcaatgataaacaccttcgacgaacgtgtggaatcattacgctggcaagttccctcatttttgcagtggaatccagctacggtcctatcttgcacactcagattaatgccctccaacatttag

SEQ ID NO: 26970 - DNA, 295 bp, Emericella nidulans
ggagcaaaagccgcctttaagcgtgagcgtaacgctaaagacaccaagtctggcggcaagtcgcagctaaaaaccgtatgttgcatttctttttaaagccctcttattttcattgatttaccatccggtacgaagtccggtgcctaatatgagtatgtagaatgaagctgcaaaggacatccagtgcgttgtatgccgggccacatttctcaagaccaccaggggtccggcgctcactgagcatgcggcgaacaagcacaacaagacactgcaagattgtttccaggctttgtag

SEQ ID NO: 26971 - DNA, 282 bp, Emericella nidulans
atgacgtgtattgcaaggggcaggccgagaaggtgctctgccgcaccgcggaagagtcatgtcgaacaaacttccgagtcagaggatcctggaaacgaaacccgcactgcttgctataccaatggacacgaccatggcgaagaagagctcacccctgttccacaaaagaaggcaccgtgcaagagcctcgggcacacgtatgacattccggacgcccaaagcaccagctccccggaaatcgggagggggaaggacagcggtatcccacagatacaatcttag

SEQ ID NO: 26972 - DNA, 258 bp, Emericella nidulans
atgcggatgggcgatctcttcgagctcgagcgtatggccaatgaacggaacactccccgggtcggcagctttggacatgggctctggctggctccggacgggagtttgaagtttgggtatgggattgttatgcaggcctttcgtaacgcgattttggctattctgcagaccccgtctgagcctgatgctgcgccagttaccggatttgcgggcaaggacccgcaccctgcttatcggcctgtgttgcgctttggctag

SEQ ID NO: 26973 - DNA, 288 bp, Emericella nidulans
  unsure (1)..(288): unsure at all n locations
atgaccgccgccgatagcatgaagatcaccgttttcgnccnannggaccatggctccctcccgcacacaactgtcgacccggtgctccttgcagcgcatatcgtggtccgattgcaaggcgtcatctcgagagagcttgaccccgacgacgtgggcgtccttaccgtgggaagtctgcaggctgggcagacggagaacgtcatctctgataaagcagagatcgggatcgactttcgctccgtctcgctcgaaacgagagagaagatcctaagctgggtctccctatag

SEQ ID NO: 26974 - DNA, 1380 bp, Emericella nidulans
cgaatctataaaccggcatctctgatctcgcagctcggacccctcatcgccagaaaacccgtcggtctcacatcgcttgccgggacctgcatccgtggtatgccgtggacagctctgtacaacatttccgagggcaccagcgcaattcctggcaacgagctcgggatttatgcgtttggtgacatgtatagccaaggtgacctcgacctgttattttcagcatttgccagcagcactgattttggaagccacatcccaaacggcactcagccgattgtgcatagtatcaatggaggcacggctcccacgacgctggataatgccggacctgagtctacgcttgacttggcaatgtcatacccgattatctggcctcagaatcccattatctttcagacggacgatcctatttgggcggacatcaataaccccaaatttccaggcatcttcaataacttccttgacgccatcgacggctcatactgtgacccatctgaggaggagcttgaccccccatatcctaaccccgcccctggaggctacaagggccagaaacaatgcggcgtgtacaaacccaccaacgtcatttccatctcatacggtttcgcagaattcgaacttcctattcgatacaaccgccgccaatgctacgaatggatgaagctgggccttcaaggagtttctgttgtggctgcgtctggaaacaacggcgtggcgactggcgggtgtctcggcaaagacagaagcgttttcactcccggttacctcatctgcccgtacatcacgaccgttggcggtacttaccttcttcccgggggcgacccgtacaatcctctagaagtcgctgttgaccccagcaccacgccaggaaattggtcatccggtgggggattcagcaacatctacgaacgaccaatgtatcaagcatccgcggttgaagagtacttttcccgcgcgaacctaaattacccgtactatgaaagcatcaacaacgatagctttgcggcaaatgacggcatctacaaccgcataggccgtgcgtatccagacatttctgcggttgcggtgaacaatttcgtcttctggagagggggtccaattcttggtggagggacctcggcgtctgcgccgattttcgctgccatactcacccgaatcaacgaggagcgacttgcggctggaatgccgacggttgggtttgtcaatccgatgctctatgcgcatcccgaggcctttcgcgatataacagagggcaataacccgggttgcagtacggacgggtttacagcgcttgagggctgggacccggttactgggcttgggacgccaatttatcccaagctcttagaggtgtttatgagcgttaagcttggtctgtag

SEQ ID NO: 26975 - DNA, 324 bp, Emericella nidulans
atgaacgggaaacctccgagccttgttgtccaactcagggacggcaaacagggtgatgataacaatactggagaacaaaaagtacaaactacctctgatagtcagaaggcggccacaactggtttgcaacagcccgcgccagtggataacgcgccccaggattccattccggaaacaccagctagccttgacaccaagaacgcccctgccgaaacacctgctacttcagctcctctggcttcaagtggcggggccacacagggtcttggtggccccgttggcactacgatgccttcagttcaacaacctgatgggacagtctaa

SEQ ID NO: 26976 - DNA, 411 bp, Emericella nidulans
atgaagtccttgactattctgggtgctgtctcggcccttttcctgggcagggcaacggctcaaataactgttgtgcgtgcaatgccagaacattcattcatgtttgtgtgttcactgacagatttacagactattcctccttttccagatcttcctaccatgtctataccgaccttgactctcccaaccagtatatctcttccttccctcccaagcattgcgattcctacgcttcctacctcgcttcccgaatctgtttgctttgctgtcccgactattccaacatcgatttcagtgcccactcttatggctgccgcacctaccgctgggccagatagcaacaccacgcaggtgcttaatgaccagtttgagcggatgcacccgcggcaaattgcaccacttggcgcctga

SEQ ID NO: 26977 - DNA, 252 bp, Emericella nidulans
atgagctacagttcctcccgcaacattgcctttatgactattgccggtgtgattggcggcgcctacgcactttttcgattacaatctccaagcaagggagtcgtgaaggaggatgatatcgcagacgccactgaaactcctaaatacggacgttcgaagattcttggagagggtgatacggctgctgcgatgggaaatccgcctcaaggacatgggcatgttggacggtcaccgagaaagggtttggagtag

SEQ ID NO: 26978 - DNA, 663 bp, Emericella nidulans
atggcgatggcccccgtcaagttcaccaagccccccgacttgtctggccgcactccgatctatcgcctcagcaaaacggtccctccgccggctccggcgccccagccgagcgccagtccccaattcgtcaacaagggcagtcaggcacatacctcccactaccaaccgccgtaccctcctcaccctcctcccttcaatattccccataccgtatcaccggcttcgcagcccggtccgcagccgcagtccacaccacaagataacaaggaaaatgcattcgcgcacacaccgcagagcctcgattcccccgcgcaagggtcgccgcccatgaccaaacgtcgcgggaggaagctgcaggagaacgagacgctcatcttggtcaactgctgcttggaatatcagagcttgtacaatgataatccacagcggttctggtactgcgtcgcgacgagcctcaaacggcagatcaagcgcaatttctcgtcgcactcgtgtcgccaaatcgtcgaggaactggtcgtcgagcgccgcgagcgccgacgggatgttgcggcggggaaggttaaagagcaaccgctgaccgagcttgtgcttgcaacggacaagtggatctcgttcatggacacggcgtctggaggtacatcgcgtctccggcgccgctga

SEQ ID NO: 26979 - DNA, 249 bp, Emericella nidulans
atgcttactccattttggcgcgtagaccgcagtctcgtgaaagctgatgtttatcccggtagctgggtgtatacaattagcatatctgcgcaatttagtgcacgccgaggtgagctgaatgccggtacacgccagtttgtccctcagggaaataagcgggctagggaggatggcgctgataatgcaaatgtgggcggcaatgccgatgggaagaggatgcgcggtggtggtcatacaccgggatcttga

SEQ ID NO: 26980 - DNA, 430 bp, Emericella nidulans
cgacgagaagctcttcggcggctcatacgagttccagccaggcaaggaggagtttatccgcaagggcaaggctgggtatgtagtttcctacggcgacatgctctaccgttcgcttgatgccgtcgagcgtctccgcaaggaaggcctcgacgttggtctgatcaacaagcctaccctaaacgttgtcgacgaggacgcgatcaaggagtatggctcgtcaccgtttgtggtcgtcgtcgagtctctcgcgcagaaaaccagtcttgggtcacggctgggatcccacctcctggaccgcggcctgacgcctaagttccgcatgatgggtgcagtcaaggagggctgtggcggcctgttcgagcagatcaacgcgcagggtatgggtcctgacgatattgtccgtgtggttaaagaggttgctcaaaagtag

SEQ ID NO: 26981 - DNA, 330 bp, Emericella nidulans
atgaagtatctcgcgatggtctccctcctcgcctgcgctgtcagggccgccccatctgcagagggcaccgtaggccaggctatccttgacaaagctctgaccgcggaagggactccctacgcctggggcggcggctcttgcgacggtcccagcgatgaccaacccccatatgactacggcgacgtgggatacgactgttccggccttgtctgctgggcagtgtgccaggtaaccggccgtgacctcttcacggagggcctccgcgtcacgtcctccatgtactgcgccagcgaggagacacttgggtacaagtacgtctgcagcaagtaa

SEQ ID NO: 26982 - DNA, 216 bp, Emericella nidulans
atgaaactggcggcccctctcgtcgaaatgttcttatatggccacttatcgggaatcattggggggtttacaatccttggtcggcgagggacgtttgacgtcgtctggaggtgcccaaatatgcagagagcctacgaagtacgtaggccagatatttcgccccgtcccgtcccgcttgacgtaagcggttccaacattacaaagtcatttgtgtga

SEQ ID NO: 26983 - DNA, 315 bp, Emericella nidulans
atgcccaaaagtgcgaaagacgtgccaaatgcgaatgccaatgcaaactcaaacccgtttccagacgccccgaagaacaaatgtgtcggtcggctgtcggtgctggaccctggattcatgctgcccggtatgccagcctggccagggacgccgtcgcagcgccgccgcagcgccgccgcagcgtcgacgcgacctttcagagaacctcacctccaacatcgtaccagggctcatattcccgagatccgagacggtggctcccagtggaatgcgcgggtttcatcggatcccagtgaatctcatttgctgatataa

SEQ ID NO: 26984 - DNA, 290 bp, Emericella nidulans
aacgagcttctgagctccggcgtctgcttaacaagattggtgactttatcaacagcaacttgcagggagagaacactggttctctctcctctctcgaaactcgactatggtatgtcgaatatcgcacatctttaagaacgatatctaatattatgcttaggcactatgtctctgtccattactggcccaacaaagacgcgggaggagctaaacttcaagaaatgtaccacaaactgattgaagtccacaagaaatctgccgaacacactgtcgcctcaaaaggagactaa

SEQ ID NO: 26985 - DNA, 363 bp, Emericella nidulans
atgcgcgtccgcgtccgcgatatgtacacactggaacaatatgcacctgccgttgagcgcctcttcgatatcatcgagcgcgcctccaaactcgaacagaaccaagcgcgagaaaagcgacggcgtgaggtcgaggaaaacgagaaacggaaggagtttaggcgggagaacaagtttaaaacaaagcaggagcagatgagccaggagcaaagggaaatggcaaaggcggagaaggaagcccgcgtgtctgataggtcttcttctcagtctcggcctcaatctcctgatgccaaggtctccatctgggatgccccggagagtgagagtgggtggagttcggatgagtctggaaaggatgcataa

SEQ ID NO: 26986 - DNA, 324 bp, Emericella nidulans
atgaatctgaccatcacgacggggtgcgcggatagtgccagcgcacttgaatgcctacgcgcattgcccgccgcgctgaacatcatcagcactcccgtctactcaggtactggcttgggcccttggctcacccaggtggatggtgatttcctgctcgacgggccgactgagtcactcgacaagcaacatttcgtccttgtgcccatcatgtacacgaccacttcggacgatgccacggccttcagtttcgtcgattccgtgataccgatgctgactttcggaatttcatcggagctggcgggcctgacgaggcgatttcggtga

SEQ ID NO: 26987 - DNA, 213 bp, Emericella nidulans
atggggcggaccttggtccctacggtcaccaccgaagcctgtcctcatccccccctggccaacaggcaaacctccaggccggctttggtggagaaccggcttaacggcctaggccagagcctagaacccctccccttaagcttccccctctccattttgcaacctatgcgtattgttgaggaaatgggactggatccctttagtgagggttaa

SEQ ID NO: 26988 - DNA, 281 bp, Emericella nidulans
ctacgcccagcgatttgggatacactcacttaggatccctcaaactgggatctcttcatgtggttaatggatccgcatccccttgtccgagcgaccggtcacagttggagcactcagaaagcctcacttcggaaaccatccctgatgatgttgacgcaacggatctttcgggcgcggttaaggttgcagaacaggtgtcgcggtcggcctcattggacggcctagagatgtacgcgaaatattatgcaatccttgacactcccagaggtctcgataatgct

SEQ ID NO: 26989 - DNA, 240 bp, Emericella nidulans
atgctggtaaagctcaaggtcgtcggtgcgggactgtcggccagatatgcctttttcttgaggtcaagaaaaagcaaagcccatgatatgtgggtcgctaacagaccaggaagcgccatccgggaggaagtatactatgtggctgctaatgctcttgagatgccagcccaattggaagaactgaagaaatccgcgcgcaattatttgcgcgtgctcgaatctttcccccaaagatggtag

SEQ ID NO: 26990 - DNA, 300 bp, Emericella nidulans
atggccgcaatgaagctcgccatattgggaacaagctggccccatcgccgcgaggcactgactgctattgagactgccacgttaggctcctacgagtctatagctgtaccggcacgattagcccgcctccgcctggaggaggatatggaaactgtcgctccgactgtaactggcaacacgtacccggctactaccaacatatttgccctgcccgacgatattattcgggcttcagattctgacaggtgcttagtcgagcacgtggcaagcaaactctcatcgaatggcgagtacttctga

SEQ ID NO: 26991 - DNA, 207 bp, Emericella nidulans
atgttccccgagacggcaggtaagaccctcgaagatgtagagggcattttcacgattccggctgggatcaagtacattggaacgccggcttggaagacgaagaatgaacggggtcgtgccgcgatgctggagcagactggctttgatgtcgatgaggagaagagagcggaggctgttgccgtgcatgaggagtcccagccgaaatga

SEQ ID NO: 26992 - DNA, 430 bp, Emericella nidulans
atgactgtcggagaaaaaattgaacaattcttcaccggacgcccaagctcctatgtcccgggccacactttagagcggcttttgtcactccccgttcgacccgattctgagcggtttggactgaacatggcgatgcactacggacagggagcagccgcagcaataattagagcgcttatgagcgcgaatgggattcgcgggccgttctcagatttcatgttcatatctgtcaggttaatgattgatcagacgttggagaattggactggtgttggggcactgacttggtgagttgtcggatctttgcgatgaaagtgccgctgaaggtatatgctgataggcaatacaggacatggcctgtcaacgagcaggttattgatatactgcacaaggcagtctttgcgttcgtcacaagatatttcacggatag

SEQ ID NO: 26993 - DNA, 356 bp, Emericella nidulans
gacggccaccgcctcgtcgcacaactccagactgaagacggcgaatgggttgacgccgagtttgatctgaaccagatcctgggcaatgacaacggtaggtcctccctgacttgcccgtactgcaacattgcgatcactacattttaaccttgataactgattctgtctttgccacaggacgttttatatgggatgaaagcgacttcagccacagtgctgaggagatcacctttaatattgagggggaggaatccgtgcctgtgcttcgtgcttttttgaagaatgaggacggggagctggttggggcggacgttaatttggctgagcggattgggaatgctaatgggtcctttgag

SEQ ID NO: 26994 - DNA, 229 bp, Emericella nidulans
tcctcgctcctcgatactctccaaacgcttcttgcactcgaccacctctggcggtatcaccttgacgagggcttccaggaactggtctctgcggcatccctcgaaccctcgatatcccgcattgatcttgtacagcatccgctggtagtatggatcgtcttcacggtggagattatagccatcgatccatcgcagatagtcatttggatccttttcgtcgccggtagag

SEQ ID NO: 26995 - DNA, 351 bp, Emericella nidulans
atggacgcaattagaacggcgttcactggcattactaggcgacgattggtttgcagccacaggcccactcaggcgcctgtgctgcatttcccaagaagcttagtggctactgcgccatcggccgaggtgatgacattcttgctcttcccaggcaccgagatcgagccattgaccaccgtgatccggtttcaccaggtggagttcgtcaagcaagttggagggtcgggaaacggactcgcattcaaggccgtaaggtgtctggccttgattgatggagcctacccggacctgcagcagcttgacgttagttcaaatcctggggacagccttcgggctgagatccctgtctaa

SEQ ID NO: 26996 - DNA, 470 bp, Emericella nidulans
gtaatagtcaaaaatcctgcaactactacccccaagcacgcccgcaagcgtgctgccgcccttgctgcgcttgttgctggagaggaagaagaggaagatgaggaggcggaggaggaggaggataaagaggaggaagagaatgcccgccgccgcaaaggcaaagccccggccacctctgcccgcaagggggttcattttgccagtcatgacacccgtgaacatgcagatagggtcccgcgccgcgcccagtgcttacacaccatgctggccgtggcggcccgacaggcatctgccgccgctgctgcctaggaagctctcgcccagacgctgctcctggtagccgccgagtacgccgatgatgctggtttccaggggtttggtggagaggaagaggaggaaggagagggaggaggagatgaagatgagtctgagctctccttactggataaggagattctgactcttggcag

SEQ ID NO: 26997 - DNA, 438 bp, Emericella nidulans
ggtgaccacctctggatctctcgtttccttctccaccgcgtcgccgaagagttcggtgtgaagatctccttcgatcctaagcccatcaagggtgactggaacggtgccggtctgcacactaacgtctcaacgacgtcaacacgtgccgagggtggcatcaaggccattgagtcgtacatgaagaaacttgaagcccgccatgtcgagcacattgccgtctacggtgagggtaacgaggagcgtctcactggtcgtcacgagactggtaacatcgacaagttctcatacggtgttgctgaccgtggtggctccatccgaattccccggcaagtcgccaaggatggtaagggttacttcgaagaccgccgccccgcttccaacgcggacccttaccagattactggtatcattgctgaaactctctgcggtggtctgtaa

SEQ ID NO: 26998 - DNA, 586 bp, Emericella nidulans
gttgctcggcagactgctgctgggccaagtggagcatcggcaatgcgcagggacagtcgcagacactcttttacgcggctcccactagtgctatagtaagtagcttcacgcagggacccaagaacgtaagcacggtgctcacacctaacgacaccggtcctgttgtcgtgctgaatatgtacacaatgtcgcttgtctgtcttgttcgaatatgtggtaccgtccgcgacttgaaccctaagctttcctatacagaaccacctctttcgaatgggcacactgaaccagctacgacttcatcaaaagtcacaatggcatcgacagtgatggcgcctacacctggattaccagcagtcagcaatgtactcccagatatctcccttatccgtcgcgcatacctgctcaacctcggcggcaacggcttcaacgtggccgtcttcgcatcctcattcccatcaagcttatcgtggcatcgcaccaaagcgtggtcattcatgatcggtacggcctgcgatcggttgctggtgttgggtatgcggcacgatccaggtgagaagcaatccatttatccataggtggtttaaag

SEQ ID NO: 26999 - DNA, 675 bp, Emericella nidulans
atgggcgccactgccaccgatattgagaaggttccatcggccgggacaccggacgagcccaaggccggcgagactaatgtctatgttgacaccgaggcggagaagagtttcggtatgttgatcgagcggctcatgatcaatgagtcggaagggacgcgggaattgctgacccgtaccagtccgcaaggtggacttctttgtcctgcctatgctatgtttggtatattgccctgatccctgtggtagacaggcggcgggtataggctaaccgcggcagatgtacttctttgactgcatggatcgagtatgttcagcctccctctactcgcttgaataaaaaaaacaacggcacactaattttagactatagagcaacctcgccaacgccaaaacggacggcctggaagaggacatcaatctcaagggcaacgaatactcgctcctcatcctgctcttctatatcccctttggcctgtttgatctgccatggaacctgctgatcaagcggtactcggcacggattatgctctcgctcagtaggtctttcatccgcagtgggaaaccctaatggctgataggacggtacgcagtgaccgtcgtctggggtatctgcgcgttgtgtcaatgcgcagcaaataacttcggcggattactcgctattcgcattatcctagg

SEQ ID NO: 27000 - DNA, 438 bp, Emericella nidulans
atgcacgccaaataccttaccttccttgccctttcttcgatggccctgggccaggactggcttgttgactccatggatgcactggagtcgactacgtatgtcgcttacctcccttcaagaactagccgctgctaacataaaagccccagtgacctcccagtacctactggtgtctcaggcgatgtccccacgctcgacgaatggattgaatcgcaagactcaagcgacatccccgtagcgactggcatcagcggctccagctcttcctcggactccgactccgactccgactctgccagcacaaaggacatcccggacatccccgaaatgcccagctcgatcatttccgagatcatcagcgctgtgcctagcactgcttattccgaccttacgaacccgacttcgctgtccagcatataccagcgagatccagggatg

SEQ ID NO: 27001 - DNA, 607 bp, Emericella nidulans
ccgctagcatctgccgtgacgacatccaacttcccgggctggcatggcatgaatacactttcacctgccgcgttcagtccgtaccaggggagttttacacaaccccttctggacttggtgctcagtggcctcagcttcctcagctgccccaactccctcagttgccgcagctccctccgttgcctccgtttccccagcttccacaaatgccccagcttgctcaagcttctccggttgttagcagtcaggtgcctgcctctggacagcaattcgtcccttcatattttcaggacgctgtctatcaaaaatcactcgaggacgccaccaagcagtacgatgcgctttccgcgcaactctctcagatcgacaggttcactgcaatgcatgcgtgggtcattgatcccgagacgaaaaagcttctggttgagcaacgaaagagcttggtacgagaacttgataccgtgagactgtataaggagcatttgcaggtgcttttcggaaaacacctgatgaacagccctgcgaaaagtcgtcaggaacgtattcctgtcccggttacacctcccaggaaagaagcctgggagacgcctaccaagtccaaatcaag

SEQ ID NO: 27002 - DNA, 747 bp, Emericella nidulans
gctcaaagccgtcccattcgcgccatactttccccagacaccgttcctcagctcaataccatatgtgcacaacgaatacgacggcttcgtcaacggcgtcatcagcgacgtcctaatccacgtcgacgatggcgtcacctataaacaaccatacgatgcaaagatcttagctgcgaatcgttatacagtgcccgagtccaacctcatgtggggttctgacgtctctttcggtccgaacggctaccaaccggccccgaactcctcgccagaagtcaagatggagccggaaccggctcccttatatggaatccatgcagtaccgcattcgcgggctgccacgccaacgacggcgcagacgcccgcactcaagcccgagtctgagccagagacggagctagagctggagcccgaggcagtgacagaggcaacgaaaatactaccgtcaagcaaagaagaagaccaactccctgagctggcagaactgagccgagccggactccagaagatcacgggcaagaagcgaagacggctcttgcacatcatcgctgagcggaatcggcgtctacatcagaataggatgtacgatgaattgtacaagatggtgcccgggctggagaacagttcgcgctcgacgaagcgcgaggtgcttatgcgcactgtggactttttggcggagctcgtagatgggaaccgaaggctacagcagcaactgaggcatctacaagtgccgcccaatacaagttcggg

SEQ ID NO: 27003 - DNA, 366 bp, Emericella nidulans
atgccgcgggatgagggcgtcctacttgaaattcatgagctacgcgctgtttcgccttctgcgaatccgaacaccagctctgtatttagtgcacgagagccacattttgtcgtcgcggcctgcgcaactgctgtgcatgaggagaatgtcgagaaggtcttgaaatggggagaagagctccaggttgcactgaagaggacgaagagagagaatatcctgccgacgtcgtacatctctttcatatcgagggaagagatggaaagggatcaagagaggattttcggaggacatctgcccttcctgaaagatttgaagaggaggcttgatccagagaacgtgtttaaagctgcagtttctggtctatga

SEQ ID NO: 27004 - DNA, 1616 bp, Emericella nidulans
agaccgcgccacatacgacgcagcctccagcgaagcagtcacctattccgtagatgatcccgctgacgcgccattgtcactcacgtacggcccgtcgtttatcactctggcatcggagtatagtggaagcgtggtcttaggcctgaaccgccggctgaatgacatcgagaacacgatcagcgccgcgagtagggcagtcagcgagatgggcgatctgcaggctatcgagttgggaaatgagccgaattgtctgtcgtcccgtcgacggaggctagaggattagaggttctgatgatcaacagttttcgcggacgatgatcccatagcgaacggggcttcctggacggcatcggcagactatgcctcccagatctcctggcaagacgccgtgtgcggcaacctctcggtgaccgatctcatctcggctggtgtatactttgggacctcgccaatgagcatccaggcgttgtcgcaggaagagggagaggcaaatgtgtacgtcaaggaatactcctcccataattatccacagtcgcagagcacagcaaatttggctgcgctcatgagccacagtgggatcgcagcccagattgccgggttcagaggcgaggttgaggctgcgaatgctgttggcaaagcgcacgtttttggagagaccaattcgggttcgtgcatcccaagcattattatttcatttattataatttctgtggcctaatagtatattctgcatcagctacgcaaggcggtgggggcatcagtccaacatttggggcggcgctgtggatagtagactatgtgatgcagctggtcaccatgggcacggaggtacatctcacatccaccagaagctgttgtcattcacaatactaagtgactgcaggcgctgtacttccaccaaggcaccatcggcaactgccagtactgctggtggggacgatacacgactggtgctccctactacggggcgtactttgcgaccatggcactggcgcaagccgaccatatcgcgcccctggacgaccagagcacctcctatgcagcgtatgctatctacaaatacggcgctcctgtgaaagttttgctgtataactccgagtactataccagcgggacgcgtccgagccagacgtatacgttgactggattgacttcggctgcggtgactgcgaagaggttaacggcgccgtattcgacgtctcgggtggaccggggagagtctccaacggttgcagggcagacttttggtaatggggattgtgtagtagagggggacgaggtccttgagaccgctactgtgcaaggggggcaagccagtttcaccgtcagtgcttcagaggccctgttggtatatctacagccataaagaggaatgaaatgacagtattggagagagaaaatgtgcagcacacaatgtacaaaaatcggtataaagcataccgaggctacgaccccgcgatcagggatgatgaggggaagaatatataaaccagtagggtcttcgcactagcgttctgctggcactgattcttgagccaggcaagatgcagcaagttaccccccatgaacagagagtttgcacaccatccctttgggtttccgtcacagacatctaa

SEQ ID NO: 27005 - DNA, 517 bp, Emericella nidulans
atggtcgagaagccggagactgagagggttgaagaaaccaccacggtcgacgacaaggatgaggccaacagcaagggacagccgctcatgcggtcggagcttgacaatctcagtatctgggaaagtctgcggcgatacaaggtggtgaccacgattgccatggtggctgccttcagtgcgtcgctcgacggataccgtaggacacgaatcttcatatgttcaaagaaacgatgctgatgctggctggacgcagagatcaacctgaacggcgggctcgtctccaataagggtttcatccgacaaatgaccgatccggagacgtcgatcattgagggaaagtacatctcggcttggagtgggatccagtcggctggacagaccgttgggcagattgtacgctctctactctattactccttagataggcactaatacactggtgcagctgctgcagtatgcagccgatcgatacggacgcaaggtcgctctttatatcatcttcctcgcctttgtgata

SEQ ID NO: 27006 - DNA, 783 bp, Emericella nidulans
catatcctttgctcgccccgatcagcgcctcctggtcctgtagcaccgacgttagactacgatgccaccagtggcccgagcccggaaacgcacaacatcctggatcccgagctggtggccctctatccggatacccgtcccccagactattctggctctgtgcaggcacttccatcagcgcagaattctgagtcggtcacgcctgacgtcaatctcgaccacgcgagcgcccggtggctgaacctgcttgcgaccgatgccgcccaggccggtgatttcagcctgcccgcttcaactcctcgaacgcggctctcgcgtgggtcggtcagccactaccgcgacaacgccagcacggcgccgctatattctccacagctctcggaaagacaagcatggcaagccgactcggatattgctttaagcaagcacgaggcttccctctttagaaagtttgccgagcacattgccctcccagtgagttcccgtagcgctatttggagaagaaacagatactgaactagatagctcgacctctttgactgccacaaacatttctccagctatgccacccggcttgcgctccgaaatgtcgggctcatgaaagccatcctcgctctctcggcccgctactcttcactatcgccgcctactcatgatagccaggaacccactgatccaaacgaagccatccaattctactacgaaaccctgcactatgtctccaccgcgctccaatacaactcctacaagcacagcgaagagctcctcgcgacggctatcgtg

SEQ ID NO: 27007 - DNA, 548 bp, Emericella nidulans
cctactactgtcatgattgatgtcttacttcaagtccagagcctggtatcaccgtttgccacgtttgcttcatttcatctactcagtgctagggagaccgacacgattacatcaacgatcgatactgccaaggagatgctgaggtcggcaaagcaggcgctgcctgtcaagcaacgactcttcctccatctgttctccaagacacgcgtcggcacggcctgtatgccaaaagaagttgtgcgcctgcccatcgagtttatggtagggtgtatctgactgcgtgctagatcgaaagttggattgtcaatccatcaatcaaatgtagattttgctgcttccaacttcaactatactaaagtcctaacccacgcctggtgcggcgataatacgagcggccatagccggaatggtgaacacccagtgcatatgctttggggtccgaattccaagctggcagcacaatcactcactcggcagtttgcaaccggttatcatcgtcgagttaacgctagactggttgaggatcttgtcgcttctctcgttgatgt

SEQ ID NO: 27008 - DNA, 931 bp, Emericella nidulans
gtagccacgccgccctccaaagacgccatcctcgaatccctcgtcgaaaatgtccgcgcctgcaatgcgcgcctatcgcccggacgcgacaagatcgtctttggcgcgtggaactcgaggtggaattgccgctgcttctcaatcggcctggcgcgcctctcccatgtagggagccgcgcgatgatttcgagaccgtcaacgcccacttttcagcccaaatacacgctttcttgaatgcattgcatgacctcgaggacatggcagacaagccgtcctcggacgacctggacctctgccgctcagatgagtgccttcggcccgtcatatgcgtttccaaccagtccttcgaaccctacctagactgcttgcaccgcgccttccacactcgccgcctcaccgtccagaacccggacagcctgcccctcctcaaccgcgtcactcaactgcgcatcctccccgaccgggattccacctttaacgcaatcaacatgcggccagtctccttaagcacgcccctcgaactcgccacccgccttcctcaactccgcgagctggactgcccctggctgtgggagcgccttcccgttgccttcacatccaaggcactgcgcataatttcccgcgtctgggcaggtccttggcgcgatgaccgcgccgagttcgcgcgggcagtgcgtcacgccatgcccttgttgccgtcctccctcaccaaggtccgtctctggttctggaggcccagctcccattgcgacgagatggaccaagcggcgcagatgcctgaccttgttggcgcgtcgtcgtcgtccttgaccaccgagtttgaaggcatggaccctgtgtctcttggcctgcgagacctgggaagtcgcctggaggaactagacgtccgcgcgctcatcacccccgatcttttcccttccaggtggcgacg

SEQ ID NO: 27009 - DNA, 387 bp, Emericella nidulans
cgtcgtcagcgatgatgtatctgaagggtcccgagagcccatccaccggcttaaattggttaacactgtacaactactaccaagtgaggatagtgaacctttggatgtctgagtaagttctggaaatttgtatcctaagctctgctgtgcaatccttctgattacaatagaatcatccacgttattgggctagacaaagagcggcagttgagacatgatacgatactcggtgacacggcaacatccagaagaagggaatttgtttttcaatgcgatatctcaagctttcttcttggggacttagtcctggacacggtccagactcaggctgtgcagttgctggatgacattgtctccctgagtgacagcaatgacagcagcaacaca

SEQ ID NO: 27010 - DNA, 584 bp, Emericella nidulans
atggtaatgctcacactcgccgcacaagcaggcctaggcgtccccgggccagtcttaaacatgaccgaaaaccgttatgcgctcctgttcgggtggctcaaccaattcttcgctctaattgccattgggctcggaaaacttaccattgttgccttcctccagcagatccagggttatcatacgctctttcgcacgatatttctgtggacgctagcagggagcaatttcatcgtcaattgtattgcggccgctctggctattgtgcagtgtgatcctgttcagaggctctgggctgaatctcttcctggagagtgtccgggaagggaacgcatccagattttcggatatgtgcagggaggtaagtataacctccagtcgtgctctgccaaacggctagtcctgctactgcgcaatggtaactgtcagaactaagaccaggaactaaccagtacttcatatatagcctggtctgccctctgcgactttgcgttggccctcttcccggttgttctcttcgctagaatccgtgcaatttcgatcccaactcgtatcggattgtgcctcctgatgggtagcggggtagt

SEQ ID NO: 27011 - DNA, 945 bp, Emericella nidulans
tggtgaaaagactccggctaaatccccttacttttgggcggtaggttccacttccctgttcaggcgaccgcaacccctaaaactttgccaagggtttcaaacagttttaggtcagtgcaactggaagccatccaggcagagcttttcattggatatgcgctagaggcacaggggcacttgggttcggctgctactctttacaacgacatctggcataagtggacagccattgccggcaaaaccaatggaattgccctgatgacacaaacagcccagggttccgcctacagaaagcaggggcagtttgatgaggcgaaagatttgcttgaacgttcctggacggagaggaagctcttgtttacaattgggaataatgtaactgtggattcgggcattcagctggccatcctatggcgggacttgggagacaatgcaagcgccattgataccattggcgaggtagtaacgtcgggcatatttccaggtgactttgaacgtgcttgtcagcttgatcatcttcgtgctctgatagatttcgacagcggccgctacttggatggtaaatgccgcttgctgcgtcgcttgggccaagcaggtaacggcgaccagcatcacaataaccgagagcttttgtggatccgtatcaccctcgctgatgttatgcggagtcatggagaaggtgacgatactctgatattgttctctgacctagtcacgccgttgtcgttgccagatgagctagacgatgagcccgaacctccccagcagctggaacttgcagagaaggccctccgatacttaaagtcatacaaccaggcagcagcaacgaaactcctccaaagtcatgggctcaaatggaggcgacccagagacttctggattcttcaagggggaccgattgcggataccgcacggatggcgccccctcggaatgcgccaggttag

SEQ ID NO: 27012 - DNA, 519 bp, Emericella nidulans
atgcaaaagacagagcaggtagaaggccatggcatatgggcaggcgtcaacggcgctgcgatgcaggctgttggggctgaggttggcgtagagcattctgttgaaaagattgccaattaccacaccattgtcacaggggaccgaccacaagactggggcgattactatgaagctcgcttcacgctgtccgagaacaaatcccaaaaagacggtattccatctacgcttacggtgtgcattcttctcgaaagagacgataaccaggactttgtctgtgtcccgaccatctctgtcacgcccaacttcaagactgtgatggctaccttgttttcgacaagagatccggacgaccctatttattttaatgtagaagaaccacctgtcgacctcctagaaggcaaattaaagatagacagggataacctggcggccaccaacttggacgaagcatgggactgtaccatgtacaacgagtatcgcggggcaataaaactatccaagcccagtgaaaccaagtga

SEQ ID NO: 27013 - DNA, 381 bp, Emericella nidulans
atgccgcccgcttttgctgagcgagctccgcagccttcttcgcttcagggagagcaagggaatgacgtcgctggtgaccaccgcccgaagggcccccacggccacggccatgagccccgttctcgttcctttggaagttaccctgttgctgttggctgtagtccgaataacccgaagctccagaagatggagctgggggaggaccgcccattccgaagcctgggagagccgattgattacggcgatgcgaatgctgattcgaagtgttccccggaacgcctagctgctgctgctggccaacctgaggaaactgaaaggcaccgagttgttgtggagaaacgccgccgatgggcgcaccgccaccttgtagagacggcgtga

SEQ ID NO: 27014 - DNA, 381 bp, Emericella nidulans
atggaaaccctgcgcctcagaagccccgctatcacacgggccgtccaatggaattgcgggaagatccccggcttgctttgcgataggctcttgacaagtggctcagtcgccaatgtggcgcttagactgatcccggcagaagtcctcaccgtcacctccgcccatctcgctgtgttccggaatacacctagcctgcagccactgtgggtgtttggtaatctgcacccttgtggacaaccagggatttttgcatccgtgcttgcatcgtgctcgcttcgccgaccgtcaaccatgtttcaagcctcagtattcgcctccgtggggtctgtcagcgttgcaatgctttctgatgccatggcgtcgggcgtctggcttgtttga

SEQ ID NO: 27015 - DNA, 342 bp, Emericella nidulans
atgaaggtcggcccaggagttattgcctcaactgccgtctatgatcagggttttttcccagatgtgtttccggagcctgaaaaatggaatcccgaacggtggctccaggctactgaccggatgaagctcaattggattccatttggtcacggatgccggtcttgccctggatcaaatcttgctctcactgagctgaagtacatccttggaacactcttcagacgtttccgggttcagttgccggaggactaccccaacgaacccctggaactggcggatgtttttgcagccggctcgaagacggggcactgttggcttgaatttgaggagatgccgaaatga

SEQ ID NO: 27016 - DNA, 444 bp, Emericella nidulans
atgcctcattattccgagtaccctaccatcaccccctcaacctccaaacttgactacatcgaggctctgaagacggctgtcggtacagaaggcttgagaactcttcaacctgatgaagctaagcctccggggttcgacgatctgcaacaatctctagcaagctctactgcgagcactcccgcaaggtatacctgttcaacggacaaacctcttccggttacccttcgaaatatcagcaatagcgctgcccttcatgtcggctttggaggagtcctgccacgctgggcaagagacccccctcagacagtcaactttgcggcatttgcgaacggctacccgcgccctgtgctcgctctcgtcggcgcaaacgcgctacgagatgccgctgacgagtggaacaagctcgatctaggagtcaagtttaagtgggtgaggaaagattga

SEQ ID NO: 27017 - DNA, 243 bp, Emericella nidulans
tttgggagcccaagccagtcagagcgtcccactagcgacgataatgtgcgtggtggctccaaccgccgctctccgcgctgtttggcgcgcccgtttggccctcatggctcgtggaagattgccatcatggctgttacgcgcagcacgaccagacactttcccttcagatggtctcgaggaaggcacaacacccttttggttctcgaggagctaaaagtgttcgaatctgcacggagtttattg

SEQ ID NO: 27018 - DNA, 409 bp, Emericella nidulans
atggctccttctatcgaagtcgcctcgccaacccctgcgtctgccccggttgaggcgaaaggcgagtctcagaaagccactgcatcgggctacatccgtgaaccactaaagtacagcggctcactcgacgagtataaaagtttcgacgtcacgcccattatcggacgcgaattttctgatctgcagctgactgatatcctccacgatgaccaaaagctccgcgacctggccatcaccggtaggctgcgctgttgcctccagatctatagagcgcacagaacttacaaagcctgtcgcagtttctcgccgcggcgtcgtcttcttccgcaaccagagtatcaactctgacgagcaaaaggttctgggccagaaacttggtgagttgacggggaagcctgccacgtccaag

SEQ ID NO: 27019 - DNA, 969 bp, Emericella nidulans
agacccctagcacacacctctctcgtcgccttacctctactcactgccgccttacctgcatccccggcctcctccgaattcactcctctcccgcttgtgatctggcacgggcttggcgacgactacacccgctcaggccttagacaagttgcatcgctcgcagaatcaaccaacccaggaacatatgtacatataatccatattggggactccgcatctagtgatcgtcaagccacatttttagggaacgtcacagagcaactatccaccgtctgtgcccagcttgccgccgaaccaattctctccactgcgcccgcaatcaatgctttaggcttctcacagggcggacagtttctacgcgcatacgtcgagcgatgcaataaccctccagtccgcaacctcgtcacctttggcagccagcataacgggatttttgagttccaggcgtgcagctggggcgactttgtctgccggggagccgaggcccttctgcgtgtcggacggtggtcgaatcttgtgcaatcgcgcttcgtcccggcgcagtacttccgagatctcgcggagctaggcgagtacttggagaatagcaacttcctggcggatgtgaataacgagcgggtgctgaagaatgcgacttacaagaagaacttgagcaccttgaatcgctttgccatgttcatgtttgaggatgatactattgtgcatccaaaggagagctcctggtttgccgaggtgaacacgactaccggggaagtgacgcccttgcgggagagggacatctacaaggaggattggctggggctgagagtgttggacgagaagggagcattggatttcaagacgctgtcgggggaacatatgcagttggctgaggaggacttggttgaggtgtttgagaagtattttgggcccgtggaggtcgatcttccgcctgcgcagtttcacctagtgaaccaggaggggtactag

SEQ ID NO: 27020 - DNA, 548 bp, Emericella nidulans
gaaatatctggcaccggccacttgctcggcgaccatctgttgcctggcagcgaatacagacagccggaacaatctcacttatacggcaaccatttgcttccaggacagcgcgtgacaccgactactatttacaagcagactgtccctgaaactaccgagttcgccttggctagtgggtgcccaagaatctgtttgccgatactgttactaatctgcttgcagaagcggctatatctaagccagctcccgctgttctctccttttctccgccaaacaaacaaggtcaaaccgctactaaatcattgcccgctaacttcaccatccctctgccctctgaaccgatcaggattgtggatccgaacatcttggtatctagcatagcaaagtcttcaagcggtgcttcagcggctctaggtgcaccgtctagcacaaccctaacgactgcacaaaagacaccctcgatgatgaagtctatctacgcaccgcagctgaaggaagccccaccctcgatcatggatgtgaagaagggatcgccggcctcgcaatag

SEQ ID NO: 27021 - DNA, 321 bp, Emericella nidulans
atgttcgacctcctcgtcgtaggcgccggcctgagcggcctgcaggccgccctctccgcgcaacaagccgggctcaccgtcgcagtcgttgaagctcgcgaccgcgtcgggggcaagatctggagtgtcccgctggcttcggggcgtgggtatgctgacctgggcggcgcctgggtgaacacgacactgcagaagcgagtcggcgcgtatgtcaagcagtttgaactgaagactgtcgtccagcgactggaaggcaaggccatcatgcaggacggtccgcagagtcgattcgagtttccctttggggtgacgccgagcgag

SEQ ID NO: 27022 - DNA, 396 bp, Emericella nidulans
tttaatgtccacctgccttggccgccccatggccaccgatgaagccgactgttgctgcgagcttccctttgatatctccaacgaagaccttgagcacggcatcccaccccggccagcagaactcaagaatcctagcgacttaccattaccatcctcacccatgaccggcttctttgcattcgcgcgtctctgccggattgctgctcgtattcacagattctatagtactaaccgtatctgaggtcgtgatacaacattgattacaggcggagactggaacgcccttctgccaaccctcaacggcttcgtccgcgaattagacgaatggttgcaggagttaccaaacgaaatccggttcagcgcgaacctcacgcagagcgggccgaatctaacgat

SEQ ID NO: 27023 - DNA, 896 bp, Emericella nidulans
gttattcaacacgcataccaaagaacttctcgccgaaaattacatttccgaattgctcgaatgcttaacaaatcttgcgtggactatgtgtccctatgacgagactgaaaactgcgaaatcactttctgcccgtggttcctcgagtacggcatgaagagaaaatacaagacgttcagctcgtggtggaaagacaaatccgctgtaacttgggccaagcttgctaccttactcgataaatggattacaaatcgctattatacgcccattgatcttgtttctttgtttgacaaagtaattcttcatgaggtgagtaaattgtcgataaccttcttttccccgggaaaacgtgtcggtgtgccggcagattgtatctgccattactaatattgctcctcgaaccaatcagttgatgcatacacgcggcgcagcaggaccagataagttcatacctgtagatgtaggtggtcgagatggatatggtaggtgttgggttctgggactccagcgggaactccgctgtgaagttgcctatatacttctactaactctttaataggctggaaaaacgcaaagagaatcgcgaagatggtaacagacctcagcactgacccagaaacattgggtccggagaaaaatgcaggtatggagcctcaaacatggtcattccttcccaggtgccctagatgaccctcaagatacatgaatgctggctgacatgggccatacgtacaattaaacagacaccctggctcttttcggatctgcagcattgatgatccaaaagggaatcgagatctatgataacgggtcatttgtagaacctaaggagatgaatgagccgcggtttgatgtttggttcgacgagcttctagaggagccagaatttggattctga

SEQ ID NO: 27024 - DNA, 268 bp, Emericella nidulans
ccgggacgtcgcatttgtgtcaatgtctcgggtcataggtaagttgaagagtaggatcacgcatgtttcagaggacgcagtccgttctgtggcaaaacaaaagttcaatgtctccagatggtccacttacaacaaagctctgatctacggtggctgcctcactctcagcctggatgatggggggattcaagcctggtatcaggcaggaacacttggtaaccagccagactacagcgccccccccatgcaggaactaaagatcaagatg

SEQ ID NO: 27025 - DNA, 656 bp, Emericella nidulans
tactgtctctgtcctcagcaaggtcccctcctcagtcctgaccgcaaacatgaagttcttccaatatttcaccgtcgcactactgccggcgactatattcgctatcccggccgcaaagcccaagcccaaggccgtcgccacggcggcagccattaccgcggaagactttcatgctctcgttaagcggcagtcgaacctgaccgacctcattggagacttgaccaattccttcggcgccattaaggacttgctgtcgaccgagagcttgaacaacatcaacctgattttgaccaaggctgccgagttactttcggacccaaccaccaagcagatcaagagcctcgtcaacacagcctcggacctccttggcagcgatgctatcaagaacctgctcgaccagatccccaccctgctcgatagcgtcggcggtctcctgaacaaagagactctcgacaagatcacaaatctgctgaataacgccgcccttctcctgaccaaggagttcgcagagaataccagaaacctcataaatgatattggtatttttgagcccttccacctccaagagatatgaccagcgctaacagtaactagctcctctggtgtccgcagtggcccaggttatatcagctcttctgggtgcccttctcgggtaa

SEQ ID NO: 27026 - DNA, 887 bp, Emericella nidulans
ggagcctctctttaacaagaatggcaggttcacgtatgtggacagcgtgcagacggtcagcgtcaatggtttcggtgctagtcttgagaggtgccacttagttaaaatattctaatcaattctggatactcgctaactatacagcacagcaaccattttacccgccgggcaacaacgccgtaccgttactgccgtggaaaatgcaaacagcccaagcagcctgacatcccacggttggcaaagcgtcaaccaaagccaaaaggccccatacctacccgggaatctgcaaaaatcaagccaaagttatccaagcgtcagtttgtctacccggctgacaatgaggcaatggaagagtacctgatcgaccgcgtcgacaactatgtaaccaacaatgcactcaccgtgtatgactacggccttaaccccggaaactcagcgcaattcgaggtgttgggggatgagcccgtagagattgtcctggatggtctgtgcgggtgcacggctcttctggttgcgtcgagaagggctgtatactttgcccatttcttgtacgtggaccttcttattatcggtgccctaaccccgacgatcagctaacatacgcagcgaaaacatctccttcctcgactctgactacgccaacaacgcggcagcccgtgagcgatttgaggacattgtaatcaggttcctggataccggagatgacctgatgggcgaagtgtacgacgatgacggcgacctgatacttcgtgagtacgtcgcactcaccgacaacttgcacttcttcactcccgacacaaacccatcaatcatcatcgtttcgcctgtagacgaaaatgaagacgcagtggagcaaggggtagaagtcaatggcatcgtcgaagacg

SEQ ID NO: 27027 - DNA, 229 bp, Emericella nidulans
atgcctcctcgatcgactcgggccgctcccgcaacagcagctgcgccagctccagaacaggcacccaaaaggcgcgcttccgcaagagttgctggagcctcagctgcagcgctaaagaaacaaaagtacgactctaccgaccctaaaggatctcctaaatcgaccgccaagacaagcaaatattttaagacagacgataccgaaaagtcaaagcgcaaggtcaaaaagc

SEQ ID NO: 27028 - DNA, 381 bp, Emericella nidulans
atgttggatatgtgtggttctattgtcgcgagcagccactccctcctacagctcccgatcaggataaccagaactcggtgcggatattgtctcggcttctgcgccggcatcagcgcggtcatctgcaaacccactgacaatacgcttgacctggttcacaatggcctccatctgcacccctggtcgccccagtcagcacgacggcatacggaacgcggaagaattcaacataccacccttctgatcggcatcgtctccatacatcccgatccagtcccagcaggaaagggtattcgcttccaaatcgccgccccagatggtgtgcgacgatttatcgacggccgtctgcgggtagaggacgatgatgtcgttcgtatctaa

SEQ ID NO: 27029 - DNA, 339 bp, Emericella nidulans
atggagaccttccgccctgcctttgctgaccggcctcgcccgctcctttcctacggcctcccatttcctgaagccgtctcccgccatgttgtcgacactttcaacgccaagcgcgtctatgtcatttgctccggatcgctggccaagacaaccgactcgctcgacaggcttgcccaggcgcttgggagagtcgatgtcgcgattgttggccgacggattggcatgaagagccatacgctttggtctgaagtccttgagatcacggaagacgcacgagtctgttcggcagatctcatcctcacagttggcggtgggtcgttacggacggtgcgaaagtga

SEQ ID NO: 27030 - DNA, 264 bp, Emericella nidulans
atggacacgcaggtcaaacttaacggacaacggattgaattggaggagattgaacaacaatgcacattcatttcaccagcaaacacacaagtagctgttgatatcgtggtaccggagacaaaaaccgttgcaaaagctttggctgctttcattaccattgctggacacgaagcacaaagtgcaacgccgggactgggtgtctcccccagagaacaatcggacagcttcacaactctttgggtcaagttctgccacaagtcatga

SEQ ID NO: 27031 - DNA, 751 bp, Emericella nidulans
atggcgcatacgcttaatgaggattactttactatacattctgcgttgaagcagaagagaggtactagttcggagagggcatcgaggggtacgtccggtaacataggaaagctttttacggatacgcaggagtacgtggaggagattagggacatccctacattaatgtacgcgatcagagtcgcaatcgtggatcgggaaaagctcaatgctgtgagaaagtttgttgacgaaggagtagaagagctctactatctagagggaaaagtaagtgccctccccaccatatgtaccactacactaacatcttccctagatccctgagataatgacccgattcgtctacagaacctctcgctggcagtttctcacgtatctgaacgaaacaatgcaatccctagatcaacaacaaaaagagctcgaaacaacgggccaaacacagccagatttagaaagcaatatccaaaatctccggcgcaaacaagaatacctctcccgtgccatctccacagctgagcgccatcttatcgggcccacggtgcttcgagtgcaagagctggagcctactgagaaccagaaacatgcatcaacttcagccgctgagctgctggatctcacagcgggaaataggaggaatagccttatatcgagagtttcaagcaggtttacgttcaagccgatggacaacgggggtcgtattaagggaatccccaaggaggcagagattgggcatgattttcatatctattga

SEQ ID NO: 27032 - DNA, 493 bp, Emericella nidulans
atctcatgggtctccgccgatatggcggccacaggccttgaagttcccgatcgtgcggagggcaaacaaggtatgcggcttttgtgcctaggcggtcgttaacatgtaccacaatcagtgcttccccggacccagacggcgcagcaggtttgggtttcttttctttcttctctttctgtgcgcggttagggtcgcgatcccggtttcgatctcggtcgcggtctcggtcgcggtatcggtcgcggtatcggtcgcgttctcgatagtcgcctctgtatctatcatggccttgatcacgatcccgctcgcgatcctggtctcggtcatacggccgacgaggagagcgatttcggtacccacgatctagtcgtacgtcgccttcattctggctatccttgtttgaacgcttgtctttccagcgaaagcccccgtgagcttttgggtggcgagggggcgaacgcgagcgtgagcggcggcgctcaacgcggccagg

SEQ ID NO: 27033 - DNA, 354 bp, Emericella nidulans
atgcttatccaaaccgttgccctctacctcgcgcgcttcatagcctccttggccgtgataaccggtccattctggttcgtcaaccataatttgggtattgtagtcctttcttctgcttgctgtgattcattgactggccgacctgtactgacatcaacgtgaacagccttccagattttcggcctcccaaaaaccatcgccagtcagcagatggcagcattcggtcccgccatcggcggccgcaacatgtcccttggcaccctgataatcctcgcgagctactacctgacataccagcagaccggcctagcgctggcacttatcgccaccggatccggctggtcggattcggag

SEQ ID NO: 27034 - DNA, 445 bp, Emericella nidulans
atgtatctggcggggctgtatcatcgggcgggaaaaggtgaaatcaacgaactggtgaacctgcctgatgtcgtggggatggagattgccataaatggtgaggttttctcgttatcccacgaagcctggcagcgtgacttggactttgccagtggcgaattacgccgcaatgttgtctggcgtaccagcaacggctcaggttacaccatcgccagccgtcgctttgtttcggcagaccaactgccgctcattgcgctggaaatcactattacgccactggacgccgacgcgtcagtgctgatttcaacaggcattgacgccacgcaaaccaatcacggtcgccaacatctcgacgaaacccaggtgcgggtgtttggtcagcatctgatgcaggggagctacaccacccaggatggacgcagtgatgtggccatcagctgttgct

SEQ ID NO: 27035 - DNA, 875 bp, Emericella nidulans
atgacggattacggccccccctacggatatgccgttcgccgaaacggtacctgcgataccgcagcgaacgaagtcaaatgcacaaatccctgggaagactggctcaactgctgtcccgaagggacagtctgcggcgatggcgccgtctgctgtccaacagactccgggtgcgctgcgcccatcgaggctaaccctcactgcgcgaacaatgccacctgggatctgtaccagctcgacgggtacctttgctgcgatagcgacacgaatggcttctcgttctcggggcttgtctataatggcagtcagacgaccggctttggctgtgcggatgggtatcctactgggagggataccgaggtgcttgtaccggtggcatacggtgtgttcagtgtgcccggctccgtggtgtgttgagtggtagtcgggctaatatgtggtttcgaaacataggaaatgaaacagacaccgattcctcatcgtcctccatgccctcaccaacaaccacaccctcgacaagcccacggcccgactcccccactgcatcagagaccaacctaacatccgactcctcttcctcgtccacaaacgcaggcgcaattgccggcggtgtcgtcggaggtgttgccggattagccctaattgtcgcgcttatctggtcccttctgcgtcgcaacgcaggcagcagctgccatgggcgcacctatctctggtgcaggtggattaacggagcacttcggtgcgaccctgcaaagggtcagtacgctgtagctcctgcggagctcggggataatgcggtccgcgcagagttgactgggtctcagaaccagcaagatggaattccgcatgagttgccgggggccatgccatcgagatag

SEQ ID NO: 27036 - DNA, 249 bp, Emericella nidulans
atggctgggacacaggacacgtactttcccggcgctgtccctgtcccggagggtgagacatatgatcccgacttctctcatccgtggctatataccgagagcagggcgatcgtgattgcgggtctgattttcagtacgctctctctgatgctgcgagtgtacaccaaagctgcactgctgcgcaagttcggatgggacgatagtgagctgcccggcgcccgtgtttctttcctcttctctacttgctaa

SEQ ID NO: 27037 - DNA, 244 bp, Emericella nidulans
atgctggggagctatccgctcaatgagtcggtcgccattgcccgggcgcgtgacaaattgcgttccatgcaactgctggcgcgtcagggcatcgacctgcctgtcacgggcattgcgcattcgccggatgataccagcgatttaatcgacatggtcggtggtgcgccgctggtggtcaagttggttgcaggcacgcagggaattggcgtcgtgctggcggagacgcgtcaggcggcggagaagc

SEQ ID NO: 27038 - DNA, 314 bp, Emericella nidulans
tttcctgacggccctgccgtcaagattgctgtcgatatgggattatttgactttgtttgcggcagtgagaaggacgagtttacggccgctgagatagcagagcacactggagctgaccctgttcttgtgggtatgaatttgtttttttcttccagtacaaatagtggctgatagtctgctacagaacgcctaatgcgccctttgatcctggctcgtctcttcagccctacctcaaacaatacttacaaggcgcaccaaagtgcccacgacctagcgcccggtgcatatgtgagggacatgctcattttcactca

SEQ ID NO: 27039 - DNA, 606 bp, Emericella nidulans
atggacggcatgaatcaggcctctggacctgtgataacgctcctcattagcgccctctacggcgtcacagaactgaccgcggccaagctcgtcaatgtggccgtcattacagccagcgtcgggctgactgtcgtcagcgagatccagttctcctgggttggtgtagcggtgcagcttgttagtttggtttgtgatgctctcaggctggtgcttatgcaggttctcacttccacctcttcctctttgtcctcgcctacattggagacgcataatgcagaaacgggcgaagagcccggtccactcggcaccgatacactgcatgaaacgagctccaaagacgaggaagaggcatcgacaagcgaaaacacagcccggggacagagccagagcctgagactcaccaatatggatcccctcctgagcctttactacacagcccccatttgcgccgtgatgaacggcatcttggcgtggaggacggaaatcctcccactcctgctggaccaaattgaccccaactcgtcgtctgcctcagaggcagcacccgctggaatgctgggcattatcctgtccacaggccttaggccccacatcctcaacgcagtg

SEQ ID NO: 27040 - DNA, 228 bp, Emericella nidulans
gcattctacctcgcccggccagagcccaacttcgaccagcatgcaggaggacaactcgctgccggcgtgcgagcccagacggcttgcttcaactacgtctgcactcgtccaaccctcttcctcaaaccagggttcgtccggcaagcagccggagagtgctaagctagctactggggacaatcgtaagcttgactctgcctcaaacgagcttttcaaaagtgccgaatg

SEQ ID NO: 27041 - DNA, 239 bp, Emericella nidulans
attgcattgacatttgcgcctgcttcaacaagaagccgaacaacagctttatggcctggcgcagcagcagcttgcagtgcagttccaagtttgggaatagcaagatccgtccgtgcactagctctaaggagttcgacagctcccacctccccttcggcagcggcacttacgaggggatatccactgggttcattataaatgaacgaatccgggtctgcaccaagttcgaggagaagtga

SEQ ID NO: 27042 - DNA, 450 bp, Emericella nidulans
gcgcggcgtggcagcggccaaccggggcgagatgtcctcgcttcgtatttcccctgtcagcgaattcgagagcattcgccttggccctttggctggaatagcgtttcggcctagcgatagtgtccgatctcgtcacagagtttaccgtgtgtatcctagtacgggtacgcgcctgccgatattagtcggaccagccgtgccggaaccgattttgctatgtgttctttctccgtccaggatatgcccgtgtagaagtattcgtccgataaggaagcagatgaccacgccaccgggcaccagcacgcgagcatggtcgagtttgaaatcgacgtcttgggtggccgtcagcagcaaccgccaagtgagctgagtgtgatccgacttgagctgcaagtaatcggtggatttcaatcttctagattatccatgagctggatgacaatgagctgg

SEQ ID NO: 27043 - DNA, 385 bp, Emericella nidulans
cttgaaaggccgcgaggatgccgatgtgggtatggactcggatgacagcgaagaagatgaggatggggagggtttcgacgacgggttctccgacgaagacgaggatatttcgggcgaggatgacagcgaagacgatgaagatgctaaagaagaagaagaagaagaagaagaagaagaagaagaagaagaagatgacgagtctgaagatgaagaagaaaagaccgcgaagcccaaacgccgcgtccagtttgcgaacgccaaggtcgcagacacatcagacgaccgcgcccaacttcgtcaactattggcgacagaccaaaaaactatcgcagcaaccatctctcaagctgcaaagagccgacgcaacaaaaggtcgtgccgttaa

SEQ ID NO: 27044 - DNA, 449 bp, Emericella nidulans
atggaagtcttcgtacacaatcttcccggaaattttaccaaggattcgttgaaacatcagcttgagccgttcatgcggtctctggccatcactgactacgactgcgaaaaaccgaggaagaagcgttttggccatatcctattcctgaatcaatccgatggcaagagatttctggctcatcatggagaagaacggcgagccgggaggcggcgtcccttatccaagctgaacttactcggatctcaggtactctgcaaaccgagccaccgcaaaccggacgaattcgaccttcgagccctggaaaacgaggtgcaggagcgaaccaacccttcccgcataatcgaagaggaagggggctcagtttcgtttatattgtcaacggctagctgtgggtacactgtgtttgtggacaatgagttctcctacgtgccagaggtggaactccaaca

SEQ ID NO: 27045 - DNA, 348 bp, Emericella nidulans
atggctgccgttctaccactgagagtcattcaccgcaaagttaagcagttcactgaaggtaacgctgagccgcgcagagtgaccaaattcgccgtcaaggaccctcgcgaactcgccgtgcagaggttcgacatcgtgtcttatcgatggggcgaaagaacagagccatggagctgcgctgagccaagcgagaactggggcgggcttcctggggttacatggaggattaaggtttcaaaggcaaagatgaaggagctgctgcggctgatggaggaggcagataaaaagttcttatgggccgactgcgtgtgtattgaccaggagaacgaagcggagaagtcggccgag

SEQ ID NO: 27046 - DNA, 212 bp, Emericella nidulans
atggtcgttggtgaacatggacatgcgtatcgcttcgtgcgagagaagtcggctttaaatacggccgtcatgccgggtgccgttgatgtggacgatccagccatgtggaccctctcttggcggttcatcatctcggacaagtccgtctccggtgccgggcctcagaagggagagtcaggcgtcccagctctggggcatagagctcgccctat

SEQ ID NO: 27047 - DNA, 466 bp, Emericella nidulans
atgcccctcttccgccgcacctccatgtcaagctcctcccactcgagcatcgacgacccaaacacacatacccacacgcaccgcaaatcaggcaggctctttggtcaccgcggctcacattctagcgggcatagctcctccagcgccggcgtcaggaccggctctacgagacgcggatacggtacgagcaactacggccatagcagtcacggcagccgcggccacggcctcttccgaaacaagcacactgaagatccgtccattatcgctgccaaggaacgcgttatgcacgctgaggaggcagagagagctgcggaccaagcgctccgtgcaagccggttggcagtccaggaggcgaggactaacgtgagagagttggaacgggatgcgaaggaggaggcgcgactcgccaagttcaagcaaaaggaagccaggaatatctcgaagagagcaaaaccgcttggcc

SEQ ID NO: 27048 - DNA, 694 bp, Emericella nidulans
atggtcgtccgccgaaaggacgagtacaaacaggaccagatcgtccagcgcctgcacgaacccattcctctgcacgagggccgtctcccgacgtcagggttccagcttgcggttgtgccgtgttcgcagcaggcgataccacaactagggagtgcgacgctaggcgcgatcaacgaggcgctgggcttgccgaatcaccaccatcattatagctctgtgcggtctggtgcgatcgggctgtttcagatgcctgacgagggctggcgtacgtccattcgaattggttttacctaaactatgtgctgatggaaagacagtattcgcccggccccgtgctcctgacttctcctccatcacaacgatgctccgctatacaccagcaacgaacattacccgcggggtcttctacttcgatcctctcttcccgcagctctacaacattatcggcgagttcgagatgtgcccgcatccgctcctcctcccgcttttagcgtgcgaactcacactggacgtgaacgtcaaccatctggagcggtatcagacgtcgctggaacagatggagggggcgacagggtatggcgtgctcaacgagaagcaagataacttccttgaccacaggatgctcgtgaagcagctgagtaaagcgaggagcggggtacacactctcccttgcaacgctgcactcgacgcggtg

SEQ ID NO: 27049 - DNA, 291 bp, Emericella nidulans
atgggcgattcacttgtggcgtcggacatctgggcactggtctggccactccatgtatgctcgcctattgttgcaaggggtcaaaatgctgggagtgggtgccatatctggcttgggcaacaatgtcgttcgacgcttctaccccatgtcgacgggggttaccagcagattttgcaggtctaccaaggctttggtgtacgacagccattgcccgccgttgcaaaacctggagaagagtctgcggatggttcaataagtgatggcgcgcagggcgagcaagttaaggcttaa

SEQ ID NO: 27050 - DNA, 322 bp, Emericella nidulans
attgccaggcacaattgccagtgcaccggtgtaccagcctacttcagcaaagcagcctctagcgggcggtagtctgcgattcgattggctacaatacagtgtaggatccgaaaatagtgtcatagtcttggaaatagctactttgagtacattcgaacacttcctataattcgagttttccggtctcgtctggacctagtgcaagtgttcgtaactgtaattttaagaatattcagggcagggatacttgaaaaaccaggttctcgacagttcatcccagaacccctgcaagtcaaggagcaagaaggcagcctgcgagtga

SEQ ID NO: 27051 - DNA, 440 bp, Emericella nidulans
tagttgatgcgctcggagggccagtggagttccagccccgggggtcgttcgagccagtaactgattaccagcacaacttcaactttgacgttccccctgggtgagcaccccatggccatctcaatatttgaggaagaagagaaaccaactaaccctgcaggacatggtcggacgacacatccatgactttgtgtctagccaagtccctgattgattctggtggtgttttcgactcccaagcagcgatccgaaattatataaactggcacgatcatggctacctttctgctacggatgagtgttttgatatcggcaacgctacatcgaaggcgcttaaaatatggcagcggtacttcgaccgattctcgattaccacaatcgacgacctcgcggggcgcgaaggtggccaacctgaaattgacaaggccctgaagcatgag

SEQ ID NO: 27052 - DNA, 522 bp, Emericella nidulans
atggccatcaccggcgacaattcgcccaatgtggcgggcagcgtcatcatgttgaccgtcctcgccttcgttacctacggcctgcgtgcgtattgtcgtatcacgaggagatcgtggtccacagaagactggatcatgacagcggctttggtatgttagattgtgtcactgtcacttttccttgtcagtgggttcagatcactgacgaaagaaggttccgttctgtgttcttgtagcaggctgcgttggaggcgctttcaatggcattggcgttcatgcatcacgactctcggagcccggaaatgagaaataccaggccgaaggacaaaagttctttcttatattcgaagtcggctattgtgccgccatcatccccatcaagctcagcatcagctggatgttgatccgagtagctgaagggcggaagaaatatgtctatatacaatacgttgttatcgccctcttctccaccatgaacatcattgcgttgatcttcattctcaccaactgtattccggttga

SEQ ID NO: 27053 - DNA, 617 bp, Emericella nidulans
tcggccgcttgccatacgataatgcgctgccggagctggtgaggtgtatcccgccgattggaatggcgattaggcttccttggacgatcgagggtgctaccccgcggataaaaatgccgatggagatgaacaatacaaggagagatagttcgccgtatctccaggctgggacgccaggaagtgcatttggcttaagggcagagcggggcaacgattatgatcacgatgtccggactctgccagatgatgtttcggtccagacgaacatgaacaccagcacgaacatcaacatgaaaatgccggcacaggcgactgggacggatttttcttttcctcttctcacaagctcgcgtcaacctaccgagaactttcagccccagcccgagcaagatcagatcaatctcgactacctctacatcgagccagacgccaacgcacaagccattaaccagggagtgacagattttgacagaatcaacctccaacacctagcacagggatttgacccgttgatatcgtcgtgggtgcacgattactttggggagtcggccccccctccggtggttagccctgggatggatcttgatatgcaggtggatgggttgggcctggcgtaa

SEQ ID NO: 27054 - DNA, 1020 bp, Emericella nidulans
actgtctcactggacactcccagagaaaatgccaccaccgccaccgccggtcctcaacccccagcccacaacccctctcacgaagaacaccaatacctcaacctgatccgccaaatccttgcggaaggcgagcaccgccctgaccggacgggcacgggaacacgctcaatcttcgccccaaaccctatgcgcttctcgctctcgaagcccagccccacgaacccatctacaaagatcccaatcctccccctcctcaccacaaaacgcgtcttcttgcgcgccgtccttgccgaacttctctggttcatatccggctcaacatcaagcattccgctctccgaagcgggcatcaaaatctgggatgggaacggatcgcgtgagttcctcgacaaagtcgggctctcgcaccgcgaagttggcgacctcggccccgtatacggattccagtggcgccatttcggggctgagtatgtcgatgcccatacggattatacagggcagggagttgaccagttagcggacattgtgaggaagattaaggagacgccgtttgatcgccggatcatcatgtcggcgtggaatccagcggacctgaagaagatggcgcttccgccttgccatatgtttgcgcagtactatgtttcttatcctgagggcattgaggatgggaagggcaaaggcaagggagagttgagctgtttgttgtaccagaggagttgtgatatggggctgggcgtcccattcaacattgcttcatatgcgttgctgacgcacatcattgctcatgcgacggatttgaacccggggaagttgatccatactatgggtgatgcgcacgtatacctggaccatgtggaagccttggaagagcagttgactagggaacctacggattttccagagttgaagattaagagggaggaccgggggagcggagttattgacggctggaaagaagaggaattcgaggtcattggctatgcgcctcacaaggcgatcaagatgaaaatgagtgtttag

SEQ ID NO: 27055 - DNA, 225 bp, Emericella nidulans
atgactgtttctcccgcaaccaagccccaaattagacgacttccagtgtctcaaaatcccggtgaaatctggaatgttgccaaggaagatggcgctgtgattatcaagggcttcttgcctccagatgttttgcagcaattcaacaaggacctggacgccataggcaaaatggttccgacagcaaggaaatttttgtactacggtgatccctttagtgagggttaa

SEQ ID NO: 27056 - DNA, 358 bp, Emericella nidulans
catcctcctccaagcttaccattctccatctctacctcctgatcttcactgtctctgatcaggtcatcatgccatctgaagctgccaataatccagatcctaatgcagacaatgccctcctgcgccgcctattgacccaacaacacagggaactgctggtcagtttctcaacaagttcaccacccctgtgtccgggttccaggatgagcagactggttattcgtacgctgtagtccgtctcactgccaagggtgaccgggctctgttcgacctctgccataacaatgtgcagagagaggtgtggcgatttccctcatacgagtttgttgttcgtgttggcgctctcacggtgaaacag

SEQ ID NO: 27057 - DNA, 249 bp, Emericella nidulans
atgaagactgcctacatcactgccctcgcggcccttgccgcctccgttgtggctgctcccaccaggatcacccaggacctcgagaccgttacccagtctcttgacctccccatcgccagtgctagcgccaccatcagcagcgtcgccaggaaggccaccaccggtgccagcggacaggtggtgcttgacgttggctctcatgtcagggacggccttgaggtactggccccacacgccaaacgcttctaa

SEQ ID NO: 27058 - DNA, 279 bp, Emericella nidulans
atgatacgaggcagtcatggcaacatatgggatcttccgaaatcgttagatgcagctgattcagacgcggtggcagataaatccgcttctccctcaataagcgcacctccgcccatcggcaacaacctaaactatacttccacccgagcattcgatcttttagcccatcccgtcgtgagaatcaggccgagccagcgccgaaaggttgctctcctcgcaatatccttaacttcccataccaagcgccctgagttcgccgccgatggattcgtttcctga

SEQ ID NO: 27059 - DNA, 398 bp, Emericella nidulans
ctccttcgccgatgtcatgagctccccgtctgtgacccagcttcagtcgcaggtacagaaacccctccgccatggacgcgcctggcgaacgtgaggcatcactatctcgggtcgaaccggggcagggatcacctacgagaccatcgacccatcacagacgcccgcaccggcaacttcacactgaaaccggggatgacgatgaggaggaacaggaggatccgaaccgggagagagaagagagtatgacagaaacgatgtcgtattatggagaagaggaagaagatgacgaggaagaagaagagccgcatttgaagtgttctcatttgaccaaacagttgggaagtgcctatcggaatggagatgcaacgagcacttttttggccgctggggacaagatg

SEQ ID NO: 27060 - DNA, 421 bp, Emericella nidulans
atggctcctcccctcgagatctccatcccaacaaccacaacttctacaacttccccacccttcacaatctacaacatcacccttcgccttcctctccgttccttcgccgtctcgaagcgctattccgatttcacgaccttccatacaaccttaatatcccaaacaaacagcgcgccacctcttccccttccccccaaatcctggctctcaaatacagtcaccaatgccaatcttcgcgaatcccgccgccaaggccttgagtcctacctccgcgccatcaacgaagcaccagatccccgatggcggaactcaccagtttggcgtgctttcttgaacctgcctagcctaggcagtaacaataatagcaacgagaacatcactgcatcctccgcccgtctccatgccgcagctacaggacctg

SEQ ID NO: 27061 - DNA, 420 bp, Emericella nidulans
atggttgacgcagtcttctaccacaagggcatcaagcaggcctacttctttggcggccgcggccgctacgcccgcatcgacttcgtccctggaagcgcaggcggaaagatcaccttcggcctagccgccatcgctgatcactggccctctctcaaatctatcggcttcggcactgtcgacgccatcctccccatcgacggcagccaagatgaaggctactacttctctggggcgcacttcgcccgcatcaagctcgttccgtcctcagacgacgatactttcgtcgatggtccctgggtcatcacgcagaagttggcgagcctcaacaaggcagggttcgacaccatcgacgcacccttcctgctcccggggtttctggtgaaacgtacatctttcgaggcgtgtattatgtgcgaataa

SEQ ID NO: 27062 - DNA, 240 bp, Emericella nidulans
atgcagtacatcagttcgcgccaattgactgactccgagaccgagcaagatctgattactgcgaacagtgccggcttgcttgaacttcttctgcaaatgcaccagagagccaaaagcgagttcatcatgcagacgaaacgcattgattctcttctggataagctgcacagtatcaccattggcactaatgttacccatgtcaacacatacaacgatcccgagcctcatggacagacttag

SEQ ID NO: 27063 - DNA, 411 bp, Emericella nidulans
atgcggcccttctggcccgtagctgctgctttattcgttcttccggtagcttggggggccgcttctatttgccctgcgccctgcaccactgacccaagcaagtggacgccgtactcgtccctggagaacctgacagagtgccgccatccggttttgctcgatttctcgtcccatgggtctctaaatgcctcggaagtgtcattcagagttctcgcctgcacaatagaggagaatcgggacccatcttccgtctctccgcttgctactcgtgagctggaagaacaaagtccatcaggctctacggacgatgatgtgtctcagtcccaagaaatccatctatttttagaccgtttgcagacagtcgtaaaccagacgtcgaaccacgacacgttcagcgtgttcgggagctga

SEQ ID NO: 27064 - DNA, 231 bp, Emericella nidulans
atggatgccggaaacaacggtatcggcggaggcgttgggattcttgcctctgtcgtcttggctggtttcggtagttctcggatttgcgggtgtctgttgttctggagtcgtaagggcggagtcaaggtcacggatggcttcgatgcaagtttgtgcccaagtgttgccacgctgcgaaagatgcttgaggatggcgagaccacttctggcatatcttccctctactattag

SEQ ID NO: 27065 - DNA, 523 bp, Emericella nidulans
ggaagagctcttccgtcttgaagaagaaaggcgcaacgagcaatcggagcggatcaaaaaggcattgctgcttgggagaaccgaagacgcaggaaacaaagcaaggcagagaaagcgaggaaagcgctcaaatgagcctaacattgctggcgaagaggagactagcggaaagcgacggagacacagtggtggaaccaatgtggaactggaggaagatgacatacttatggatgatatggagatgccatcgcgagcctcttccggtgagtactcgtctaatgatgccgatgccatcgacaaatctatggctgcagctgaagacgagctttacttcgacgatgacctagcatttggccgggaccgagacaaggatgagacaagtgtcgacagagacggtgcagatgcgtccagccctagaaagcacaatgatggcagcgagagcgctgaagaagacatccctttggcgccgcctaatcgtagacggttgcgggctggattcgtggtagaaagcgattcggaatga

SEQ ID NO: 27066 - DNA, 666 bp, Emericella nidulans
atggaccagggagactacgaacgagccagtccatgctcgcccgttgatctgccccagacgctgctggagcccatcctcgtgcgctatgcaacatggcagggattcaccacgagattcgacattacgctgttgtcctttgcgcgcgacgagaaacagcgaattaccgcaacagtccgcgacaacctttcgcacaaagagtaccagattcggacgagatacctgtttggtgccgacggggcgcgaagtcagattgttaagcaactgggcctgccgctgaccgtcaaaccaggccaagggcttgcgatcaacgtgctagtaaaagcagatctctcccacttggtggcgcaccgaaagggaaatctgcactgggtcatgcagccggaccgcgaccatcccagcttcggctggatggccatcatccgcatggtcaagccgtgggatgagtggatgttcatcctcttcccaactagaggctatgatcctgcgagcgtgagcccgtccaaggaggaatacctacaccgagtcagggagctaatcggggacgaaacgcctgccgagatcctgaatatctccaagtggtatatcaacgagattgtggcggagcatactcagacggtaataacgtcttttgcctgggcgacgctgtgcatcgacatccgccactga

SEQ ID NO: 27067 - DNA, 354 bp, Emericella nidulans
gatacaaagcagcaggaagcttcacaacaaccgcaacaacaaaagcctaccgtgcttgaggaagatgatgagtttgaggactttcctgttgatggtgggtttccaacggcgcttctgctgaggctcttcgttcccttcctccaacctccccggcgacagcgccatgtactatgcaagtacttcatatcaacaaattactaatcattctataatcatgcagactggcccgagaacgaaactgagcaggctactgcgaacgggaataacgtacacctgtgggaggagagctgggatgatgatgacgccgccgaggacttctccaagcagttaagacgtcacttatctactacctga

SEQ ID NO: 27068 - DNA, 249 bp, Emericella nidulans
atggcgaaaggctggacacctacattggaatggagggaagtatatgtagatgctcaggctgaggtggacaggggtctgaaacagctggagaaggagttcagtcctgcgcttgtgcctggggtgtttgcggcggcgttaatgagtgggaggtatggggccgagtataaggaggtagataatgagctcttggggttgggatttatggataagagggagattaacgattttggaaagaaattcacgaagtag

SEQ ID NO: 27069 - DNA, 1851 bp, Emericella nidulans
agcacaattcagagcctgaaaaatttcatacgtcatgggaaacaagcccgccttgtcaccccccatgcggaacccacgaccaacgtgtctcctgtccatgctgagcaacagcgtcagccccagggtcaattcgcccccgctgcagggaatctagacgcgattgacagcaagctggggggtggtcagcctcactccacacaacgcgaatctcccgagattcccgtcaagagggctcgcgaggccgaaatcgagcaaatcatcgctgaagaaaagaccaatcgcactaagatgccgcattacccaggcttagagcgttacgtcctgctggagaaaatgggagacggcgctttcagcaacgtctaccgggccaaggatgcttccggtgaatacggcgaagtcgccattaaagtggttcgcaagtttgagatgaacagcacacagcgagcgaacatcctcaaagaggtccagattatgcgccagatcgatcaccctaatatcgtcaaactgatccagttttctgagtctcgccaatactattacattgtcctcgagctctgcccaggcggagaactcttccaccaaatcgtccgcctgacctactttagtgaggatctcagtcgtcatgttatcgtccaggttgccaaagcaatcgagtatctgcacgagacatcaggtgtcgtgcatcggagcgcagctaattttgccagtgacatcaaacccgagaacctcctcttctatcccaccgaatatgtcccatcgaaacatccaaagccgcgccaacctggcgacgaggacaaggtagacgaaggtgaattcatacccggcaaaggcgcaggcgggataggtgtgatcaagattgccgactttggtctgtccaaggtcatatgggatacccaaacaatgacaccatgcggcactgttgggtatactgctcccgagatagtaaaggatgaaagatattctaagagtgtcgacatgtgggcgctaggttgcgtcctttatactctgctttgtggatttccgcccttctacgacgagagcattcaagtccttacggaaaaggtcgctcgtggacagtatactttcttatcgccctggtgggacgacatttcaaaatctgccaaggacttgatttcccacctgctgacggtcgaccctgatgaacggtataccatcaaacaatttctggctcatccttggatccgacaatccggtgaagagacgcaagctgcttcagacgccccgccactaacgacaccggcgcccgaagctcgcaaccaggcacttgatgccattgcggcagaacttgcgccatatccgcccgcgagtgcacagctgtcagccggggaacggccaatggatttccgatctcctggtgcaattaacttgcgtgaagtctttgatgttggctacgctgttcatcgacaggaggaagagggcaagcgacgcaaagctggccgcggtttccggcagtcgaacccgaccgccgcgttccagtcagcacttaacccgctcgatgaagactacgatgatgaggatggaattgcgtatcagaccatcgacgaagagggccatccgcctgctaaaatgcaaaagtccacccagcagtctggcgacgttgctgcgatggaggctaaaatgcggcaaaccaacttgggtgctactagtcatgctgcacagatgcggcaatcacaccagccgcgggggtatggacaacacagcgcccaggtcgcagccgctgccaagcagaacatggttcgaaatgcacgggcaccattcgagctcagcctagacaacgcaagtctgctagagaagcgcggcagaagacatcaagagcagcctgccatgtaa

SEQ ID NO: 27070 - DNA, 851 bp, Emericella nidulans
tttcagcgacgatccttcgcagggcgattcgatccagatctacacagattcccgtgatcgaattcctgaagttgacgagagcgaggagaatccattttatcaaaagccttccaccaacacaaaacctcggccatctaggccaatgactaggagccgcgacaaggaagtcaatgaggctctgaagcgcgaggatggcatggtctacgtcttgtaagtgtttcaaacttccaacaatttgcttacgtttctaacgaatcttcagtcgaggcaaaaagatgttccggaagtttagcgatgatgttttcggcagtgacgatgaggacgatgacgacgacttagggttactggcttcccgtccagatctgctagattctgggattctagagaatgcccgtcccctaactcggtcatcgatcaaaccgcgggtgcttttccctagcgcccgtgagcatgttgcgggggaaaataatgaagaggaagaagccgccacggatatcgaagaccaattcctcgaccacactgaagctgctgacgacctggaccttatcgccaacgtccacccggaacaacgcctagacactccacctccaaaatctgatgtttcaacgcctccatcacccggtgtttcagtacgatctctacgttcaagatccaagcgagagctgggagctcgacagaccccaactgcatcggatcccacgaaaaaacccagtccattcgacggctggctccgaaagaagcaaacgcctccggtcatagccgcaaaaaccaagaagcgagatgcagaatctgccggaggcccagcccccaagaagacccgaggcaatcgagctattatctctccatcgtga

SEQ ID NO: 27071 - DNA, 414 bp, Emericella nidulans
atgcctctcagtcacccaggcgttcaaccacttcgctgcgtcgaggagaacccctcgatcaagcctgctgaagtggcagtctccgtggctgagtcggccctggagggagatattgtagcgtacaataaaagctctatttcctggaatcttacagagcactcgagctggaccgggtctgcgtactcggccactggggctgcccgtttcgatgtctctcttgacgaaacctccacctggacgcttacgcggaacgtgagtctgcacaatttcgccaatgtagtcccagatcatgggaacattcgttctcgaggattcagtattcactataacgcctcggcagctggcagcaagtggctcaaatctaaaactgtggccctgccgggaggtggccatcttaggccgtaccctcagtag

SEQ ID NO: 27072 - DNA, 312 bp, Emericella nidulans
atggaagacgacaaggataattcatacgagacacttattgtcctccaatcgctcgagatgttcttgacgtatatcgacgggcacttgacggcattatcgcctgcgagccaggcgctatgggaccaggagtttgtggatgccgtttcatttgcagcacagcatattcagaggcagaaagcgtgggttaacacgcatatcaaagtcaagagtccgcagacactgcttgtgcctcagaggccgccaatggaagttgacgctgatcgtgatgaggaggcggctgagaatgtgctggttagggagttttactactga

SEQ ID NO: 27073 - DNA, 234 bp, Emericella nidulans
atgttttgtgcggcctggacgatcctggtcgtcgtcttccacttcgtcgagtccggcttggaaagccgcccgataattggctacgttggtatcgtcgccgaggccgtgactgtcctcgcgtggcttgccgggttacattcacgtggctgtaaatgttttgacgaccgatgcctgctcatcgggactcaattcgtgcgcggagctcaaggctgcgacggcctttggtgcttttga

SEQ ID NO: 27074 - DNA, 670 bp, Emericella nidulans
atggagacatcttccccgcatccccgcgaaagcatcaccaccgcgcaaacagaatctcgaaacccgcaggcggatatctttgagcaattgagcacatatcctttctcgaccgatcgcgaatttgcaggcggccttgccattatactcggtcaccccgagacgccggcctcagacgaggagattgctcgcgatgatgatttggtcctgcaggcgaagtgttattattttatcaggtacgcaccatcaagacataccgtatatctactccctgcctgcatagctttgtgctgagagaattgtacgctgtattaaactaatttttttctccactaccagaaagaataaccttgcgctgccgctagatgttgcgacctacaagtcctggcttgaagctaggcgtacttcgagtacctccatagatggctcgcgagaaaccggctcatcgcaaatttccgcatcatctctgtccccgactacagtcccggcatcgaagccgacatcacaagagccaacatatccgacatcggacgctcatatcgttcagcttattacaacggggcagccggtttcaggaatccaacataaaccagtcatttttttaacgggccaaggagctgcgagtgcaaagcccaagagactgaaaacttgggagaagggggagaccgcttaa

SEQ ID NO: 27075 - DNA, 774 bp, Emericella nidulans
atgcctaccgagttcatcagcctcacctttcctaccccgtctacggagatcgacccgatccccaatgccgccattgacccggcattcctggagcgctatgctcgcaatctagatgattactcttacaactatacccttgtcccttatgattcctcttatttcgatccttggactgtcggcgcgaccatcgcctcacacacgaaaaacctcaaaatcatcatcgcggtgcggcccaacaccctttatccgactgtggccgccaaagccctagcgactctggatcagcttagctccggccgtgccgttgtccattttatcgccggtggcagtgatgccgaacaggccagggagggcgacttcctcaccaaagaccagcgctatggccgactggaggattatatcaaaatcctacgccgggcctgggagtctgccgacccattcgactgggagagcccctactacacatttaaggatttcagcaaccgggttcgtccggtgaacggcaccattcctgtctcagtcggtggatcatctgacgaagcctatcgcattggtggctcactcgcggacatcttcggtctttggggagagcccctgaaggagactaaggagcaaatcgaccgcatctatgctgaagcggagaaagcagaccgtactgacctgccgcgcatgtgggtgaccttccctcctatagtggccgagacggacgagctggcctgtgccaagcacaccgcacccttgatgccctacagaaaaaccctgcccctggtcttg

SEQ ID NO: 27076 - DNA, 378 bp, Emericella nidulans
ttcatgcaacgagctgctgccagtgctgctacaaaagaggctgcccaatctgcgtccggtagcgaactctcagattctacaccgaaaaaacgcagagtctctgctgcagacggaatctcacccgcaccctcgtcggacttagaagcgatctcagctgctctcgcggaagaagaggagcgacggcgggaagccatttctcggcaggcggcggaagcgggagaaacagaatgggtgcttgattttggagatgctgttaccgtggaccagcctgctcagccgctcgtacttgcagacagttctttagacgcagatgatgacgatttgggctatgggggccgccaactttatggcaacttcaaaaggaagaccaaagctaag

SEQ ID NO: 27077 - DNA, 246 bp, Emericella nidulans
atggtataccttctcgaacgcggtacgcaggatgctgcgaaggaatacatgacccttgacagagaagtacacggtcccgcgtctgtatccaaggcgaagactggaggcacagaaccagtgtctcataccgcaccccaggttcctcctgtgactccggcccctcctattattcctacgccccaagtcaacccgtacaactactatccacaacagagtcctgtcaacgggggctatgggaatgcctag

SEQ ID NO: 27078 - DNA, 267 bp, Emericella nidulans
atggaatcacagtcgatcctgcctcctccaccccctcctgaggatgccagcgcacctccacctcccccagaagagtccgctgctcctccgccgccgccagatgtatccgcgcctccacctccgcccgaagaccttccaccacctcctcctgaaccggaagtaaagaaaaagaaggtgggatggggtaccaagcgtccggctacgacgccgttgagtgtagaggagttagttcggaagaaaagagaagccgatgcagcagcggctcgg

SEQ ID NO: 27079 - DNA, 370 bp, Emericella nidulans
ggagacccaagcttaggagcctttatgggccagacaagatggcaagaaggtcgatacaccaatgctaaaacgctacaccaagaggccgtcgacgggctaataaggctcaaggggatagacaacgaagataccctaacggccacgggcaatctcggtcgtaccaaggccaaattctacgagaacctcgatgaagcaaagtcactactcaagcgagcatcacacggcatgagcaaggtactcgggacaacgcatgtgaagactttgatcgtgcaagaggacctcgccctgcttgcggcgcagatggaagaagagctatgtgagccattggagacggtgcaacaagtgctcgacattcgaacgaaaaaggtag

SEQ ID NO: 27080 - DNA, 565 bp, Emericella nidulans
ctggatcggcacctttgacgcagaccttgcctttgtccctgcggatgagcttctgtctgcttacgaccctgccgattatgcttccgtcgccgccatgagcggcgcctcctacggtgacgcccgcttcttctgcgcaacagactacctcctcgatcttcgcgccgccgctcagccaacgtggatctaccggtggttcgggcagtacgacaacgtcctccccatcccggggctgggcccctcgcacggcagcgaagtgccgttcttccacggcggtaacgagtgctttgagtcgatctccggcgtcacggacgccgagcaggctctagctgactacatgaatgactggttcgtggcatggattaaaaatcccgcttccggacctgggtgggaacgtgcgacgccagtcgatgggccgctggccagactgggtgttcctggtagcgaggaggcggttgtcaagagcaccactggcgagtacaacagtcgctgccagaagacgtataagccaaactaccccaactatccgcatgtgctgaacccggtcgagctggcggctagttcgtga

SEQ ID NO: 27081 - DNA, 335 bp, Emericella nidulans
gatttggaacaaacactcagaattcaggttcagcattcggaacccaaaaccgtcctaccactggctttggctcgacgacgtctggcggcggcctgttcggaagcaacaatgccggtgcaagcacaggcggtggatttggtggctttggctctacgagcacgagtgggtttggtagctcgaacaccggcaccagtctgtttggaagcaagcctgcaggaggagggtttggcagcacaactggaactggaaccggaactggattcggtactggaactggcttcggcagcagcagtggctcaggctttggtggagcaggaactgctttccagcagggg

SEQ ID NO: 27082 - DNA, 501 bp, Emericella nidulans
atgcacagacccccaccttggtctctcgtcctcgctcttgtcctcctttccccagccctcagcagcgaggacataaactatgatcctgccacaaactaccgtccagaaaacgtcaccggtcttgattactactactatccatgggttggctcgtatgtttcactctccgccttgcaaatccctctaacaaaacagttactacaacggcacggcaacattcacaatctcaggcctgtccatccggtcaaggtcctacgatgaagatgaagaccaagagctttgtacccagctacagaactacacgtacacactctcctatccagctctgctggcaatcacagagacggagcctgaagatgaacggccggaaaacacaaacccagtaaatgtgattttgtcaacctcatacagcaatttcacgaaatactttaatgattacatggactcgagcaatatgcagataagggacgagccgtgggtctttgaaagcatagatgtttc

SEQ ID NO: 27083 - DNA, 656 bp, Emericella nidulans
atggcaacggtccacccaaatgctgagaaactcatatcgttggcggaggagttctttgccgaagtcgccgatctgtctgtgcatctctcgtctcttctcctgtctttacttcttttcgctacaacccgtatacttcaggcagccgtgcacccgtatacccgtacagcctgctaatgctatacattgctctattgtagaactcccggtcgcgcccttgaggaatatctgaatgaacactacggccccggcaataaatactacgacaccttctgctcgctcatcctcagcggtcttcgcaacaacgaaggctgggtcgccaccgacgagctagacggccccagatacaggcgcagccgactctgcgatcccagcgagcgtacgcgctatttcagtattacgaccgtctacatgcagagtcaggacgagtatcgagggcagtatcatctgcatccgtatggggagatcaattgcgtggtgcaggtcgatcgcacagctgagttgaaggggatgaatgggtggcaggcggccgggtggacctcgccggcggcaggaacgcaccactatcccgaagtgagaggaggtgcactcgttgcgctgttcttcttgccggccgggaggatctcgtataaggcgactcccgagatggcgcagccgcc

SEQ ID NO: 27084 - DNA, 939 bp, Emericella nidulans
tcacttatttggttgatgcctgggcctggggtgctgagatcttctgcggttgtgaagtccggtatgtcgagagagatggagactcgtatcttgtacattttgcctggcatcagaaaggcaggcggagcttcgcagaggacggtatggcgcagctgttctgggtcagagcggtacgtcaagtgcatagtgacctatgctgacaagttattaattgttagcagaaggagttctgtttcctcggtgcaggagcgcttgggacaacagagattctcctccgctcaaagaagcacggcctatcgtgttcaccgctagtgggaaggaacatgtctggaaacggtaacctcttagtctttggtatttctatgtcctaacattacggggggcagactaacgcaaggtaaaagaggatatactgatcttcattagggtacaacggtagcaaagagatcaacggggttgcaggtagtaccaagcctggcccaaccatcactagcatgatcgattgctaccaaaagaccccgaacggcgtctgcggctctgagaacaataacaaagtcggtgcatttgtcatcgaggacgggtgcgttcctgagcctttcgcgcctgtgatcgaatggatgttcatcatgcagacaataaatataaagcacttcttctcttcgtttttcggctgcccacttaggcaaaccaaaagaacactcgcagcaattatgtccatcgtccggggcccatatatccccggtggcgcgattcagcgcacagcaacatacctggccatgtcccacgacaacaacgaggttacactaacgctggaaaatgacaatccgcaactccaaggtgttggagaagggcgtggtgcaaacattcattctattaaagatgccttgcgccgcgtgcttggggtcgatggggcgagtatgggatattcttatttctatg

SEQ ID NO: 27085 - DNA, 246 bp, Emericella nidulans
atgctgcaggcgcgatacggagcggagccagatttcgggctcggaggagatacgcttgtgaatcgcaattggcggctgattctgaatagcgaccatacactgagccacattggcgagggtgatggctatacccagctgccaacacacaaagcttctgacgctaattggactgctccaagccgccgcgaggaggaggataccttctgtgcccgcaagttgctggaacccatgactgttgggcgctag

SEQ ID NO: 27086 - DNA, 760 bp, Emericella nidulans
atcttacttcactgaggaagaaatcaccttcaggcgtggacaagcgaatgtggctgcaaggaaacaacgacaattgatcgtcgcgaagctgtctgctgagcgctccgatggaagtgagataggatcggactctcaagacagctccctggaattgcaggcttacctttgactcgtccgcgatcgacgacgccacgcaaagcttgaagtcttctagcaatatctttaagagctgcgaaaccgggatacccctcgcccggaagatttcgataatcaggaacgccagaaccagaccgctttgctggaagagtttgaagatgagggtcaagccagcggtgaagctagtgctgatattgaggagcttgtgcataagctagagagagcagtcattcgtgcaaagtcacaacttgatcgggaaaaaaagctatacgcggaactgaaagctcgcagtgcgttcgagagttatggggaggaagagcccgccccagctttgaaagccgcagctctccaggtaacccgcaatgagcttgtacaatgggtagaggataagcttgtaggcagtggggacagtgaagaagctcctatacaggagatacctgctgaagagatagaggagtccgctcgtatccttgaggagcagaggatgcggattatacagcagtacacagtttacacggaaacccgcaagcgcctgttagagacagttgctcgagcttgccagcctgtgtcaacagttccgccaagactgcatcgcgacccctag

SEQ ID NO: 27087 - DNA, 249 bp, Emericella nidulans
atggcttatcctgcagacacatcggccgtagacgggctggagtcgcagatattcgactttgtggtcggaggaggaggcactgctggccttgtcgttgccaaccgtctctttgaggactctaaggtcagagtcctcgtcattgaggcgggcagcaacagcgtcagagatcctcgtatttcaatccctggtctcgctgccagcacctacttcgacccggatttcgactggtgcatcaccagtccaccacag

SEQ ID NO: 27088 - DNA, 800 bp, Emericella nidulans
atgacagtccaaccactcctacttctggccctgagctccctcgcgataggcgtagtctccatcgtggacccttgcgatttcgctgatatcgcagcggatgccggggacaatgccataatggccgattacatcaccgacaacggcggccccatgtacctggactataatatcaccgggccttactactacgccgacgccgacgtgcaactggtccatgaaaccttgtccgtcgacgcgaacgacaccagcgtgctcgttgctacagacagtgccaatgtgaatctatcccacgtcgaggtgatcaagacaggatactgcacctggctgacccaggcgagcttcttcggcgtcaacgccgcaatcaatattgccaatggctctacggcatatatcgaggacagcaacattacagtccacaatggagcagccaacatctttgcctacggtactggaacagtcgtttatgttagcaacaccgatctctacagctccggccccgtcgcgcacggtctctacgctgccggcaacgggacaatctacgcgtccaatgtccgccattactctggcggaaatcgctgctcctccttctccggcgacactcccgctggatatgtgtacgtggacgacgcggttgcgcacacggcgggagtgggcagtgccatcttctatgccttgggcgaggtatacgggaccgacgtcgtgggacttggccgagaacgcccccgtcctcttcagcgatggagcacaaaaagcggttttcaagaacgtcgactttactgccggtctgttcgcagggactt

SEQ ID NO: 27089 - DNA, 283 bp, Emericella nidulans
gtctcccaccaccgaccaccccacgactccctgggatgattgaaatatacgatgatgactaccatcctgaccgcagctggagggacggtgcgctgcacatgtgtcatatctgctacggaccaggttttgaacttggacagcctcttgatgagagttggtatggcatcgaccctgatccggatcagtctttgagctatttgatctgggagcactctcgttgggatggctggcaaggcactcttggggtatatcagcgtgctacagatagagagtggatcacttg

SEQ ID NO: 27090 - DNA, 1487 bp, Emericella nidulans
atgcgcctcactcactgcttgtgcatgctcagcctgctggccaccgccactgcgacggcctataccaaccgctcctccatgccacggaccgtagtcacaactgatctcgagcaagacgacctcgcctcgctgatccgctacctcctctataccaacgagattgacacccatggaataatctactcatcaagtcgataccattggtcgggcgatgggaacgggactaggttcttcctgccagaccgcgagtacgagacaacgcagtggacatggcgatggacaggcacgcggacagtgcaggatatcgtgctcaaagcgtatgcagaggtgtggccgaacctgaatattcatgatccgttctatccgtccccggacgagttgctagctatggtcaaaattgggaatatcgacttcgagggcgagatggagaaagacacagagggttcggatttcattcgcgagttgctgctcgacgattcagatagcaggacgctctatctacaagcgtggggaggaacgaataccattgcgcgtgctctcaagtctatcgagtacgagtactcgagctcgagcacatggaacgagacccgagcagccgtctctcgcaaggccgtgatcctcgccagcggattccaggacaacacgtacgtcgattatatcgcgcccaactggccagccctgcgcgtcgaggactttagcgccgcatactcactctgggcttacaactgcgagaagggagagggtaacaccctcggtctcccggacaacaatgtctacttcacggggaactggaccaaggcttacgtgcaaaaggggccgctggggagcctctaccgctcctggcttgatgggcagcgcatgccaggcgacctcctcgacgtctttggcaacctcgcctggtatgcgggcaccaagcagagatgttatccgctagaaccatacgccttcctctccgagggggacaacgtcgtcttcaacccgctcatcaacaccggccttcaggacccggcgaatcccgcgctggctagctggggcggccgatcaaagcaaaagagcagctcgccagatctctgggtgctcgttgacgacgagaagaatgcgaccggcgctgccgacagcgagtacacgtatacgcggtggattgcaccaatccagaatgactttgcggcacgaatccagtggacgctcgaggcaaactacacgcgggccaaccatgcgccggaagtgcggatcctgaacgggacgtacgtcagcgcaccccccggatcgacgatcattctggcgggcgaggtcagtgatccggacgatgacacggtcaagacgagctggtggcagtatcttgaggagggaacctacgaggatagtgtagaggtaaccgagctcgccggtcaccaggcgagtgtcgctattccagaggacgcgagcaagggccagacgatctcgatcatcttgcagggaacagacgacggggagtttccgttgacgag

SEQ ID NO: 27091 - DNA, 576 bp, Emericella nidulans
ctattaacgtccacgacaagaggatatcagcttctcatcacctcaagtatggacttcgacatcagtacagaactatacacccattccattgagttcacccccataaatatccgcaccgaccacggacgggaagttgccaatgcagcgatgaatgaagcgaacgacaacggggatgagcagcatgtatccggcatcgaagcagaagatgaggaaaacgtaagtcagtaaccatatgcgctactgtacaaacacaaagcggagttaacgaataatttccagaacaccaacgcctcgccagtgtcgatgaccaaaaaagaaacccctaaactcggctagcgcactggcatgcgcgcctcctccaaaaccgcttctaagaaattcaagaaggatccggggttgacgacggaaatggcactggtacacccgaaggagcaccagcccgagcaactgttccccccattcaaccagtcttgcaacagcggtgaaaggaccgttgatctaccctgcgcgagaggaaagatcatgtcgcagatcaaaggctttactgaaaacgggatcatgtcgagtacacaatag

SEQ ID NO: 27092 - DNA, 240 bp, Emericella nidulans
atggcgactcccggcctcgatgttatcatgagctggacgccaaactatgaccatcctcatgagcccctggatgccgtcatatacggtgtcaacatcccactgatggttctaatgaccatattcgttgcgggcaggtttctatcgcggacattccttgtgcgcaacgcgcttggagtagatgactggatgatgcttgttgcctatgttggtgccagtgctggctttggacgtacatcgtga

SEQ ID NO: 27093 - DNA, 458 bp, Emericella nidulans
aatgacccacgaaaagtctgcgtcctttatctctgttgagtcctctgagatggacattactggaaagaagtaagtcccttgcatcatgagtagtctcggagcgtgcacgtactgacaccgcctgtgttaatagatccaagatcccctgcactgtccacggcccttcccagactccacaccttgaccacgaactccagcagccctacgcacaggatataatacacactttgactgccgctctcaacgacctcacagatgagaataagtgtgcgaaatgcacggttgagaagttttctgttcttctaaccggccatgtgcgcgagatccgagacgcgaagaagaatgggcagtggtcgaaggaggaaaggaaggcaatgaaagctgaagtgaagagcacctacaaaccagtaaagaaagctgtaaaggctctgtggaaagagaggaagcaagagaaatag

SEQ ID NO: 27094 - DNA, 431 bp, Emericella nidulans
atgacgcgaatcgtttcgcagtccgttgttccacgcgacatcacagaggagtttacgcaagctgcatcaagtaagactgccgccggagctgttctacatcaattaggcaggaatagagcttggctaatttacattctccagaattaaagaccggtcaactcgtcaaagatgaacactttacgcttttcgaggccgtgggtgcgctggaagtaggtgcagtcatcttagctgctgcgcatggcagctaccatagaagtgaacgttcagctaacagacttgtcgcacattcagatcatggatcccaaaatggacagtggatacctcggccccgaagagaaaggacagggattggaggatgactacaatatcttgcgcgagcttaccccggaggaagtagtatggattctggatggaaacgcttttgccatgag

SEQ ID NO: 27095 - DNA, 297 bp, Emericella nidulans
atgctctacggcattaccggccagcctttcgaccctaacgtgaagcaggagggtaaggatgagcccgtctggatcccaattcgtccaccatgggttgttgctatcagcatcccactgtggatttgcttagtgtacttctgcgcgacaatgtggacaaaatatgtcgatccgttctgtgcccgcatgacccaaaagatggagaaccacatgttcatccaggacgagaaacctgcacaggccgaaacactacccttgacctccatgccgatgcagacgatgccaattcaaaacgcctaa

SEQ ID NO: 27096 - DNA, 315 bp, Emericella nidulans
atgatacctgggctactatttccaagacgagacatatctgacgagagcgcacctacgacgacgcgctacctgagtcggacggaccgcgaaccgacacctctcgcggcaacatcctatgaattgctaggccacgactcaaatacgaccgagaccaacaccacccggactaccgctgcgcctactaccaggtcccctgcgccgaggagctgtatgctgcccttcagcccgtccgtccagagagcgacttccgcaccggtcgacccattgtcggacgagcgcttcataccacctcaacaagaccgctacatggagtaa

SEQ ID NO: 27097 - DNA, 738 bp, Emericella nidulans
agtactgggtcgaagcgcacatcgagctcttgcggcagcacaaggggcggacgtggccgaccggcacacggccatcgcgccgtttccgctgcgaaacgtccacctgggcccggccatcaccgagttcaatatgcgcgagttcaaaagacaccatacgacgtgggcataccggctcgtccccggtaccaccaagatcagtttcgggcagaagacgagacagctgttcgcctcgtccaaagtcccaaaaatcggcctccgcatcagactctcgctgccccatacattgcaagtcggcaacgagcagaccatcccaaccactctacatatcgaccctgacctggactcaacgagcctcgccattcacggtatccaacaagagatcctcatcacagcggtccgggtcaaagtcaagccgacgacgaccgtgcaggccgagcggcacgacttctccaaatccaccgagagcgtgagtctcgttccgccgggcaacggcaaccggccactgcgcatggtagtgactcctggcggaaaggccagcgaaccgcttgccctgggcgagatcctggggatcaggctgccggcaggctgcctgtatccaaatctgatcacgtacaatatcgtccgctcgcatgaactgaaatgggaattggacggcgagatcgccgggagtgcattcaagctggggtcctggcacccagtgagggtcttacctgagccagacgtggagggccctccacg

SEQ ID NO: 27098 - DNA, 240 bp, Emericella nidulans
atgtcctttcagaacttcgattctttccaaaaccagcacccagcggctgacgcagccgctacggcttccggcgcttcagctaccgttgacactaccatgactggacaggcagacccttcgaccggcccattccagggtccaacccccggtgagggtgcctccgctggtgctcaccagggaaaccagggcaaaacccctttttgggttgtgcaaacaccgcacttttttatgcttggttaa

SEQ ID NO: 27099 - DNA, 603 bp, Emericella nidulans
gacgccgtcaacttcctgtgcgcgcagcggaccgagatcatcgtggtctggtttacctggaaccaatggagcgaagccaaccccgagcccgaaaccgtgttgaaaatgctccaggactgctttaatgatgccaaaactaaaggtgtgacgctggaacgaggcacgttcgcggatttggatcgcccagtcgacacattgcgccaggaaaacaagcgctttatcttgtcttttaagaacgatggttacaacccttacgacaacttcgatacgaagcggcatgccgtcgctgacagctctggaattatcactgaactcagcgagatgtcggctgagaaacaaaagggaacacccatgacttatttgcagtgtcaaactaccatgagctcgaatacctatggtctggcagcggcaatcacgttccataatcgggttcttttagcgcagaaggccaaaactgatcccttgacgctggattggctgtatgcacatgtgaaggctcggcttggtgatgatcatcttcttgttatcatgaacgacttctttgacctggcgacgtcggatgttgcgaaccagcttaccaagacgaggctctgggatccctag

SEQ ID NO: 27100 - DNA, 356 bp, Emericella nidulans
ggatcctgacctccgccttttggacggctacacgcttggccaagctttttacgaagaaccttcgatcggccctgggctctaagacgccattaactcaggcatttttcggcacaaaggtcacctacaaggaacccgggaatgggcccgaccttgtcagcaggacccaagatggcgcggccgtgcagaagttgcaggttcaaaaggcactcgcagagaaatgcaatagcattgacccctctgcagaggttaaggtctttgcgactatcgaagaagctatcgattttacccgtgacctggcttcaagggaggagcaccgtatcgagggcgatgaaactccaatcatgcctttggactga

SEQ ID NO: 27101 - DNA, 795 bp, Emericella nidulans
attgccgcttctactgcccagaagcaggatcgccagaattttgtcaagctcgacattgtttctgtcaagctcgatgacattgacatcaaactcaagaagtctaagcataaggttctattcactctcttcaagcccttgctcttccgcactgtgcgtcccgcacttcaaaaggcccttgaaaagcaggttcacgcaccaaacatttacaaccgctacttgaactctttccgtgccaaattggaggagggcagacgcaaggcccagaaggcttcccagcaagctgcccagcgcgacaccaaggcgcagaccacgactactctgaagggctcgctgttcccggacatcaaacttcctggaggcattaccaccaaggctaccgaatacgaagaacttgcgcgtaagggcgagcgctgggagtcgcccatcttcagcattggctccgcctcggagtcgagcgacatcccgaagccggaacagatcactcgtaagcctcacaacactgccgaaagcaagctccgggaccgtcaatccaacggcgctgcaactggtggcgcagctggcggtctcgctgctgctcctcgtggccccgtcaccaacggcggcgcattggctaccggacgagccacggacggtggcccagcaaccgctgccccaaccctaaccaacggcagcaccgcggtgaccaacggtcatgcgaagcactatgattctctcttaagcaatggtgctgatggcaaactggctcaggacatttcccaaatctcaggaactggattcaaccctcaaaccgcatag

SEQ ID NO: 27102 - DNA, 321 bp, Emericella nidulans
atgcatctcgtccggggccggcgacccctcgcgtcgctcttcggtcacattccactgtacctccttcatgatccggaccccagattcattatcaggaacactgccatgctccgcgagctcaatctcgtcttgaagcactgtatgctcgggtcttcgtcgccacgatcgggttgtgctcgccccgccgttgtagcttttgaagtaacggcccgcggaggagccctcgccgatgagcttgggagcgtagcggcgcagaaagtggcgcataaacggcagacaggcgcagatgatgataaaatttgcctcgacgttgctggttga

SEQ ID NO: 27103 - DNA, 1388 bp, Emericella nidulans
atgctgtcccttcctttgatcctggctgctggcagcctttccaccctcattgctggggcccccgtcccgtccaatcccttgagcggccacagacacgcagaacgacactcgcacgctctctcgcacgcgcgttcccttgacaaacgtgcctacaacgtccttggaggaaatggcaaggtcgccgccggttggcctgatcatgataactggtggcctgactttgatgagatgtacgtcccctcttgaggcggcgtcccgccgccaatggtgttgtgttactgaccgatcgtgtaggttcgaagccaaccgcgatacgatgcgtcaatcctgcacccaatggaatgtccctaacaattcggacgacgaaatcgataacatctcgtccgccatcaaagaggtctctgaatcctccggcgtcgacccccgcttcatcctggctatcgtcatccaggaaagcaacggctgtgtgcgcgcccctaccaccaactacggcgtcaccaacccgggcttgatgcagtcgcacaacggccagggctcatgcaacaatggcgaggtcttgaccccatgccctgccgagcagatcaagcaaatgatcaaggacggcaccgagggtaccagcgatggtgacgggctcaagcagtgcctcgagcaggcgggcggtgttggcgatgccgccaacttctacgccgccgctcgtatctacaactcgggctcgatccctgcctcgggtaaccttggccagggtatcgcgactcactgctactcgtcggatgttgccaaccgtctgaccggctggtctactggccctagcacctgcgaggacaatgtgatcgggtctctcgacaaggccgtcaccagcattttccggttcacctccagcttggttggcggttcagactctgactcgagcgattcggacgattcggattctggctcgaccgagtcttctacatctaccaccactgctgcgccaaccgctacagaggctccgacatctaccactgaagccccgacgacaacggaggctcctgctacgaccgaagcccccagcaccgtcaccagcacaagcactactacctcgaccagcacgagcactaacaccgtgacttacaccctcaatggcagccccactgacactccgcggcgacgagcagtgccagcactgtcccgccgcccccaccgcttcgtccggttcatcctctgcgccaatctacccgtacgccaactcctcctgcacgcagtactacaccgtcatggacggcgactactgcctgaaggtcgaggaggctattggcgtttccctcagccagctccgcgagttgaactccgggctgaaggaagactgcacgaatctctggctgggctaccagtactgcatcaaggcttag

SEQ ID NO: 27104 - DNA, 622 bp, Emericella nidulans
atgccatcaacggttaatctcctcctgtccgctctcccggccctccccatggcgctggctgcctgcccaggccctgatgtcaacaccgcaacgacagatctcatgaaggcctttgagagctgggagcccgatgtctacgatgacggttacgggaaccctaccattggatacggccacctgtgcagcgactggtcgtgctcggatgtcgcgtatgatatccctttgtccgaagaggatggggtgaagctttttgcagaggatattgctgtgcgtctccctccacggccttcctctcatgacgggacctctgggatggaagaaagatgtaaggtgctgatacgatgagtgaaacaggtctaccaagacggcgtggtctctgccctcgactcctcggttaccttgaacgacaaccagtacggggccctcgtctcctggtgctataacgtcggcgcgggcgccgtcgccgagtcgacccttgcggctcgcctcaatgccggcgaggatcccaacactgtggcggaagaggaactgatcaagtgggtgtatgcgaacggcgaggtatcggaggggctgaaacgcagacgtaatgcggagattgagcttttccaaaccagcagtgatg

SEQ ID NO: 27105 - DNA, 1062 bp, Emericella nidulans
atggacctgagcagtgacaaggcagatagcgaagctgcagcgtacatgggaaaagccgccatcactcgcaaacgcaagcgggaattggagaactggacttctcctgccaaagaggagcgtcgccgctcgtcaaggatttttgcggcaacaccagctgccgaagtcgaaaaaaatcaacttctttccaagaaacaaaagcttacagctacgcctcaagataccggcttctcgccagctaaccgagccacgaagaagcggaagcatgagacagttgaagttacagccgaaaccccgagaaaggagcagatcaatatggacaaagaggccactagagaaccagggtctcagagatctcagaagcggcgatcacaccgtattagtggtgtacctgcacccgatatcccagatgaacttcctgccccgaagaagtctccgcggcccagtagttcgcagaagcaggcgtcgaagccgaagcagaacaagaagcaaactaaccgcatgtcggagagacgccgctctcaacgagcgggagcttcgcaggacgaaatcattccggaaacggatagttctatggagaaatcagttgaacattctcaactttctacgacagacaataactccgagcaacaaccgcaaccaaccgatgctgctcatagagaccaaccgggaccgcaggctagtcaacaagcagaagcgtctggggaagccatagccattcaaatagcggaattcagagcaactgggtcggaacgagccgcagtaacagatgtcgagggtgcatttatcccaaaatctcaagcggaggccgagaagcaagctctctccgactcaagccagccacaccagccgttgtccgcaccagatcaatcgacgtcagagagagcgccccaaccaaaccaagacttccaaatctcaacctccctccgctccctcatcgaccaagtgaagttatcttcgctcgaccgaaacgctgtcaaagagctggatgaactcctcttcgatcttcgagtggagatgcatgaggctttgcggcgccatcatgccagtgacacccatggctaa

SEQ ID NO: 27106 - DNA, 270 bp, Emericella nidulans
atgaagcgcatcggtcggtcggtgattccggcgcgccgctttccgatctgtactgcgagtctatccgtcgccgctgccgcgggatggcaaccacattcagcccggtctcgtgtcagactgggcttacgaaacagcgcccacctcgttttcttcgcaagacgaaggatccaggatgttggaaacaaaaacattttatgtccaagcaagtcaagcaagtcttcattcgcagatggcggagctgaagtacgcctaaaggatggagccccttag
